(19) United States
(12) Patent Application Publication
(10) Pub. No.: US 2013/0036517 A1
(43) Pub. Date: Feb. 7, 2013

(54) INTEIN-MODIFIED ENZYMES, THEIR PRODUCTION AND INDUSTRIAL APPLICATIONS

(71) Applicants: James Apgar, Somerville, MA (US); Philip Lessard, Framingham, MA (US); R. Michael Raab, Arlington, MA (US); Binzhang Shen, Jamaica, MA (US); Gabor Lazar, Belmont, MA (US); Humberto de la Vega, Peabody, MA (US)

(72) Inventors: James Apgar, Somerville, MA (US); Philip Lessard, Framingham, MA (US); R. Michael Raab, Arlington, MA (US); Binzhang Shen, Jamaica, MA (US); Gabor Lazar, Belmont, MA (US); Humberto de la Vega, Peabody, MA (US)

(73) Assignee: AGRIVIDA, INC., Medford, MA (US)

(21) Appl. No.: 13/508,234

(22) PCT Filed: Nov. 5, 2010
(86) PCT No.: PCT/US10/55751

§ 371 Date: Sep. 20, 2012

Related U.S. Application Data
(63) Continuation-in-part of application No. 12/590,444, filed on Nov. 6, 2009.

(51) Int. Cl. C12N 9/24; C07K 16/40; A01H 5/00; C12N 9/42; C12N 15/56

(52) U.S. Cl. 800/298; 435/200; 435/209; 536/23.2; 530/387.9

(57) ABSTRACT

A method of predicting an intein insertion site in a protein that will lead to a switching phenotype is provided. The method includes identifying a plurality of C/T/S sites within the protein; selecting from the plurality of C/T/S/ sites those that are ranked 0.75 or higher by a support vector machine, within ten angstroms of the active site of the protein, and at or near a loop-β-sheet junction or a loop-α-helix junction. A method of controlling protein activity and hosts including proteins with controlled activity are also provided. Also, intein modified proteins and plants containing intein modified proteins are provided.

[0001] This application is a continuation-in-part application of U.S. patent application Ser. No. 12/590,444, which was filed Nov. 6, 2009 and is incorporated herein by reference as if fully set forth.

[0002] This invention was made at least in part with government support under the United States Department of Energy Advanced Research Projects Agency-Energy (ARPA-e) Grant No. DE-AR0000042. The Government has certain rights in this invention.

[0003] The sequence listing electronically filed with this application titled “Sequence Listing,” which was created on Nov. 5, 2010 and had a size of 14,792,733 bytes is incorporated herein by reference as if fully set forth.

### FIELD OF INVENTION

[0004] The invention relates to controlling the activity of proteins.

### BACKGROUND

[0005] Many proteins have useful characteristics but in certain settings a protein can be difficult to use. For example, hydrolytic enzymes have important industrial and agricultural applications, but their expression and production may be associated with undesirable phenotypic effects in some expression hosts. Cell wall degrading enzymes, which include cellulases, xylanases, ligninases, esterases, peroxidases, and other hydrolytic enzymes, are often associated with detrimental effects on growth, physiological performance, and agronomic performance when expressed in plants. Xylanases are enzymes that catalyze the hydrolysis of beta-1,4-xylan, a linear polysaccharide component of hemicellulose contained in plant cell walls. Cellulases are enzymes that catalyze either the internal or terminal hydrolysis of glucose polymers linked by beta-1,4-D-glycosidic bonds contained in cellulose, cellulose strains with different degrees of polymerization, and cellobiose. Based on these activities, expression of a xylanase or a cellulase in a plant may lead to undesirable degradation of plant components. Some enzymes may also be poorly expressed in microbial hosts, due to their hydrolytic activity.

### SUMMARY

[0006] In an aspect, the invention relates to an isolated protein having an amino acid sequence with at least 90% identity to a sequence selected from the group consisting of SEQ ID NOS: 2373-2686 and 3315-3322.

[0007] In an aspect, the invention relates to an isolated nucleic acid having a nucleotide sequence encoding an amino acid sequence with at least 90% identity to a sequence selected from the group consisting of SEQ ID NOS: 2373-2686 and 3315-3322.

[0008] In an aspect, the invention relates to a transgenic plant including a isolated nucleic acid having a nucleotide sequence encoding an amino acid sequence with at least 90% identity to a sequence selected from the group consisting of SEQ ID NOS: 2373-2686 and 3315-3322.

[0009] In an aspect, the invention relates to an isolated nucleic acid having a nucleotide sequence that hybridizes under conditions of moderate stringency to a sequence selected from the group consisting of SEQ ID NOS: 2687-3000 and 3323-3330.

[0010] In an aspect, the invention relates to a transgenic plant including a isolated nucleic acid having a nucleotide sequence that hybridizes under conditions of moderate stringency to a sequence selected from the group consisting of SEQ ID NOS: 2687-3000 and 3323-3330.

[0011] In an aspect, the invention relates an isolated amino acid sequence comprising a contiguous amino acid sequence having at least 90% identity to 6, to 50, 10 to 100, 10 to 150, 10 to 300, 10 to 400, 10 to 500, or 10 to all contiguous amino acid residues of a protein having the sequence of any of SEQ ID NOS: 2373-2686 and 3315-3322. The protein has an intein sequence, an enzyme sequence, an upstream intein-extein junction and a downstream intein-extein junction. The protein having the sequence of one of SEQ ID NOS: 3315-3322 has at least one amino acid change relative to SEQ ID NO: 2518. The isolated amino acid sequence includes at least one of the upstream intein-extein junction, the downstream intein-extein junction or one or more of the at least one amino acid change relative to SEQ ID NO: 2518.

[0012] In an aspect, the invention relates to an antibody recognizing an epitope on an isolated amino acid sequence comprising a contiguous amino acid sequence having at least 90% identity to 6, 10 to 50, 10 to 100, 10 to 150, 10 to 300, 10 to 400, 10 to 500, or 10 to all contiguous amino acid residues of a protein having the sequence of any of SEQ ID NOS: 2373-2686 and 3315-3322. The protein has an intein sequence, an enzyme sequence, an upstream intein-extein junction and a downstream intein-extein junction. The protein having the sequence of one of SEQ ID NOS: 3315-3322 has at least one amino acid change relative to SEQ ID NO: 2518. The isolated amino acid sequence includes at least one of the upstream intein-extein junction, the downstream intein-extein junction or one or more of the at least one amino acid change relative to SEQ ID NO: 2518.

[0013] In an aspect, the invention relates to an isolated nucleic acid having a sequence encoding a contiguous amino acid sequence having at least 90% identity to 6, 10 to 50, 10 to 100, 10 to 150, 10 to 300, 10 to 400, 10 to 500, or 10 to all contiguous amino acid residues of a protein having the sequence of one of SEQ ID NOS: 2373-2686 and 3315-3322. The protein has an intein sequence, an enzyme sequence, an upstream intein-extein junction and a downstream intein-extein junction. The protein having the sequence of one of SEQ ID NOS: 3315-3322 has at least one amino acid change relative to SEQ ID NO: 2518. The isolated amino acid sequence includes at least one of the upstream intein-extein junction, the downstream intein-extein junction, or one or more of the at least one amino acid change relative to SEQ ID NO: 2518.

### BRIEF DESCRIPTION OF THE DRAWINGS

[0014] The following detailed description of the preferred embodiments will be better understood when read in conjunction with the appended drawings. For the purpose of illustrating the invention, there are shown in the drawings embodiments which are presently preferred. It is understood, however, that the invention is not limited to the precise arrangements and instrumentalities shown. In the drawings:

[0015] FIG. 1 illustrates intein insertion site distance from a protein active site. Diamonds indicated insertion sites and squares indicate other C/S/T sites where no intein is inserted.

[0016] FIG. 2A illustrates a plant expression vector, which is designated pAG2005 (SEQ ID NO: 1).

[0017] FIG. 2B illustrates pAG2005 (SEQ ID NO: 1) with greater detail.

[0018] FIGS. 3A to 3L illustrate western blot data for Tth intein modified P77853, where the intein is inserted at either serine 158 (S158), or threonine 134 (T134) of the P77853 enzyme. In some of FIGS. 3A to 3L, parts of the western blot are covered to focus on a specific set of lanes. The agar plate phenotype is denoted for each sample at the top of the lane. The agar plate phenotypes are given as “SW” for a switcher phenotype, TSP for a temperature sensitive switcher splicer phenotype, and P for a permissive phenotype. In each of FIGS. 3A to 3L NIC indicates an N-extein, intein and C-extein containing intein modified protein; and NC indicates spliced protein containing the N- and C-exteins.

[0019] FIG. 3A illustrates a western blot showing the P77853-Tth-S158-2 protein (SEQ ID NO: 1672) that was preheat treated at 37° C. (panel 2, left lane) or 55° C. (panel 2, right lane) for four hours. Also shown are lanes containing protein from the empty vector control (VCT) and wild-type P77853 protein (P77) that was preheat treated in the same manner.

[0020] FIG. 3B illustrates a western blot showing the P77853-Tth-S158-4 protein (SEQ ID NO: 1673) that was preheat treated at 37° C. (panel 4, left lane) or 55° C. (panel 4, right lane) for four hours. Also shown are lanes containing protein from the empty vector control (VCT) and wild-type P77853 protein (P77) that was preheat treated in the same manner.

[0021] FIG. 3C illustrates a western blot showing the P77853-Tth-S158-7 protein (SEQ ID NO: 1674) that was preheat treated at 37° C. (panel 7, left lane) and 55° C. (panel 7, middle lane) for four hours, and 70° C. for one hour (panel 7, right lane). Also shown are lanes containing protein from the empty vector control (VCT) and wild-type P77853 protein (P77).

[0022] FIG. 3D illustrates a western blot showing the P77853-Tth-S158-19 protein (SEQ ID NO: 1675) that was preheat treated at 37° C. (panel 19, left lane) or 55° C. (panel 19, middle lane) for four hours, and 70° C. for one hour (panel 19, left lane). Also shown are lanes containing protein from the empty vector control (VCT) and wild-type P77853 protein (P77).

[0023] FIG. 3E illustrates a western blot showing the P77853-Tth-S158-20 protein (SEQ ID NO: 1676) that was preheat treated at 37° C. (panel 20, left lane) or 55° C. (panel 20, middle lane) for four hours, and 70° C. for one hour (panel 20, right lane). Also shown are lanes containing protein from the empty vector control (VCT) and wild-type P77853 protein (P77).

[0024] FIG. 3F illustrates a western blot showing the P77853-Tth-S158-21 protein (SEQ ID NO: 1677) that was preheat treated at 37° C. (panel 21, left lane) or 70° C. (panel 21, right lane) for one hour. Also shown are lanes containing protein from the empty vector control (VCT) and wild-type P77853 protein (P77) that was preheat treated in the same manner.

[0025] FIG. 3G illustrates a western blot showing the P77853-Tth-S158-25 protein (SEQ ID NO: 1678) that was preheat treated at 37° C. (panel 25, left lane) or 70° C. (panel 25, right lane) for one hour. Also shown are lanes containing protein from the empty vector control (VCT) and wild-type P77853 protein (P77) that was preheat treated in the same manner.

[0026] FIG. 3H illustrates a western blot showing the P77853-Tth-S158-38 protein (SEQ ID NO: 1679) that was preheat treated at 37° C. (panel 38, left lane) or 55° C. (panel 38, right) for four hours. Also shown are lanes containing protein from the empty vector control (VCT) and wild-type P77853 protein (P77) that was preheat treated in the same manner.

[0027] FIG. 3I illustrates a western blot showing the P77853-Tth-S158-39 protein (SEQ ID NO: 1680) that was preheat treated at 37° C. (panel 39, left lane) or 55° C. (panel 39, middle lane) for four hours, and 70° C. for one hour (panel 39, right lane). Also shown are lanes containing protein from the empty vector control (VCT) and wild-type P77853 protein (P77).

[0028] FIG. 3J illustrates a western blot showing the P77853-Tth-S158-42 protein (SEQ ID NO: 1681) that was preheat treated at 37° C. (panel 42, left lane) or 55° C. (panel 42, middle lane) for four hours, and 70° C. for one hour (panel 42, right lane). Also shown are lanes containing protein from the empty vector control and wild-type P77853 protein.

[0029] FIG. 3K illustrates a western blot showing the P77853-Tth-S158-138 protein (SEQ ID NO: 1691) that was preheat treated at 37° C. (left lane) or 59° C. (second from left lane) for four hours. Also shown are lanes containing protein from the empty vector control (VCT) and wild-type P77853 protein (P77853).

[0030] FIG. 3L illustrates a western blot showing the P77853-Tth-T134-1 protein (SEQ ID NO: 1629) (panel 1), P77853-Tth-T134-2 protein (SEQ ID NO: 1630) (panel 2), P77853-Tth-T134-3 protein (SEQ ID NO: 1631) (panel 3), P77853-Tth-T134-9 protein (SEQ ID NO: 1632) (panel 9), P77853-Tth-T134-91 protein (SEQ ID NO: 1644) (panel 91), P77853-Tth-T134-48 protein (SEQ ID NO: 1638) (panel 48), P77853-Tth-T134-80 protein (SEQ ID NO: 1640) (panel 80), and P77853-Tth-T134-95 protein (SEQ ID NO: 1645) (panel 95) that were preheat treated at 37° C. (left lane in each of the before mentioned panels) and 70° C. (right lane in each of the before mentioned panels) for one hour. Also shown are lanes containing protein from the empty vector control (VCT) and wild-type P77853 protein (P77) that was preheat treated in the same manner. The phenotype of each protein is given above its corresponding lanes.

[0031] FIGS. 4A to 4C illustrate western blot analysis for S158 Tth intein-modified P77853 xylanase mutants.

[0032] FIG. 4A illustrates a western blot analysis for S158-19 Tth intein-modified P77853 xylanase (SEQ ID NO: 1675). Protein samples were incubated at 59° C. for different amounts of time (0, 1, 2, 3, 4, and 6 hours). The empty vector (V) and wild-type P77853 control samples are shown on the far right along with a molecular weight ladder. The grayed out middle area is to cover lanes that contained other samples.

[0033] FIG. 4B illustrates a western blot analysis for S158-30-103 Tth intein-modified P77853 xylanase (SEQ ID NO: 1701). Protein samples were incubated at either 37° C., 50° C., 59° C., and 65° C. for different amounts of time (1, 2, 3, 4, and 6 hours) as indicated. The empty vector (Vect) and wild-type P77853 control samples are shown on the far right along with a molecular weight ladder.

[0034] FIG. 4C illustrates a western blot analysis for T134-100-101 Tth intein-modified P77853 xylanase (SEQ ID NO: 1711). Protein samples were incubated at either 37° C., 50° C., 59° C., and 65° C. for different amounts of time (1, 2, 4, 6, and 17 hours) as indicated. The empty vector (Vect) and wild-type P77853 control samples are shown on the far right along with a molecular weight ladder.

[0035] FIG. 5 illustrates plasmid vectors for expressing and secreting intein modified proteins; e.g., endoglucanases derived Acidothermus cellulolyticus, in yeast cells.

[0036] FIG. 6 illustrates activity assays of Pichia strains expressing either P07981 (endoglucanase EG-1 from Trichoderma reesei), P54583, or albumin (as a negative control).

[0037] FIG. 7 illustrates a plate assay for secretion of P54583 from S. cerevisiae.

[0038] FIG. 8 illustrates P54583 activity over different pH levels and at different temperatures.

[0039] FIG. 9 illustrates P54583 activity over time and at different temperatures.

[0040] FIG. 10 illustrates a PNP-C assay for P54583.

[0041] FIG. 11 illustrates purification of P54583 with microcrystalline cellulose.

[0042] FIG. 12 illustrates western detection of wild type P54583.

[0043] FIG. 13 illustrates candidate intein insertion sites in P54583.

[0044] FIG. 14 illustrates an assembly strategy for genes encoding intein-modified endoglucanases.

[0045] FIG. 15 illustrates scoring of intein-modified endoglucanases behavior in response to different temperature treatments.

[0046] FIG. 16 illustrates intein modified endoglucanases activity assays.

[0047] FIG. 17 illustrates a western blot analysis of various intein modified P54583 proteins.

[0048] FIGS. 18A-C illustrate error prone PCT to generate mutangenized libraries.

[0049] FIG. 19 illustrates the effect of a crippled intein on enzyme activity in P54583.

[0050] FIG. 20 illustrates enzyme activity recovery by pre-incubation at various temperatures.

[0051] FIG. 21 illustrates enzyme activity recovered from P54583 carrying a mini-intein in the S237 position after pre-incubation at different temperatures.

[0052] FIG. 22 illustrates pre-incubation time and intein-modified endoglucanase activation. Each panel (1, 2, 3, and 4) includes bars representing 0, 2, 4, 6, 8 and 10 hour pre-incubation presented consecutively from left to right.

[0053] FIG. 23 illustrates high throughput endoglucanase assay results for an intein modified endoglucanase library.

[0054] FIG. 24 illustrates of a mutagenized intein modified endoglucanase library screen.

[0055] FIG. 25 illustrates repeated activity assays on candidates from a mutagenized intein modified endoglucanase library.

[0056] FIG. 26 illustrates heat-inducible enzyme activity from intein modified endoglucanases carrying mutations in the R51 position of the Tth intein.

[0057] FIG. 27 illustrates a phylogenetic tree of endoglucanases.

[0058] FIG. 28 illustrates a plasmid vector for expression and secreting intein modified proteins; e.g., expression an sectreting of an endoglucanase derived from termite in yeast.

[0059] FIG. 29 illustrates yeast expressing an empty expression vector, an expression vector encoding NtEG, and an expression vector encoding a mutant NtEG lacking the native signal peptide.

[0060] FIG. 30 illustrates endoglucanase activity of NtEG and a mutant NtEG lacking the native signal peptide over a range of temperatures.

[0061] FIG. 31 illustrates endoglucanase activity of a mutant NtEG lacking the native signal peptide and P54583 a over a range of pH.

[0062] FIG. 32 illustrates endoglucanase activity of a mutant NtEG lacking the native signal peptide and with or without a His tag.

[0063] FIG. 33 illustrates a strategy for assembling genes encoding intein-modified NtEG endoglucanases.

[0064] FIG. 34 illustrates a timecourse of enzyme activity from yeast cells expressing intein modified termite endoglucanases.

[0065] FIG. 35 illustrates the expression cassette in the λ ZAP®II vector.

[0066] FIGS. 36A-D illustrate pH 6.5 switching assays for intein modified P77853 in Example 15 for the T134 and the S158 insertion sites. The set of inteins was inserted into the S158 position (FIGS. 36A-B and T134) position (FIGS. 36C-D) of P77853. The activities at high and low temperatures are plotted compared to the wild type P77853 (FIGS. 36A and C). The high temperature activities versus the fold induction (activity at high temperature/activity at low temperature) are also plotted (FIGS. 36B and D). The inteins are broken down by thermophilicity of their host. The vertical dashed line represents 10% of the low-temperature wild-type activity. The horizontal dashed line is 40% of the high-temperature wild-type activity.

[0067] FIGS. 37A to D illustrate pH 7.5 switching assays for intein modified P77853 in Example 15 for the T134 and the S158 insertion sites. The set of inteins was inserted into the S158 position (FIGS. 37A-B) and T134 position (FIGS. 37C-D) of P77853. The activities at high and low temperatures are plotted compared to the wild type P77853 (FIGS. 37A and C). The high temperature activities versus the fold induction (activity at high temperature/activity at low temperature) are also plotted (FIGS. 37B and D). The inteins are broken down by thermophilicity of their host. The vertical dashed line represents 10% of the low-temperature wild-type activity. The horizontal dashed line is 40% of the high-temperature wild-type activity.

[0068] FIGS. 38A-D illustrate top activity candidates in Example 15. The set of inteins was inserted into the S158 position (FIGS. 38A and C) and T134 position (FIGS. 39B and D) of P77853. The activities following high (right bar for each sample) and low (left bar for each sample) temperature heat treatments at pH 6.5 (FIGS. 38A and B) and pH 7.5 (FIGS. 38C and D) are plotted for the top 20 highest activity candidates compared to the wild type and empty vector. The dashed line between 2 and 4 on the Activity axis represents 40% of the high temperature wild-type activity. The dashed line below 2 represents 10% of the low temperature wild-type activity.

[0069] FIGS. 39A-D illustrate examples of different switching classes from Example 15. FIGS. 39A and C illustrate data for S158 P77853 intein insertions, and FIGS. 39B and D illustrate DNA for T134 P77853 intein insertions. FIGS. 39A and B correspond to heat treatments at pH 6.5. FIGS. 39C and D correspond to heat treatments at pH 7.5. The dashed line between 2 and 4 on the Activity axis represents 40% of the high temperature wild-type activity. The dashed line below 2 represents 10% of the low-temperature wild-type activity.

[0070] FIG. 40 illustrates re-evaluation of top performing candidates (AS-146, AS-2, AS-79, AS-83) in Example 15 and comparison of the same to a low performer (AS-8), a positive control (P77853) and the empty vector control (pBS). The dashed line above 1 on the Activity axis represents 40% of the high temperature wild-type activity. The dashed line below 0.5 represents 10% of the low-temperature wild-type activity.

[0071] FIG. 41 illustrates a western blot of top performing candidates at the S158 insertion site (AS-2, AS-79, AS-83 and AS-146) and at the T134 insertion site (AT-2, AT-83, AT-149, AT-154) of P77853. pBS is the empty vector control, P77 is the positive control (P77853). The left and right bar over each sample designation represents the low temperature (37° C./4 hrs) and heated (60° C./4 hrs) aliquots from the same lysate, respectively. Arrows indicate the intein modified P77853 precursors, NC marks the position of the mature protein.

[0072] FIGS. 42A and B illustrate differences in activity and switching based upon thermo-tolerance. The fraction of candidates having high activity at high temperatures (FIG. 42A) and higher than 2× switching (FIG. 42 B) is compared for inteins from thermophilic/hyperthermophilic organisms (right bar for each sample label) to inteins from mesophilic/UNK organisms (left bar for each sample label).

[0073] FIGS. 43A and B illustrate differences in activity and switching based upon length of intein. The fraction of candidates having high activity at high temperatures (FIG. 43A) and higher than 2× switching (FIG. 43 B) is compared for inteins <240 amino acids (left bar for each sample) and inteins >240 amino acids (right bar for each sample) in length.

[0074] FIGS. 44A-D illustrate sequence similarity amongst top hits. FIGS. 44A and C illustrate those for the S158 P77853 intein insertions, and FIGS. 44B and D illustrate those for T134. FIGS. 44A and B illustrate those for heat treatments at pH 6.5. FIGS. 44C and D illustrate those for heat treatments at pH 7.5 for the “Top Hits” (classified as >40% wt activity or >30% wt activity and >2× switching) and the “None Hits” (remainder of sequences). FIGS. 44A-D show the faction of similar sequences (E-value <1e-20) that are also top hits (“Similar Top Hits” in the left bar for each of the two sample labels) or none hits (“Similar None Hits” in the right bar for each of the two sample labels).

### DETAILED DESCRIPTION OF THE PREFERRED EMBODIMENTS

[0075] Unless defined otherwise, all technical and scientific terms used herein have the meaning commonly understood by a person skilled in the art to which this invention belongs. The methods of the embodiments herein may be substituted or combined with other screening and application methods known to those of skill in the art. The phrase “at least one” followed by a list of two or more items, such as “A, B or C,” means any individual one of A, B or C as well as any combination thereof.

[0076] As used herein, “extein,” refers to the portion of an intein modified protein that is not part of the intein.

[0077] As used herein, “amino terminal extein,” “N-terminal extein” or “N-extein” are synonymous and refer to an extein that is positioned prior to the N-terminal residue of the intein. The carboxy terminus of an amino terminal extein, N-terminal extein or N-extein is fused to the amino terminus of the intein in an assembled intein modified protein.

[0078] As used herein, “carboxy terminal extein,” “C-terminal extein,” or “C-extein” are synonymous and refer to an extein that is positioned after the C-terminal residue of the intein. The amino terminus of a carboxy terminal extein, C-terminal extein or C-extein is fused to the carboxy terminus of the intein in an assembled intein modified protein.

[0079] As used herein, “target protein” is a protein in which an intein is inserted or that is a candidate for insertion of an intein. Prior to intein insertion, respective portions of the target protein may be referred to as an extein, amino terminal extein, or carboxy terminal extein based on the intended insertion site.

[0080] A “target protein” can be an enzyme, and the term “target enzyme” means a “target protein” that is an enzyme.

[0081] As used herein, “permissive” or “P” refers to intein modification where the intein modified protein retains function after intein insertion, or the intein is cleaved or spliced from the protein to leave extein or ligated protein with function.

[0082] As used herein, “non-permissive” or “NP” refers to intein modification where the intein modified protein has reduced function after intein insertion.

[0083] As used herein, “temperature-sensitive” refers to an intein modification where the intein modified protein has greater function after exposure to the temperature or range of temperatures, or the intein is spliced from the protein to leave extein or ligated protein with greater function after exposure to the temperature or range of temperatures.

[0084] As used herein, “switching” refers to an activity change of an intein modified protein in response to a physical or chemical condition change. An intein modification that results in a “switching” or “switcher” intein-modified protein is non-permissive prior to the change in condition and permissive after the change in condition. Switching may occur based on the presence of the intein, cleavage of the intein from an extein, or cleavage of the intein and ligation of the exteins.

[0085] As used herein, “temperature-sensitive switcher splicer” or “TSP,” refers to an intein modified protein where the intein splices in response to an induction temperature or temperature range. The intein modified protein may be non-permissive prior to exposure to temperatures other than the induction temperature or temperature range and permissive after exposure to the induction temperature or temperature range.

[0086] “Isolated nucleic acid,” “isolated polynucleotide,” “isolated oligonucleotide,” “isolated DNA,” or “isolated RNA” as used herein refers to a nucleic acid, polynucleotide, oligonucleotide, DNA, or RNA separated from the organism from which it originates or from the naturally occurring genome, location, or molecules with which it is normally associated, or that was made through a synthetic process.

[0087] “Isolated protein,” “isolated polypeptide,” “isolated oligopeptide,” or “isolated peptide” as used herein refers to a protein, polypeptide, oligopeptide or peptide separated from the organism from which it originates or from the naturally occurring location, or molecules with which it is normally associated, or that was made through a synthetic process.

[0088] As used herein, “variant” refers to a molecule that retains a biological activity that is the same or substantially similar to that of the original sequence. The variant may be from the same or different species or be a synthetic sequence based on a natural or prior molecule.

[0089] Nucleic acids, nucleotide sequences, proteins or amino acid sequences referred to herein can be isolated, purified, synthesized chemically, or produced through recombinant DNA technology. All of these methods are well known in the art.

[0090] As used herein, “operably linked” refers to the association of two or more biomolecules or portions of one or more biomolecules in a configuration relative to one another such that the normal function of the biomolecules can be performed. In relation to nucleotide sequences, “operably linked” refers to the association of two or more nucleic acid sequences, by means of enzymatic ligation or otherwise, in a configuration relative to one another such that the normal function of the sequences can be performed. For example, the nucleotide sequence encoding a presequence or secretory leader is operably linked to a nucleotide sequence for a polypeptide if it is expressed as a preprotein that participates in the secretion of the polypeptide; a promoter or enhancer is operably linked to a coding sequence if it affects the transcription of the coding sequence; and a ribosome binding site is operably linked to a coding sequence if it is positioned so as to facilitate translation of the sequence.

[0091] Isolated proteins with controlled activity, isolated nucleic acids that encode the isolated proteins, methods of determining intein insertion sites, and methods to control the activity of proteins are provided. The proteins or nucleic acids may be provided in plants, microbes, and other organisms. Through the control, one or more of the proteins or nucleic acids could be used in the production of fuels, fiber, dough, chemicals, sugars, textiles, pulp, paper, human food, or animal feed. Preferably, the proteins or nucleic acids do not readily interfere with one or more of growth, physiology or other performance characteristics of the expression host. The protein to be controlled may be an enzyme but could be any kind of protein, including a non-enzyme, a structural protein, or a hormone.

[0092] One way to control protein activity is with inteins and the control may allow expression of an intein modified protein with a predefined activity level. Inteins are self-cleaving and self-ligating peptides. The collective attributes of being both self-cleaving and self ligating are referred to as “self-splicing” or “splicing.” An intein cleaves from the protein and mediates ligation of the protein sequences (exteins) from which it cleaves to splice the protein. An intein may be inserted internally to the protein sequence or fused terminally to the protein. A intein insertion in a protein may allow control of a protein by yielding a protein that has one activity when the intein is present and another activity after intein cleavage or splicing. In some cases, the intein splicing reaction can be controlled by one or more of a variety of induction conditions. When an activity normally detrimental to the host is reduced, the intein may protect the expression host from detrimental growth, physiological, or yield effects of the protein. After expression of the protein, the activity could be changed by exposing the modified protein to reaction conditions that induce intein splicing. The protein that results after splicing may have increased activity. In an embodiment, the intein modification is non-permissive at low temperatures and permissive at higher temperatures such that the intein modified protein switches when the temperature is changed from low to higher temperatures. In some embodiments, however, the enzyme has lower activity after cleavage and/or ligation. A nucleic acid encoding the intein modified protein may be codon optimized for expression in a plant. Target proteins that can be modified with an intein in the present embodiments include but are not limited to cell wall degrading enzymes, lignocellulosic degrading enzymes, xylanases and cellulases. All proteins disclosed herein can be a target protein for intein modification.

[0093] The target protein may be modified with an intein selected from Mth, Psp-Pol, mini Psp-Pol (mPsp-Pol), RecA, Tac, Tag, Tth, mini Tth inteins, or derivatives thereof. Mth, Psp-Pol, mini Psp-Pol, RecA, Tac, Tag, Tth, and mini Tth (mTth) inteins may include the sequence of SEQ ID NOS: 2, 3, 4-87, 88, 89, 90, 91, and 92-103, respectively. An intein may, however, be from another source or a modified form of a natural intein.

[0094] Isolated intein modified xylanases are provided. Embodiments of the intein-modified xylanases have a different activity before and after intein cleavage or intein splicing. In an embodiment, intein cleavage or splicing is induced by exposure of the intein-modified xylanase to an induction condition. The induction condition can be but is not limited to an elevated temperature. The elevated temperature can be within but is not limited to the range of 50-70° C., which includes the temperatures of 50° C. and 70° C., or a sub-range between any two integers within said range. The elevated temperature can be greater than or equal to a temperature in integer increments within the range of 25-70° C. The elevated temperature can be greater than or equal to 50° C., 55° C., 59.9° C., 60° C., 65° C., or 70° C. A nucleic acid encoding an intein modified xylanase is preferably, but not necessarily, codon optimized for expression in a plant. In an embodiment, an intein modified xylanase can be expressed in a transgenic plant.

[0095] Isolated intein modified cellulases are provided. Embodiments of the intein modified cellulases have a different activity before and after intein cleavage or intein splicing. In an embodiment, intein cleavage or splicing is induced by exposure of the intein-modified cellulase to an induction condition. The induction condition can be but is not limited to elevated temperature. The elevated temperature can be within but is not limited to the range of 50-70° C., which includes the temperatures of 50° C. and 70° C., or sub-ranges between any two integers within said range. The elevated temperature can be greater than or equal to a temperature in integer increments within the range of 25-70° C. The elevated temperature can be greater than or equal to 45° C., 50° C., 55° C., 60° C., 62° C., or 65° C. A nucleic acid encoding the intein modified cellulase is preferably, but not necessarily, codon optimized for expression in a plant. In an embodiment, the intein modified cellulase can be expressed in a transgenic plant.

[0096] Xylanases that can be target proteins include but are not limited to Beta-1,4-xylanase 229B from Dictyoglomus thermophilum, (accession number P77853, SEQ ID NO: 104), endo-1,4-beta-xylanase from Clostridium thermocellum (accession number PS1584, SEQ ID NO: 105), an alkaline thermostable endoxylanase precursor from Bacillus sp. NG-27 (accession number 030700, SEQ ID NO: 106), endo-1,4-beta-xylanase from Thermomyces lanuginosus (accession number 043097, SEQ ID NO: 107), and a thermal stable celloxylanase from Clostridium stercorarium (accession number P40942, SEQ ID NO: 108). Xylanases can be modified with one or more of several inteins, including, but not limited to at least one selected from Mth, Psp-Pol, mini Psp-Pol, RecA, Tac, Tag, Tth, mini Tth inteins or derivatives thereof. In an embodiment, the Mth, Psp-Pol, mini Psp-Pol, RecA, Tac, Tag, Tth, or mini Tth inteins have the sequence of SEQ ID NOS: 2, 3, 4-87, 88, 89, 90, 91, or 92-103, respectively. An intein or multiple inteins can be inserted into one or more of multiple candidate sites in xylanases.

[0097] Cellulases that can be target proteins include but are not limited to Clostridium thermocellum celK cellulase (accession number O68438 (SEQ ID NO: 109)), the Thermomonospora fusca celB cellulase (accession number P26222 (SEQ ID NO: 110)), the Ace1 Endoglucanase E1 from Acidothermus cellulolyticus (accession number P54583 (SEQ ID NO: 111)), and the Nasutitermes takasagoensis NtEG cellulase (accession number 077044 (SEQ ID NO: 112)). Cellulases can be modified with one or more of several inteins, including, but not limited to at least one selected from Mth, Psp-Pol, mini Psp-Pol, RecA, Tac, Tag, Tth, mini Tth inteins or derivatives thereof. In an embodiment, the Mth, Psp-Pol, mini Psp-Pol, RecA, Tac, Tag, Tth, or mini Tth inteins have the sequence of SEQ ID NOS: 2, 3, 4-87, 88, 89, 90, 91, or 92-103, respectively. An intein or multiple inteins can be inserted into one or more of multiple candidate sites in cellulases.

[0098] An intein modified protein can be produced by standard molecular biological techniques and then screened. The intein, the target protein, or the intein modified protein can be subjected to mutation and then screened. Screening systems that can be utilized include lambda phage, yeast, or other expression systems that allow production of the protein and/or testing of its physical and/or functional characteristics. From an intein modified protein or mutant intein modified protein population, candidates can be isolated and analyzed further. Further analysis may include DNA sequencing, functional assays, structural assays, enzyme activity assays, and monitoring changes in activity, structure, or splicing in response to induction conditions.

[0099] Induction conditions can include exposure of the intein modified protein to changes in physical or chemical conditions such as, but not limited to, changes in temperature, pH, concentration of splicing inhibitors, concentration of ligand, light, salt conditions, and pressure. Natural or mutant inteins can be screened to determine induction conditions. Further, inteins can be derived from organisms adapted to life at a desired induction condition. For example, temperature induced inteins may be isolated from psychrophiles, mesophiles, or thermophiles (for example, Nanoarchaeum equitans, Pyrococcus abyssi, or Pyrococcus sp.); pH induced inteins may be isolated from acidophiles, alkaliphiles, or neutrophiles (for example, Pyrococcus sp., Mycobacterium tuberculosis, Saccharomyces cerevisiae); and salt induced inteins may be isolated from halophiles. Chemically induced or inhibited inteins have also been identified. As non-limiting examples of chemically induced or inhibited inteins, the vacuolar ATPase subunit (VMA) intein isolated from Saccharomyces cerevisiae cleaves inducibly by exposure to DTT, NH₂OH, or cysteine; and inteins isolated from Mycobacterium and others from Saccharomyces have been show to have inhibited splicing in the presence of Zn²⁺. Induction of inhibited inteins may occur by removing the inhibiting condition. Natural inteins may also be mutated and screened to determine if the mutation(s) resulted in an intein that is inducible at a desired induction condition. An intein from any of these sources may be provided in an intein modified protein.

[0100] Intein insertion sites can be determined experimentally. To determine if an insertion site will permit intein splicing, the intein-protein fusion gene can be constructed and cloned using known methods in the art, the intein-modified protein can be expressed, and the intein-modified protein tested for its ability to splice either spontaneously or under induction conditions.

[0101] To avoid adding any additional amino acids to the protein, and thereby potentially altering the protein's function or activity, native cysteines, serines, and threonines that occur within a protein may be screened as potential intein insertion sites. After insertion, the protein can be tested before and after intein cleavage and/or ligation for alteration of its function.

[0102] Inteins can be inserted into a protein at any place by adding a cysteine, serine, or threonine at the new junction site. The cysteine, serine, or threonine can be added by substitution of an amino acid within the protein sequence or insertion of the cysteine, serine, or threonine. When an intein is inserted at the new junction site, the carboxy terminus of the intein will be fused to the first amino acid of the amino terminus of the carboxy extein. If an additional cysteine, serine, or threonine is placed in a protein to facilitate intein insertion, then this amino acid will be left within the protein following the splicing reaction. Additional amino acids left in a mature protein following the splicing reaction may interfere with the protein's function or activity, thus one could confirm the function and activity of any protein resulting from such a splicing reaction that contains an additional amino acid. Functional assays are known in the art to determine the function of any known protein that has been assigned a function.

[0103] Because many proteins contain multiple cysteines, serines, and threonines, it may be desirable to rank order, or even limit, the number of insertion sites that are tested for intein splicing. Three features that can be used to predict an intein insertion site are: A) the local sequence as described by a support vector machine (SVM), B) the distance of the insertion site to the active site residues, and C) the proximity of the insertion site to a local secondary structure (e.g., at or near the end of an alpha-helix or beta-sheet). In an embodiment, the local sequence and distance to the active site are used to narrow the selection of proposed insertion sites, while the secondary structure element information can be used to prioritize similar insertion sites.

[0104] A) The Local Sequence

[0105] An SVM method can be used to predict or evaluate intein insertion sites. A suitable training set of known intein insertion sites can be assembled from known native intein insertion sites. Known intein insertion site sequences for this purpose can be found in the NEB inbase database as described in Perler, F. B. (2002), InBase, The Intein Database, Nuc. Acids Res. 30: 383-384, which is incorporated herein in its entirety as if fully set forth. Preferably, the training set intein insertion sites have the sequences of SEQ ID NOS: 1233-1512. One source of protein sequence for this purpose is the NCBI database but many other sources are available. The intein containing proteins corresponding to the SEQ ID NOS: 1233-1512 training set intein insertion sites have the sequences of SEQ ID NOS: 393-672, respectively. Based on the intein sequences (SEQ ID NOS: 113-392) and the intein containing protein sequences (SEQ ID NOS: 393-672)), the extein sequences of each intein containing protein can be separated from each intein sequence. The N-exteins in the protein sequences of SEQ ID NOS: 393-672 are presented in SEQ ID NOS: 673-952, respectively, and the C-exteins in the protein sequences of SEQ ID NOS: 393-672 are presented in SEQ ID NOS: 953-1232, respectively. For the generation of the SVM sequence prediction, the cassette, which includes the insertion site X and the sequence surrounding X in the N- and C-exteins, is determined. Preferably, the sequence analyzed includes a −3 to +2 (6 amino acids total, numbered as −3, −2, −1, 0, 1, 2) amino acid cassette surrounding X (a sequence of NNNXNN where X is the 0 amino acid). The following description applies to the NNNXNN cassette as a model for the SVM. If a cassette other than NNNXNN is utilized, then the SVM is modified as will be readily apparent from the description herein.

[0106] The cassette is converted to a vector V using the following equations:

V=[site₋₃site₋₂site₋₁site₀site₊₁site₊₂]

where

siteᵢ=[aaᵢALAaaᵢARG . . . aaᵢTRPaaᵢTYR]

[0107] aaᵢN=1 if amino acid type N is present at site i; otherwise, N=0. This converts the cassette sequence of six amino acids into a 1 by 120 vector. The insertion site cassette for the intein containing proteins of SEQ ID NOS: 393-672 is provided in SEQ ID NOS: 1233-1512, respectively. This set of vectors for insertion site cassettes is used as the true positives control set to train the SVM. From each protein with a true positive, three random NNNXNN cassettes with cysteine, threonine and serine (referred to herein as “C/T/S”) at the X (0) position, but no intein insertion, are also chosen from the N and C extein sequences (preferably from SEQ ID NOS: 673-1232) as true negatives. The set of true negatives from extein sequences are then compiled. A selected true negative may be from the same protein as the true positive insertion site and have the same residue type in the X position as the true positive.

[0108] The total SVM for prediction of intein insertion sites is trained on the entire set of intein insertion site sequences, removing any sequences that are identical. This can be done by implementing any one of a number of different methods or programs. One SVM program that can be used for prediction of intein insertion sites is SVM_light V6.02 (Aug. 14, 2008), which is incorporated by reference herein as if fully set forth and is available from Thorsten Joachims Weichgut LLC, Ithaca, N.Y. See also Thorsten Joachims, Making large-Scale SVM Learning Practical. Advances in Kernel Methods—Support Vector Learning, B. Schölkopf and C. Burges and A. Smola (ed.), MIT-Press, 1999, which is incorporated by reference herein as if fully set forth. Briefly, SVM_light V6.02 is an implementation of the support vector machine training method of the above referenced Joachims 1999 publication that accounts for the difficulty of larger training sets associated with large-scale problems. The algorithm is based upon a decomposition strategy that addresses these issues with selecting variables for the working set in an efficient way. With SVM_light V6.02 a linear kernel and cost-factor set to 1 are utilized so the errors in the positive and negative sets are equally weighted.

[0109] To test the validity of this method, smaller sets of insertion site cassettes can be chosen for training and testing using the following method: 1) A random set of m true positive training set insertion sites with unique sequences are selected (in an embodiment, m ranges from 1 to 250, and the sequences are selected from SEQ ID NOS: 1233-1512); 2) for each true positive insertion site, three corresponding true negative cassettes are randomly selected from the exteins of the same intein containing protein (in an embodiment, SEQ ID NOS: 673-1232) associated with the true positive insertion site, where the true negatives have the same central amino acid X but no intein insertion, and 3) the remaining unique sequences in the group that were not selected in step 1), for example, those remaining in SEQ ID NOS: 1233-1512, can be selected as the test set. The support vectors are then trained using the same method as for the total prediction, and these support vectors are then used to score the test set, which consists of positive values of the known insertion site cassettes, and negative values of all other non-insertion site cassettes selected from the exteins (SEQ ID NOS: 673-1232) with cysteine, threonine, or serine at the 0 position.

[0110] The scores for the collection of sites for each protein are then compared and the insertion sites are ranked according to their scores. To create a metric for comparison, each intein insertion site can be assigned a number that is calculated as the ratio of the number of sites with a lower SVM score than the insertion site (L), divided by the number of all sites in the test set minus one (Nn), or L/Nn. A metric of 1 would mean that the insertion site has a higher number than all other sites, while a metric of 0 would mean that it has a lower number than all other sites. This process may be repeated 25 times for each size training set, with each run being based upon a random selection of insertion site cassettes from the SEQ ID NOS: 1233-1512, and the corresponding true negative insertion sites selected from the corresponding SEQ ID NOS: 673-1232, to be used for training and testing. Table 1, below, shows the metrics for known intein insertion sites using this training and testing procedure. The average metric for the known intein insertion sites and the standard deviations for each size training set in Table 1 are based on the preferred embodiment including training and test set sequences selected from SEQ ID NOS: 673-1512. For training sets of size 25 or higher, on average the intein insertion site has a metric of 0.75. This was shown to be statistically significant, with an approximate p-value of 10⁻¹⁰ for a training set of 150 insertion site cassettes. Potential intein insertions sites for any target protein can be screened through the SVM to predict, based on local sequence characteristics, insertion sites that can be used to modify the activity of the target protein. In an embodiment, candidate insertion sites with a rank of 0.75 or higher are chosen as the site to insert an intein.

TABLE 1

| | Average | | |
|---|---|---|---|
| Training Set Size | Metric | Std. Dev. | Number of SV |
| 1 | 0.57 | 0.068 | 3 |
| 25 | 0.73 | 0.032 | 75 |
| 50 | 0.74 | 0.031 | 150 |
| 75 | 0.75 | 0.045 | 225 |
| 100 | 0.75 | 0.048 | 300 |
| 125 | 0.77 | 0.054 | 375 |
| 150 | 0.75 | 0.052 | 450 |
| 175 | 0.77 | 0.062 | 525 |
| 200 | 0.76 | 0.071 | 600 |
| 225 | 0.77 | 0.070 | 675 |
| 250 | 0.86 | 0.133 | 750 |

[0111] A set of preferred NNNXNN intein insertion cassettes include those having the sequence of GGKCGG, GGKSGG, GGKTGG, PGATSP, PGATVP, GAKSLG, PGATSL, PGASPL, PGATGP, AQRSLG, NQPSIV, NQASIV, PNMSSA, GNHSSG, PSHSAY, SLMSSC, TNTSNY, IDTSRN, PSTSAY, QIKSLG, FETCNY, AVLSVN, LVYSAH, AGYSSA, MWGTLR, LSASSY, FAQTQI, GGRSFV, SFVCGF, GFGSNP, NPPTRP, HHRSSS, HRSSSC, RSSSCP, DWNTFN, TFNSPD, DDRSDY, EVATDY, NQVTEL, SSVTFW, LRESVW, RFHTLV, DLSSVT, DNHTWL, DYNTEV, LDVSLY, HYNSIV, ADLSSV, NIITEL, GHQTHI, MRNSPW, RFHTLV, DYNTDD, DKYSWL, LDMSIY, HNQTPT, DIKSWD, WGISDK, SGATDL, YYYSWW, SWWSDG, NFGTYD, GKTTRV, NAPSID, GTQTFD, QYWSVR, IVATEG, GYFSSG, NGNSYL, YGWTRN, YDPSSG, LGKTTR, YFSSGY, IDHTDS, SWSTNE, HTDSWS, NEITIN, DSWSTN, LDQSYV, EDPTIT, SYVTGY, PWGSNS, GSNSFI, TPGSGG, TNYSHP, DGMSYL, PQKCYI, DLISLM, LMSSCM, AGSSQA, AGHSAW, GIATNT, ATNTSN, CDPSGR, PQGTWF, VIDTSR, QGLTSL, SGQSAL, NGDSYW, SGDTGG, GVQSYN, LVYSAH, EFGTTL, FQWTFW, TFWSWN, NPDSGD, GYQSSG, IVESWG, GWSTNP, NLGTID, TGNTTM, NGNSYL, YGWSTN, YQSSGS, SNASGT, or DGGTYD (SEQ ID NOS: 1513-1628, respectively).

[0112] B) The Distance of the Insertion Site to the Active Site Residues

[0113] Although an intein insertion at any point in a protein is contemplated, an intein insertion site can be selected to be close to the active site of the protein. As shown in FIG. 1, it was discovered that intein insertion sites within 25 angstroms of the active site are more common than those farther away. In FIG. 1, the distance between the insertion site and the active site is measured from i) the atom in the insertion site amino acid that is closest to the active site to ii) the atom in the active site that is closest to the insertion site amino acid. An intein may be inserted at a position that is less than or equal to 25, 24, 23, 22, 21, 20, 19, 18, 17, 16, 15, 14, 13, 12, 11, 10, 9, 8, 7, 6, 5, 4, 3, 2, or 1 angstroms away from the active site. In an embodiment, an intein insertion site is located at 10 angstroms or less from the active site of the target protein. As used herein, “within 10 angstroms” means 10 angstroms or less. The insertion site can be separated from the active site in the primary or secondary structure of the protein and the distance is measured through physical distance, rather than number of amino acids or secondary structure landmarks. To determine the distance of the insertion site residue to the active site, protein characteristics may be obtained through reference to published data or crystallographic, nuclear magnetic resonance, or homology models. Homology models can be constructed using Swissprot (SWISS-MODEL and the Swiss-PdbViewer: An environment for comparative protein modeling. Guex, N. and Peitsch, M. C. (1997) Electrophoresis 18, 2714-2723, which is incorporated by reference herein as if fully set forth) with default parameters. Active site residues can be identified by reference to literature regarding a specific protein, or by using the annotation of active site positions as described by the NCBI genPept files (Database resources of the National Center for Biotechnology Information. David L. Wheeler, Tanya Barrett, Dennis A. Benson, Stephen H. Bryant, Kathi Canese, Vyacheslav Chetvernin, Deanna M. Church, Michael DiCuccio, Ron Edgar, Scott Federhen, Lewis Y. Geer, Yuri Kapustin, Oleg Khovayko, David Landsman, David J. Lipman, Thomas L. Madden, Donna R. Maglott, James Ostell, Vadim Miller, Kim D. Pruitt, Gregory D. Schuler, Edwin Sequeira, Steven T. Sherry, Karl Sirotkin, Alexandre Souvorov, Grigory Starchenko, Roman L. Tatusov, Tatiana A. Tatusova, Lukas Wagner, and Eugene Yaschenko (2007) Nucl. Acids Res. 2007 35: D5-D12, which is incorporated by reference herein as if fully set forth), the Catalytic Site Atlas database (The Catalytic Site Atlas: a resource of catalytic sites and residues identified in enzymes using structural data. Craig T. Porter, Gail J. Bartlett, and Janet M. Thornton (2004) Nucl. Acids. Res. 32: D129-D133; Analysis of Catalytic Residues in Enzyme Active Sites. Gail J. Bartlett, Craig T. Porter, Neera Borkakoti, and Janet M. Thornton (2002) J Mol Biol 324:105-121; Using a Library of Structural Templates to Recognise Catalytic Sites and Explore their Evolution in Homologous Families. James W. Torrance, Gail J. Bartlett, Craig T. Porter, Janet M. Thornton (2005) J Mol. Biol. 347:565-81, which are incorporated by reference herein as if fully set forth), and other sources of active site information. Intein insertions at or near other protein sites, such as but not limited to allosteric affector sites, are also contemplated. An insertion site at or near an other protein site is not limited to but can be less than or equal to 25, 24, 23, 22, 21, 20, 19, 18, 17, 16, 15, 14, 13, 12, 11, 10, 9, 8, 7, 6, 5, 4, 3, 2, or 1 angstroms away from the other site.

[0114] C) The Proximity of the Insertion Site to a Local Secondary Structure

[0115] Intein insertion sites may occur within any type of local secondary structure. In an embodiment, the intein insertion site is near a loop-β sheet junction or an α-helix junction. As used in this context, “near” means that the insertion site is within ten amino acids from a loop-β sheet junction or an α-helix junction. As used herein, the insertion site “within ten amino acids” of a loop-β sheet or a loop α-helix junction means that the insertion site is located before the amino acid that is 10, 9, 8, 7, 6, 5, 4, 3, 2, or 1 amino acids away or at the loop-β sheet or loop α-helix junction. An intein may be inserted within 2 amino acids of a loop-β-sheet junction or within 2 amino acids of a loop-α-helix junction. As used herein, “within 2 amino acids” means that the intein is inserted before an amino acid that is 2 or 1 amino acid away from or at the loop-β sheet or loop α-helix junction. Additional secondary structures where an intein can be inserted include, but are not limited to, at or near the middle of a β-sheet, at or near the middle of a of α-helix, or at or near the middle of a loop.

[0116] Summary of Intein Insertion Site Prediction

[0117] Based on one or more of A) the local sequence as described by the SVM, B) the distance of the site to the active site residues, and C) the proximity of the insertion site to a local secondary structure (e.g., a loop-β-sheet junction or a loop-α-helix junction), intein insertion sites that can be used to control protein activity can be predicted and then tested experimentally. The SVM model can be used to predict an insertion site that can be used to control protein activity on-average within the top 25% of all sites. Intein insertion sites may be located at or within 10 angstroms from active site residues. The local secondary structure of intein insertion sites may be at or near the junction of loops with either β-sheets or α-helices.

[0118] After predicting an insertions site, the protein can be modified with an intein and screened. The screening can include functional assays to determine if the intein modified protein has a permissive, non-permissive, condition-sensitive permissive, temperature-sensitive permissive, or switching phenotype. The screening can include physical assays to determine if the intein in the intein modified protein spliced, cleaved, or remained within the intein-modified protein upon construction or after exposure to induction conditions. Western blots can be used to determine if the intein in the intein modified protein spliced, cleaved, or remained within the intein-modified protein. A combination of functional and physical assays can be employed to determine if the intein modified protein is a condition-sensitive switcher splicer. The combination of functional and physical assays can be used to determine if the intein modified protein is a temperature-sensitive switcher splicer by constructing the protein, exposing it to an induction temperature and conducting the functional and physical assays.

[0119] An intein modified protein can be constructed without using the prediction method by inserting an intein prior any C/S/T position. The C/S/T position can be natural or introduced.

[0120] An intein modified protein encoding sequence can be mutated. The mutations can be carried out on the intein encoding sequences, the extein encoding sequences, or a combination thereof. Mutated intein modified proteins can then be constructed and screened by functional and/or physical assays.

[0121] In an embodiment, an isolated protein having a sequence with at least 70, 75, 80, 85, 90, 91, 92, 93, 94, 95, 96, 97, 98, 99, or 100% identity to a protein having the sequence of any one of SEQ ID NOS: 1629-1784, 2373-2686 and 3313-3322 is provided. In an embodiment, the one or more proteins having less than 100% identity to its corresponding amino acid sequence of SEQ ID NOS: 1629-1784, 2373-2686 and 3313-3322 is a variant of the referenced protein or amino acid. In an embodiment, an isolated protein, polypeptide, oligopeptide, or peptide having a sequence with at least 70, 75, 80, 85, 90, 91, 92, 93, 94, 95, 96, 97, 98, 99, or 100% identity to a protein having the sequence of any one of SEQ ID NOS: 1629-1784, 2373-2686 and 3313-3322 along 6, 10 to 50, to 100, 10 to 150, 10 to 300, 10 to 400, 10 to 500, 10 to 600, 10 to 700, 10 to 800, 10 to 900, or 10 to all amino acids of a protein having the sequence of any of one any one of SEQ ID NOS: 1629-1784, 2373-2686 and 3313-3322 is provided. This list of sequence lengths encompasses every full length protein in SEQ ID NOS: 1629-1784, 2373-2686 and 3313-3322 and every smaller length within the list, even for proteins that do not include over 900 amino acids. For example, the lengths of 6, 10 to 50, 10 to 100, 10 to 150, 10 to 300, 10 to 400, and 10 to all amino acids would apply to a sequence with 453 amino acids. A range of amino acid sequence lengths recited herein includes every length of amino sequence within the range, endopoints inclusive. The recited length of amino acids may start at any single position within a reference sequence where enough amino acids follow the single position to accommodate the recited length. The range of sequence lengths can be extended by increments of 10 to 100N amino acids, where N=an integer of ten or greater, for sequences of 1000 amino acids or larger. Identity can be measured by the Smith-Waterman algorithm (Smith T F, Waterman M S (1981), “Identification of Common Molecular Subsequences,” Journal of Molecular Biology 147: 195-197, which is incorporated by reference in its entirety as if fully set forth). Peptides, oligopeptides, or polypeptides having amino acid sequences less than the full length of any one of SEQ ID NOS: 1629-1784, 2373-2686 and 3313-3322 can be used for a number of applications including but not limited to raising an antibody to detect an intein modified protein or a fragment thereof. The antibody can be used to detect whether an intein modified protein or fragment thereof is expressed in a plant, a plant tissue, a plant cell, or a plant sub-cellular region or compartment. An embodiment provides an antibody recognizing an epitope on an isolated amino acid sequence having at least 90% identity to 6, 10 to 50, 10 to 100, 10 to 150, 10 to 300, 10 to 400, 10 to 500, 10 to 600, 10 to 700, 10 to 800, 10 to 900, or 10 to all contiguous amino acid residues of a protein having the sequence of any of SEQ ID NOS: 1629-1784, 2373-2686 and 3313-3322.

[0122] The skilled artisan will realize that variants of the above protein or amino acid sequences can be made by conservative amino acid substitutions, and variants of any of the above sequences with conserved amino acid changes are provided as further embodiments. Proteins with any of the above sequences but having synthetic or non-naturally occurring amino acid analogues (and/or peptide linkages) are included in the embodiments herein. A conservative amino acid substitution can be an amino acid substitution that does not alter the relative charge or size characteristics of the polypeptide in which the amino acid substitution is made. Amino acids are sometimes specified using the standard one letter code: Alanine (A), Serine (S), Threonine (T), Aspartic acid (D), Glutamic acid (E) Asparagine (N), Glutamine (Q), Arginine (R), Lysine (K), Isoleucine (I), Leucine (L), Methionine (M), Valine (V), Phenylalanine (F), Tyrosine (Y), Tryptophan (W), Proline (P), Glycine (G), Histidine (H), Cysteine (C). “Hydrophobic amino acids” refers to A, L, I, V, P, F, W, and M; “polar amino acids” refers to G, S, T, Y, C, N, and Q; and “charged amino acids” refers to D, E, H, K, and R. Conservative amino acid substitution can also include amino acid substitutions of those amino acids that are not critical for protein activity, or substitution of amino acids with other amino acids having similar properties (for example, acidic, basic, positively or negatively charged, polar or non-polar, hydrophobic, charged, et cetera) such that the substitutions of a critical amino acid does not substantially alter activity. The following six groups each contain amino acids that are conservative amino acid substitutions for one another: 1) Alanine (A), Serine (S), Threonine (T); 2) Aspartic acid (D), Glutamic acid (E); 3) Asparagine (N), Glutamine (Q); 4) Arginine (R), Lysine (K); 5) Isoleucine (I), Leucine (L), Methionine (M), Valine (V); and 6) Phenylalanine (F), Tyrosine (Y), Tryptophan (W). One of skill in the art will appreciate that the above-identified substitutions are not the only possible conservative substitutions. For example, in some instances one may regard all charged amino acids as conservative substitutions for each other whether they are positive or negative. In addition, individual substitutions, deletions or additions which alter, add or delete a single amino acid or a small percentage of amino acids in an encoded sequence can also be conservative amino acid substitutions. Conservative amino acid substitution tables providing functionally similar amino acids are well known in the art and conservative amino acid changes as known in the art are contemplated herein. Conservative nucleotide substitutions in a nucleic acid encoding an isolated protein are also contemplated in the present embodiments. Conservative nucleotide substitutions include but are not limited to those that affect a conservative amino acid substitution in the encoded amino acid sequence. In addition, degenerate conservative nucleotide substitutions can be made in a gene sequence by substituting a codon for an amino acid with a different codon for the same amino acid.

[0123] The isolated proteins, polypeptides, oligopeptides, or peptides and variants thereof can be prepared according to methods for preparing or altering polypeptide sequences, and their encoding nucleic acid sequences, known to one of ordinary skill in the art such as are found in common molecular biology references, for example, Molecular Cloning: A Laboratory Manual, J. Sambrook, et al., eds., Second Edition, Cold Spring Harbor Laboratory Press, Cold Spring Harbor, N.Y. (1989) or Current Protocols in Molecular Biology, F. M. Ausubel, et al., eds., John Wiley & Sons, Inc., New York, which are incorporated herein as if fully set forth. The isolated proteins, polypeptides, oligopeptides, or peptides may include natural amino acids, natural amino acid analogues, or synthetic amino acid analogues.

[0124] In an embodiment, an isolated nucleic acid, or the complement thereof, having a sequence encoding an amino acid sequence with at least 70, 75, 80, 85, 90, 91, 92, 93, 94, 95, 96, 97, 98, 99, or 100% identity to a protein having the sequence of any one of SEQ ID NOS: 1629-1784, 2373-2686 and 3313-3322 is provided. In an embodiment, the nucleic acid encoding an amino acid having less than 100% identity to the reference sequence encodes a variant of the reference sequence. In an embodiment, an isolated nucleic acid, polynucleotide, or oligonucleotide having a sequence encoding an amino acid sequence with at least 75, 80, 85, 90, 91, 92, 93, 94, 95, 96, 97, 98, 99, or 100% identity to a an amino acid sequence of any one of SEQ ID NOS: 1629-1784, 2373-2686 and 3313-3322 along 6, 10 to 50, 10 to 100, 10 to 150, 10 to 300, 10 to 400, 10 to 500, to 600, 10 to 700, 10 to 800, 10 to 900, or 10 to all amino acids of a protein having the sequence of any of one SEQ ID NOS: 1629-1784, 2373-2686 and 3313-3322 is provided. In an embodiment, the complement of said isolated nucleic acid, polynucleotide, or oligonucleotide is provided. This list of sequence lengths encompasses every full length protein in SEQ ID NOS: 1629-1784, 2373-2686 and 3313-3322 and every smaller length within the list, even for proteins that do not include over 900 amino acids. For example, the lengths of 6, to 50, 10 to 100, 10 to 150, 10 to 300, 10 to 400, and 10 to all amino acids would apply to a sequence with 453 amino acids. The range of sequence lengths can be extended by increments of 10 to 100N amino acids, where N=an integer of ten or greater, for sequences of 1000 amino acids or larger. Identity can be measured by the Smith-Waterman algorithm (Smith T F, Waterman M S (1981), “Identification of Common Molecular Subsequences,” Journal of Molecular Biology 147: 195-197, which is incorporated by reference in its entirety as if fully set forth).

[0125] In an embodiment, an isolated nucleic acid having a sequence that hybridizes to a nucleic acid having the sequence of any one of SEQ ID NOS: 1629-1784, 2373-2686 and 3313-3322 or the complements thereof is provided. In an embodiment, the hybridization conditions can be low stringency. In an embodiment, the hybridization conditions can be moderate stringency. In an embodiment, the hybridization conditions can be high stringency. Examples of hybridization protocols and methods for optimization of hybridization protocols are described in the following books: Molecular Cloning, T. Maniatis, E. F. Fritsch, and J. Sambrook, Cold Spring Harbor Laboratory, 1982; and, Current Protocols in Molecular Biology, F. M. Ausubel, R. Brent, R. E. Kingston, D. D. Moore, J. G. Seidman, J. A. Smith, K. Struhl, Volume 1, John Wiley & Sons, 2000, which are incorporated by reference in their entirety as if fully set forth. By way of example, but not limitation, procedures for hybridization conditions of moderate stringency are as follows: filters containing DNA are pretreated for 2-4 h at 68° C. in a solution containing 6×SSC (Amresco, Inc., Solon, Ohio), 0.5% SDS (Amersco, Inc., Solon, Ohio), 5×Denhardt's solution (Amersco, Inc., Solon, Ohio), and 100 μg/mL denatured, salmon sperm DNA (Invitrogen Life Technologies, Inc., Carlsbad, Calif.). Approximately 0.2 mL of pretreatment solution are used per square centimeter of membrane used. Hybridizations are carried out in the same solution with the following modifications: 0.01 M EDTA (Amersco, Inc., Solon, Ohio), 100 μg/ml salmon sperm DNA, and 5−20×10⁶ cpm ³²P-labeled or fluorescently labeled probes can be used. Filters are incubated in hybridization mixture for 16-20 h at 68° C. and then washed for 15 minutes at room temperature (within five degrees of 25° C.) in a solution containing 2×SSC and 0.1% SDS, with gentle agitation. The wash solution is replaced with a solution containing 0.1×SSC and 0.5% SDS, and incubated an additional 2 h at 68° C., with gentle agitation. Filters are blotted dry and exposed for development in an imager or by autoradiography. If necessary, filters are washed for a third time and re-exposed for development. By way of example, but not limitation, low stringency refers to hybridizing conditions that employ low temperature for hybridization, for example, temperatures between 37° C. and 60° C. By way of example, but not limitation, high stringency refers to hybridizing conditions as set forth above but with modification to employ high temperatures, for example, hybridization temperatures over 68° C.

[0126] In an embodiment, an isolated nucleic acid, polynucleotide, or oligonucleotide encoding at least a portion of any of the amino acid sequences of SEQ ID NOS: 1629-1784, 2373-2686 and 3313-3322 can be used as a hybridization probe or primer. In an embodiment, the complement of said isolated nucleic acid, polynucleotide or oligonucleotide may be used as a hybridization probe or primer. In an embodiment, an isolated nucleic acid, polynucleotide, or oligonucleotide having a sequence of or complementary to a portion of one of SEQ ID NOS: 1785-1923, 2052, 2058, 2687-3000 and 3323-3330 can be used as a hybridization probe or primer. The isolated nucleic acids, polynucleotides, or oligonucleotides herein are not limited to but may have a length in the range from 10 to 100, 10 to 90, 10 to 80, 10 to 70, 10 to 60, 10 to 50, to 40, 10 to 35, 10 to 30, 10 to 25, 10 to 20 or 10 to 15 nucleotides, or from 20 to 30 nucleotide residues, or of 25 nucleotide residues. A range of nucleotide sequence lengths recited herein includes every length of nucleotide sequence within the range, endopoints inclusive. The recited length of nucleotides may start at any single position within a reference sequence where enough nucleotides follow the single position to accommodate the recited length. In an embodiment, a hybridization probe or primer is 85 to 100%, 90 to 100%, 91 to 100%, 92 to 100%, 93 to 100%, 94 to 100%, 95 to 100%, 96 to 100%, 97 to 100%, 98 to 100%, 99 to 100%, or 100% complementary to a nucleic acid with the same length as the probe or primer and having a sequence chosen from a length of nucleotides corresponding to the probe or primer length within a nucleic acid encoding one of the proteins of SEQ ID NOS: 1629-1784, 2373-2686 and 3313-3322 or the complement of said nucleic acid. In an embodiment, a hybridization probe or primer is 85 to 100%, 90 to 100%, 91 to 100%, 92 to 100%, 93 to 100%, 94 to 100%, 95 to 100%, 96 to 100%, 97 to 100%, 98 to 100%, 99 to 100%, or 100% complementary to a nucleic acid with the same length as the probe or primer and having a sequence chosen from a length of nucleotides corresponding to the probe or primer length within a nucleic acid having the sequence of one of SEQ ID NOS: 1785-1923, 2052, 2058, 2687-3000 and 3323-3330 or the complement of said nucleic acid. In an embodiment, a hybridization probe or primer hybridizes along its length to a corresponding length of a nucleic acid encoding the sequence of one of SEQ ID NOS: 1629-1784, 2373-2686 and 3313-3322 or the complement said nucleic acid. In an embodiment, a hybridization probe or primer hybridizes along its length to a corresponding length of a nucleic acid having the sequence of one of SEQ ID NOS: 1785-1923, 2052, 2058, 2687-3000 and 3323-3330 or the complement said nucleic acid. In an embodiment, hybridization can occur under conditions of low stringency. In an embodiment, hybridization can occur under conditions of moderate stringency. In an embodiment, hybridization can occur under conditions of high stringency.

[0127] The isolated nucleic acids, polynucleotides, or oligonucleotides of embodiments herein may include natural nucleotides, natural nucleotide analogues, or synthetic nucleotide analogues. Nucleic acids, polynucleotides, or oligonucleotides of embodiments herein may be any kind of nucleic acid including deoxyribonucleic acid (DNA), ribonucleic acid (RNA), or peptide nucleic acid (PNA). SEQ ID NOS: 1785-1923 are listed as a DNA sequences but RNA sequences where U replaces Tin SEQ ID NOS: 1785-1923 are also contemplated as nucleic acids of embodiments herein.

[0128] Although non-labeled hybridization probes or primers can be used in the embodiments herein, the hybridization probes or primers may detectably labeled and could be used to detect, sequence, or synthesize nucleic acids. Exemplary labels include, but are not limited to, radionuclides, light-absorbing chemical moieties, dyes, and fluorescent moieties. The label may be a fluorescent moiety, such as 6-carboxyfluorescein (FAM), 6-carboxy-4,7,2′,7′-tetrachlorofluoroscein (TET), rhodamine, JOE (2,7-dimethoxy-4,5-dichloro-6-carboxyfluorescein), HEX (hexachloro-6-carboxyfluorescein), or VIC.

[0129] In an embodiment, an isolated nucleic acid, polynucleotide, or oligonucleotide encoding an intein modified protein, a variant of an intein modified protein, or a fragment of an intein modified protein is provided in an expression construct suitable for expression in a desired host. The fragment of an intein modified protein may include a portion of the intein modified protein that retains the activity of the intein modified protein. But the fragment may also have other utility such as but not limited to serving as an antigen to make antibody that can then be used to detect an intein-modified protein or fragment thereof in or extracted from a plant, plant tissue, plant cell, or plant subcellular region or compartment. The nucleic acid may include a sequence encoding an amino acid sequence with at least 70, 75, 80, 85, 90, 91, 92, 93, 94, 95, 96, 97, 98, 99, or 100% identity to a protein having the sequence of any one SEQ ID NOS: 1629-1784, 2373-2686 and 3313-3322. A fragment of the intein modified protein encoding nucleic acid in an expression construct may encode an amino acid sequence having 75, 80, 85, 90, 91, 92, 93, 94, 95, 96, 97, 98, 99, or 100% identity to a an amino acid sequence of any one of SEQ ID NOS: 1629-1784, 2373-2686 and 3313-3322 along 6, 10 to 50, 10 to 100, 10 to 150, 10 to 300, 10 to 400, 10 to 500, 10 to 600, 10 to 700, 10 to 800, 10 to 900, or 10 to all amino acids of a protein having the sequence of any of one any one of SEQ ID NOS: 1629-1784, 2373-2686 and 3313-3322. This list of sequence lengths encompasses every full length protein in SEQ ID NOS: 1629-1784, 2373-2686 and 3313-3322 and every smaller length within the list, even for proteins that do not include over 900 amino acids. For example, the lengths of 6, 10 to 50, 10 to 100, 10 to 150, 10 to 300, 10 to 400, and 10 to all amino acids would apply to a sequence with 453 amino acids. The range of sequence lengths can be extended by increments of 10 to 100N amino acids, where N=an integer of ten or greater, for sequences of 1000 amino acids or larger. The nucleic acid may include a sequence that hybridizes to a nucleic acid having the sequence or complement thereof of one of SEQ ID NOS: 1785-1923, 2052, 2058, 2687-3000 and 3323-3330. In an embodiment, hybridization can occur under conditions of moderate stringency. In an embodiment, hybridization can occur under conditions of low stringency. In an embodiment, hybridization can occur under conditions of high stringency.

[0130] The expression construct may be any suitable expression construct for expression of the intein modified protein or fragment thereof in a suitable host. An embodiment is the expression construct pAG2005 (SEQ ID NO: 1) or any expression construct having at least 90, 91, 92, 93, 94, 95, 96, 97, 98, 99, or 100% identity to the sequence of SEQ ID NO: 1. In a preferred embodiment, a nucleic acid encoding any of the proteins in the preceding paragraph or a fragment thereof is provided in pAG2005. The nucleic acid can be cloned into the KpnI and EcoRI sites in pAG2005 and under control of the rice ubiquitin promoter.

[0131] The isolated nucleic acids, polynucleotides, or oligonucleotides in an expression construct may be codon optimized for an expression host. The codon optimization may be but is not limited to codon optimization for a plant. The codon optimization may be for one of switchgrass, corn, miscanthus, sorghum, sugarcane, wheat, or rice.

[0132] The host for an expression construct having one or more of the nucleic acids, polynucleotides, or oligonucleotides may be a plant. The plant may be a monocotyledonous plant. The monocotyledonous plant can be but is not limited to switchgrass, corn, miscanthus, sorghum, sugarcane, wheat, or rice. The plant could be a dicotyledonous plant. The dicotyledonous plant can be but is not limited to soy bean, canola, poplar, willow, or rapeseed. The expression construct may be pAG2005 (SEQ ID NO: 1), which is illustrated in FIGS. 2A-2B. The nucleic acid in the expression construct can be operably linked to a promoter. The promoter may control the expression of the intein modified protein or fragment thereof and the promoter can be but is not limited to a plant ubiquitin promoter system, the maize ubiquitin promoter, a modified maize ubiquitin promoter that lacks one or more heat shock elements, rice ubiquitin promoter, rice actin 1 promoter, rice actin 2 promoter, gamma-zein promoter, glutelin promoter, maize PR-1 promoter, maize alcohol dehydrogenase 1 promoter, CaMV 19S promoter, CaMV 35S promoter, 35S-enhanced mas promoter, 35S minimal promoter, Arabidopsis PR-1 promoter, tobacco PR-1a promoter, opaline synthase promoter, soybean heat shock promoter, octopine synthase promoter, mannopine synthase promoter, a synthetic promoter, an alcohol inducible promoter, a tetracycline inducible promoter, a steroid inducible promoter, a hormone inducible promoter, a promoter based on the ecdysone receptor, a yeast copper responsive promoter, a metallothionein promoter, a heat regulated promoter, a cold inducible promoter, potato alpha-amylase promoter, a light regulated promoter, a maize chlorophyll a/b promoter, a dark and light-active Cab promoter, a tissue specific promoter, a root promoter, a seed specific promoter, or a constitutive promoter. The promoter could be a constitutive or inducible promoter and may be the rice ubiquitin, maize ubiquitin, gamma zein, glutelin, or rice actin promoter. The nucleic acid can be provided in the pAG2005 operably linked to the rice uniquitin promoter, and the construct can be provided in switchgrass, corn, miscanthus, sorghum, sugarcane, wheat, or rice. The nucleic acid can be cloned into the KpnI and EcoRI sites in pAG2005 and under control of the rice ubiquitin promoter. In an embodiment, if the nucleic acid in any of the above expression constructs encodes an amino acid sequence having less than 100% identity to any one of SEQ ID NOS: 1629-1784, 2373-2686 and 3313-3322, it encodes a variant of the amino acid sequence.

[0133] Referring to FIGS. 2A to 2B, pAG2005 (SEQ ID NO: 1) includes an Oryza sativa ubiquitin 3 gene promoter with the first intron (OsUbi3 promoter, nucleotides 12-2094), a sequence encoding phosphomannose isomerase enzyme used for selection of transformants (PMI, nucleotides 2104-3279), a left T-DNA border (LB, nucleotides 3674-3698), a ColE1 origin of replication (Ori, nucleotide 6970), a right T-DNA border (RB, nucleotides 9717-9741), a second OsUbi3 promoter with the first intron (nucleotides 9948-12015), and a Nos terminator (nucleotides 12035-12310), where the nucleotide numbers are indexed relative to nucleotide 1 within the EcoRI sequence at the 5′ end of the OsUbi3 promoter that drives PMI.

[0134] In an embodiment, a transgenic plant is provided with one or more of the isolated nucleic acids, polynucleotides, oligonucleotides, and/or expression constructs herein. The isolated nucleic acid, polynucleotide, oligonucleotide, and/or expression construct can be introduced into the plant by Agrobacterium mediated transformation or any other suitable method known in the art. Agrobacterium-mediated transformation of immature maize embryos may be performed as described in Negrotto et al., (2000) Plant Cell Reports 19: 798-803, which is incorporated by reference herein as if fully set forth.

[0135] Embodiments herein also include mutant inteins, which can be but are not limited to uses such as modifying a protein. The mutant inteins include but are not limited to those having at least 70, 75, 80, 85, 90, 91, 92, 93, 94, 95, 96, 97, 98, 99, or 100% identity to a protein having the sequence of any one of SEQ ID NOS: 92-103 and 2373-2686, or any one of the inteins contained in any one of SEQ ID NOS: 1675, 1678-1681, 1689, 1691, 1700-1708, 1710 and 3315-3322. Embodiments also include a nucleic acid that encodes a mutant intein including but not limited to mutant inteins having at least 70, 75, 80, 85, 90, 91, 92, 93, 94, 95, 96, 97, 98, 99, or 100% identity to a protein having the sequence of any one of SEQ ID NOS: 92-103 and 2373-2686, or any of the inteins contained in any one of SEQ ID NOS: 1675, 1678-1681, 1689, 1691, 1700-1708, 1710 and 3315-3322. Embodiments also include a nucleic acid that encodes a mutant intein, where the nucleic acid hybridizes to a nucleic acid, or the complement thereof, that encodes a protein having the sequence of one of SEQ ID NOS: 92-103 and 2373-2686, or any one of the inteins contained in any one of SEQ ID NOS: 1675, 1678-1681, 1689, 1691, 1700-1708, 1710 and 3315-3322. Embodiments also include a nucleic acid that encodes a mutant intein, where the nucleic acid hybridizes to a nucleic acid, or the complement thereof, having the sequence of one of the intein encoding sequences contained in any one of SEQ ID NOS: 3323-3330. In an embodiment, hybridization can occur under conditions of low stringency. In an embodiment, hybridization can occur under conditions of moderate stringency. In an embodiment, hybridization can occur under conditions of high stringency. A mutant intein may be inducible to cleave and/or splice from a protein in which it is inserted. Induction conditions can include exposure of the intein to changes in physical or chemical conditions such as, but not limited to, changes in temperature, pH, concentration of splicing inhibitors, concentration of ligand, light, salt conditions, and pressure. The induction condition can be but is not limited to an elevated temperature. The elevated temperature can be within but is not limited to the range of 50-70° C., which includes the temperatures of 50° C. and 70° C. The elevated temperature can be greater than or equal to a temperature in integer increments within the range of 25-70° C., endpoints included. The elevated temperature can be greater than or equal to 50° C., 55° C., 59.9° C., 60° C., 65° C., or 70° C. An intein having at least 70, 75, 80, 85, 90, 91, 92, 93, 94, 95, 96, 97, 98, 99, or 100% identity to a protein having the sequence of SEQ ID NOS: 2, 3, 4-103, 113-392, or any one of the inteins contained in any one of SEQ ID NOS: 1675, 1678-1681, 1689, 1691, 1700-1708, and 1710 can be used to modify a protein, enzyme, cellulase, or xylanase. A nucleic acid that hybridizes to a nucleic acid encoding SEQ ID NOS: 92-103, or any one of the inteins in any one of SEQ ID NOS: 1675, 1678-1681, 1689, 1691, 1700-1708, and 1710 or the complement thereof may be used to modify a protein, enzyme, cellulase, or xylanase at the nucleic acid level. The intein sequence in each of SEQ ID NOS: 1675, 1678-1681, 1689, 1691, 1700-1708, and 1710 can be found by comparing each one of the sequences with the Tth intein sequence of SEQ ID NO: 91.

[0136] As described above, embodiments include amino acid sequences where one such sequence comprises 75, 80, 85, 90, 91, 92, 93, 94, 95, 96, 97, 98, 99, or 100% identity to an amino acid sequence of any one of SEQ ID NOS: 1629-1784, 2373-2686 and 3313-3322 along 6, 10 to 50, 10 to 100, 10 to 150, 10 to 300, 10 to 400, 10 to 500, 10 to 600, 10 to 700, 10 to 800, 10 to 900, or 10 to all amino acids of a protein having the sequence of one of SEQ ID NOS: 1629-1784, 2373-2686 and 3313-3322. Embodiments also include nucleic acids encoding said amino acid sequences, and antibodies recognizing epitopes on said amino acid sequences. A less than full length amino acid sequence may be selected from any portion of one of the sequences of SEQ ID NOS: 1629-1784, 2373-2686 and 3313-3322 corresponding to the recited length of amino acids. A less than full length amino acid sequence may be selected from a portion of any one of SEQ ID NOS: 1629-1784, 2373-2686 and 3313-3322 having an upstream intein-extein junction with the C-terminal residue of the N-extein and the N-terminal residue of the intein at any two adjacent positions therein. For example, positions 134 and 135 in each of SEQ ID NOS: 3313-3322 are the C-terminal residue of the N-extein and the N-terminal residue of the intein for each respective sequence, and a less than full length amino acid sequence selected from any one of SEQ ID NOS: 3313-3322 may include residues 134 and 135 at any two respective, consecutive positions within the recited length. A less than full length amino acid sequence may be selected from a portion of any one of SEQ ID NOS: 1629-1784, 2373-2686 and 3313-3322 having a downstream intein-extein junction with the C-terminal residue of the intein and the N-terminal residue of the C-extein at any two adjacent positions therein. For example, positions 616 and 617 in each of SEQ ID NOS: 3313-3322 are the C-terminal residue of the intein and the N-terminal residue of the C-extein for each respective sequence, and a less than full length amino acid sequence selected from any one of SEQ ID NOS: 3313-3322 may include residues 616 and 617 at any two respective, consecutive positions within the recited length. A less than full length amino acid sequence may be selected from a portion of any one of SEQ ID NOS: 1629-1784, 2373-2686 and 3313-3322 where the portion selected includes at least one amino acid different than the native intein or native protein sequence at a position within the portion. For example, the following sequences include a mutation (indicated by “/AAi#AAj” following the sequence ID) relative to the base sequence (SEQ ID NOS: 2518): SEQ ID NO: 3315/R322H; SEQ ID NO: 3315/R398W; SEQ ID NO: 3315/1412V; SEQ ID NO: 3315/T415M; SEQ ID NO: 3316/D188E; SEQ ID NO: 3316/K245N; SEQ ID NO: 3316/T402A; SEQ ID NO: 3316/R504G; SEQ ID NO: 3316/K566N; SEQ ID NO: 3317/K245M; SEQ ID NO: 3317/D418V; SEQ ID NO: 3317/S585I; SEQ ID NO: 3318/V231L; SEQ ID NO: 3318/P282S; SEQ ID NO: 3318/K402M; SEQ ID NO: 3318/E545D; SEQ ID NO: 3318/1618N; SEQ ID NO: 3319/P134S; SEQ ID NO: 3319/E405K; SEQ ID NO: 3319/N747Y; SEQ ID NO: 3320/P134S; SEQ ID NO: 3320/R345M; SEQ ID NO: 3320/V589D; SEQ ID NO: 3321/T301; SEQ ID NO: 3321/E331G; SEQ ID NO: 3321/G366E; SEQ ID NO: 3321/L578M; SEQ ID NO: 3322/P189L; SEQ ID NO: 3322/G242A and SEQ ID NO: 3322/N730D. A less than full length amino acid sequence selected from one of SEQ ID NOS: 3313-3322 may include one or more of the amino acid changes listed above with respect to SEQ ID NOS: 2518. A less than full length amino acid sequence selected from any other sequence herein with one or more amino acid change relative to the native intein or native enzyme may be similarly selected. The relative position of the amino acid changes with respect to one another may be maintained if the less than full length amino acid sequence selected includes more than one amino acid change. But the change or changes may otherwise appear anywhere within the recited length of the less than full length amino acid sequence. A nucleic acid provided herein may encode any one of these less than full length amino acid sequences. A nucleic acid provided herein may be of any length described above, including a less than full length amino acid sequence that encodes a portion of an intein modified protein having at least one of an upstream intein-extein junction, a downstream intein-extein junction or a change in an intein modified protein sequence compared to the native intein or native protein sequence. The nucleotides encoding the junctions or change sites may be located at any respective position along the length of the recited length of the nucleic acid. An antibody provided herein may recognize an epitope on any one of these less than full length amino acid sequences. The epitope may include an upstream intein-extein junction, a downstream intein-extein junction, one or more changes in the less than full length amino acid sequence relative to the native intein or native protein sequence, or any other sequence in the less than full length amino acid sequence.

[0137] Any single embodiment herein may be supplemented with one or more element from any one or more other embodiment herein.

### EXAMPLES

[0138] The following non-limiting examples are provided to illustrate particular embodiments. The embodiments throughout may be supplemented with one or more detail from any one or more example below.

### Example 1

### Intein insertion site prediction

[0139] The use of A) the local sequence as predicted by an SVM, B) the distance of the site to the active site residues, or C) the proximity of the insertion site to a local secondary structure (e.g., the end of an alphα-helix or beta-sheet) allowed prediction of the insertions sites in the following xylanases and cellulases: The Bacillus sp. NG-27 xylanase (accession number O30700 (SEQ ID NO: 106)); the Clostridium stercorarium xynB xylanase (accession number P40942 (SEQ ID NO: 108)); the Thermomyces lanuginosus xynA xylanase (accession number O43097 (SEQ ID NO: 107)); the Dictyoglomus thermophilum xynB xylanase (accession number P77853 (SEQ ID NO: 104)); the Clostridium thermocellum celK cellulase (accession number O68438 (SEQ ID NO: 109)); the Thermomonospora fusca celB cellulase (accession number P26222 (SEQ ID NO: 110)); the Acidothermus cellulolyticus cellulase (accession number P54583 (SEQ ID NO: 111)); and the Nasutitermes takasagoensis cellulase (accession number O77044 (SEQ ID NO: 112)). For each of these xylanases and cellulases, the distance between each C/T/S site in the enzyme and its active site was calculated based upon the shortest distance between any atom in the C/T/S residue and any atom in any of the residues of the active site. Then, the SVM score of each NNNXNN local sequence cassette, where X is C/T/S, was obtained. The SVM was trained and utilized as described above using the intein insertion cassette sequences of SEQ ID NOS: 1233-1512. The validity of the SVM was tested using: 1) A random set of m (m ranged from 1 to 250) true positive training set sites with unique sequences selected from the intein containing protein library of SEQ ID NOS: 1233-1512; 2) true negatives including 3 other random cassettes from the extein sequences from which the true positive insertion cassettes were selected (SEQ ID NOS: 673-1232); 3) the remaining sequences from the intein insertion site cassettes of SEQ ID NOS: 1233-1512 as true positive test sets, where the known intein insertion sites were filtered to remove sequences in the training set; and 4) true negatives in the test set selected from other C/S/T sites in the extein sequences (SEQ ID NOS: 673-1232). Each true negative in the training set included the same central amino acid X as the corresponding true positive, but there was no intein insertion at that true negative amino acid position.

[0140] Sites that were at or closer than 10 angstroms and/or had an SVM score of greater than 0 were included for further analysis. Sites that scored high on the SVM score but were further than 20 angstroms were excluded. Next the secondary structure of all of the candidate site was determined and sites that were located at loop-(α-helix or β-sheet) junctions are prioritized. Sites that were located in long surface loops, that were not immediately adjacent to the active site, or sites that were in the core of the protein were also excluded. A list of such predicted insertion sites is shown in Table 2, below.

TABLE 2

| Enzyme | Predicted Insertion Sites |
|---|---|
| O30700 | T309, T360, S215, T137, S358, T369, T250, S314, S95, |
| (SEQ ID NO: | S357 |
| 106) | |
| P40942 | T292, T263, S198, T122, T233, S350, S297, T129, S179, |
| (SEQ ID NO: | S346 |
| 108) | |
| O43097 | T134, S47, S50, T126, T152, S158, T164, S170, |
| (SEQ ID NO: | T208, S213, S103, T111, S130, T151, S214 |
| 107) | |
| O68438 | T788, T793, S790, T797, S792, S723, T759, T726, S680, |
| (SEQ ID NO: | S682, S547, S298, S712, C783 |
| 109) | |
| P26222 | S43, S115, S151, S154, S155, S180, S191, T217, T219, |
| (SEQ ID NO: | S220, S251, S266, T71, T250 |
| 110) | |
| P54583 | T133, S165, S251, T369, S246, S277, T326, T358, T361, |
| (SEQ ID NO: | S366 |
| 111) | |
| P77853 | S212, S158, S124, T113, T199, T52, S104, |
| (SEQ ID NO: | S112, S213, S35, T134, T145 |
| 104) | |
| O77044 | T356, S406, S363, S364, C348, S362, T303, S345, S379, |
| (SEQ ID NO: | S352, T376, S84, S325, T415 |
| 112) | |

### Example 2

### Xylanase Cloning, Expression, and Activity Assays

[0141] Wild type xylanases were cloned for expression in the lambda phage and E. coli screening systems. The nucleic acids coding for nine xylanases were PCR amplified with or without a 6 His-tag attached to the carboxy terminal (referred to herein also as the “C-terminal”) encoding sequence. These xylanases were the uncultured bacterium GH11 xylanase (accession number EU591743 (SEQ ID NO: 1924)), the Bacillus sp. NG-27 xylanase (accession number O30700 (SEQ ID NO: 106)), the Thermomyces lanuginosus xynA xylanase (accession number O43097 (SEQ ID NO: 107)), the Clostridium stercorarium xynA xylanase (accession number P33558 (SEQ ID NO: 1925)), the Clostridium thermocellum xynY xylanase (accession number PS1584 (SEQ ID NO: 105)), the Dictyoglomus thermophilum xynB xylanase (accession number P77853 (SEQ ID NO: 104)), the Clostridium stercorarium xynB xylanase (accession number P40942 (SEQ ID NO: 108)), the Erwinia chrysanthemi xylanase (accession number Q46961 (SEQ ID NO: 1926)), and the Thermotoga sp. xynA xylanase (accession number Q60044 (SEQ ID NO: 1927)). The PCR products were EcoRI/XhoI digested (37° C. for one hr), column purified (MinElute PCR purification kit, Qiagen), and ligated (4° C. for at least 40 hours or 12° C. for at least 12 hours) into a predigested lambda ZAP®II vector (Stratagene). The expression cassette in the λ ZAP®II vector is illustrated in FIG. 35 with a gene of interest represented by the gray box. Once the enzyme genes were ligated into the predigested vector, the vectors containing the enzyme genes were packaged into lambda phage (room temperature for 2 hr) with phage packaging extract (Stratagene). The recombinant phage were used to infect XL1-Blue MRF' E. coli cells (Stratagene) and plated out on NZY agar plates (described in the ZAP®-cDNA Gigapack III Gold Cloning Kit, Stratagene) containing 0.2% AZCL-xylan substrate (Megazyme). NZY agar plates include 10 g of NZ amine (casein hydrolysate), 5 g NaCl, 2 g MgSO₄*7H₂O, 5 g yeast extract, and 15 g agar per liter, pH adjusted to 7.5 with NaOH, and are sterilized in an autoclave as described by the vender (Stratagene). AZCL-xylan substrate (Megazyme) includes azurine-crosslinked xylan, which is hydrolyzed to release dye and yield a blue color. After overnight incubation at 37° C., plates were visually inspected for the development of blue color in and around phage plaques. Xylanase activity was scored as active or inactive based on the ability to hydrolyze the AZCL-xylan substrate and thereby develop a blue color in and around the phage plaque. Selected plaques were confirmed by PCR to contain the subject xylanase gene and replated on NZY agar plates containing 0.2% AZCL-xylan to confirm the xylanase enzymatic activity of the phage plaque.

[0142] Each xylanase-expressing phage isolate was amplified in XL1-Blue MRF' E. coli cells to generate high titer phage lysate, which was used in a second infection of XL1-Blue MRF' E. coli cells (Stratagene) in the presence of Isopropyl β-D-1-thiogalactopyranoside (IPTG, Dioxane free, 99% pure; available from Research Products International, Corp.) to induce xylanase expression. Aliquots of individual lysates were incubated at different temperatures ranging from 4° C. to 70° C. for up to four hours, and then cooled at 4° C. for at least two hours. Xylanase activity from each lysate was measured either by Enzchek® kit (Invitrogen™) or by adding AZCL-xylan substrate to 0.2% and incubation at 37° C. or 70° C. for 4 hrs.

[0143] Xylanase activity was compared on NZY agar plates containing AZCL-xylan and in liquid assays. P77853 gave the strongest activity with or without C-terminal His-tag, followed by PS1584, O43097 and O30700 on NZY agar plates supplemented with AZCL-xylan substrate. In all cases, the 6 His-tag suppressed at least some xylanase activity.

### Example 3

### Insertion of Inteins into Xylanases

[0144] Several inteins were inserted into a subset of the predicted sites, as set forth in Table 2, using a PCR approach. First, three pieces of DNA, “N” (for amino terminal or N-extein fragment) and “C” (for carboxy terminal or C-extein fragment) from a xylanase, and “I” (for intein) from an intein, were generated by PCR separately (Phusion™ Taq polymerase (New England Biolabs), following manufacturer's procedure). The intein fragment, I, was amplified so that it would have a 20 nucleotide overlap with the C-terminus of the N xylanase PCR fragment, and a 20 nucleotide overlapping region with N-terminus of the C xylanase PCR fragment. N, I, and C fragments were then assembled into a contiguous gene encoding an intein-modified enzyme, using a two step PCR (Accumprime™ Taq polymerase Pfx (Invitrogen)). As used herein, “NIC” represents the fusion of the N-terminal DNA fragment of the xylanase to the desired intein, which is also fused to the C-terminal DNA fragment of the xylanase. Although “NIC” is used in the context of an intein modified xylanase in this example, “NIC” can refer to the N-extein, intein, and C-extein contiguous sequence for any intein modified protein. A naming convention for the different constructs was adopted that follows the following format: (Target Enzyme)-(Intein)-(Insertion Site)-(Mutant Number); for example the Tth intein inserted into P77853 at S158 would be named P77853-Tth-S158. Likewise the Tth intein inserted into P77853 at T134 would be named P77853-Tth-T134. Mutants of either intein modified enzyme would then be named sequentially, with additional dashes; for example P77853-Tth-S158-1, P77853-Tth-S158-2, P77853-Tth-S158-3, P77853-Tth-S158-4, etc.

[0145] Generally, the first step in NIC assembly uses 100 ng each of N, I and C encoding nucleic acids in a master mix containing 1× buffer PCR reaction buffer, 200 μM of each dNTP, and 1 unit Pfx Taq polymerase in 12.5 μL with one cycle at 95° C. for two minutes, followed by five three-step thermal cycles of 95° C. for 20 seconds, 45° C. for one minute, and 68° C. for two minutes (alternatively three minutes may be used for longer genes), followed by a final PCR extension at 68° C. for 15 minutes. The second step is NIC amplification, where the master mix containing the assembled NIC is PCR amplified using 0.15 μM primers that hybridize to the 5′ and 3′ end of the assembled NIC DNA. The thermal cycle used in the second step uses one cycle at 95° C. for two minutes, followed by 27 three-step thermal cycles of 95° C. for 20 seconds, 58° C. for 30 seconds, and 68° C. for three minutes, followed by a final PCR extension at 68° C. for 15 minutes.

[0146] Assembled NIC genes, prepared as described above, were gel purified using a QIAquick Gel Extraction kit (Qiagen) and digested with EcoRI and XhoI (New England Biolabs), gel purified using a QIAquick Gel Extraction kit (Qiagen) and ligated with precut lambda ZAP®II vector (Stratagene) following the procedure set forth in example 2, above.

[0147] Products were plated on NZY agar plates containing 0.2% AZCL-xylan substrate, and the xylanase activity of the plaques was scored after overnight incubation at 37° C. The plates were then incubated for up to four hours at temperatures ranging from 37° C. to 70° C., and xylanase activity was scored for each plaque again. Based on the activity scores following the overnight incubation and the second incubation, each plaque was assigned a phenotype. Plaques that developed a blue color after the overnight incubation at 37° C. remained blue following the second incubation at an elevated temperature and were scored as permissive. Plaques that were inactive and did not develop a blue color following the overnight incubation at 37° C., but did develop a blue color following the second incubation at an elevated temperature were scored as switching. Plaques that were inactive after the overnight incubation at 37° C. and following the second incubation at an elevated temperature were scored as non-permissive. Based on agar plate phenotype of the intein modified xylanase bearing an intein at a specific site, the respective intein insertion was classified as permissive (intein insertion does not interfere with protein function, or intein is spliced during the overnight incubation at 37° C.), non-permissive (intein insertion interferes with protein function at all conditions tested) or switching (xylanase activity is observed following the four hour incubation at high temperature, but activity is not observed following the overnight incubation at 37° C.).

[0148] Individual plaques were picked from plates corresponding to each insertion site and excised as phagemid following the manufacture's protocol (Stratagene). Briefly, the lambda ZAP® II vector is designed to enable simple, efficient in vivo excision and recirculization of any cloned insert inside of the lambda vector to form a phagemid containing the cloned insert. To excise cloned inserts into a phagemid, isolated plaques are transferred to a sterile microcentrifuge tube containing 500 μL of SM buffer (Stratagene) and 20 μL of chloroform (Sigma). The tube is vortexed to release the phage particles into the SM buffer. The tube is incubated for at least one hour at room temperature or overnight at 4° C. After incubation, previously prepared XL1-Blue MRF′ (Stratagene) and SOLR™ (Stratagene) cells are centrifuged at 1000×g for several minutes. The pellets are resuspended in 25 ml of 10 mM MgSO₄ to an OD₆₀₀ of 1.0 (8×10⁸ cells/ml) in 10 mM MgSO₄. Once the cells are resuspended, 200 μL of XL1-Blue MRF' cells at an OD₆₀₀ of 1.0, 250 μL of the desired isolated phage stock (containing >1×10⁵ phage particles), and 1 μl of the ExAssist® (Stratagene) helper phage (>1×10⁶ pfu/μL) are placed into a 15 mL polypropylene tube. The tube is incubated at 37° C. for 15 minutes to allow the phage to attach to the cells. After the incubation, 3 mL of LB broth with supplements are added and the mixture is incubated for 2.5-3 hours at 37° C. with shaking. The mixture is then heated at 65-70° C. for 20 minutes to lyse the lambda phage particles and the cells. Following the lysis, the cell debris is pelleted by centrifuging the tube for 15 minutes at 1000×g. The supernatant is decanted into a new sterile tube. This supernatant contains the excised phagemid as filamentous phage particles. To plate the excised phagemids, 200 μL of freshly grown SOLR™ cells (OD₆₀₀=1.0) are mixed with 100 μL of the phage supernatant in a 1.5-mL microcentrifuge tube. This mixture is incubated at 37° C. for 15 minutes and then 200 μL of the cell mixture is spread on LB-ampicillin agar plates (100 μg/mL) and incubated overnight at 37° C. The resulting colonies contain the excised phagemid. Each phagemid contains an ampicillin resistance marker to support growth in ampicillin containing medium. After confirmation by PCR and DNA sequencing, phagemid clones were cultured in auto induction media (also referred to herein as AIM, obtained as Overnight Express™ Instant TB Medium, and is available from Novagen) overnight. Cells were lysed with FastBreak™ lysis buffer (Promega) and assayed for splicing by western blot.

[0149] Intein modified xylanases were analyzed for plaque phenotype on NZY agar plates, and for precursor accumulation and mature xylanase accumulation using a modified western blot procedure (described below in Example 5). A Psp-pol intein (SEQ ID NO: 3) was inserted into P77853 at positions S112 (SEQ ID NO: 1696) and S124 (SEQ ID NO: 1697), which were predicted as insertion sites in Example 1 (above). The plaque phenotype of these positions was scored as permissive for S112, and non-permissive for S124. On the western blot, S112 accumulated some precursor intein modified xylanase and some mature xylanase. S124 accumulated primarily precursor intein modified xylanase. In addition to the predicted sites, the Psp-pol intein was also inserted into several other sites. Among the other sites tested, S63 (SEQ ID NO: 1692), S86 (SEQ ID NO: 1694), S95 (SEQ ID NO: 1695), and S178 (SEQ ID NO: 1698) produced plaques that were scored as switching phenotypes with the Psp-pol intein. On the western blot, these sites accumulated precursor intein modified xylanase when unheated, and also mature xylanase following heat treatment of the phage lysate at 70° C.

[0150] A Tag intein (SEQ ID NO: 90) was inserted into P77853 at positions S112, T113, S124, T134, T145, S158, and T199, which were predicted as insertion sites in Example 1 (above). Plaques expressing the P77853 intein modified xylanase with the Tag intein were scored according to their phenotype as follows: S112 (non-permissive), T113 (non-permissive), S124 (non-permissive), T134 (permissive), T145 (switcher), S158 (non-permissive), and T199 (non-permissive). Precursor Tag intein modified xylanase accumulated for the S112, T113, S124, T134, T145, S158, and T199 insertions; however, only the T145 and T199 accumulated mature xylanase. Other cleavage products were observed on the western blot at other insertion sites.

[0151] A Tth intein (SEQ ID NO: 91) was inserted into the P77853 xylanase at positions S112, T113, S124, T134, T145, S158, and T199, which were predicted as insertion sites in Example 1 (above). The plaque phenotype of these positions was scored as follows: S112 (permissive), S124 (switcher), T113 (non-permissive), T134 (switcher), S158 (switcher), T145 (non-permissive), and T199 (non-permissive). On the western blot, some precursor intein modified xylanase accumulation was detected for S112, S124, T113, T134, S158, T145, and T199 insertion sites. Mature xylanase was detected on the western blot for S112, S124, T113, S158, and T145.

[0152] Mini-Psp-Pol inteins mPspM1L4 (SEQ ID NO: 7) and mPspM5L5 (SEQ ID NO: 36) were inserted into in the P77853 xylanase at the S112 insertion site, which was predicted as insertion sites in Example 1 (above). Plaques expressing the P77853 intein modified xylanase containing either mPspM1L4 or mPspM5L5 were scored as non-permissive phenotypes when inserted at S112, and were not analyzed by western blot. Likewise mini-Psp-Pol inteins mPspM1L4 (SEQ ID NO: 7), mPspM1L7 (SEQ ID NO: 10), mPspM2L5 (SEQ ID NO: 15), mPspM4L3 (SEQ ID NO: 27), mPspM5L2 (SEQ ID NO: 33), mPspM5L5 (SEQ ID NO: 36), and mPspM7L3 (SEQ ID NO: 48) generated non-permissive plaque phenotypes when inserted into the P77853 xylanase at S67. In contrast, these same inteins (mPspM1L4 (SEQ ID NO: 7), mPspM1L7 (SEQ ID NO: 10), mPspM2L5 (SEQ ID NO: 15), mPspM4L3 (SEQ ID NO: 27), mPspM5L2 (SEQ ID NO: 33), mPspM5L5 (SEQ ID NO: 36), and mPspM7L3 (SEQ ID NO: 48)) generated permissive plaques when inserted into the P77853 xylanase at S95 and S178.

[0153] A Psp-Pol intein (SEQ ID NO: 3) was inserted into the O30700 xylanase at positions S215, S314, and S357, which were predicted in Example 1 (above). The plaque phenotype of the Psp-pol intein inserted at these positions was scored non-permissive for S215 and S314, but permissive for S357. In contrast, when the mini Psp-Pol inteins mPspM1L4 (SEQ ID NO: 7), and mPspM3L5 (SEQ ID NO: 22) were inserted into the same sites, S314 was scored as permissive, while S215 and S357 were scored as non-permissive.

[0154] A Tth intein (SEQ ID NO: 91) was inserted into the O30700 xylanase at positions S95, T137, S215, T250, S358, S314, and S357, which were predicted in Example 1 (above). The plaque phenotype for phage expressing the O30700 xylanase with the Tth intein inserted was scored as: S95 (permissive), T137 (non-permissive), S215 (non-permissive), T250 (non-permissive), S314 (permissive), S357 (non-permissive), and S358 (permissive).

[0155] A Mth intein (SEQ ID NO: 2) and Tag intein (SEQ ID NO: 90) were separately fused to the C-terminus of the O30700 xylanase in individual experiments and the resulting intein modified proteins were active after overnight incubation at 37° C., indicating that C-terminal fusion with the Mth and Tag inteins was permissive with O30700.

[0156] A Tth intein (SEQ ID NO: 91) was inserted into the O43097 xylanase at positions S47, S50, S103, T111, T126, S130, T134, T151, T152, S158, T164, S170, T208, S213, and S214, which were predicted in Example 1 (above). Phage plaques expressing the Tth intein modified O43097 xylanase were scored for phenotype as follows: S47 (permissive), T134 (non-permissive), T151 (non-permissive), T152 (non-permissive), S158 (non-permissive), T164 (non-permissive), S170 (non-permissive), T208 (non-permissive), S213 (permissive), S214 (permissive). In the western blot analysis, the Tth intein modified O43097 xylanase precursor was observed for insertion sites S47, S50, S103, T111, S130, T164, S213, and S214, and mature O43097 xylanase was observed for S47, S50, S103, S213, and S214. Phage lysates from phage expressing the Tth intein modified O43097 xylanase at positions T126, T134, T152, S158 were not analyzed by western blot.

[0157] As shown above, inserting an intein at an insertion site predicted based on the method described herein may result in an intein modified protein that has a switching phenotype. But the method also leads to permissive candidates or non-permissive candidates that may or may not be cleaved or spliced. Further, intein insertion at sites other than those found by the method can result in a switching phenotype. The method, however, enriches the pool of candidates for insertion sites that are more likely to lead to a switching phenotype.

### Example 4

### Mutagenesis of Intein Modified Enzymes

[0158] Many different methods of protein mutagenesis exist in the art but as a non-limiting example, different specific strategies were used to generate variant intein modified enzymes, as presented below.

[0159] Random mutation was introduced into a xylanase, intein modified xylanase, or intein in the examples above using a Mutazyme® (Stratagene) mutagenesis kit. Each time a template DNA is amplified by the Mutazyme®, there is a certain probability that a mutation will be introduced in the newly synthesized DNA. In practice, mutation rates are achieved by varying the amount of template DNA and number of PCR cycles. The mutagenic PCR procedure herein was optimized to introduce 1-2 amino acid mutations per intein when modifying the whole cassette or the intein coding portion.

[0160] For whole cassette mutagenesis, five μg of phagemid NIC DNA was PCR amplified for 10 cycles using the GeneMorph® II Random Mutagenesis Kit (Stratagene) with M13 Forward and Reverse primers following manufacturer's protocol. Briefly, five μg of phagemid NIC DNA to be mutagenized is mixed with 1× buffer PCR reaction buffer, 200 μM of each dNTP, 0.15 μM primers complementary to the ends of the NIC DNA, and 2.5 units Mutazyme® II DNA polymerase in a 50 μL final volume and subjected to one cycle at 95° C. for two minutes, followed by 10 three-step thermal cycles of 95° C. for 20 seconds, 58° C. for 30 seconds, and 68° C. for three minutes (one minute per kilobase of template), followed by a final PCR extension at 68° C. for 15 minutes. The amplification step was followed by 10 cycles of PCR with cloning primers for each mutagenized NIC DNA using regular Taq polymerase. The Mutagenized NIC DNA library thus generated was gel purified using the QIAquick gel extraction kit (Qiagen), digested with EcoRI and XhoI (New England Biolabs), column purified with the MinElute PCR purification kit (Qiagen), ligated into ZAP® II vector (Stratagene), packaged in lambda phage, as described above, and plated out on NZY agar, as described above.

[0161] For intein mutagenesis, five μg of intein encoding plasmid DNA was PCR amplified for 10 cycles with intein end specific primers using the GeneMorph® II Mutagenesis kit (Stratagene) following the manufacturer's protocol. Briefly, five μg of intein DNA to be mutagenized is mixed with 1× buffer PCR reaction buffer, 200 μM of each dNTP, 0.15 μM intein end specific primers and 2.5 unit Mutazyme® II DNA polymerase in a 50 μL final volume and with one cycle at 95° C. for two minutes, followed by 10 three-step thermal cycles of 95° C. for 20 seconds, 58° C. for 30 seconds, and 68° C. for three minutes, followed by a final PCR extension at 68° C. for 15 minutes. The mutagenized intein library was then gel purified using the QIAquick gel extraction kit (Qiagen). Xylanase N-terminal and C-terminal fragments (N and C) were generated by PCR using regular Taq polymerase. A NIC DNA with wild type N and C and a mutagenized intein library, I, was assembled using the PCR procedure described above and cloned into ZAP® II vector for library screening on NZY agar plates as described above.

[0162] For intein mutagenesis, a synthetic mutagenesis library of the Tth intein (SEQ ID NO: 91) was also made. This library was designed so that every single amino acid substitution was present at least once at every position in the Tth intein. Once designed, the library was synthesized by Genscript. Xylanase N-terminal and C-terminal fragments (N and C) were generated by PCR using regular Taq polymerase. A NIC DNA with wild type N and C and the synthetic mutagenized Tth intein library, I, was assembled using the PCR procedure described above and cloned for library screening.

[0163] The following mutagenized libraries were created by these procedures:
[0164] 1. A whole cassette mutagenized library where the cassette containing mini-Psp Pol intein mPspM1L4 inserted in P77853 at the S67 site was mutagenized;
[0165] 2. an intein mutagenized library where the mutagenized mini-Psp Pol intein mPspM1L4 was inserted in P77853 at the S67 site;
[0166] 3. an intein mutagenized library where a mixture of mutagenized mini-Psp Pol intein mPspM1L4, mPspM2L5, mPspM3L5, mPspM4L3, mPspM5L5, mPspM5L2, and mPspM7L3 was inserted in P77853 at the S67 site;
[0167] 4. an intein mutagenized library where mutagenized mini-Psp Pol intein mPspM5L5 was inserted in P77853 at the S112 site;
[0168] 5. a whole cassette mutagenized library where the cassette containing the Tth intein inserted in P77853 at the T134 site was mutagenized;
[0169] 6. an intein mutagenized library where the mutagenized Tth was inserted in P77853 at the T134 site;
[0170] 7. an intein mutagenized library where the mutagenized Tth was inserted in P77853 at the S158 site; and
[0171] 8. an intein mutagenized library where the mutagenized mini-Psp Pol intein mPspM3L5 was inserted in O30700 at the S106, S215, S295, S314, S357 or S358 sites.

### Example 5

### Screening of Intein Modified Enzyme Libraries

[0172] The mutagenized libraries were screened and candidates were isolated, purified, and confirmed. Individual libraries were titrated to measure the titer (plaque forming unit or pfu per μl) by serial dilution in SM buffer (SM buffer can be prepared by mixing 5.8 g of NaCl, 2.0 g of MgSO₄*7H₂O, 50.0 mL of 1 M Tris-HCl (pH 7.5), 5.0 mL of 2% (w/v) gelatin into a final volume of one liter and sterilizing in an autoclave) and plating out on NZY plates. For insertion sites that were scored with a non-permissive phenotype, such as mini-Psp Pol intein mPspM1L4 in S67 site and 5112 site of P77853, or various sites in O30700, high density phage titers were used in screening. Up to 10,000 pfu were plated out with 500 μL of XL1-Blue MRF' cells (OD600=0.5) on a 15 cm plate. For libraries derived from intein modified enzymes (for example, libraries made from the insertion of the Tth intein at sites T134 and S158 in the P77853) that had a switching phenotype, 2000 pfu were screened per plate for libraries.

[0173] Each library was plated out on agar plates and incubated at 37° C. overnight. Plaques with blue halos were marked representing permissive phenotype mutations. Plates then went through a heat treatment series (50° for 2 hrs and then 70° C. for 2 hrs) to induce phenotype expression of the candidate phage plaques. Individual plaques were picked and diffused into 500 ul SM buffer. Serial dilutions in SM buffer were made and used to infect XL1-Blue MRF' cells, which were then plated onto NZY plates. Plates were incubated overnight at 37° C. and then 70° C. for 2 hrs. Plaque phenotypes were confirmed following incubation at both temperatures.

[0174] More than 500 intein modified P77853 xylanase candidates have been isolated, purified and phenotype confirmed. Among them about 100 include a mini-Psp Pol intein insertion at site S67, 70 include a M5L5 intein insertion at site S112, 250 include a Tth intein insertion at site T134, and 75 include a Tth intein insertion at site S158. For O30700 xylanase, about 50 picks went through plaque purification, phenotype confirmation and confirmation by PCR.

[0175] Phenotype-confirmed candidates were individually excised into phagemid following procedure described above. Most candidates were analyzed by enzyme assay. Candidates showing temperature-sensitive switching activity were analyzed by western blot assay (splicing) and DNA sequence analysis.

[0176] Enzyme assays for xylanase activity were conducted as follows: 1) Cultures were inoculated from a single colony containing an excised phagemid and grown overnight in 1 mL of Luria Broth (Luria Broth, LB, can be made by mixing 10 g of NaCl, 10 g of bacto-tryptone, and 5 g of bacto-yeast extract into a final volume of one liter, then adjusting the pH to 7.0 using 5 N NaOH, and sterilizing in an autoclave) supplemented with 100 mg/L ampicillin (AMP, obtained from Sigma) at 37° C. and 300 RPM. 2) 50 ul of cells were transferred to 5 mL of Overnight Express™ Instant TB medium (also called autoinduction medium, herein, or AIM, and is available from Novagen) and grown overnight at 30° C. and 250 RPM. 3) The cultures were centrifuged at 3000 RPM for 15 min. 4) The supernatant was removed and the cell pellets were resuspended in 200 μl lysis buffer (the lysis buffer contains 1× FastBreak Lysis Buffer™ (Promega), 200 mM Sodium Phosphate pH 6.5, and 0.2 μl DNase/mL). 5) The lysate was mixed thoroughly and a 1:10 dilution of the lysate was made in 200 mM Sodium Phosphate pH 6.5. And 6) 100 μl of each dilution was used for the activity assays, which were conducted on samples that were either exposed to splicing induction conditions, such as a heat pretreatment, or unexposed to induction conditions.

[0177] For Pretreatment (PT) assays, lysate samples were distributed into aliquots of equal volume, which were incubated at 37° C. or 55° C. for 4 hr, then cooled on ice. 20 μl 0.2% finely grounded AZCL substrate was then added and the samples were mixed well. Reactions were allowed to proceed at 37° C. for at least one hour, but sometimes as long as overnight. Depending upon the intein modified enzyme, and its respective mature enzyme, reaction times, temperatures, conditions, and substrates could vary.

[0178] For No Pretreatment (NPT) assays, samples were distributed into aliquots of equal volume and mixed with 20 μl 0.2% finely grounded AZCL substrate. Reactions were allowed to proceed at 37° C. and 70° C. for up to 6 hr. Depending upon the intein modified enzyme, and its respective mature enzyme, reaction times, temperatures, conditions, and substrates could vary.

[0179] In either the Pretreatement (PT) or No Pretreatment (NPT) assays, after the reaction time was complete the samples were vortexed and then centrifuged at 4,000 RPM for 7 minutes. From each sample, 50 μl of supernatant was used to measure the absorbance at 590 nm, which is an indication of how active an enzyme or intein modified enzyme was in the sample. Absorbance measurements were made either on a Thermo Scientific Spectrophotometer, or on a BioTek Synergy™ Multi-mode microplate reader in 96 or 384 well round bottom assay plates. If necessary, the samples were centrifuged again to make sure no cellular debris was picked up, and 5× or 10× dilutions in 200 mM Sodium Phosphate pH 6.5 were made when necessary.

[0180] Western blot analysis of candidate mutant intein modified enzymes was conducted as follows: 1) A 5 ml AIM culture as grown overnight at 30° C. and 250 RPM and then centrifuged at 3000 RPM for 15 min. 2) The supernatant was removed and the pelleted cells were resuspend in 200 μl of lysis buffer (see above). 3) The lysate was mixed thoroughly and a 1:50 dilution was made using 1× phosphate buffered solution (PBS can be prepared by mixing 137 mmol NaCl, 2.7 mmol KCl, 4.3 mmol of Na₂HPO₄, and 1.47 mmol of KH₂PO₄ in a final volume of one liter, adjusting the pH to 7.4 with 2N NaOH, and filter sterilizing the solution with a 0.22 micron filter), while the remaining unused sample were stored at −20° C. (a higher dilution may be required depending on expression levels and activities). 4) For each dilution, 50 μl of each dilution was transferred to a sterile centrifuge or PCR tube and heat treated in a 37° C. or 59° C. for 4 hours (the volume may vary depending on needs, but a minimum of 15-25 μl is recommended). 5) An equal volume of 2× loading buffer (2× loading buffer contains 62.5 mM Tris-Cl pH 6.8, 6M Urea, 10% glycerol, 2% SDS, 0.0125% bromophenol blue, and 5% BME) was added; 6) A Biotinylated ladder was prepared with equal volume of urea (the volume of ladder can be calculated by multiplying the number of gels to be used by 20 μl for an 18-well gel (Biorad), or by multiplying the number of gels to be used by 15 μl for a 26-well gel (Biorad)). 7) The samples were vortexed well and then loaded onto the gel (for an 18-well Biorad gel, 30 μl samples were loaded and for a 26-well Biorad gel, 20 μl samples were loaded). 8) The gel was run at 150-175V for 1 hr and then disassembled. 10) The gel was soaked in 1× Transfer (Towbin) Buffer (25 mM Tris base, 192 mM glycine, and 20% methanol) for 15 min. 11) A Whatman-PVDF (dipped in methanol)-gel-Whatman sandwich was assembled and sample was transferred by electroblotting at 15V and at less than 600 mA for 1 hr. 12) The blot was removed and placed in blocking solution containing 2% BSA in TBST (50 mM Tris-HCl, 150 mM NaCl, 0.1% Tween-20). 13) The blot was retained in the blocking solution overnight at 4° C. 14) Blocking solution was decanted and a primary antibody solution (1% BSA in TBST with 1:2,000 of primary antibody that recognizes the enzyme and intein modified enzyme being detected) was added. 15) The blot was washed with TBST 5 times for 5 minutes for each wash. 16) A secondary antibody solution (1% bovine serum albumin (BSA) in TBST with 1:20,000 horseradish peroxidase (HRP) antibiotin and 1:5,000 HRP anti rabbit secondary) was added and the blot was washed with TBST 5 times for 5 minutes each. 17) The blot was immersed in 20 μl of SuperSignal® West Pico Chemiluminescent Substrate (Pierce) for 5 min and then developed in a G:Box™ gel imaging system (Syngene) using successive snapshots, 20× at 1 mM intervals under Chemi setting.

[0181] DNA sequencing was done by routine methods in the art.

[0182] About 40 candidates from library (1) (mini-psp Pol intein mPspM1L4 in P77853 at S67 site, whole cassette mutagenized) were generated and analyzed on western blot and by DNA sequencing. Over fifty percent of the candidates sequenced had a stop codon in the C-extein, right in or after the linker sequence between the substrate binding domain and the catalytic domain. Whole cassette mutagenesis tended to create a large number of candidates with truncated P77853 protein lacking the entire carbohydrate binding domain, at the S67 insertion site. While spliced mature xylanase was observed in a few candidates (m25, m30), more candidates only had cleavage product (such as m3).

[0183] Intein mutagenesis was more efficient in creating amino acid substitutions. With the mutagenic PCR conditions tested, an average of 4 amino acid substitutions were observed in mini-psp Pol candidates, at both the S67 and S112 sites of P77853. These mutations led to precursor cleavage but not intein splicing in most mini-psp Pol candidates.

[0184] The Tth intein rendered P77853 intein modified xylanases temperature-sensitive on the NZY agar plate, in an enzyme assay and for accumulation of spliced product on western blot. Based on this result, Tth intein modified xylanase candidates were characterized further.

[0185] In order to accurately measure the temperature-sensitive switching and splicing activity of a large number of candidates, the optimum switching conditions (temperature and time) of these candidates was determined. First, a few candidates were tested for effect of heat pretreatment induction conditions on xylanase activity. It was found that 55° C. for 4 hours was the best from the series of temperatures tested (30° C., 37° C., 45° C., 55° C., 70° C.) and times tested (0.5 hr, 1 hr, 2 hr, 3 hr, 4 hr, 6 hr and 20 hrs). Several candidates were tested at a much smaller increment of temperature around 55° C. for 4 hours. 59° C. was found to be the optimum temperature for all Tth candidates tested using these conditions.

[0186] FIGS. 3A to 3L illustrate western blot data for Tth intein modified P77853, where the intein is inserted at either serine 158 (S158), or threonine 134 (T134) of the P77853 enzyme. The agar plate phenotype is denoted for each sample at the top of the lane. The agar plate phenotypes are given as “SW” for a switcher phenotype, TSP for a temperature sensitive switcher splicer phenotype, and P for a permissive phenotype.

[0187] FIG. 3A illustrates a western blot showing the P77853-Tth-S158-2 protein (SEQ ID NO: 1672), which had a switcher phenotype in the agar plate assay. FIG. 3B illustrates a western blot showing the P77853-Tth-S158-4 protein (SEQ ID NO: 1673), which also had a switcher phenotype in the agar plate assay. FIG. 3C illustrates a western blot showing the P77853-Tth-S158-7 protein (SEQ ID NO: 1674), which also had a switcher phenotype in the agar plate assay. FIG. 3D illustrates a western blot showing the P77853-Tth-S158-19 protein (SEQ ID NO: 1675), which had a temperature sensitive switcher splicer phenotype. FIG. 3E illustrates a western blot showing the P77853-Tth-S158-20 protein (SEQ ID NO: 1676), which had a permissive phenotype in the agar plate assay. FIG. 3F illustrates a western blot showing the P77853-Tth-S158-21 protein (SEQ ID NO: 1677), which had a switcher phenotype in the agar plate assay. FIG. 3G illustrates a western blot showing the P77853-Tth-S158-25 protein (SEQ ID NO: 1678), which had a temperature sensitive switcher splicer phenotype. FIG. 3H illustrates a western blot showing the P77853-Tth-S158-38 protein (SEQ ID NO: 1679), which had a temperature sensitive switcher splicer phenotype. FIG. 3I illustrates a western blot showing the P77853-Tth-S158-39 protein (SEQ ID NO: 1680), which had a temperature sensitive switcher splicer phenotype. FIG. 3J illustrates a western blot showing the P77853-Tth-S158-42 protein (SEQ ID NO: 1681), which had a temperature sensitive switcher splicer phenotype. FIG. 3K illustrates a western blot showing the P77853-Tth-S158-138 protein (SEQ ID NO: 1691), which had a temperature sensitive switcher splicer phenotype.

[0188] FIG. 3L illustrates a western blot showing the P77853-Tth-T134-1 protein (SEQ ID NO: 1629) (panel 1), P77853-Tth-T134-2 protein (SEQ ID NO: 1630) (panel 2), P77853-Tth-T134-3 protein (SEQ ID NO: 1631) (panel 3), P77853-Tth-T134-9 protein (SEQ ID NO: 1632) (panel 9), P77853-Tth-T134-91 protein (SEQ ID NO: 1644) (panel 91), P77853-Tth-T134-48 protein (SEQ ID NO: 38) (panel 48), P77853-Tth-T134-80 protein (SEQ ID NO: 1640) (panel 80), and P77853-Tth-T134-95 protein (SEQ ID NO: 1645) (panel 95) that were preheat treated at 37° C. (left lane in each of the before mentioned panels) and 70° C. (right lane in each of the before mentioned panels) for one hour. Also shown are lanes containing protein from the empty vector control (VCT) and wild-type P77853 protein (P77) that was preheat treated in the same manner. The phenotype of each protein is given above its corresponding lanes.

[0189] Based on both enzyme assay and western blot data in FIGS. 3A to 3L, incubation at temperatures between 55° C. and 70° C. for 4 hours increases intein splicing in many of the Tth intein modified P77853 xylanase candidates.

[0190] The T134 candidates with increased intein splicing on the western blot were tested in liquid assays using pretreatment at 37° C. or 59° C. pretreatment (PT) for four hours followed by a 12 hour reaction at 37° C. with substrate. Alternatively, each had no pretreatment (NPT) and a 5 hour reaction at either 37° C. or 70° C. was conducted. The results are tabulated in Table 3, below. Activity is quantified in an assay that measures the release of a dye from a labeled substrate and is expressed in arbitrary absorbance units, measured on a spectrophotometer or plate reader at a wavelength of 590 nm. The parenthetical percent in the 59° C. column indicates the fold activity change for 59° C. PT in comparison to 37° C. PT, which was calculated as Fold Change=([(activity after 59° C. PT)/(activity after 37° C. PT)]−1)×100. ND means not determined.

TABLE 3

| | | | | | Activity |
|---|---|---|---|---|---|
| | | Activity | Activity | | With |
| | | With | With 59° C. | Activity | NPT |
| Intein | | 37° C. PT | PT and | With NPT | and 70° |
| Modified | | and 37° C. | 37° C. | and 37° C. | C. |
| Protein | Sequence | Reaction | Reaction | Reaction | Reaction |
| T134-1 | SEQ ID NO: | 1.275 | 3.140 | 0.203 | 3.75 |
| | 1629 | | (146%) | | |
| T134-2 | SEQ ID NO: | 1.595 | 2.746 | 0.209 | 3.771 |
| | 1630 | | (72%) | | |
| T134-3 | SEQ ID NO: | 0.280 | 0.983 | 0.368 | 1.711 |
| | 1631 | | (251%) | | |
| T134-9 | SEQ ID NO: | ND | ND | ND | ND |
| | 1632 | | | | |
| T134-12 | SEQ ID NO: | 1.515 | 2.090 | 0.349 | 3.748 |
| | 1633 | | (38%) | | |
| T134-36 | SEQ ID NO: | 0.653 | 1.597 | 0.193 | 5.734 |
| | 1634 | | (144%) | | |
| T134-42 | SEQ ID NO: | 0.537 | 1.264 | 0.165 | 6.830 |
| | 1635 | | (134%) | | |
| T134-43 | SEQ ID NO: | 0.633 | 1.992 | 0.229 | 5.689 |
| | 1636 | | (215%) | | |
| T134-45 | SEQ ID NO: | 0.181 | 0.725 | 0.073 | 6.068 |
| | 1637 | | (301%) | | |
| T134-48 | SEQ ID NO: | 0.662 | 1.084 | 0.1625 | 1.494 |
| | 1638 | | (64%) | | |
| T134-49 | SEQ ID NO: | 8.516 | 10.11 | 2.800 | 14.38 |
| | 1639 | | (19%) | | |
| T134-80 | SEQ ID NO: | 0.064 | 0.522 | 0.039 | 0.935 |
| | 1640 | | (715%) | | |
| T134-82 | SEQ ID NO: | 0.492 | 1.292 | 0.168 | 3.256 |
| | 1641 | | (163%) | | |
| T134-83 | SEQ ID NO: | 1.149 | 3.933 | 0.358 | 7.648 |
| | 1642 | | (242%) | | |
| T134-89 | SEQ ID NO: | 1.543 | 2.017 | 0.291 | 10.66 |
| | 1643 | | (31%) | | |
| T134-91 | SEQ ID NO: | 1.033 | 1.761 | 0.185 | 2.180 |
| | 1644 | | (70.1%) | | |
| T134-95 | SEQ ID NO: | 1.131 | 1.870 | 0.212 | 3.595 |
| | 1645 | | (65%) | | |
| T134-98 | SEQ ID NO: | 1.795 | 2.648 | 0.450 | 3.793 |
| | 1646 | | (47%) | | |
| T134- | SEQ ID NO: | 0.564 | 1.210 | 0.177 | 5.718 |
| 100 | 1647 | | (115%) | | |
| T134- | SEQ ID NO: | 3.084 | 3.270 | 0.680 | 3.721 |
| 108 | 1648 | | (6%) | | |
| T134- | SEQ ID NO: | 2.325 | 2.899 | 0.475 | 3.704 |
| 110 | 1649 | | (25%) | | |
| T134- | SEQ ID NO: | 0.587 | 1.778 | 0.132 | 4.292 |
| 119 | 1650 | | (203%) | | |
| T134- | SEQ ID NO: | 0.381 | 1.136 | 0.097 | 3.824 |
| 121 | 1651 | | (199%) | | |
| T134- | SEQ ID NO: | 0.406 | 1.056 | 0.129 | 3.353 |
| 122 | 1652 | | (160%) | | |
| T134- | SEQ ID NO: | 2.303 | 2.647 | 0.740 | 8.686 |
| 144 | 1653 | | (15%) | | |
| T134- | SEQ ID NO: | 0.084 | 0.354 | 0.033 | 1.698 |
| 153 | 1654 | | (321%) | | |
| T134- | SEQ ID NO: | 0.093 | 0.188 | 0.023 | 0.908 |
| 167 | 1655 | | (103%) | | |
| T134 - | SEQ ID NO: | 0.030 | 0.361 | 0.035 | 0.257 |
| 168 | 1656 | | (1086%) | | |
| T134- | SEQ ID NO: | 0.911 | 1.572 | 0.198 | 1.883 |
| 173 | 1657 | | (73%) | | |
| T134- | SEQ ID NO: | 0.240 | 1.278 | 0.050 | 1.720 |
| 174 | 1658 | | (432%) | | |
| T134- | SEQ ID NO: | 0.448 | 1.220 | 0.127 | 1.587 |
| 175 | 1659 | | (172) | | |
| T134- | SEQ ID NO: | 0.982 | 1.516 | 0.177 | 2.806 |
| 180 | 1660 | | (54%) | | |
| T134- | SEQ ID NO: | 0.084 | 0.117 | 0.013 | 0.940 |
| 190 | 1661 | | (39%) | | |
| T134- | SEQ ID NO: | ND | ND | ND | ND |
| 191 | 1662 | | | | |
| T134- | SEQ ID NO: | 0.175 | 0.834 | 0.030 | 1.509 |
| 193 | 1663 | | (376%) | | |
| T134- | SEQ ID NO: | 0.116 | 0.868 | 0.098 | 2.992 |
| 194 | 1664 | | (649%) | | |
| T134- | SEQ ID NO: | 1.985 | 2.624 | 0.392 | 3.776 |
| 195 | 1665 | | (32%) | | |
| T134- | SEQ ID NO: | 1.692 | 2.472 | 0.329 | 3.772 |
| 218 | 1666 | | (46%) | | |
| T134- | SEQ ID NO: | 0.200 | 0.591 | 0.051 | 1.666 |
| 219 | 1667 | | (195%) | | |
| T134- | SEQ ID NO: | 0.005 | 0.076 | 0.008 | 0.020 |
| 225 | 1668 | | (1434%) | | |
| T134- | SEQ ID NO: | 0.020 | 0.033 | 0.012 | 0.090 |
| 238 | 1669 | | (64%) | | |
| T134- | SEQ ID NO: | 0.036 | 0.090 | 0.090 | 1.672 |
| 248 | 1670 | | (149%) | | |
| T134- | SEQ ID NO: | ND | ND | ND | ND |
| 249 | 1671 | | | | |

Additional T134 insertion site intein modified P77853 xylanases developed include those in SEQ ID NOS: 1711-1712.

[0191] Using the Pretreatment assay (PT) described above, the switching profile was analyzed for temperature induced xylanase reactivation of over 300 Tth intein modified P77853 xylanase candidates in E. coli SOLR™ cells (Stratagene). Xylanase activity data was collected for all samples with duplicates and with or without preheat treatment. For preheat treatment, one set of samples was incubated at 37° C. and another at 59° C., both for 4 hours. After cooling the samples on ice, AZCL-xylan substrate was added and the mixture was left at 37° C. for up to 12 hrs. AZCL-xylan substrate was added directly to another two sets of samples without being preheated, and set to react at 37° C. for 5 hrs. The results for the Tth S158 P77853 xylanase are presented in the Table 4, below. While 59° C. preheated samples always had improved activity in general, nearly a third of all Tth intein modified P77853 xylanase candidates demonstrated at least a 2-fold difference (increase) in activity between 37° C. and 59° C. preheat treatment. That is, the activity measured at 37° C. was often twice as high for samples that were preheat treated at 59° C. than for samples that were preheat treated at 37° C. These candidates were further analyzed on western blot. Activity is expressed in arbitrary absorbance units as measured on a plate reader at a wavelength of 590 nm. The parenthetical percent in the 59° C. column indicates the activity change for 59° C. PT in comparison to 37° C. PT, which was calculated as the Percent Fold Change=([(activity after 59° C. PT)/(activity after 37° C. PT)]−1)×100%. ND means not determined.

TABLE 4

| | | | | | Activ- |
|---|---|---|---|---|---|
| | | | | | ity |
| | | | | | With |
| | | Activity | Activity | | NPT |
| | | With 37° C. | With 59° C. | Activity | and |
| Intein | | PT and | PT and | With NPT | 70° C. |
| Modified | | 37° C. | 37° C. | and 37° C. | Reac- |
| Protein | Sequence | Reaction | Reaction | Reaction | tion |
| S158-2 | SEQ ID NO: | 1.046 | 2.475 | 0.189 | 3.751 |
| | 1672 | | (136%) | | |
| S158-4 | SEQ ID NO: | 1.108 | 2.795 | 0.212 | 3.714 |
| | 1673 | | (152%) | | |
| S158-7 | SEQ ID NO: | 0.447 | 0.9445 | 0.131 | 2.296 |
| | 1674 | | (111%) | | |
| S158-19 | SEQ ID NO: | 0.820 | 1.502 | 0.165 | 3.354 |
| | 1675 | | (83%) | | |
| S158-20 | SEQ ID NO: | 2.772 | 2.930 | 0.708 | 3.784 |
| | 1676 | | (6%) | | |
| S158-21 | SEQ ID NO: | 0.869 | 2.653 | 0.195 | 3.460 |
| | 1677 | | (205%) | | |
| S158-25 | SEQ ID NO: | 0.568 | 0.926 | 0.152 | 3.156 |
| | 1678 | | (63%) | | |
| S158-30 | SEQ ID NO: | 1.139 | 2.884 | 0.205 | 3.394 |
| | 1699 | | (153%) | | |
| S158-38 | SEQ ID NO: | 0.540 | 0.830 | 0.139 | 3.069 |
| | 1679 | | (54%) | | |
| S158-39 | SEQ ID NO: | 0.399 | 0.565 | 0.136 | 2.302 |
| | 1680 | | (42%) | | |
| S158-42 | SEQ ID NO: | 0.337 | 0.505 | 0.130 | 1.999 |
| | 1681 | | (50%) | | |
| S158-107 | SEQ ID NO: | 0.515 | 1.981 | 0.911 | 1.572 |
| | 1682 | | (285%) | | |
| S158-111 | SEQ ID NO: | 0.392 | 1.160 | 0.073 | 1.306 |
| | 1683 | | (196%) | | |
| S158-112 | SEQ ID NO: | 0.451 | 1.239 | 0.075 | 0.947 |
| | 1684 | | (175%) | | |
| S158-113 | SEQ ID NO: | 0.523 | 1.886 | 0.077 | 1.622 |
| | 1685 | | (257%) | | |
| S158-115 | SEQ ID NO: | 0.850 | 2.790 | 0.085 | 1.832 |
| | 1686 | | (288%) | | |
| S158-128 | SEQ ID NO: | 0.609 | 1.941 | 0.083 | 1.515 |
| | 1687 | | (219%) | | |
| S158-131 | SEQ ID NO: | 0.451 | 1.239 | 0.075 | 0.947 |
| | 1688 | | (175%) | | |
| S158-132 | SEQ ID NO: | 0.320 | 0.625 | 0.071 | 0.682 |
| | 1689 | | (95%) | | |
| S158-137 | SEQ ID NO: | 0.417 | 1.197 | 0.068 | 1.339 |
| | 1690 | | (187%) | | |
| S158-138 | SEQ ID NO: | 0.422 | 1.080 | 0.072 | 0.992 |
| | 1691 | | (156%) | | |

Additional S158 insertion site intein modified P77853 xylanases developed include those in SEQ ID NOS: 1700-1710.

[0192] A time course splicing assay was performed and splicing was checked on western blots for each of the intein-modified P77853 candidate samples with either the T134 insertion or S158 insertion in the tables above. FIG. 4A illustrates the time course splicing assay for the S158-19 sample. Protein extracts were incubated at 59° C. for six hours, with samples taken at the 0, 1, 2, 3, 4, and 6 hours, as labeled in FIG. 4A. The right hand side of FIG. 4A shows the empty expression vector control and the wild-type P77853 positive control, as well as molecular weight standards. For Tth intein modified P77853 xylanase candidate S158-19, which accumulated precursor protein to high level, a decreased intein modified enzyme precursor level is correlated directly with accumulation of spliced mature protein. This accumulation of spliced mature xylanase peaked at 4 Hrs. when samples were heat-treated at 59° C. However, splicing at 59° C. was observed over six hours. And splicing was observed at temperatures from 50° C. to 59° C. As time of incubation increased, the amount of NIC Tth intein-modified S158-19 P77853 decreases while the amount of P77853 increases, indicative of increased intein splicing as time progresses during the 59° C. incubation. Similarly, FIG. 4B illustrates a western blot analysis for S158-30-103 Tth intein-modified P77853 xylanase (SEQ ID NO: 1701). Protein samples were incubated at either 37° C., 50° C., 59° C., or 65° C. for different amounts of time (1, 2, 3, 4, and 6 hours) as indicated in FIG. 4B. The empty vector and wild-type P77853 control samples are shown on the far right along with a molecular weight ladder. FIG. 4B shows that as time and temperature increases, there is an increase in mature P77853 enzyme (NC) formation, while there is a decrease in Tth intein-modified S158-30-103 P77853 xylanase (NIC). Likewise, FIG. 4C illustrates a western blot analysis for T134-100-101 Tth intein-modified P77853 xylanase (SEQ ID NO: 1711). Protein samples were incubated at either 37° C., 50° C., 59° C., or 65° C. for different amounts of time (1, 2, 4, 6, and 17 hours). The empty vector and wild-type P77853 control samples are shown on the far right along with a molecular weight ladder. FIG. 4C shows that as time and temperature increases, there is an increase in wild-type P77853 formation (NC), while there is a decrease in the amount of Tth intein-modified S158-30-103 P77853 xylanase (NIC), indicative of increase intein splicing. This figure shows that as time and temperature increases, there is an increase in P77853 formation, while there is a decrease in the amount of Tth intein-modified S158-30-103, indicative of increase intein splicing.

[0193] Unlike the activity-based Pretreatment assay above, which provides quantitative measurement of enzyme reactivation upon preheat treatment, a western blot based splicing assay offers the advantage of a visual demonstration of splicing. About 90 intein modified enzyme candidates that performed well in the Pretreatment assay were analyzed on western blot. For each individual candidate analyzed, a splicing profile was established. A splicing profile consists of precursor level, precursor stability, spliced mature protein level, and cleavage product level, each at two temperatures (usually selected from room temperature, 25° C., 37° C., 50° C., 55° C., 59° C., 65° C., or other temperatures as desired). For some intein modified proteins, samples were taken over time during a heat pretreatment and western blotted to investigate the kinetics of splicing.

[0194] Mutations to amino acids capable of enhancing intein switching and splicing (DNA sequence data) were identified for some intein modified enzymes, as described below. These mutations were specific to the specific intein modified enzyme as defined by a single target protein, a single intein, and a single insertion site.

[0195] From the Tth intein modified P77853 xylanase candidates, switching candidates and TSP candidates were submitted for DNA sequencing, along with Tth intein modified P77853 xylanase candidates that demonstrated splicing in the western blot analysis. Amino acids both in the Tth intein and P77853 residues at the intein-extein junction were identified that are associated with enhanced switching and splicing. For candidates generated from the insertion of the Tth intein in P77853 at the T134 site of P77853, a Tth intein mutation from P71 (amino acid 71 of the Tth intein) to L, T, or Q (SEQ ID NOS: 1928, 1929, and 1930) is associated with a TSP phenotype. A P136 single insertion (+3 portion of the C-extein) was also associated with a TSP phenotype (SEQ ID NO: 1931). No combination of these mutations (P71 to L/T/Q, or insertion at P136) occurred in any of the TSP candidates that were sequenced. In the case of P136 insertion, there were additional mutations, most noticeably an S to V substitution at S135 site (+2 position of the C-extein (SEQ ID NO: 1932)). These double mutants were also classified as belonging to the TSP family. The remaining candidates from the 61 displayed a switching phenotype but temperature-sensitive splicing was difficult to detect.

[0196] Tth intein-modified P77853 xylanases, constructed by intein insertion at S158, were analyzed and different TSP constructs were identified. Seventeen R51G(S) (amino acid 51 of the Tth intein) substitutions in the Tth intein (SEQ ID NO: 91) were identified (SEQ ID NOS: 1675, 1678-1681, 1689, 1691, 1700-1708, and 1710) and all were associated with TSP. Sequencing data suggests that these intein mutations that correlate with the TSP phenotype play a role in the temperature exposure-dependent splicing of the Tth intein-modified P77853 xylanases when inserted at these specific locations. Additional evidence to support TSP element's role in splicing comes from structural analysis of the mutations on the surface of the intein. Both R51 and P71 of the Tth are predicted to be in close proximity to the intein-extein junction and therefore the active site for intein cleavage and splicing.

[0197] Summary of results from examples 1-5. One xylanase, P77853, was modified with an intein and analyzed as set forth above. Multiple P77853 mutagenized intein libraries were created by inserting a mutagenized intein into the enzyme. Multiple mutagenized inteins and multiple intein insertion sites were used to create the library. Each modified enzyme in the library had a single mutagenized intein inserted into a single insertion site. From about 10 million mutants in the library, 500 candidates were isolated. The candidates were analyzed by DNA sequencing, enzyme activity assay, temperature-sensitive changes in activity and splicing. It was established that preheat treatment at a temperature near 60° C. most often induces switching; i.e., activity changes, of the intein-modified enzyme. In some candidates, switching is correlated with intein splicing. It was also found that particular amino acid changes in inteins and exteins, particularly near the intein-extein junction are significant in enhancing intein splicing or temperature sensitivity. These amino acid changes are dependent upon the specific intein, target enzyme, and intein insertion site.

[0198] Inserting the Tth intein into P77853, which does not contain an intein in its native sequence resulted in TSP switching phenotypes as described in the examples above. The P77853 T134 site is located at the junction of a beta-sheet and a loop region and the SVM score ranks this in the top 5 highest probability splice sites. Additionally, increased splicing occurs with a mutation near the insertion site to introduce a +2 proline, which correlates to a higher SVM score. Inserting the Tth intein in the P77853 S158 site, which is the 7th closest site to the active site residues (only 6.6 angstroms away) and also occurs at the junction of a beta-sheet loop region, resulted in intein-modified candidates that were capable of temperature dependent splicing and both switching and TSP phenotypes.

[0199] Examples of intein modified xylanses are provided in SEQ ID NOS: 1629-1712.

### Example 6

[0200] Examples of Intein Modified Cellulases are Provided in SEQ ID NOS: 1713-1784.

### Example 7

### Cellulase Assays and Purification

[0201] The cellulase Ace1 (endoglucanase E1 from Acidothermus cellulolyticus 11B) is an endoglucanase (EC 3.2.1.4) from Acidothermus cellulolyticus (Genbank accession P54583). The enzyme has an N-terminal catalytic domain (CD) with homology to members of the glycosyl hydrolase 5 family of enzymes and a C-terminal cellulose binding domain with homology to the carbohydrate binding module 2 (CBM2) family of proteins. The CD and CBM2 domains in P54583 are joined by a serine-, threonine-, and proline-rich linker domain. P54583 has been expressed from heterologous systems, including plants, and has been shown to effectively hydrolyze plant-derived cellulosic material.

[0202] Expression and characterization of P54583. Referring to FIG. 5, plasmids pGAPZα and pAL410 are illustrated with cellulase inserts. The plasmids are not drawn to scale. In FIG. 5, the annotations have the following meaning: P-GAP, nominally constitutive yeast GAP promoter; alpha, secretion signal from yeast alpha mating factor, which is translated as an N-terminal fusion to the endoglucanase; P54583, coding sequence for Ace1 endoglucanase (see below); AOXt, transcriptional terminator and polyadenylation signal derived from the yeast AOX gene; P-TEF1, promoter from the yeast TEF1 gene; P-EM7, promoter derived from the yeast AM7 gene; zeo, coding sequence conferring zeocin resistance in yeast and E. coli; CYC1t, transcriptional terminator and polyadenylation signal derived from the yeast CYC1 gene; ColEI, region that enables replication of the plasmid in E. coli; f1 ori, sequence for generating single-stranded plasmid derivatives; KanMX, gene conferring resistance to G418 in yeast; 2u ori, 2 micron origin, enabling plasmid replication in yeast cells; bla, gene conferring ampicillin resistance in bacterial cells. Note that P54583 is expressed with C-terminal 6His and myc translational fusions from pGAPZα-P54583 and pAL410-P54583.

[0203] A codon-optimized version of P54583 was prepared. The DNA sequence of P54583 as optimized for expression in plants is shown below. Note: this sequence corresponds only to amino acid residues 42 through 562 of the native polypeptide in A. cellulolyticus, which corresponds to the “mature” form of the endoglucanase and lacks the signal peptide (amino acid residues 1 through 41). The GCT codon following the ATG start codon encodes amino acid 42.

Codon-optimized version of P54583
(SEQ ID NO: 1933)
ATGGCTGGAGGAGGATACTGGCACACTTCCGGCAGGGAGATCCTCG
ACGCAAATAACGTTCCAGTCAGAATCGCCGGGATTAATTGGTTTGG
CTTCGAAACGTGTAACTACGTGGTTCACGGCCTGTGGTCTCGGGAT
TACAGATCAATGCTCGACCAGATCAAATCCTTGGGGTATAATACAA
TTAGGCTGCCCTACAGCGATGACATTCTTAAGCCTGGAACCATGCC
GAACTCGATTAATTTCTACCAAATGAACCAGGATCTGCAGGGATTG
ACTTCTCTGCAGGTTATGGACAAGATCGTGGCGTACGCCGGCCAAA
TCGGGCTCAGAATTATTTTGGATCGGCACAGGCCAGACTGCTCAGG
TCAGTCGGCCCTGTGGTACACAAGCTCCGTGTCAGAGGCAACATGG
ATTTCAGATCTTCAAGCCCTCGCACAACGCTATAAAGGCAACCCCA
CGGTTGTGGGATTCGACCTTCACAACGAACCTCACGATCCGGCCTG
TTGGGGCTGCGGGGACCCTTCGATCGACTGGAGACTGGCAGCGGAG
AGGGCTGGTAACGCCGTTCTCAGCGTCAATCCCAACTTGCTGATCT
TTGTGGAGGGAGTTCAGTCCTACAACGGCGATTCTTACTGGTGGGG
CGGAAATCTCCAAGGCGCAGGGCAGTATCCTGTCGTGCTTAACGTT
CCGAATCGCCTGGTCTACTCAGCACACGACTACGCGACTAGCGTGT
ACCCACAGACGTGGTTCTCCGATCCCACATTTCCTAACAATATGCC
GGGAATCTGGAACAAGAATTGGGGTTACTTGTTTAACCAAAACATT
GCTCCAGTTTGGTTGGGTGAATTTGGCACCACTCTTCAGTCGACGA
CAGACCAAACCTGGCTGAAAACCCTCGTCCAGTATTTGCGGCCAAC
TGCTCAGTACGGAGCAGATTCTTTTCAATGGACGTTCTGGTCTTGG
AATCCTGACTCCGGGGATACAGGCGGTATCCTGAAAGACGATTGGC
AGACCGTGGACACTGTTAAGGACGGGTACTTGGCGCCGATTAAAAG
CTCGATCTTTGACCCAGTCGGCGCTAGCGCTTCCCCATCTTCACAA
CCTTCGCCGAGCGTCAGCCCCAGCCCAAGCCCAAGCCCGTCTGCCA
GCAGAACCCCCACTCCCACACCTACCCCCACGGCCTCACCAACTCC
GACGCTCACTCCTACGGCGACGCCAACACCAACTGCTTCACCCACT
CCTAGCCCCACCGCAGCGAGCGGGGCTAGGTGCACCGCTTCTTACC
AGGTCAACTCTGACTGGGGTAATGGCTTCACCGTGACTGTGGCGGT
CACTAACTCAGGAAGCGTCGCGACGAAAACCTGGACTGTGTCCTGG
ACGTTCGGGGGCAACCAAACAATCACCAACAGCTGGAACGCTGCAG
TTACGCAGAATGGGCAAAGCGTCACGGCGCGCAATATGAGCTACAA
CAACGTGATTCAACCAGGCCAGAATACCACATTCGGTTTTCAAGCA
AGCTATACCGGGTCAAACGCTGCCCCAACTGTCGCTTGTGCTGCCT
CA.

[0204] A DNA fragment carrying this sequence was ligated into the Pichia pastoris integrative expression vector pGAPZα (Invitrogen, Carlsbad Calif.), described above. pGAPZα is an integrative vector for transformation of P. pastoris GS115. The resulting plasmid, pGAPZα-P54583 (FIG. 5), was then introduced into P. pastoris GS115 cells according to the Invitrogen protocol. Recombinants were selected on the basis of zeocin resistance, and scored for their ability to mobilize the dye from AZCL-HE-cellulose (Megazyme International Ireland Ltd) on agar plates.

[0205] Pichia strains expressing either P54583, an unrelated endoglucanase from Trichoderma reesei (P07981 from glycosyl hydrolase family 7), or albumin were grown in rich media in the presence of zeocin. Supernatants were collected from these cultures and assayed for endoglucanase activity using the Cellazyme C assay (see below), in which endoglucanases release blue dye (AZCL) from a cellulosic substrate (Megazyme International Ireland, Ltd.). These assays demonstrated that the Pichia clones expressing P54583 produced approximately twice as much endoglucanase activity as did the clones expressing P07981. See FIG. 6. In FIG. 6, Blank is a sample containing uninoculated culture medium, and activity is expressed in cellulase units.

[0206] As mutagenesis might be more easily accomplished in S. cerevisiae, the coding sequence for P54583 was transferred from pGAPZα-P54583 to pAL410, producing the plasmid pAL410-P54583 (FIG. 5). pAL410 is an autonomously replicating vector for transformation of S. cerevisiae. S. cerevisiae strains carrying pAL410-P54583 plasmid or the negative control plasmid pAL410 were scored onto YPD agar plates containing 100 mg/L G418 and onto which an overlay of 0.2% AZCL-HE-cellulose (Megazyme) in 2% agar had been applied. Details of the plate activity assay are provided below. As shown in FIG. 7, two independent transformants carrying pAL410-P54583 and two carrying pAL410 were scored onto AZCL-HE-cellulose. Mobilization of the AZCL dye was clearly visible only in the vicinity of the clones that secreted active endoglucanase.

[0207] Measuring Activity of Endoglucanases and Intein-Modified Derivatives:

[0208] Plate Activity Assays. Activity assay plates were prepared by applying a thin layer of liquid agar containing 0.2% AZCL-HE cellulose substrate over YPD G418 100 mg/L selection plates. Once the plates were solidified, yeast cells containing genes of interest were plated on top of the substrate overlay. Cells were then grown at 30° C. Active endocellulase will mobilize AZCL dye and a blue halo will form in the surrounding media. This is a qualitative assay to evaluate activity from different host strains and constructs over varying temperatures and time frames. This can also be tested to see activity in intein modified P54583 derivatives.

[0209] Liquid Phase Activity Assays. The liquid assays allow for greater variation in assay and sample preparation conditions and give quantifiable results by absorbance readings on a spectrophotometer or plate reader. Assay conditions may vary for a wide range of pH, temperature, duration, and sample preparation. Sample preparation for this assay can include varied growth conditions, concentration or purification methods and pretreatments. This assay can be modified for measuring activity within the culture supernatants or cell pellets.

[0210] Cellazyme C tablet (Megazyme) substrate liquid assay. Cellazyme C tablets are pre-pelleted AZCL-HE cellulose substrate (Megazyme International Ireland, Ltd.). This assay gives results that correlate well with the plate assay. A standard Cellazyme C tablet assay is conducted as follows. Mix a protein sample from liquid culture with 25 mM NaOAc buffer pH4.5 to a final volume of 500 uL. Equilibrate samples to 42° C. for 5 minutes. Add 1 Cellazyme C tablet to each sample and incubate for 30 minutes at 42° C. To stop reaction, add 1 mL 20% tris base. Measure Abs590 in clear flat bottom plate on plate reader. Samples with more endocellulase activity will degrade the substrate more rapidly causing the Abs590 to increase. Using this assay, it was determined that P54583 activity is optimal around pH 5.0 and increases up to at least 70° C. Longer duration of assay time will give increased absorbance (590 nm) readings (FIGS. 8 and 9). As shown in FIG. 8, P54583 has increased activity at pH 4.5 to pH 8.0. However there is no significant activity above that of the negative control at pH 2.0. As shown in FIG. 9, the Cellazyme C assay can be used to demonstrate that P54583 activity increases with increased temperature, and the signal intensity (absorbance 590) increases with time.

[0211] PNP-C liquid assay. Activity from endoglucanases such as P54583 is also detectable with para-nitrophenyl-cellobioside (PNP-C) substrates. A standard PNP-C assay is a 50ulreaction including 5 mM PNP-C substrate, active enzyme and a buffer to control pH. This assay can be run over a wide range of pH, time, and temperature conditions. To stop the reaction and to amplify the signal intensity, 100 uL of sodium carbonate pH 10.5 is added at a given timepoint. Absorbance at 405 nm (Abs.₄₀₅) is measured on a spectrophotometric plate reader. An increase in activity will give a greater reading (FIG. 10). As shown in FIG. 10, a PNP-C assay of P54583 shows that enzyme activity increases with assay temperature.

[0212] Enzchek (Invitrogen) liquid assay. Enzchek is a synthetic, fluorometric substrate that is also useful for endoglucanase activity assays. A standard assay involving Enzchek substrate is as follows. Mix equal volumes of room temperature substrate with room temperature enzyme, buffered around pH 5.0, in black well plates (e.g., Corning 384-well black plates #3820) for fluorescence reading. Incubate at room temperature protected from light and measure fluorescence with 340/450 excitation/emission wavelengths. Fluorescence readings increase over time and with more concentrated samples. Readings can be taken without stopping the reaction as early as 5 minutes after the assay begins or after several hours of incubation for samples with low levels of activity. Stopping a reaction makes it possible to perform the reading after the same incubation time, which is useful when processing hundreds or thousands of samples. To stop a reaction, add an equal volume of 20% tris base. This causes an immediate increase in fluorescent reading, which appears consistent between all samples, and is stable for several hours. This activity assay is sensitive, reproducible and can be used for high throughput assays on a liquid handler. Standard liquid handler conditions may be set to 10u1 reactions using total culture, in Corning #3820 plates.

[0213] Selection of yeast host for expressing intein-modified endoglucanases. To test whether alternative yeast hosts might be more suitable for i) mutagenesis and ii) screening clones expressing intein-modified endoglucanases, the abilities of two yeast strains (INVSc-1 (Invitrogen, Carlsbad Calif.) and SCBJ (a.k.a. BJ5465, American Type Culture Collection, Manassas Va., Cat. No. 20829)) to take up foreign DNA were compared. Samples of plasmid DNA as either supercoiled or linearized DNA were prepared, and these DNAs were used to transform samples of each cell type with Zymo Research's EZ yeast transformation kit. Table 5, below, shows the relative transformation efficiency of two strains of S. cerevisiae. As shown, transformation efficiency was 100 fold higher with SCBJ than with INVSc1. SCBJ forms noticeable colonies sooner than do INVSc-1 cells.

TABLE 5

| Host | DNA | # of Colonies |
|---|---|---|
| SCBJ | 160 ng linear DNA | 5,000 |
| INVSc-1 | 160 ng linear DNA | 30 |
| SCBJ | Supercoiled plasmid | 7,000 |
| INVSc-1 | Supercoiled plasmid | 50 |

[0214] Pull down concentration and purification of endoglucanases expressed from yeasts. Common among many endoglucanases, P54583 possesses a C-terminal carbohydrate binding domain that tethers the enzyme to its crystalline substrate. Based on this feature, methods to pull down, and partially purify, endoglucanase with a carbohydrate analog were tested. Six equal aliquots from supernatants of cultures either expressing P54583 or carrying the negative control empty vector (pAL410, FIG. 5) were collected. Avicel™ (microcrystalline cellulose) was added to five aliquots (all but one aliquot, which was saved as the untreated sample). Then, all aliquots were rocked at room temperature for one hour. After incubation, the avicel was pelleted and supernatant was discarded. Four pellets were washed with elution buffers, as indicated in FIG. 11. The eluate was immediately transferred to clean tubes and brought to a neutral pH. The fifth avicel pellet did not receive an elution wash. Activity of all six aliquots was then measured with Cellazyme C tablets. As shown in FIG. 11, microcrystalline cellulose can be used to separate active cellulase out of culture samples. This is a simple, inexpensive, and rapid method for protein purification and concentration of supernatants and cell lysates. Enzyme can then be analyzed by western blot analysis or activity assayed directly from the Avicel™ or eluted to a lesser extent with a variety of buffers.

[0215] Immunological assays. P54583 can be detected directly via immunological assays such as western blots. FIG. 12 illustrates the results of a western blot. To conduct the assay, proteins were derived from either culture supernatants or lysates of cell pellets, then deglycosylated prior to electrophoresis. This assay shows that the majority of the detectable protein resides in the culture supernatant which suggests that an antibody-based affinity purification of the enzyme might be useful for protein concentration and purification.

### Example 8

### Intein Modification of P54583 Endoglucanase

[0216] P54583 intein insertion sites were identified by the method set forth in the detailed description. FIG. 13 depicts the relative positions of sites selected in P54583 for insertion of the Tth intein. Relative positions of the catalytic domain (GH5), the linker domain (narrow bar), and the carbohydrate binding module (CBM2) are shown. Two catalytic glutamates are conserved among members of the GH5 family. Numbering of the serine, threonine and cysteines residues shown are all relative to the “mature” form of the polypeptide as it would be secreted from S. cerevisiae following cleavage of the alpha signal peptide, except for C75 and C465, which are actually at position 35 and 425 relative to the cleavage site.

[0217] Coding sequences for the recombinant P54583 proteins were then assembled via an SOE PCR strategy (Horton R M, Hunt H D, Ho S N, Pullen J K, Pease L R. 1989. Engineering hybrid genes without the use of restriction enzymes: gene splicing by overlap extension. Gene. 77(1):61-8), which is incorporated herein in its entirety as if fully set forth) as depicted in FIG. 14. This strategy is similar to that used above in assembling intein-modified xylanase genes. Primers were designed to anneal to:
[0218] (A) the sequence encoding the alpha signal peptide in pAL410-P54583 (see FIG. 5);
[0219] (B) a region within the coding sequence for P54583 that is adjacent to the insertion site;
[0220] (C) the 5′ end of the coding sequence for the Tth intein;
[0221] (D) the 3′ end of the coding sequence for the Tth intein;
[0222] (E) a region within the coding sequence for P54583 that is adjacent to the insertion site (note this site does not overlap that covered by primer C); and
[0223] (F) a region within the CYC terminator sequence from pAL410 P54583.
   PCR1 employed primers A and B to assemble a short product that includes the coding sequences for a portion of the alpha signal factor as well as the N-terminal portion of the endoglucanase (P54583-N). The extreme 3′ end of PCR product 1 includes a short segment that is homologous to the extreme 5′ end of the Tth intein. PCR2 employs primers C and D to amplify the coding sequence of the Tth intein. PCR3 employs primers E and F to amplify the coding sequences for the C-terminal portion of the endoglucanase (P54583-C, which may include all or a portion of the catalytic domain as well as the carbohydrate binding module) along with the “C+1” amino acid, a short segment that is homologous to the extreme 5′ end of the Tth intein, and a portion of the CYC1 terminator (CYC1t) from pAL410 P54583. PCR products 1, 2, and 3 were then combined in a single PCR reaction. By virtue of their homology to the ends of the Tth intein, PCR products 1 and 3 will anneal to PCR product 2. DNA synthesis and amplification with the outermost primers (A and F) will lead to the assembly of the full-length product, as indicated at the bottom of the diagram. The final product is often referred to simply as a “NIC” (N-terminal fragment, an Intein, and a C-terminal fragment). This method may be used to construct an intein modified protein of any type at any insertion site by choosing appropriate primers. And the intein insertion sited can be selected as any amino acid in the protein by utilizing a natural nucleophilic amino acid at the zero position or mutating the amino acid at the zero position to be a nucleophilic amino acid. The nucleophilic amino acid can be a C, T, or S residue.

[0224] Typical cycling conditions for SOE PCR involved 20 μl reactions, with 10 μl of Phusion HF (New England Biolabs, Ipswich Mass.) DNA polymerase Master Mix, 4 μl of each primer (from a stock concentration of 1 μM) and 2 μl of the appropriate template, diluted to approximately 0.1-1 ng/μl. Thermal cycling was carried out as recommended by the manufacturers of Phusion HF DNA polymerase. After the initial round of PCR reactions, products were gel purified via the Wizard SV Gel and PCR Cleanup Kit (Promega, Madison, Wis.), and 1 μl from each first round product was mixed to assemble the second round (full-length) product in a subsequent PCR reaction, with conditions virtually identical to the first round, except that extension times were increased from 30 s to as much as 60 s.

[0225] To prepare any desired intein-modified P54583 derivative, PCR products can be prepared that are tailored for each intein insertion position. However, some of the components in this experimental setup are modular. For example, primers C and D can be used to prepare PCR product 2, which can then be used to assemble any of the planned recombinants. Similarly, primers A and F can be used to prepare PCR products 1 and 3, respectively, regardless of the insertion position. As such, only primers B and E are unique to a given intein insertion event. Table 6, below, lists the sequences (in 5′-3′ orientation) of the oligonucleotide primers that were used to assemble each of the intein-modified endoglucanases. While primers B and E are unique to each product, each contains a region that is homologous to the terminus of the Tth intein, as presented in the discussion of FIG. 14. This region is underlined in each primer sequence in Table 6.

TABLE 6

| Primer A | GCTGTTTTGCCATTTTCCAACAGCA |
|---|---|
| | (SEQ ID NO: 1934) |
| Primer C | TGCCTGGCCGAGGGCTCGCTCGTCTTGGACGCGGCTACCG |
| | (SEQ ID NO: 1935) |
| Primer D | GTTATGCACCACCAGGTCCTCGCTCACGAAGTTTGCAAAG |
| | (SEQ ID NO: 1936) |
| Primer F | CCCAAAACCTTCTCAAGCAAGGT |
| | (SEQ ID NO: 1937) |
| Insertion | |
| Site | Primer B |
| S10 | AGCGAGCCCTCGGCCAGGCAAGTGTGCCAGTATCCTCCTC |
| | (SEQ ID NO: 1938) |
| S56 | AGCGAGCCCTCGGCCAGGCATTTGATCTGGTCGAGCATTG |
| | (SEQ ID NO: 1939) |
| C75 | TCGGGTACCCTCGGCAAGGCACGTTTCGAAGCCAAACCA |
| | (SEQ ID NO: 1940) |
| T61 | AGCGAGCCCTCGGCCAGGCAATTATACCCCAAGGATTTGA |
| | (SEQ ID NO: 1941) |
| S67 | AGCGAGCCCTCGGCCAGGCAGTAGGGCAGCCTAATTGTAT |
| | (SEQ ID NO: 1942) |
| T93 | AGCGAGCCCTCGGCCAGGCACAATCCCTGCAGATCCTGGT |
| | (SEQ ID NO: 1943) |
| S94 | AGCGAGCCCTCGGCCAGGCAAGTCAATCCCTGCAGATCCT |
| | (SEQ ID NO: 1944) |
| S134 | AGCGAGCCCTCGGCCAGGCACACGGAGCTTGTGTACCACA |
| | (SEQ ID NO: 1945) |
| T154 | AGCGAGCCCTCGGCCAGGCAGGGGTTGCCTTTATAGCGTT |
| | (SEQ ID NO: 1946) |
| S192 | AGCGAGCCCTCGGCCAGGCAGAGAACGGCGTTACCAGCCC |
| | (SEQ ID NO: 1947) |
| S237 | AGCGAGCCCTCGGCCAGGCAGTAGACCAGGCGATTCGGAA |
| | (SEQ ID NO: 1948) |
| S290 | AGCGAGCCCTCGGCCAGGCACTGAAGAGTGGTGCCAAATT |
| | (SEQ ID NO: 1949) |
| S314 | AGCGAGCCCTCGGCCAGGCAATCTGCTCCGTACTGAGCAG |
| | (SEQ ID NO: 1950) |
| S321 | AGCGAGCCCTCGGCCAGGCACCAGAACGTCCATTGAAAAG |
| | (SEQ ID NO: 1951) |
| S353 | AGCGAGCCCTCGGCCAGGCATTTAATCGGCGCCAAGTACC |
| | (SEQ ID NO: 1952) |
| Insertion | |
| Site | Primer E |
| S10 | AGGACCTGGTGGTGCATAACTCCGGCAGGGAGATCCTCGA |
| | (SEQ ID NO: 1953) |
| S56 | AGGACCTGGTGGTGCATAACTCCTTGGGGTATAATACAAT |
| | (SEQ ID NO: 1954) |
| C75 | AGGGGTTGTCGTGCACAACTGTAACTACGTGGTTCACGGCCT |
| | (SEQ ID NO: 1955) |
| T61 | AGGACCTGGTGGTGCATAACACAATTAGGCTGCCCTACAG |
| | (SEQ ID NO: 1956) |
| S67 | AGGACCTGGTGGTGCATAACAGCGATGACATTCTTAAGCC |
| | (SEQ ID NO: 1957) |
| T93 | AGGACCTGGTGGTGCATAACACTTCTCTGCAGGTTATGGA |
| | (SEQ ID NO: 1958) |
| S94 | AGGACCTGGTGGTGCATAACTCTCTGCAGGTTATGGACAA |
| | (SEQ ID NO: 1959) |
| S134 | AGGACCTGGTGGTGCATAACTCAGAGGCAACATGGATTTC |
| | (SEQ ID NO: 1960) |
| T154 | AGGACCTGGTGGTGCATAACACGGTTGTGGGATTCGACCT |
| | (SEQ ID NO: 1961) |
| S192 | AGGACCTGGTGGTGCATAACAGCGTCAATCCCAACTTGCT |
| | (SEQ ID NO: 1962) |
| S237 | AGGACCTGGTGGTGCATAACTCAGCACACGACTACGCGAC |
| | (SEQ ID NO: 1963) |
| S290 | AGGACCTGGTGGTGCATAACTCGACGACAGACCAAACCTG |
| | (SEQ ID NO: 1964) |
| S314 | AGGACCTGGTGGTGCATAACTCTTTTCAATGGACGTTCTG |
| | (SEQ ID NO: 1965) |
| S321 | AGGACCTGGTGGTGCATAACTCTTGGAATCCTGACTCCGG |
| | (SEQ ID NO: 1966) |
| S353 | AGGACCTGGTGGTGCATAACAGCTCGATCTTTGACCCAGT |
| | (SEQ ID NO: 1967) |

[0226] Insertion of the Tth intein into the C75 position was accompanied by a small number of conservative amino acid changes near the intein/extein junctions. To accommodate these changes, the Tth intein (PCR2) that was used to assemble the C75Tth product was amplified with alternative forms of primers C and D as follows:

C_{C75Tth},
(SEQ ID NO: 1968)
5' TGCCTTGCCGAGGGTACCCGAGTCTTGGACGCGGCTACCGGGCA 3'
D_{C75Tth},
(SEQ ID NO: 1969)
5' GTTGTGCACGACAACCCCTTCGCTCACGAAGTTTGCAAAGGGT3'

[0227] The insertion sites listed in Table 2 are the same as those depicted in FIG. 13. A series of primers were also designed to insert the PspPol and RecA inteins into several positions within P54583. The strategy for inserting these inteins is identical to that described in reference to FIG. 14, except that the sequences of Primers B, C, D, and E are all tailored to the specific intein. The compositions of these primers are shown in Table 7 (primers used to assemble products encoding PspPol intein-modified P54583 endoglucanases) and Table 8 (primers used to assemble products encoding RecA intein-modified P54583 endoglucanases) below.

TABLE 7

| | |
|---|---|
| Primer | GCTGTTTTGCCATTTTCCAACAGCA |
| A | (SEQ ID NO: 1970) |
| Primer | AGCATTTTACCGGAAGAATGGGT |
| C | (SEQ ID NO: 1971) |
| Primer | ATTATGTGCATAGAGGAATCCA |
| D | (SEQ ID NO: 1972) |
| Primer | CCCAAAACCTTCTCAAGCAAGGT |
| F | (SEQ ID NO: 1973) |
| Inser- | Primer B |
| tion | |
| Site | |
| C75 | ACCCATTCTTCCGGTAAAATGCTCGTTTCGAAGCCAAACCA |
| | (SEQ ID NO: 1974) |
| S56 | ACCCATTCTTCCGGTAAAATGCTTTTGATCTGGTCGAGCATTGA |
| | (SEQ ID NO: 1975) |
| S94 | ACCCATTCTTCCGGTAAAATGCTAGTCAATCCCTGCAGATCCT |
| | (SEQ ID NO: 1976) |
| S237 | ACCCATTCTTCCGGTAAAATGCTGTAGACCAGGCGATTCGGA |
| | (SEQ ID NO: 1977) |
| S290 | ACCCATTCTTCCGGTAAAATGCTCTGAAGAGTGGTGCCAAATTCA |
| | (SEQ ID NO: 1978) |
| S353 | ACCCATTCTTCCGGTAAAATGCTTTTAATCGGCGCCAAGTAC |
| | CCGT |
| | (SEQ ID NO: 1979) |
| C465 | ACCCATTCTTCCGGTAAAATGCTCCTAGCCCCGCTCGCTGCGGT |
| | (SEQ ID NO: 1980) |
| Inser- | Primer E |
| tion | |
| Site | |
| C75 | TGGATTCCTCTATGCACATAATTGTAACTACGTGGTTCACGGCCT |
| | (SEQ ID NO: 1981) |
| S56 | ACCCATTCTTCCGGTAAAATGCTTTTGATCTGGTCGAGCATTGA |
| | (SEQ ID NO: 1975) |
| S94 | TGGATTCCTCTATGCACATAATTCTCTGCAGGTTATGGACAAGA |
| | TCGT |
| | (SEQ ID NO: 1983) |
| S237 | TGGATTCCTCTATGCACATAATTCAGCACACGACTACGCGA |
| | (SEQ ID NO: 1984) |
| S290 | TGGATTCCTCTATGCACATAATTCGACGACAGACCAAACCT |
| | (SEQ ID NO: 1985) |
| S353 | TGGATTCCTCTATGCACATAATAGCTCGATCTTTGACCCAGT |
| | (SEQ ID NO: 1986) |
| C465 | TGGATTCCTCTATGCACATAATTGCACCGCTTCTTACCAGGT |
| | (SEQ ID NO: 1987) |

TABLE 8

| | |
|---|---|
| Primer | GCTGTTTTGCCATTTTCCAACAGCA |
| A | (SEQ ID NO: 1988) |
| Primer | TGCCTTGCCGAGGGTACCCGAaTCTTCGA |
| C | (SEQ ID NO: 1989) |
| Primer | GTTGTGCACGACAACCCCTTCGGCGA |
| D | (SEQ ID NO: 1990) |
| Primer | CCCAAAACCTTCTCAAGCAAGGT |
| F | (SEQ ID NO: 1991) |
| Inser- | Primer B |
| tion | |
| Site | |
| C75 | TCGGGTACCCTCGGCAAGGCACGTTTCGAAGCCAAACCA |
| | (SEQ ID NO: 1992) |
| S56 | TCGGGTACCCTCGGCAAGGCATTTCATCTGGTCGAGCATTGA |
| | (SEQ ID NO: 1993) |
| S94 | TCGGGTACCCTCGGCAAGGCAAGTCAATCCCTGCAGATCCT |
| | (SEQ ID NO: 1994) |
| S237 | TCGGGTACCCTCGGCAAGGCAGTAGACCAGGCGATTCGGA |
| | (SEQ ID NO: 1995) |
| S290 | TCGGGTACCCTCGGCAAGGCACTGAAGAGTGGTGCCAAATTCA |
| | (SEQ ID NO: 1996) |
| S353 | TCGGGTACCCTCGGCAAGGCATTTAATCGGCGCCAAGTACCCGT |
| | (SEQ ID NO: 1997) |
| C465 | TCGGGTACCCTCGGCAAGGCACCTAGCCCCGCTCGCTGCGGT |
| | (SEQ ID NO: 1998) |
| Inser- | Primer E |
| tion | |
| Site | |
| C75 | AGGGGTTGTCGTGCACAACTGTAACTACGTGGTTCACGGCCT |
| | (SEQ ID NO: 1999) |
| S56 | AGGGGTTGTCGTGCACAACTCCTTGGGGTATAATACAATTAGGCT |
| | (SEQ ID NO: 2000) |
| S94 | AGGGGTTGTCGTGCACAACTCTCTGCAGGTTATGGACAAGATCGT |
| | (SEQ ID NO: 2001) |
| S237 | AGGGGTTGTCGTGCACAACTCAGCACACGACTACGCGA |
| | (SEQ ID NO: 2002) |
| S290 | AGGGGTTGTCGTGCACAACTCGACGACAGACCAAACCT |
| | (SEQ ID NO: 2003) |
| S353 | AGGGGTTGTCGTGCACAACAGCTCGATCTTTGACCCAGT |
| | (SEQ ID NO: 2004) |
| C465 | AGGGGTTGTCGTGCACAACTGCACCGCTTTCTTACCAGGT |
| | (SEQ ID NO: 2005) |

[0228] Using the above primers, SOE PCR reactions were carried out for all of the intein-modified endoglucanases that were designed. Full-length PCR products were then ligated into pCRBlunt II TOPO (Invitrogen) and individual clones were fully sequenced to ensure that no unintended base changes had occurred during PCR and/or cloning. In cases where mutations were discovered, all or parts of the affected PCR reactions were repeated and errors were corrected. Once the composition of a product encoding an intein modified P54583 was confirmed, the entire fragment was excised from the pCRBlunt II vector and ligated into pAL410 (or a related vector). The resulting vectors were subsequently introduced into yeast cells. Yeast transformants were typically verified via a combination of colony PCR and plasmid recovery via miniprep (using reagents from the ZymoPrep Yeast Miniprep Kit II, Zymo Research, Orange Calif.). Plasmids recovered from yeast cells were then re-introduced into E. coli cells, propagated, isolated via E. coli plasmid miniprep and examined via restriction enzyme digestion to determine whether the plasmids had suffered any mutations or rearrangement since their introduction into the original yeast cells. When fully verified plasmids were recovered in this manner, the corresponding yeast strain would be used in subsequent experiments involving the intein-modified endoglucanase.

[0229] S. cerevisiae transformants carrying expression vectors for intein modified endoglucanases were then scored onto parallel YPD plates (A and B) containing 100 mg/L G418 onto which an overlay of 0.2% AZCL-HE-cellulose had been applied. These plates were incubated for 2 nights at 30° C. Then plate B was moved to 70° C. for several hours. FIG. 15 shows plates A and B and in respective order, streaks 1-21 are P54583 T154Tth, P54583 S135Tth, P54583 S134Tth, P54583 S96Tth, P54583 S94Tth, P54583 T93Tth, P54583 C75Tth, P54583 S67Tth, P54583 T61Tth, P54583 S56Tth, P54583 S10Tth, P54583-Wild Type, pAL410 empty vector, P54583 S393Tth, P54583 S353Tth, P54583 S330Tth, P54583 S321Tth, P54583 S314Tth, P54583 S277Tth, P54583 S237Tth, and P54583 S192, which have the sequences of SEQ ID NOS: 1753-1758, 1741, 1759, 1760, 1739, 1761, 111, 2006, 1762-1767, 1743 and 1742, respectively. Blue halos appear around some of the cells, indicating the presence of P54583 activity. Results from this experiment suggested that insertion of the Tth intein disrupts P54583 to varying degrees, depending on the insertion site, and that one or more of these intein-modified endoglucanases displays temperature-sensitive enzyme activity.

[0230] Inserting Tth intein into P54583 wild type has an effect on the enzyme expression and activity levels, which can be measured by western analysis and activity assays. An Enzchek activity assay was run on 20 P54583 NICs with controls. The 20 NICS had the Tth intein inserted in the S10, S56, T61, S67, (C75), T93, S94, (S96), S134, (S135), T154, S192, S237, S290, S314, S321, S353, and (S393) positions. These 20 NICS have the sequence of (SEQ ID NOS: 1761, 1739, 1760, 1759, 1741, 1758, 1757, 1756, 1755, 1754, 1753, 1742, 1743, 1768, 1766, 1765, 1763, and 1762). Culture supernatant was divided into aliquots. Half of these aliquots were subjected to heating pretreatment at 52.5° C. for 6 hours while the other half were stored at 4° C. Temperature and duration of pretreatment may vary. These samples were then equilibrated to room temperature and subjected to an Enzchek assay (3 hour incubation time with the substrate). At the end of the assay, endoglucanase activity was inferred from the amount of fluorescence in each sample. As shown in FIG. 16, the Enzchek activity assay revealed that a subset of the intein-modified endoglucanases produce enzyme activity above the background (pAL410, empty vector control), and that a portion of these show higher activity still when pre-incubated at 52.5° C. In FIG. 16, wt means wild type P54583 endoglucanase. Because of the difference in numbering used among constructs (reflecting either the immature or the mature form of P54583 lacking its signal peptide) the amino acid position of the insertion site relative to the immature form is presented in parentheses for a subset of the NICs.

[0231] The constructs described in FIG. 16 contain a His tag on the carboxyl end which can be detected by a His tag antibody. Supernatants from corresponding cultures were concentrated 20-fold, and used in western blot assays (FIG. 17). In FIG. 17, wt indicates the P54583 wild type, pAL410 indicates the empty vector with the His antibody (Genscript, Piscataway N.J.), and mature spliced protein appears as a 60 kDa band. An additional Tth intein modified P54583, C465 (SEQ ID NO: 1769) was also assayed by western blot, as shown in FIG. 17. Lanes marked with an asterisk also show significant activity on plate assay (See FIG. 15). Western blots showed that proteins with molecular weights similar to that of the wild type enzyme could be detected in cultures expressing intein-modified enzymes, suggesting that intein splicing is occurring in the recombinant proteins. Higher molecular weight species could also be detected in several samples, which may correspond to unspliced NICs, splicing intermediates, aggregates, or other forms of the recombinant proteins. The NICs showed varying levels of protein accumulation, which corresponds to the activity measurements presented in FIG. 16 to some extent.

### Example 9

### Mutagenesis of Intein Modified Endoglucanases

[0232] Homologous recombination has been used to generate tremendous diversity among DNA libraries in S. cerevisiae (Swers J S, Kellogg B A, Wittrup K D. 2004, Shuffled antibody libraries created by in vivo homologous recombination and yeast surface display, Nucleic Acids Res. 32:e36, which is incorporated by reference herein in its entirety as if fully set forth). In this system, linear DNAs carrying the coding sequences for polypeptides that have been generated can be inserted into linearized expression vectors by co-transformation into yeast. Error-prone PCR or other strategies can be used to mutagenize all of an intein-modified endonuclease or portions thereof (e.g., the intein). The resulting products can be co-transformed into S. cerevisiae cells along with a suitable linearized expression vector (e.g., pAL410 or a derivative thereof), which will catalyze homologous recombination between the molecules and give rise to collections of several thousand yeast clones, each carrying a unique recombinant expression vector. Yeast colonies that arise from such an in vivo recombination protocol can thus express a variety of modified proteins whose diversity is directly related to (or even greater than) the level to which the coding sequence has been mutagenized.

[0233] A series of recombination vectors for use in yeast in vivo recombination were developed. The recombination vectors each carry a truncated version of the Tth intein. The truncated Tth inteins lack most of the intein sequence, retaining only 70-80 by from each of the 5′ and 3′ ends of the intein coding sequence. At the center of this DNA sequence is a unique EcoRV recognition site. The DNA sequence of the truncated Tth is shown below, with the EcoRV site underlined.

(SEQ ID NO: 2007)
TGCCTGGCCGAGGGCTCGCTCGTCTTGGACGCGGCTACCGGGCAGAG
GGTCCCTATCGAAAAGGTGCGTCCGGGGATATCGAACCGGCCGGTAA
GGCGAGAACATTCGACTTGCGCGTTCCACCCTTTGCAAACTTCGTGA
GCGAGGACCTGGTGGTGCATAAC

[0234] Expression vectors that carry such a truncated intein can be easily linearized via EcoRV digestion. Since such vectors lack most of the “wild type” intein sequence, the expression vectors that arise during homologous recombination in yeast are more likely to carry the mutations generated during error-prone PCR since there is less “wild type” intein to compete with the mutants during recombination. Furthermore, the use of this truncated intein in the recombination vector provides the added benefit of decreasing the number of false positives that might arise due to vector self-ligation in a high throughput screening regime. Because of the nature of the truncation, the truncated inteins introduce a frameshift into the endoglucanase gene, resulting in an enzyme whose translation would be prematurely terminated. Such translation products are less likely to be enzymatically active. As such, functional enzymes that arise during screening of libraries are more likely to result from true recombination events involving DNA fragments encoding mutagenized inteins.

[0235] Using a strategy similar to that described in reference to FIG. 14, expression vectors derived from pAL410-P54583noHis were prepared. In these expression vectors, the truncated Tth intein sequence was introduced in place of the full-length inteins in either the S56, C75, S192, or S237 positions. This collection of recombination vectors was then used to generate libraries of mutagenized intein-modified endoglucanases in yeast SCBJ cells. Referring to FIGS. 18A-C, a PCR intein mutagenesis scheme is illustrated. Primers (e.g., S237up and S237down) flanking the intein insertion site in the template expression vector (pAL410-P54583noHis S237Tth (FIG. 18A)) can be used to amplify a specific region of the recombinant vector that contains the entire intein coding sequence as well as portions of the flanking extein coding sequences. Alternatively, primers that amplify only intein sequences can be used. Under appropriate conditions, PCR products were generated with random mutations scattered among the collection of amplified DNA molecules (stars). These mutagenized DNA molecules can be mixed with an appropriate vector, as shown in FIG. 18C that has been linearized via digestion with EcoRV restriction endonuclease. The mixture can then be introduced into yeast cells to drive recombination. In the example above, the DNA molecules depicted in (B) would be used to create a library of mutagenized inteins in the S237 position using linearized pAL410-P54583noHis S237Tth-trunc as the vector. Primers tailored for the S56, C75, or S192 positions can similarly be used in conjunction with the respective recombination vectors depicted in FIG. 18C. Such a strategy permits the inclusion of DNA molecules that carry mutations in the flanking regions of the extein (in this example, a endoglucanase) as well as within the intein. However, if PCR primers are used that amplify only intein sequences during error prone-PCR, then any of the recombination vectors can be used to host the altered intein coding sequences. In FIG. 18A, P54583-N and P54583-C refer to the coding sequences for the N and C-terminal portions of the endoglucanase. In FIG. 18B, P54583* refers to small flanking portions derived from the endoglucanase coding sequences that can be included in the mutagenized PCR product with judiciously designed primers. In FIG. 18C, TthN and TthC denote the N- and C-terminal portions of the Tth coding sequence that are separated by the EcoRV site in the truncated intein. Other abbreviations are as described in reference to FIG. 5.

### Example 10

### P54583 Modified with Mini-Inteins

[0236] Based on initial plate and liquid activity assays, a subset of the insertion sites described above were chosen to modify with an additional eight mini Tth inteins, which are mTth001 (SEQ ID NO:92), mTTh002(SEQ ID NO:93), mTth003(SEQ ID NO:94), mTth004(SEQ ID NO:95), mTth005(SEQ ID NO:96), mTth007(SEQ ID NO:98), mTth008(SEQ ID NO:99), and mTth010(SEQ ID NO:101). One intein was inserted per construct. The S56 position in P54583 was the initial site chosen for modification with mini-inteins. In a single yeast in vivo recombination reaction, the mini-Tth inteins were inserted into this position. Following recovery and growth of the yeast on YPD G418 plates, 36 separate colonies were cultured for activity assay. Two of the 36 expressed activity above baseline levels. Plasmids were recovered from these two strains and subjected to DNA sequence analysis. Both samples were found to carry the mTth010 mini-intein. The DNA sequence of the MTth010 mini-intein is shown below with the corresponding amino acid sequence beneath:

| mTth010 | |
|---|---|
| tgcctggccgagggctcgctcgtcttggacgcggctaccgggcagagggtccctatcgaa | (SEQ ID NO: 2008) |
| C L A E G S L V L D A A T G Q R V P I E | (SEQ ID NO: 101) |
| aaggtgcgtccggggatggaagttttctccttgggacctgattacagactgtatcgggtg | |
| K V R P G M E V F S L G P D Y R L Y R V | |
| cccgttttggaggtccttgagagcggggttagggaagttgtgcgcctcagaactcggtca | |
| P V L E V L E S G V R E V V R L R T R S | |
| gggagaacgctggtgttgacaccagatcacccgcttttgacccccgaaggttggaaacct | |
| G R T L V L T P D H P L L T P E G W K P | |
| ctttgtgacctcccgcttggaactccaattgcagtcagagatgttgagactggagaggtt | |
| L C D L P L G T P I A V R D V E T G E V | |
| ctctgggaccctattgttgctgtcgaaccggccggtaaggcgagaacattcgacttgcgc | |
| L W D P I V A V E P A G K A R T F D L R | |
| gttccaccctttgcaaacttcgtgagcgaggacctggtggtgcataac | |
| V P P F A N F V S E D L V V H N | |

[0237] To test whether the endoglucanase activity of the P54583 derivative carrying this mini-intein (a.k.a. “P54583 S56 mTth010”) was dependent upon the ability of the mini-intein to splice, a modified version of the construct was prepared. In the modified version, the terminal amino acids of the intein (the cysteine residue at the N-terminus and the asparagine residue at the C-terminus; see the sequence above) were replaced with alanines. The N-terminal cysteine and the C-terminal asparagine likely play critical roles in catalyzing intein splicing, and substitutions of these residues with alanine are either known to or are likely to prevent intein splicing. Referring to FIG. 19, samples were removed from SCBJ yeast cultures carrying either the empty expression vector, pAL410 (negative control), an expression vector encoding the uninterrupted enzyme, P54583 (wt), an expression vector encoding a derivative carrying the mini-intein in the S56 position, P54583 S56Tth139, or an expression vector encoding a derivative carrying the crippled mini-intein in the S56 position, P54583 S56AThA139. The samples were assayed for endoglucanase activity via a four hour incubation at room temperature in the Enzchek assay. Unlike the mini-intein, the crippled intein reduces endoglucanase activity nearly to the level of the negative control. This trend was consistent regardless of whether the samples had been pre-incubated at low (4° C.) or high (55° C.) temperatures for 6 hours prior to the assay. From this, it was concluded that the inability to splice a mini-intein in the S56 position of P54583 will disrupt enzyme activity, while a splicing-competent mini-intein in the same position will permit reconstitution of much of the enzyme's native activity.

[0238] To investigate whether the mini-intein in this position showed temperature-sensitive splicing, that is, whether pre-incubation of the recombinant enzyme at particular temperatures reconstituted different amounts of endoglucanase activity, samples from a single culture of SCBJ yeast cells expressing P54583 S56MTth010 (a.k.a. P54583 S56Tth139) were pre-incubated six hours at various temperatures. After this period, the samples were cooled uniformly to 4° C. and then subjected to the standard Enzchek assay (room temperature incubation with substrate). Referring to FIG. 20, preincubation temperatures as high as 46.6° C. reconstituted no more activity than did preincubation at 4° C. However, preincubation of the enzyme for 6 hours at 50.8-53.6° C. led to modest increases in enzyme activity. At higher temperatures, the endoglucanase activity appeared to drop below the levels attained by enzymes that had not been heated above 4° C. At least in part this decrease in apparent activity may be due to the loss of a background “endoglucanase-like” activity that can be detected in yeast culture supernatants. The background activity is heat labile at such elevated temperatures. When total endoglucanase activity is slow (as in this particular experiment), the effect of this background activity can be significant. To some extent, the effect of this phenomenon can be seen in the data depicted in FIG. 19 where the endoglucanase “activity” of the negative control s ample (pAL410) appears to decrease when the culture is preincubated at 55° C. prior to the assay. FIG. 20 shows that a temperature between 50.8° C. and 53.6° C. leads to the reconstitution of the greatest amount of activity from this recombinant enzyme.

[0239] Eight mini-inteins were introduced into the S237 position of P54583. The eight mini-inteins had the sequence of SEQ ID NOS: 2009-2016, respectively. One intein was inserted per construct. The mini-inteins were introduced into the S237 position via in vivo recombination. Candidate recombinant yeast colonies were recovered in each case, and the plasmids that each carried were isolated and tested via DNA sequencing to confirm whether the gene responsible for the intein-modified endoglucanase was intact, and lacking point mutations or other changes. Once a yeast strain had been identified for each of the mini-intein-modified endoglucanases, the entire set was subjected to endoglucanase assays. Strains carrying the mTth010 mini-intein demonstrated clear endoglucanase activity. As shown in FIG. 21, this intein-modified endoglucanase also showed an optimum induction temperature near 52.5° C. Preincubation of the enzyme for 6 hours at 50.8-53.6° C. led to an increase in enzyme activity of approximately 75%. Assays were carried out at room temperature for 1 hour using the Enzchek substrate. Additional P54583-mTth010-S237 intein modified proteins that were isolated and showed improved activity levels are given as SEQ ID NOS: 1751, 1752.

[0240] Having shown that mTth010 activity could be recovered from the P54583 S237MTth010 intein-modified endoglucanase by pre-incubation at approximately 52.5° C., it was then tested whether the length of this pre-incubation step influenced enzyme activity. Four separate colonies from a culture of SCBJ (pAL410 P54583noHis S237Tth139) were cultured independently in a rich medium. Aliquots were sampled from each culture, split into multiple samples, and each split sample pre-incubated for different lengths of time at 52.5° C. as follows: 0 hours (not heated, pre-incubated only at 4° C.), 2 hours, 4 hours, 6 hours, 8 hours, or 10 hours. Following the pre-incubation step, individual split samples were stored at 4° C. until assays were carried out. Each split sample was then assayed via the Enzchek assay at room temperature. As shown in FIG. 22, three of the four cultures tested achieved their highest level of activation within 2-4 hours. Longer pre-incubation times either did not improve enzyme activation or caused a decrease in the amount of activity recovered.

### Example 11

### Mutagenesis and Screening of Intein-Modified Endoglucanases

[0241] Using the strategies outlined in reference to FIG. 18, error-prone PCR was used to create collections (libraries) of mutants carrying base pair alterations in the DNA encoding the inteins and adjacent portions of the endoglucanase. Libraries were prepared that are derivatives of both full-length and mini-inteins in each of several positions in P54583, including the S56, C75, S192, and S237 positions. Yeast clones from each library were collected for preliminary analysis. Colony PCR (Using KAPA2G Robust Taq from KAPA Biosystems, Waltham Mass.) was used to amplify the portion of the endoglucanase-encoding gene that included the mutagenized intein in each case. These PCR products were then subjected to DNA sequencing to assess the frequency and nature of the mutations in the library.

[0242] Following the initial assessment of mutation frequencies, clones from an individual library were spread onto selective media (YPD agar supplemented with 100 mg/L G418) and grown at 30° C. for 2-3 days. 3760 colonies were picked from these plates, along with a number of positive [SCBJ(pAL410 P54583noHis)] and negative [(SCBJ(pAL410)] controls, and inoculated into 1 ml volumes of YPD liquid medium supplemented with 100 mg/L G418 that had been dispensed into deep, 96-well plates. These cultures were then incubated for 3 days with vigorous shaking at 30° C. Aliquots were then removed from each of the liquid cultures, divided into replicate samples, and subjected to the Enzchek assay. For each culture, a portion of the replicate samples were pre-incubated at 52.5° C. for 4 hours, while the remainder were incubated at room temperature. Afterward, all replicate samples were equilibrated to room temperature, and split into triplicate samples prior to mixing with the Enzchek substrate. After 90 minutes, the endoglucanase reaction was halted by the addition of an equal volume of 20% tris base, and total fluorescence units were measured. The degree of heat-sensitive enzyme activation was inferred from the difference in activity measured from the heated and unheated treatments for each sample. The difference in activity that each clone displayed across the two pretreatment conditions was then calculated as a fold induction where 1-fold denoted no change in activity. Degrees of heat-sensitive increase (or decrease) in enzyme activity were then binned, and the number of clones falling into each category plotted in the histogram of FIG. 23. As shown in FIG. 23, the diversity of behaviors (temperature-sensitivity) among clones from the library is centered on the behavior of the parental clone, in this case the P54583 endoglucanase carrying the MTth010 mini-intein in the S56 position, which also displayed an increase in activity of ˜10% (i.e., 1.1-fold induction; cf. FIG. 23) when pre-incubated at about 52.5° C.

[0243] Ranking the degree of temperature-sensitivity among these nearly 4000 clones permitted identification of candidates for further analysis. Clones from a library designated “Library 14” (Lib14, SCBJ cells carrying derivatives of pAL410 P54583 S56Tth139) were analyzed. Clones that showed the greatest difference in activity in the experiment described in reference to FIG. 23 were further analyzed, and a portion of the data is shown in the chart of FIG. 24. Selected clones include the mutant intein modified enzymes indicated in Table 9, below. The activity from room temperature-treated samples is indicated by the left bar for each mutant, and the activity from heat treated samples is indicated by the right bar for each mutant of FIG. 24. Error bars in FIG. 24 reflect the differences in activity among triplicate assays. In these assays, the wild type P54583 positive controls and the pAL410 negative controls typically displayed modest decreases in activity following pre-incubation at the elevated temperature. As such, none of these control samples appear in FIG. 24 among the 40 clones showing the greatest increase in activity.

TABLE 9

| MUTANT | SEQUENCE |
|---|---|
| AA0002.C8 | SEQ ID NO: 1745 |
| AA0021.C10 | SEQ ID NO: 1746 |
| AA0057.F3 | SEQ ID NO: 1747 |
| AA0057.D5 | SEQ ID NO: 1748 |
| AA0063.C5 | SEQ ID NO: 1749 |
| AA0064.B7 | SEQ ID NO: 1750 |

[0244] Individual clones were collected from the above set and colony purified. Fresh cultures (in YPD G418) were grown from 3 single colonies derived from each clone, and these cultures were subjected to the Enzchek assay for temperature-sensitivity endoglucanase activity, constituting a second assay of the above candidates. Subsequently, a colony from one of the 3 single colonies that had been used for the second assay was used to inoculate 3 separate 1 ml volumes of YPD G418, grown at 30° C., and tested via the Enzchek assay, constituting a third assay of the above candidates. In each case, the fold increase in activity was calculated, making it possible to determine the reproducibility of the performance of each clone. Such a comparison is shown in FIG. 25 for six of the clones collected from this library. In FIG. 25, Assay 1 refers to the initial result with each clone from the high-throughput screening. The data from this assay correspond to a single culture from which 6 technical replicates (3 pre-heated, 3 unheated) were generated and assayed. Data from Assay 2 reflects 3 biological samples (single cultures derived from 3 separate colonies), from which duplicate samples were prepared (one pre-heated, one unheated), which were each then split into two technical replicates prior to the assay. Assay 3 reflects results with cultures derived from single colonies purified from the initial cultures that had been examined during Assay 1. In Assay 3, the results are averages of a minimum of 12 assays (6 pre-incubated at room temperature and 6 pre-incubated at 52.5° C.), with each set of 6 corresponding to two technical replicates for each of a minimum of three biological replicates. These results suggest that the initial screen may slightly overstate the degree of change in activity that can be recovered from a given clone, although each of the candidates shown in FIG. 25 showed ≧1.5-fold induction in subsequent assays.

[0245] Portions of the DNA sequences encoding the intein-modified endoglucanases were isolated by colony PCR from several of the candidates identified in the original screening of Library 14. An examination of the sequences of the intein-coding regions from each clone presented in FIG. 25 showed that each carried a mutation that caused at least one amino acid change within the sequence of mini intein MTth010, and one of the clones also had a mutation that resulted in an amino acid change in the adjacent N-extein sequence. These mutations are listed in Table 10, below.

TABLE 10

| Original Clone | Amino Acid Changes | Amino Acid Changes |
|---|---|---|
| Designation | in MTth010* | in P54583† |
| Lib14 AA0002.C8 | L66S | |
| Lib14 AA0021.C10 | P104L | |
| Lib14 AA0057.F3 | R55C | |
| Lib14 AA0057.D5 | R55C | |
| Lib14 AA0063.C5 | E27K | P21S |
| Lib14 AA0064.B7 | L86V | |

*Numbering relative to that of MTth010
†Numbering relative to the mature form of P54583 endoglucanase

[0246] In the examples summarized in Table 10, only the regions in the immediate vicinity of the intein were sequenced. It is interesting to note, however, that two independent clones were recovered with the same mutation in the intein (R55c in both Lib14 AA0057.F3 and Lib 14 AA0057.D5).

[0247] Additional libraries were constructed in which a single amino acid within the full-length Tth intein was targeted for saturating mutagenesis. Previous results with intein mutagenesis in a xylanase (SwissProt accession number P77853) revealed that mutations that affected arginine 51 of the intein when Tth was inserted into certain positions of P77853 gave the intein-modified xylanase a strong temperature-sensitivity switching phenotype. To test whether a similar mutation might cause a temperature-sensitive behavior in intein-modified endoglucanases, we introduced random mutations at the R51 position of the Tth intein, where the inteins were carried in either the S56, C75, S192, or S237 positions of P54583. Libraries of yeast clones expressing intein-modified endoglucanases with these mutations were then screened with the same high-throughput Enzchek assay described above. Data were sorted to identify those clones that expressed enzymes with the strongest temperature-sensitive induction. As shown in FIG. 26, candidates arising from this screen showed modest (1.5 to 2-fold) induction in activity upon pretreatment. The majority of the best performers were derived from those clones that carried the inteins in either the S192 or the S56 positions of P54583.

### Example 12

### Termite Endoglucanases

[0248] An endoglucanase from Nasutitermes takasagoensis was modified with an intein such that the intein compromises the activity of the endoglucanase, and excision of the intein (either spontaneously or in response to a stimulus such as temperature shift) reconstitutes activity of the endoglucanase. The intein-modified endoglucanase may be used in applications that require the conditional hydrolysis of cellulosic materials and/or other polysaccharides that can be recognized as substrates by the endoglucanase. The termite-derived endoglucanase may have advantageous pH tolerance, expression, and/or higher specific activity relative to other endoglucanases. For example, a pH inducible intein could be inserted in endoglucanase.

[0249] Termites naturally metabolize a variety of lignocellulosic materials by virtue of their unique anatomy, physiology, and symbiotic microflora. As termites consume lignocellulosic materials, they mix the particulate matter with a variety of enzymes. Passing through the termite gut, the materials encounter pH changes that range from mildly acidic to strongly basic. Particles are then taken up by symbionts that populate the termite gut and are further metabolized. Exchanges of organic metabolites between the symbionts and the termite provide a means by which the termites derive indirect nutritional benefit from the ingested materials.

[0250] Not all of the digestive enzymes responsible for the breakdown of lignocellulosic materials in termites are microbial in origin. Some of the most active enzymes in the termite system are actually expressed and secreted by the termites themselves and subsequently taken up by the symbionts along with the particulate materials. In some termite species, such as Reticulitermes speratus or Mastotermes darwiniensis, endoglucanases are secreted from the salivary glands and are mixed with the woody material during mastication, after which they pass into the gut and are then taken up by the symbionts. In other species, such as Nasutitermes takasagoensis, the enzymes are secreted directly in the midgut.

[0251] FIG. 27 shows the phylogeny of termite endoglucanases. Amino acid sequence comparisons of the catalytic domains from a variety of glycosyl hydrolase 9 (GH9) endoglucanases reveals considerable similarity among termite (Nasutitermes, Reticulitermes), microbial, and plant-derived enzymes. As shown, endoglucanases (EC 3.1.2.4) expressed by primitive and more apical termites share significant homology not only with each other, but also with bacterial and plant-derived enzyme. Unlike many members of the GH9 family of enzymes, termite endoglucanases typically lack carbohydrate binding domains, consisting solely of the catalytic domains. NtEG, an endoglucanase from Nasutitermes takasagoensis, can be expressed in E. coli as a functional enzyme. Differential cellulolytic activity of the native-form and C-terminal tagged-form of a cellulase derived from Coptotermes formosanus and expressed in E. coli has enabled the in vitro evolution of enzyme derivatives with enhanced properties such as thermostability. Random exchanges of non-conserved amino acid residues among four parental termite cellulases by family shuffling has also improved thermostability. Any of these cellulases can be modified with an intein, as outlined herein.

[0252] The NtEG endoglucanase has been shown to be structurally stable under very acidic conditions. This may reflect the fact that, as mentioned previously, termite-derived endoglucanases are exposed to a wide pH range in the gut. The major endoglucanase from Nasutitermes takasagoensis (NtEG) has been crystallized and it undergoes only very subtle changes in structure across pH ranges from 6.5 to 2.5. Termite-derived intein modified endoglucanases may be provided in conditions involving exposure to strong pH changes.

### Example 13

### Expression and Characterization of Termite Endoglucanases

[0253] A codon-optimized version of NtEG (077044, SEQ ID NO: 2017) was prepared. The DNA sequence of NtEG as optimized for expression in plants is shown below. Included in this sequence is a region (underlined in the sequence below) that encodes an N-terminal polypeptide of about 16 amino acids that likely functions as a secretion signal when the protein is expressed in termite cells.

Codon optimized NtEG
(SEQ ID NO: 2017)
ATGAGGGTGTTCCTTTGCCTGCTCTCGGCGCTAGCTTTGTGCCAGG
CGGCTTACGACTACAAGCAGGTGTTGCGGGACTCGCTACTATTCTA
TGAGGCCCAGAGATCCGGCCGGCTCCCAGCCGACCAGAAGGTCACG
TGGAGGAAGGATAGCGCGCTGAATGACCAGGGTGACCAGGGACAAG
ACTTGACCGGCGGCTACTTTGACGCTGGGGACTTCGTCAAGTTCGG
GTTCCCCATGGCTTATACCGCAACCGTGCTGGCATGGGGCCTCATA
GATTTTGAGGCCGGCTACAGCAGTGCCGGGGCCTTGGATGATGGAC
GGAAGGCTGTCAAATGGGCCACCGACTATTTCATAAAGGCCCACAC
AAGTCAAAATGAGTTCTATGGTCAGGTCGGCCAGGGTGACGCCGAT
CACGCTTTCTGGGGAAGACCAGAGGATATGACGATGGCGCGCCCGG
CGTACAAGATAGACACCTCAAGGCCTGGCTCTGATCTGGCAGGCGA
GACAGCGGCTGCTCTTGCCGCTGCTTCAATCGTGTTCCGGAACGTC
GATGGCACTTACTCAAATAACCTGTTAACACACGCTCGCCAGCTAT
TCGACTTCGCGAACAACTACCGGGGAAAGTATAGTGACTCTATTAC
TGACGCAAGAAATTTCTACGCAAGCGCAGACTACAGAGACGAGTTG
GTTTGGGCTGCTGCGTGGTTATACAGAGCGACCAACGACAACACCT
ACCTCAACACTGCTGAGTCACTGTACGATGAGTTTGGGCTACAGAA
CTGGGGGGGGGGCCTGAACTGGGATAGCAAGGTGTCTGGCGTGCAG
GTGTTGTTGGCCAAGCTTACCAATAAGCAGGCCTACAAGGACACGG
TGCAGTCTTACGTCAATTACCTAATTAATAACCAGCAGAAGACTCC
CAAGGGCCTCCTCTACATCGACATGTGGGGCACCCTTCGCCACGCT
GCCAACGCCGCATTCATCATGCTCGAAGCCGCCGAGCTGGGCTTGT
CCGCCTCCTCTTATAGACAGTTCGCGCAAACGCAAATCGACTACGC
CCTGGGCGATGGTGGCCGCTCCTTTGTGTGCGGGTTCGGGAGTAAT
CCTCCTACGAGACCGCACCACAGATCCTCGTCGTGCCCGCCAGCTC
CCGCTACTTGCGACTGGAATACATTCAACTCACCTGACCCAAACTA
CCACGTCCTCTCTGGGGCCCTAGTGGGCGGACCTGATCAGAATGAC
AACTACGTCGATGACCGTTCAGACTATGTTCACAACGAAGTCGCCA
CTGATTACAACGCGGGTTTCCAGTCCGCGTTAGCTGCTTTGGTGGC
CCTTGGTTAC

[0254] A DNA fragment carrying this sequence was ligated into the Saccharomyces cerevisiae expression vector pAL410. The resulting construct, pAL410 NtET is illustrated in FIG. 28. In FIG. 28, P-GAP is the nominally constitutive yeast GAP promoter; alpha is the secretion signal from yeast alpha mating factor, which is translated as an N-terminal fusion to the termite-derived endoglucanase; NtEG-SP is the putative 16 amino acid signal sequence that may drive secretion of NtEG from termite cells; BAA33708 NtEG is the remainder of the coding sequence for the termite endoglucanase; CYCt is a transcriptional terminator and polyadenylation signal derived from the yeast CYC1 gene; f1 on is the sequence for generating single-stranded plasmid derivatives; KanMX is a gene conferring resistance to G418 in yeast; 2u ori is the 2 micron origin, enabling plasmid replication in yeast cells; bla is a gene conferring ampicillin resistance in bacterial cells; and ColEI is a region that enables replication of the plasmid in E. coli.

[0255] It is possible that the two signal peptides, one derived from yeast and the second native to NtEG, might conflict during expression from the pAL410. To determine whether expression of NtEG might be enhanced by removing the native signal peptide, a derivative of the NtEG expression vector was prepared that differed from the original vector only in that it that lacked the 48 base pairs from the beginning of the NtEG open reading frame. These 48 base pairs encode native signal peptide. This vector (pAL410 NtEGm) was introduced into yeast cells.

[0256] Yeast cells carrying one of pAL410, pAL410 NtEG, or pAL410 NtEGm were streaked onto plates of YPD agar containing 100 mg/L G418 onto which an overlay of 1.5% agarose and 0.2% AZCL-HE-cellulose (Megazyme International Ireland Ltd) had been applied. As shown in FIG. 29, endoglucanase activity could be detected most readily in the vicinity of colonies that carried pAL410 NtEGm, indicating both that the enzyme was active and that it was being secreted from growing cells.

[0257] Yeast cells carrying pAL410 NtEG, pAL410 NtEGm, or pAL410-P54583 (Ace 1 endoglucanase, see Example 7) plasmids, as well as a strain that carried the empty pAL410 vector as a control, were then grown in rich media, and the culture supernatants were assayed for endoglucanase activity via the Cellazyme C assay (Megazyme International Ireland Ltd), which measures release of dye (absorbance at 590 nm) from AZCL-HE-cellulose. As shown in FIG. 30, the mature form of the termite endoglucanase (NtEGm) clearly gives higher activity than does the full-length form, which retains the native signal sequence. NtEGm also shows higher activity than P54583. While both NtEGm and P54583 increase in activity as the temperature increases, NtEGm lost activity when incubated at 70° C., while P54583 activity continued to increase. These assays revealed that expression of NtEGm produced more detectable endoglucanase activity than did P54583.

[0258] As a preliminary measure of the pH tolerance of the expressed enzymes, supernatants were collected from cultures expressing either NtEGm or P54583. Because of its lower overall activity, the supernatant from the P54583 culture was concentrated 20-fold via filtration through 10,000 molecular weight cut-off Millicon filters (Millipore, Bedford Mass.) prior to assaying. Cellazyme C assays were then carried out in buffers of different pH and at different temperatures. As shown in FIG. 31, NtEGm showed higher activity at pH 4.5 and 8.0 (as measured by absorbance at 590 nm of the released dye) than did P54583. This trend occurred when the cultures were incubated at 40° C. or at 58° C. As shown previously, though, P54583 activity outperformed that of NtEGm at 70° C. in both of the higher pH conditions.

[0259] The pH effects on enzyme stability versus pH effects on enzyme activity (catalysis) were analyzed as follows. P54583 and NtEGm were prepared from culture supernatants as above. The cultures were then exposed to buffers of different pH for 1 hour. After this treatment, buffers were exchanged with assay buffer (pH4.5) via filtration through Ultracel YM-30 regenerated cellulose filters (Millipore). Results from these assays suggest that NtEGm withstands pretreatments at pH values as high as 10.5, but is less hardy at pretreatments at pH 2 or pH 3 (data not shown).

[0260] To determine whether a His tag could be added to NtEGm and whether it had any impact on activity, a version of pAL410 NtEGm was created in which 6 histidine codons were introduced immediately before the stop codon of the NtEGm coding sequence. This plasmid, pAL410 NtEGmHis, was introduced into yeast cells. Supernatants were then collected from cultures of yeast cells carrying either pAL410, pAL410NtEGm, or pAL410 NtEGmHis and assayed for endoglucanase activity as before. From these experiments (FIG. 32), it appears that the introduction of a His-tag compromises endoglucanase activity.

### Example 14

### Intein Modification of Termite Endoglucanases

[0261] A series of protein fusions with the Tth intein inserted into NtEG at different positions were made. The intein insertion site was determined by the method described herein and was typically adjacent to serines, threonines, or cysteines. Coding sequences for the recombinant NtEG proteins were then assembled via an SOE PCR strategy as depicted in FIG. 33 (see also example 6b). As shown in FIG. 33, primers were designed to anneal to:
[0262] (A) the sequence encoding the alpha signal peptide in pAL410 NtEGm;
[0263] (B) a region within the coding sequence for NtEGm that is adjacent to the insertion site (in this case, serine 84);
[0264] (C) the 5′ end of the coding sequence for the Tth intein;
[0265] (D) the 3′ end of the coding sequence for the Tth intein;
[0266] (E) a region within the coding sequence for NtEGm that is adjacent to the insertion site (in this example, this site does not overlap that covered by primer C); and
[0267] (F) a region within the CYC terminator sequence from pAL410 NtEGm.
   PCR1 employs primers A and B to assemble a short product that includes the coding sequences for a portion of the alpha signal factor as well as the N-terminal portion of the endoglucanase (NtEG-N). The extreme 3′ end of PCR product 1 includes a short segment that is homologous to the extreme 5′ end of the Tth intein. PCR2 employs primers C and D to amplify the coding sequence of the Tth intein. PCR3 employs primers E and F to amplify the coding sequences for the C-terminal portion of the endoglucanase (NtEG-C), including the “C+1” amino acid (in this case serine 84) and a short segment that is homologous to the extreme 5′ end of the Tth intein, as well as a portion of the CYC1 terminator (CYC1t) from pAL410. PCR products 1, 2, and 3 were then combined in a single PCR reaction; and by virtue of their homology to the ends of the Tth intein, PCR products 1 and 3 annealed to PCR product 2. DNA synthesis and amplification with the outermost primers (A and F) lead to the assembly of the full-length product as indicated at the bottom of the diagram.

[0268] To prepare any desired intein-modified NtEG derivative, PCR products must be prepared that are tailored for each intein insertion position. However, some of the components in this experimental setup are modular. For example, primers C and D can be used to prepare PCR product 2, which can then be used to assemble any of the planned recombinants. Similarly, primers A and F can be used to prepare PCR products 1 and 3, respectively, regardless of the insertion position. As such, only primers B and E are unique to a given intein insertion event. Table 11, below, lists the sequences (in 5′-3′ orientation) of the oligonucleotide primers that were used to assemble each of the intein-modified NtEG endoglucanases. While primers B and E are unique to each product, each contains a region that is homologous to the terminus of the Tth intein. This constant region is underlined in each primer sequence in Table 11.

TABLE 11

| | |
|---|---|
| Primer | GCTGTTTTGCCATTTTCCAACAGCA |
| A | (SEQ ID: 2018) |
| Primer | TGCCTGGCCGAGGGCTCGCTCGTCTTGGACGCGGCTACCG |
| C | (SEQ ID: 2019) |
| Primer | GTTATGCACCACCAGGTCCTCGCTCACGAAGTTTGCAAAG |
| D | (SEQ ID: 2020) |
| Primer | CCCAAAACCTTCTCAAGCAAGGT |
| F | (SEQ ID: 2021) |
| Inser- | Primer B |
| tion | |
| Site | |
| S84 | TCCAAGACGAGCGAGCCCTCGGCCAGGCAGTAGCCGGCCTCAAA |
| | ATCTATGA |
| | (SEQ ID: 2022) |
| T303 | TCCAAGACGAGCGAGCCCTCGGCCAGGCAGCCCCACATGTCGAT |
| | GTAGAGGA |
| | (SEQ ID: 2023) |
| S325 | TCCAAGACGAGCGAGCCCTCGGCCAGGCAGGCGGACAAGCCCAG |
| | CT |
| | (SEQ ID: 2024) |
| T333 | TCCAAGACGAGCGAGCCCTCGGCCAGGCATTGCGCGAAC |
| | TGTCTATAAGAGGA |
| | (SEQ ID: 2025) |
| S345 | TCCAAGACGAGCGAGCCCTCGGCCAGGCAGCGGCCACCA |
| | TCGCCCA |
| | (SEQ ID: 2026) |
| C348 | TCCAAGACGAGCGAGCCCTCGGCCAGGCACACAAAGGAGC |
| | GGCCACCA |
| | (SEQ ID: 2027) |
| S352 | TCCAAGACGAGCGAGCCCTCGGCCAGGCACCCGAACCCGC |
| | ACACA |
| | (SEQ ID: 2028) |
| T356 | TCCAAGACGAGCGAGCCCTCGGCCAGGCAAGGAGGATTAC |
| | TCCCGA |
| | (SEQ ID: 2029) |
| S362 | TCCAAGACGAGCGAGCCCTCGGCCAGGCATCTGTGGTGCG |
| | GTCTCGT |
| | (SEQ ID: 2030) |
| S363 | TCCAAGACGAGCGAGCCCTCGGCCAGGCAGGATCTGTGGTG |
| | CGGTCTCGT |
| | (SEQ ID: 2031) |
| S364 | TCCAAGACGAGCGAGCCCTCGGCCAGGCACGAGGATCTGTG |
| | GTGCGGT |
| | (SEQ ID: 2032) |
| T376 | TCCAAGACGAGCGAGCCCTCGGCCAGGCAATTCCAGTCGCA |
| | AGTAGCGGGA |
| | (SEQ ID: 2033) |
| S379 | TCCAAGACGAGCGAGCCCTCGGCCAGGCAGTTGAATGTATT |
| | CCAGTCGCA |
| | (SEQ ID: 2034) |
| S406 | TCCAAGACGAGCGAGCCCTCGGCCAGGCAACGGTCATCGAC |
| | GTAGTTGTCA |
| | (SEQ ID: 2035) |
| T415 | TCCAAGACGAGCGAGCCCTCGGCCAGGCAGGCGACTTCGTT |
| | GTGAACA |
| | (SEQ ID: 2036) |
| Inser- | Primer E |
| tion | |
| Site | |
| S84 | AGGACCTGGTGGTGCATAACAGCAGTGCCGGGGCCTTGGA |
| | (SEQ ID: 2037 ) |
| T303 | AGGACCTGGTGGTGCATAACACCCTTCGCCACGCTGCCA |
| | (SEQ ID: 2038 ) |
| S325 | AGGACCTGGTGGTGCATAACTCCTCTTATAGACAGTTCGC |
| | GCAAACGCA |
| | (SEQ ID: 2039) |
| T333 | AGGACCTGGTGGTGCATAACACGCAAATCGACTACGCCCT |
| | (SEQ ID: 2040) |
| S345 | AGGACCTGGTGGTGCATAACTCCTTTGTGTGCGGGTTCGGGA |
| | (SEQ ID: 2041) |
| C348 | AGGACCTGGTGGTGCATAACTGCGGGTTCGGGAGTAATCCT |
| | (SEQ ID: 2042) |
| S352 | AGGACCTGGTGGTGCATAACAGTAATCCTCCTACGAGACCGCA |
| | (SEQ ID: 2043) |
| T356 | AGGACCTGGTGGTGCATAACACGAGACCGCACCACAGATCCT |
| | (SEQ ID: 2044) |
| S362 | AGGACCTGGTGGTGCATAACTCCTCGTCGTGCCCGCCA |
| | (SEQ ID: 2045) |
| S363 | AGGACCTGGTGGTGCATAACTCGTCGTGCCCGCCAGCT |
| | (SEQ ID: 2046) |
| S364 | AGGACCTGGTGGTGCATAACTCGTGCCCGCCAGCTCCCGCT |
| | (SEQ ID: 2047) |
| T376 | AGGACCTGGTGGTGCATAACACATTCAACTCACCTGACCCA |
| | (SEQ ID: 2048) |
| S379 | AGGACCTGGTGGTGCATAACTCACCTGACCCAAACTACCA |
| | (SEQ ID: 2049) |
| S406 | AGGACCTGGTGGTGCATAACTCAGACTATGTTCACAACGA |
| | (SEQ ID: 2050) |
| T415 | AGGACCTGGTGGTGCATAACACTGATTACAACGCGGGTTTCCA |
| | (SEQ ID: 2051) |

[0269] The insertion sites listed in Table 11 refer to the identity and relative position of the amino acid residue in the C+1 position of the extein. The numbering is relative to the amino acid sequence of the predicted NtEGm polypeptide, wherein 2-5 correspond to amino acids 17-20 (Ala-Tyr-Asp-Tyr), of the native, NtEG sequence (077044) (SEQ ID NO: 112).

[0270] Using the above primers, SOE PCR reactions were carried out. A subset of these recombinant PCR products has been ligated into pCRBlunt II TOPO (Invitrogen, Carlsbad Calif.), sequenced to confirm composition, and then transferred to the pAL410 yeast expression vector. Supernatants were collected from cultures of yeast cells carrying pAL410, pAL410 NtEGm, or pAL410 NtEGm with the Tth intein inserted adjacent to serine 84, threonine 303, serine 325, or threonine 333. These supernatants were then examined in the Cellazyme C assay, and endoglucanase activity was monitored as an increase in absorbance at 590 nm (due to release of the dye from the AZCL-HE-cellulose substrate) as a function of time. FIG. 34 shows that insertion of the Tth intein into any of the four positions tested strongly reduces activity of the enzyme.

### Example 15

### P77853, Intein Modified Xylanases

[0271] Intein Selection

[0272] Intein amino acid sequences were selected from the Inbase database (release 7/2007). This database contained several trans-splicing inteins which were joined together and reduced this list to 408 inteins. The following inteins were then removed: Mth RIR1 intein, Tth-HB8 DnaE-1 intein, Tth-HB27 DnaE-1 intein, Tag Pol-3 (Tsp-TY Pol-3) intein, Tac-ATCC25905 VMA intein, Psp-GBD Pol intein. The following inteins from Pathogenic species were also removed: Mtu(5 inteins), Mch(1), Mma(1), Mbo(5), Mfa(1), Mfl(2), Mga(3), Mgo(1), Min(1), Mkas(1), Mle(4), Msh(1), Msm(2), Msp(4), Mthe(1), Mtu(5), Mvan(2), Mxe(1). From the remaining 361 sequences, sequences that had >62% sequence identity to another remaining sequence were removed. For example, for a set of A, B, C and D seqeuences where all of them had >62% identity, three of them would be eliminated. For a pair of similar sequences the sequence to remove was selected by which one was less thermophilic, where the order of thermophilicity from greatest to least is hyperthermophilic>thermophilic>mesophilic=UNK. Sequences were classified by the optimal growth conditions of their host organisms using the Prokaryotic Growth Temperature Database (PGTdb) and other literature sources. Hyperthermophilic was defined as organism with optimal growth temperature of greater than 80° C., thermophilic was 45 to 80° C., and mesophilic was less than 45° C. The UNK classification was for an organism that could not be classified. After this process, 157 sequences were left for testing, of which 70 were from hyperthermophilic organisms, 19 from thermophilic organisims, 64 from mesophilic organisms and 4 from organisms in the unknown group.

[0273] Construction of Intein Modified P77853

[0274] The DNA sequence of all of the inteins selected were codon optimized for Zea mays (maize) by GenScript. The inteins were then examined for the following restriction sites to make sure they were not present: GAATTC, EcoRI; CTCGAG, XhoI; and CATATG, NdeI. Several of the sequences had NdeI sites which were mutated so they translated into the same amino acid pair that resulted from the codons formed by the original NdeI site. SEQ ID NOS: 2059-2215 list the intein sequences used after codon optimization and removal EcoRI, XhoI or NdeI sites, if present. One sequence had an XhoI site prior to being mutated to CTGGAG. The amino acid sequence of the encoded by each of SEQ ID NOS: 2059-2215 is given in SEQ ID NOS: 2,216-2,372, respectively. All of the inteins were then inserted into a codon optimized plasmid that contained the P77853 enzyme (SEQ ID NO: 104). The insertion site was before the T134 codon or the S158 codon, and the sequences below show the codon optimized P77853 encoding nucleic acid, plasmid nucleic acid sequence and the intein insertion point. In addition, SEQ ID NOS: 2687-3000 list each of the intein modified P77853 nucleic acid encoding sequences utilized in this example. The experiments described below list samples AS-1 to AS-157 and AT-1 to AT-157. SEQ ID NOS: 2373-2529 correspond to the amino acid sequence of the protein of samples AS-1 to AS-157, respectively. SEQ ID NOS: 2530-2686 correspond to the amino acid sequence of the protein of samples AT-1 to AT-157, respectively. SEQ ID NOS: 2687-2843 correspond to nucleic acid sequences encoding the protein of samples AS-1 to AS-157, respectively. SEQ ID NOS: 2844-3000 correspond to nucleic acid sequences encoding the protein of samples AT-1 to AT-157, respectively. SEQ ID NOS: 3001-3157 correspond to nucleic acid sequences encoding the protein of samples AS-1 to AS-157, respectively, in pBluescript. SEQ ID NOS: 3158-3314 correspond to nucleic acid sequences encoding the protein of samples AT-1 to AT-157, respectively, in pBluescript. The sequences below, in the following two paragraphs, contain P77843 (lower case) inserted into the pBlueScript plasmid (uppercase) and the site for intein insertion (inside double angled brackets). See SEQ ID NOS: 2059-2215 for the sequences of intein encoding nucleic acids inserted, and SEQ ID NOS: 2216-2372 for the respective intein amino acid sequence encoded.

>Plasmid for P77853-S158 insertion
(SEQ ID NOS: 3001-3157)
GCACTTTTCGGGGAAATGTGCGCGGAACCCCTATTTGTTTATTTTTCTAAATACATTCAAATATGTATCCGCTCA
TGAGACAATAACCCTGATAAATGCTTCAATAATATTGAAAAAGGAAGAGTATGAGTATTCAACATTTCCGTGTCG
CCCTTATTCCCTTTTTTGCGGCATTTTGCCTTCCTGTTTTTGCTCACCCAGAAACGCTGGTGAAAGTAAAAGATG
CTGAAGATCAGTTGGGTGCACGAGTGGGTTACATCGAACTGGATCTCAACAGCGGTAAGATCCTTGAGAGTTTTC
GCCCCGAAGAACGTTTTCCAATGATGAGCACTTTTAAAGTTCTGCTATGTGGCGCGGTATTATCCCGTATTGACG
CCGGGCAAGAGCAACTCGGTCGCCGCATACACTATTCTCAGAATGACTTGGTTGAGTACTCACCAGTCACAGAAA
AGCATCTTACGGATGGCATGACAGTAAGAGAATTATGCAGTGCTGCCATAACCATGAGTGATAACACTGCGGCCA
ACTTACTTCTGACAACGATCGGAGGACCGAAGGAGCTAACCGCTTTTTTGCACAACATGGGGGATCATGTAACTC
GCCTTGATCGTTGGGAACCGGAGCTGAATGAAGCCATACCAAACGACGAGCGTGACACCACGATGCCTGTAGCAA
TGGCAACAACGTTGCGCAAACTATTAACTGGCGAACTACTTACTCTAGCTTCCCGGCAACAATTAATAGACTGGA
TGGAGGCGGATAAAGTTGCAGGACCACTTCTGCGCTCGGCCCTTCCGGCTGGCTGGTTTATTGCTGATAAATCTG
GAGCCGGTGAGCGTGGGTCTCGCGGTATCATTGCAGCACTGGGGCCAGATGGTAAGCCCTCCCGTATCGTAGTTA
TCTACACGACGGGGAGTCAGGCAACTATGGATGAACGAAATAGACAGATCGCTGAGATAGGTGCCTCACTGATTA
AGCATTGGTAACTGTCAGACCAAGTTTACTCATATATACTTTAGATTGATTTAAAACTTCATTTTTAATTTAAAA
GGATCTAGGTGAAGATCCTTTTTGATAATCTCATGACCAAAATCCCTTAACGTGAGTTTTCGTTCCACTGAGCGT
CAGACCCCGTAGAAAAGATCAAAGGATCTTCTTGAGATCCTTTTTTTCTGCGCGTAATCTGCTGCTTGCAAACAA
AAAAACCACCGCTACCAGCGGTGGTTTGTTTGCCGGATCAAGAGCTACCAACTCTTTTTCCGAAGGTAACTGGCT
TCAGCAGAGCGCAGATACCAAATACTGTCCTTCTAGTGTAGCCGTAGTTAGGCCACCACTTCAAGAACTCTGTAG
CACCGCCTACATACCTCGCTCTGCTAATCCTGTTACCAGTGGCTGCTGCCAGTGGCGATAAGTCGTGTCTTACCG
GGTTGGACTCAAGACGATAGTTACCGGATAAGGCGCAGCGGTCGGGCTGAACGGGGGGTTCGTGCACACAGCCCA
GCTTGGAGCGAACGACCTACACCGAACTGAGATACCTACAGCGTGAGCTATGAGAAAGCGCCACGCTTCCCGAAG
GGAGAAAGGCGGACAGGTATCCGGTAAGCGGCAGGGTCGGAACAGGAGAGCGCACGAGGGAGCTTCCAGGGGGAA
ACGCCTGGTATCTTTATAGTCCTGTCGGGTTTCGCCACCTCTGACTTGAGCGTCGATTTTTGTGATGCTCGTCAG
GGGGGCGGAGCCTATGGAAAAACGCCAGCAACGCGGCCTTTTTACGGTTCCTGGCCTTTTGCTGGCCTTTTGCTC
ACATGTTCTTTCCTGCGTTATCCCCTGATTCTGTGGATAACCGTATTACCGCCTTTGAGTGAGCTGATACCGCTC
GCCGCAGCCGAACGACCGAGCGCAGCGAGTCAGTGAGCGAGGAAGCGGAAGAGCGCCCAATACGCAAACCGCCTC
TCCCCGCGCGTTGGCCGATTCATTAATGCAGCTGGCACGACAGGTTTCCCGACTGGAAAGCGGGCAGTGAGCGCA
ACGCAATTAATGTGAGTTAGCTCACTCATTAGGCACCCCAGGCTTTACACTTTATGCTTCCGGCTCGTATGTTGT
GTGGAATTGTGAGCGGATAACAATTTCACACAGGAAACAGCATatgcaaacaagcattactctgacatccaacgc
atccggtacgtttgacggttactattacgaactctggaaggatactggcaatacaacaatgacggtctacactca
aggtcgatacctgccagtggtcgaacatcaataacgcgttgataggaccgggaagaaatacaaccagaattggca
gtctcaggcacaatccggatcacgtactctgcgacttacaacccaaacgggaactectacttgtgtatctatggc
tggtctaccaacccattggtcgagactacatcgttgagtcctgggggaactggagaccgcctggtgccacgtccc
tgggccaagtgacaatcgatggcgggacctacgacatctataggacgacacgcgtcaaccagcct<<insert.
intein.here.for.S158>>tccattgtggggacagccacgttcgatcagtactggagcgtgcgcacctctaa
gcggacttcaggaacagtgaccgtgaccgatcacttccgcgcctgggcgaaccggggcctgaacctcggcacaat
agaccaaattacattgtgcgtggagggttaccaaagctctggatcagccaacatcacccagaacaccactctcag
ggctatcaccggcagttcgggtggctcatccggctccacaacgactactcgcatcgagtgtgagaacatgtccag
tccggaccctacgttagcaggatcaccaatccattaatggtattgcgctgtacgccaacggagacacagcccgcg
ctaccgttaacttccccgcaagtcgcaactacaataccgcctgcggggagcggcaacaacaataatcttgcccgt
gtggacctgaggatcgacggacggaccgtegggaccattattaccagggcacatacccctgggaggccccaattg
acaatgatatgtcagtgcggggagtcatacagtcgaaatcactgttactgcggataacggcacatgggacgtgta
tgccgactacctggtgatacagtgaCTCGAGGGGGGGCCCGGTACCCAATTCGCCCTATAGTGAGTCGTATTACA
ATTCACTGGCCGTCGTTTTACAACGTCGTGACTGGGAAAACCCTGGCGTTACCCAACTTAATCGCCTTGCAGCAC
ATCCCCCTTTCGCCAGCTGGCGTAATAGCGAAGAGGCCCGCACCGATCGCCCTTCCCAACAGTTGCGCAGCCTGA
ATGGCGAATGGAAATTGTAAGCGTTAATATTTTGTTAAAATTCGCGTTAAATTTTTGTTAAATCAGCTCATTTTT
TAACCAATAGGCCGAAATCGGCAAAATCCCTTATAAATCAAAAGAATAGACCGAGATAGGGTTGAGTGTTGTTCC
AGTTTGGAACAAGAGTCCACTATTAAAGAACGTGGACTCCAACGTCAAAGGGCGAAAAACCGTCTATCAGGGCGA
TGGCCCACTACGTGAACCATCACCCTAATCAAGTTTTTTGGGGTCGAGGTGCCGTAAAGCACTAAATCGGAACCC
TAAAGGGAGCCCCCGATTTAGAGCTTGACGGGGAAAGCCGGCGAACGTGGCGAGAAAGGAAGGGAAGAAAGCGAA
AGGAGCGGGCGCTAGGGCGCTGGCAAGTGTAGCGGTCACGCTGCGCGTAACCACCACACCCGCCGCGCTTAATGC
GCCGCTACAGGGCGCGTCAGGTG

[0275] >Plasmid for P77853-T134 insertion.

[0276] GCACTTTTCGGGGAAATGTGCGCGGAACCCCTATTTGTTTATTTTTCTAAATA CATTCAAATATGTATCCGCTCATGAGACAATAACCCTGATAAATGCTTCAATA ATATTGAAAAAGGAAGAGTATGAGTATTCAACATTTCCGTGTCGCCCTTATTC CCTTTTTTGCGGCATTTTGCCTTCCTGTTTTTGCTCACCCAGAAACGCTGGTG AAAGTAAAAGATGCTGAAGATCAGTTGGGTGCACGAGTGGGTTACATCGAAC TGGATCTCAACAGCGGTAAGATCCTTGAGAGTTTTCGCCCCGAAGAACGTTT TCCAATGATGAGCACTTTTAAAGTTCTGCTATGTGGCGCGGTATTATCCCGT ATTGACGCCGGGCAAGAGCAACTCGGTCGCCGCATACACTATTCTCAGAATG ACTTGGTTGAGTACTCACCAGTCACAGAAAAGCATCTTACGGATGGCATGAC AGTAAGAGAATTATGCAGTGCTGCCATAACCATGAGTGATAACACTGCGGCC AACTTACTTCTGACAACGATCGGAGGACCGAAGGAGCTAACCGCTTTTTTGC ACAACATGGGGGATCATGTAACTCGCCTTGATCGTTGGGAACCGGAGCTGAA TGAAGCCATACCAAACGACGAGCGTGACACCACGATGCCTGTAGCAATGGCA ACAACGTTGCGCAAACTATTAACTGGCGAACTACTTACTCTAGCTTCCCGGC AACAATTAATAGACTGGATGGAGGCGGATAAAGTTGCAGGACCACTTCTGCG CTCGGCCCTTCCGGCTGGCTGGTTTATTGCTGATAAATCTGGAGCCGGTGAG CGTGGGTCTCGCGGTATCATTGCAGCACTGGGGCCAGATGGTAAGCCCTCC CGTATCGTAGTTATCTACACGACGGGGAGTCAGGCAACTATGGATGAACGAA ATAGACAGATCGCTGAGATAGGTGCCTCACTGATTAAGCATTGGTAACTGTC AGACCAAGTTTACTCATATATACTTTAGATTGATTTAAAACTTCATTTTTAATT TAAAAGGATCTAGGTGAAGATCCTTTTTGATAATCTCATGACCAAAATCCCTT AACGTGAGTTTTCGTTCCACTGAGCGTCAGACCCCGTAGAAAAGATCAAAGG ATCTTCTTGAGATCCTTTTTTTCTGCGCGTAATCTGCTGCTTGCAAACAAAAA AACCACCGCTACCAGCGGTGGTTTGTTTGCCGGATCAAGAGCTACCAACTCT TTTTCCGAAGGTAACTGGCTTCAGCAGAGCGCAGATACCAAATACTGTCCTT CTAGTGTAGCCGTAGTTAGGCCACCACTTCAAGAACTCTGTAGCACCGCCTA CATACCTCGCTCTGCTAATCCTGTTACCAGTGGCTGCTGCCAGTGGCGATAA GTCGTGTCTTACCGGGTTGGACTCAAGACGATAGTTACCGGATAAGGCGCAG CGGTCGGGCTGAACGGGGGGTTCGTGCACACAGCCCAGCTTGGAGCGAACG ACCTACACCGAACTGAGATACCTACAGCGTGAGCTATGAGAAAGCGCCACGC TTCCCGAAGGGAGAAAGGCGGACAGGTATCCGGTAAGCGGCAGGGTCGGAA CAGGAGAGCGCACGAGGGAGCTTCCAGGGGGAAACGCCTGGTATCTTTATA GTCCTGTCGGGTTTCGCCACCTCTGACTTGAGCGTCGATTTTTGTGATGCTC GTCAGGGGGGCGGAGCCTATGGAAAAACGCCAGCAACGCGGCCTTTTTACG GTTCCTGGCCTTTTGCTGGCCTTTTGCTCACATGTTCTTTCCTGCGTTATCCC CTGATTCTGTGGATAACCGTATTACCGCCTTTGAGTGAGCTGATACCGCTCG CCGCAGCCGAACGACCGAGCGCAGCGAGTCAGTGAGCGAGGAAGCGGAAGA GCGCCCAATACGCAAACCGCCTCTCCCCGCGCGTTGGCCGATTCATTAATGC AGCTGGCACGACAGGTTTCCCGACTGGAAAGCGGGCAGTGAGCGCAACGCA ATTAATGTGAGTTAGCTCACTCATTAGGCACCCCAGGCTTTACACTTTATGCT TCCGGCTCGTATGTTGTGTGGAATTGTGAGCGGATAACAATTTCACACAGGA AACAGCATatgcaaacaagcattactctgacatccaacgcatccggtacgtttgacggttactattacgaactct ggaaggatactggcaatacaacaatgacggtctacactcaaggtcgctatcctgccagtggtcgaacatcaataac gcgttgataggaccgggaagaaatacaaccagaattggcagtctatggcacaatccggatcacgtactctgcgact tacaacccaaacgggaactectacttgtgtatctatggctggtctaccaacccattggtcgagttctacatcgttgagt cctgggggaactggagaccgcctggtgcc<<insert.intein.here.for.T134>>acgtccctgggccaagtg acaatcgatggcgggacctacgacatctataggacgacacgcgtcaaccagccaccattgtggggacagccacgtt cgatcagtactggagcgtgcgcacctctaagcggacttcaggaacagtgaccgtgaccgatcacttccgcgcctgggc gaaccggggcctgaacctcggcacaatagaccaaattacattgtgcgtggagggttaccaaagctctggatcagcca acatcacccagaacaccactctcagggctatcaccggcagttcgggtggctcatccggctccacaacgactactcgc atcgagtgtgagaacatgtccagtccggaccctacgttagcaggatcaccaatccattaatggtattgcgctgtacg ccaacggagacacagcccgcgctaccgttaacttccccgcaagtcgcaactacaataccgcctgcggggagcggca acaacaataatcttgcccgtgtggacctgaggatcgacggacggaccgtcgggaccattattaccagggcacatacc cctgggaggccccaattgacaatgatatgtcagtgcggggagtcatacagtcgaaatcactgttactgcggataac ggcacatgggacgtgtatgccgactacctggtgatacagtgaCTCGAGGGGGGGCCCGGTACCCA ATTCGCCCTATAGTGAGTCGTATTACAATTCACTGGCCGTCGTTTTACAACGT CGTGACTGGGAAAACCCTGGCGTTACCCAACTTAATCGCCTTGCAGCACATC CCCCTTTCGCCAGCTGGCGTAATAGCGAAGAGGCCCGCACCGATCGCCCTTC CCAACAGTTGCGCAGCCTGAATGGCGAATGGAAATTGTAAGCGTTAATATTT TGTTAAAATTCGCGTTAAATTTTTGTTAAATCAGCTCATTTTTTAACCAATAG GCCGAAATCGGCAAAATCCCTTATAAATCAAAAGAATAGACCGAGATAGGGT TGAGTGTTGTTCCAGTTTGGAACAAGAGTCCACTATTAAAGAACGTGGACTC CAACGTCAAAGGGCGAAAAACCGTCTATCAGGGCGATGGCCCACTACGTGA ACCATCACCCTAATCAAGTTTTTTGGGGTCGAGGTGCCGTAAAGCACTAAAT CGGAACCCTAAAGGGAGCCCCCGATTTAGAGCTTGACGGGGAAAGCCGGCG AACGTGGCGAGAAAGGAAGGGAAGAAAGCGAAAGGAGCGGGCGCTAGGGC GCTGGCAAGTGTAGCGGTCACGCTGCGCGTAACCACCACACCCGCCGCGCT TAATGCGCCGCTACAGGGCGCGTCAGGTG (SEQ ID NOS: 3158-3314)

[0277] Switching Assays

[0278] pBlueScript plasmids encoding the intein modified P77853 were transformed to TOP10 E. coli bacterial host (Invitrogen) and plated onto LB agar supplemented with Ampicillin (100 mg/l). After overnight incubation at 37° C., eight colonies (biological replicates) were picked from each construct and placed into 1 ml auto induction media (AIM, Novagen) supplemented with Carbenicillin (100 mg/l) in 96 well plates. Cultures were grown at 900 rpm in a Multitron shaker (Infors HT) at 37° C. for 10 hrs, then 30° C. for 6˜8 hrs. Cell were harvested and lysed in 100 μl Polybuffer (at various pH: 4.5, 5.5, 6.5 or 7.5) containing 10% of 10× FastBreak (Promega) and Benzonase (0.1 μl/ml of 25KUN, Novagen) at 30° C. for 1 hr. Lysate was diluted with Polybuffer (same pH as the lysis buffer) to 1 ml final volume and split for heat treatment. Heat treatment temperatures were 37° C., 50° C., 55° C. or 60° C. for 2 hrs, 4 hrs or 6 hrs. Samples were put on ice. Xylanase activity was assayed with the solid substrate AZCL-xylan birchwood (Megazyme): lactose=25%:75% dispensed to 384 well plates with the VP724B solid dispenser (V&P Scientific) in a reaction mix of 30 μl lysate and 40 μl Polybuffer (same pH as the lysis buffer) at 37° C. for 30 min, 45 min, 65 min or 100 min. Absorption was read at 590 nm on a Paradigm plate reader (Beckman Coulter).

[0279] The results of the pH 6.5 and pH7.5 enzyme assay are shown below in FIGS. 36A-D and 37A-D for both the T134 and the S158 insertion sites of P77853. FIGS. 36A-D show the results at pH 6.5, and FIGS. 37A-D show the results at pH 7.5. The activities at high and low temperatures are plotted compared to the wild type P77853 (FIGS. 36A and C). The high temperature activities versus the fold induction (activity at high temperature/activity at low temperature) are also plotted (FIGS. 36B and D). The inteins are broken down by thermophilicity of their host. The vertical dashed line represents 10% of the low-temperature wild-type activity. The horizontal dashed line is 40% of the high-temperature wild-type activity. For both of the T134 and the S158 insertion sites, there were a number of inteins that caused a large fold induction. But only the S158 insertions showed candidates that were close to or met the metrics (low temperature activiy less than or equal to 10% of the native (non-intein modified) enzyme and high temperature activity greater than 40% of the native (non-intein modified) enzyme).

[0280] The top candidate intein modified xylanases (as ranked by total high temperature activity) for each pH and insertion site are shown in FIGS. 38A-D. The set of inteins was inserted into the S158 position (FIGS. 38 A and C) and T134 position (FIGS. 39B and D) of P77853. The activities following high (right bar for each sample) and low (left bar for each sample) temperature heat treatments at pH 6.5 (FIGS. 38 A and B) and pH 7.5 (FIGS. 38C and D) are plotted for the top 20 highest activity candidates compared to the wild type and empty vector. The dashed line between 2 and 4 on the Activity axis represents 40% of the high temperature wild-type activity. The dashed line below 2 represents 10% of the low temperature wild-type activity. As shown in FIGS. 38A-D, for both the S158 and T134 insertion sites the top ranking hits have activities from high temperature heat treatments that are close to or above 40% of the wild-type activities. However, there is a larger fold induction for more of the top candidates seen in the S158 site than the T134 site. Additionally there are a few candidates that meet or are very close to the metrics set (<10% WT activity prior to splicing and >40% WT activity after exposure to splicing conditions) for the S158 site including AS-146 and AS-79 at pH 6.5, and AS-79, AS-2 and AS-83 at pH 7.5. All of the top candidates for T134 have much higher activity following the low temperature heat treatment.

[0281] All the candidates for each insertion site and pH were grouped by performance in the switching assay. These groups are composed based on their activity following high temperature exposure and low temperature exposure. For the activity classification, the groups are non-permissive, (NP=<10% wt activity), weak activity (W=10-30% wt activity) and strong activity (>30% wt activity). For switching, the groups are permissive (P=<2× ratio of high to low temperature activity), switching (S=2-3× ratio of high to low temperature activity) and strong switching (SS=>3× ratio of high temperature to low temperature activity). The distribution and performance of these for each pH is shown in Table 12, below, and Activity data for representative inteins in each group are shown in FIGS. 39A-D. FIGS. 39 Å and C illustrate data for S158 P77853 intein insertions. FIGS. 39B and D illustrate DNA for T134 P77853 intein insertions. FIGS. 39A and B correspond to heat treatments at pH 6.5. FIGS. 39C and D correspond to heat treatments at pH 7.5. The dashed line between 2 and 4 on the Activity axis represents 40% of the high temperature wild-type activity. The dashed line below 2 represents 10% of the low-temperature wild-type activity. As shown in FIG. 39A-D, for both cases there are a small number of switchers of weak and strong activity. However there are many more permissive inteins for the T134 site than the S158 site. This similar to what was seen previously for the Tth insertions at these sites in that inteins inserted into the T134 are commonly not able to block activity as strongly, leaving a higher background activity.

TABLE 12

| | NP | W-P | W-S | W-SS | S-P | S-S | S-SS |
|---|---|---|---|---|---|---|---|
| activity | <10% | 10-30% | 10-30% | 10-30% | >30% | >30% | >30% |
| | WT | WT | WT | WT | WT | WT | WT |
| switching | — | <2X | 2-3X | >3X | <2X | 2-3X | >3X |
| S158 | 99 | 6 | 2 | 11 | 11 | 1 | 5 |
| (pH 6.5) | | | | | | | |
| S158 | 110 | 5 | 1 | 5 | 7 | 3 | 4 |
| (pH 7.5) | | | | | | | |
| T134 | 56 | 32 | 5 | 4 | 34 | 14 | 2 |
| (pH 6.5) | | | | | | | |
| T134 | 64 | 37 | 6 | 0 | 25 | 12 | 3 |
| (pH 7.5) | | | | | | | |
| Total | 320 | 80 | 14 | 20 | 77 | 30 | 14 |

[0282] Referring to FIG. 40, the top candidates from the previous screen (AS-146, AS-2, AS-79, AS-83) were re-validated for heat inducible enzyme activity and compared to a non-permissive candidate (AS-8), the wild type enzyme P77853, and the empty vector pBS. The dashed line above 1 on the Activity axis represents 40% of the high temperature wild-type activity. The dashed line below 0.5 represents 10% of the low-temperature wild-type activity. In this re-test, AS-79 and AS-83 met the metrics of >=40% high temperature activity (58% and 40% respectively) and <=10% low temperature activity (6% and 10%). AS-146 was close to the metric with slightly less than 40% high temperature activity (34%) but still below the low temperature activity metric (7%). Higher heat-induced activity and lower uninduced activity may be a desirable property for these enzymes.

[0283] Western Blot

[0284] Referring to FIG. 41, top performing candidates at the S158 insertion site (AS-2, AS-79, AS-83 and AS-146) and at the T134 insertion site (AT-2, AT-83, AT-149, AT-154) of P77853 were analyzed for heat inducible splicing using a western blot. Culture conditions and lysis were the same as for the switching assay, but Polybuffer was used at pH: 6.5 and the heat treatments were at 37° C. and 60° C. for 4 hrs. The western blot was developed with a rabbit anti-P77853 primary antibody using standard procedures.

[0285] In FIG. 41, pBS is the empty vector control, and P77 is the positive control (P77853). The left and right bar above each sample label represents the low temperature (37° C./4 hrs) and heated (60° C./4 hrs) aliquots from the same lysate, respectively. Arrows indicate the intein modified P77853 precursors, and NC marks the position of the mature protein. AS-83, AS-146 and AS-79 and to a lesser extent AT-154, AT-149 and AT83 show a modest, heat inducible accumulation of the mature protein (NC). This is consistent with heat inducible splicing. However, the extent of heat inducible splicing alone does not seem to quantitatively reflect the heat inducible enzyme activity in AS-79, AS-83 and AS-146 (compare FIG. 41 with FIG. 40).

[0286] Common Features of Top Candidates

[0287] Thermal-Tolerance of Host Organism

[0288] There is a higher proportion of high activity candidates and a higher proportion of switching candidates seen with inteins from hyperthermophilic and thermophilic organisms than from the mesophilic/UNK ones. This can be seen in the following tables which break the data in Table 1 into the distribution and performance in the intein switching assay for inteins from hyperthermophilic and thermophilic organisms (Table 13) and for inteins from mesophilic and UNK organisms (Table 14). These distributions are shown in where the data is normalized as a fraction of total candidates in that thermo-tolerance group. The fraction of candidates having high activity at high temperatures (FIG. 42A) and higher than 2× switching (FIG. 42 B) is compared for inteins from hyperthermophilic/thermophilic organisms (right bar for each of the four sample labels) to inteins from mesophilic/UNK organisms (left bar for each of the four sample labels). Using chi-squared analysis the activity and switching are seen to be significantly different (p-value<0.05) for these two groups for the T134 insertions, while only the switching is significant for the S158 insertions. Using the Wilcoxon rank sum test on the raw activity data instead of the grouped data showed significant differences (p-value<0.05) for both activity and switching at both sites and both pH 6.5 and 7.5 heat treatments. Despite the higher number of high activity candidates identified from the thermophilic and hyperthermophilic category, the highest number of constructs still appear in the non-permissive, weakly permissive, and strongly permissive categories for all inteins test.

TABLE 13

| | NP | W-P | W-S | W-SS | S-P | S-S | S-SS |
|---|---|---|---|---|---|---|---|
| activity | <10% | 10-30% | 10-30% | 10-30% | >30% | >30% | >30% |
| | WT | WT | WT | WT | WT | WT | WT |
| switching | — | <2X | 2-3X | >3X | <2X | 2-3X | >3X |
| S158 | 53 | 2 | 2 | 10 | 6 | 1 | 5 |
| (pH 6.5) | | | | | | | |
| S158 | 60 | 2 | 1 | 5 | 4 | 3 | 4 |
| (pH 7.5) | | | | | | | |
| T134 | 23 | 17 | 5 | 4 | 24 | 13 | 2 |
| (pH 6.5) | | | | | | | |
| T134 | 33 | 19 | 6 | 0 | 16 | 12 | 2 |
| (pH 7.5) | | | | | | | |
| Total | 169 | 40 | 14 | 19 | 50 | 29 | 13 |

TABLE 14

| | NP | W-P | W-S | W-SS | S-P | S-S | S-SS |
|---|---|---|---|---|---|---|---|
| activity | <10% | 10-30% | 10-30% | 10-30% | >30% | >30% | >30% |
| | WT | WT | WT | WT | WT | WT | WT |
| switching | — | <2X | 2-3X | >3X | <2X | 2-3X | >3X |
| S158 | 46 | 4 | 0 | 1 | 5 | 0 | 0 |
| (pH 6.5) | | | | | | | |
| S158 | 50 | 3 | 0 | 0 | 3 | 0 | 0 |
| (pH 7.5) | | | | | | | |
| T134 | 33 | 15 | 0 | 0 | 10 | 1 | 0 |
| (pH 6.5) | | | | | | | |
| T134 | 31 | 18 | 0 | 0 | 9 | 0 | 1 |
| (pH 7.5) | | | | | | | |
| Total | 160 | 40 | 0 | 1 | 27 | 1 | 1 |

a) High activity at high pretreatment temperature.
b) Inteins with >2X switching.

[0289] Size of Inteins or Presence of Endonuclease Domain

[0290] Referring to FIGS. 43A and B, the differences in the length of the inteins in relation to activity and switching was examined. FIGS. 43A and B illustrate differences in activity and switching based upon length of intein. The fraction of candidates having high activity at high temperatures (FIG. 43A) and higher than 2× switching (FIG. 43 B) is compared for inteins <240 amino acids (left bar for each of the four sample labels) to >240 amino acids (right bar for each of the four sample labels) in length. The longer inteins, >240 amino acids, predominantly contain an identified endonuclease domain, while the shorter inteins do not. Tables 15 and 16, below, show the distribution of performance in the intein switching assay for inteins of length >240 amino acids (Table 15) and the Distribution of performance in the intein switching assay for inteins of length <240 amino acids (Table 16). Whether there was a significant difference in hits between these two groups was examined. By breaking up the groups into longer and shorter inteins, it can be see that there is an increase in the high activity group for both sites for the shorter length inteins and a difference in switching between the T134 and S158 sites. Using the Wilcoxon rank sum test on the un-grouped raw activity data, only the increase in activity for the shorter inteins in the T134 site and the increase in switching for the longer inteins in the T134 site showed significance (p-value<0.05). This fact could be related to the relative proximity of the T134 site to the P77853 active site. Since it is somewhat far away relative to the S158 site, a shorter intein may not be big enough to block the active site and so would have higher activity before splicing. Conversely, the larger inteins may block the active site better as they fill more space which would result in higher switching. The lack of significance of the S158 data could be due to the fact that since it is significantly closer to the active site, small inteins are enough to block activity and so the larger intein doesn't have added advantage.

TABLE 15

| | NP | W-P | W-S | W-SS | S-P | S-S | S-SS |
|---|---|---|---|---|---|---|---|
| activity | <10% | 10-30% | 10-30% | 10-30% | >30% | >30% | >30% |
| | WT | WT | WT | WT | WT | WT | WT |
| switching | — | <2X | 2-3X | >3X | <2X | 2-3X | >3X |
| S158 | 90 | 6 | 2 | 11 | 9 | 1 | 2 |
| (pH 6.5) | | | | | | | |
| S158 | 100 | 5 | 0 | 5 | 6 | 3 | 2 |
| (pH 7.5) | | | | | | | |
| T134 | 54 | 25 | 5 | 4 | 28 | 14 | 2 |
| (pH 6.5) | | | | | | | |
| T134 | 64 | 30 | 5 | 0 | 19 | 11 | 3 |
| (pH 7.5) | | | | | | | |
| Total | 308 | 66 | 12 | 20 | 62 | 29 | 9 |

TABLE 16

| | NP | W-P | W-S | W-SS | S-P | S-S | S-SS |
|---|---|---|---|---|---|---|---|
| activity | <10% | 10-30% | 10-30% | 10-30% | >30% | >30% | >30% |
| | WT | WT | WT | WT | WT | WT | WT |
| switching | — | <2X | 2-3X | >3X | <2X | 2-3X | >3X |
| S158 | 9 | 0 | 0 | 0 | 2 | 0 | 3 |
| (pH 6.5) | | | | | | | |
| S158 | 10 | 0 | 1 | 0 | 1 | 0 | 2 |
| (pH 7.5) | | | | | | | |
| T134 | 2 | 7 | 0 | 0 | 6 | 0 | 0 |
| (pH 6.5) | | | | | | | |
| T134 | 0 | 7 | 1 | 0 | 6 | 1 | 0 |
| (pH 7.5) | | | | | | | |
| Total | 21 | 14 | 2 | 0 | 15 | 1 | 5 |

[0291] Sequence Similarities

[0292] Most inteins possess several conserved domains (also referred to as “blocks”), referred to by letters A, B, C, D, E, F, G, and H. Of these blocks, C, D, E, and H are often found in the endonuclease domain of most inteins. The sequences of the top hits and the A, B, F and G blocks did not show significant clustering into a small group in relation to the rest of the sequences. This suggests that there was not a strong unique sequence feature among all of the top candidates that was different from the remainder of the sequence set. Referring to FIGS. 44A-D, however, inteins that produced Top Hits (classified as >40% wt activity or >30% wt activity and >2× switching) for the S158 insertion site were statistically more likely to have similar sequences (E-value from a blast alignment of <1e-20) that produce top hits than inteins that did not produce top hits. FIGS. 44A-D illustrate sequence similarity amongst top hits. FIGS. 44A and C illustrate those for the S158 P77853 intein insertions, FIGS. 44B and D illustrate those for T134. FIGS. 44A and B illustrate those for heat treatments at pH 6.5. FIGS. 44C and D illustrate those for heat treatments at pH 7.5. “None Hits” represent remainder of sequences not in the Top Hits group. FIGS. 44A-D show the faction of similar sequences (E-value <1e-20) that are also top hits (“Similar Top Hits” in the left bar for each panel) or none hits (“Similar None Hits” in the right bar for each panel). These results were shown to be statistically significant using Chi-Squared analysis. The resultant p-values for both pH 6.5 and pH7.5 were less than 0.05. This suggests that the sequences that are similar to the top hits are more likely than the set as a whole to produce good candidates (at least for S158 insertion sites). As a result it may be useful to at least include sequences that are close to the top hits in embodiments herein. The top hit samples included an intein modified protein having the sequence of one of SEQ ID NOS: 2374, 2423, 2424, 2431, 2451, 2455, 2461, 2466, 2467, 2471, 2479, 2483, 2493, 2507, 2510, 2511, 2518, 2531, 2540, 2541, 2543, 2545, 2548, 2569, 2571, 2574, 2575, 2581, 2582, 2584, 2585, 2586, 2587, 2588, 2590, 2591, 2594, 2602, 2608, 2610, 2612, 2613, 2617, 2618, 2619, 2620, 2624, 2626, 2630, 2636, 2637, 2639, 2643, 2645, 2652, 2656, 2657, 2661, 2664, 2666, 2667, 2668, 2678, 2680, 2682 and 2683.

[0293] Raw data for activity assays for intein modified enzymes in this example is provided in Table 17, below. The sequence of each intein modified protein in samples AS-2 to AS-147 and AT-1 to AT-157, listed in Table 17, is provided in SEQ ID NOS: 2374-2519 and 2530-2686, respectively.

TABLE 17

| | pH 6.5 | | | | pH 7.5 | | | |
|---|---|---|---|---|---|---|---|---|
| | Low Temp. | | High Temp. | | Low Temp. | | High Temp. | |
| | activ- | | activ- | | activ- | | activ- | |
| Name | ity | rmsd | ity | rmsd | ity | rmsd | ity | rmsd |
| P77853 | 7.73 | 2.71 | 7.96 | 3.72 | 6.29 | 1.18 | 6.55 | 1.47 |
| pBS | 0.13 | 0.07 | 0.18 | 0.16 | 0.25 | 0.07 | 0.31 | 0.25 |
| AS-2 | 0.29 | 0.05 | 2.57 | 0.82 | 0.34 | 0.17 | 3.16 | 2.75 |
| AS-4 | 0.81 | 0.32 | 0.99 | 0.14 | 1.03 | 0.38 | 1.66 | 0.76 |
| AS-5 | 0.07 | 0.01 | 0.20 | 0.03 | 0.11 | 0.02 | 0.20 | 0.03 |
| AS-6 | 0.10 | 0.02 | 0.11 | 0.02 | 0.13 | 0.03 | 0.14 | 0.02 |
| AS-7 | 0.09 | 0.01 | 0.09 | 0.02 | 0.19 | 0.17 | 0.22 | 0.19 |
| AS-8 | 0.08 | 0.01 | 0.09 | 0.02 | 0.18 | 0.05 | 0.18 | 0.03 |
| AS-9 | 1.25 | 1.23 | 0.82 | 0.94 | 0.13 | 0.04 | 0.14 | 0.02 |
| AS-10 | 0.10 | 0.01 | 0.09 | 0.02 | 0.15 | 0.04 | 0.16 | 0.02 |
| AS-11 | 0.28 | 0.08 | 0.31 | 0.05 | 0.38 | 0.11 | 0.46 | 0.15 |
| AS-12 | 3.02 | 0.75 | 2.87 | 0.65 | 0.37 | 0.17 | 0.35 | 0.14 |
| AS-13 | 0.36 | 0.06 | 0.39 | 0.10 | 0.35 | 0.23 | 0.36 | 0.24 |
| AS-14 | 0.19 | 0.04 | 0.21 | 0.03 | 0.17 | 0.08 | 0.21 | 0.07 |
| AS-15 | 0.13 | 0.03 | 0.25 | 0.08 | 0.29 | 0.04 | 0.29 | 0.03 |
| AS-16 | 0.17 | 0.06 | 0.28 | 0.07 | 0.26 | 0.06 | 0.23 | 0.05 |
| AS-17 | 0.25 | 0.03 | 0.23 | 0.03 | 0.39 | 0.09 | 0.44 | 0.14 |
| AS-20 | 0.12 | 0.03 | 0.09 | 0.01 | 0.22 | 0.02 | 0.18 | 0.03 |
| AS-21 | 0.12 | 0.05 | 0.10 | 0.02 | 0.25 | 0.03 | 0.25 | 0.05 |
| AS-23 | 0.33 | 0.17 | 0.28 | 0.18 | 0.51 | 0.37 | 0.52 | 0.38 |
| AS-24 | 0.10 | 0.03 | 0.07 | 0.02 | 0.22 | 0.02 | 0.19 | 0.04 |
| AS-25 | 0.10 | 0.03 | 0.08 | 0.02 | 0.22 | 0.03 | 0.18 | 0.05 |
| AS-26 | 0.12 | 0.05 | 0.09 | 0.02 | 0.24 | 0.04 | 0.18 | 0.06 |
| AS-27 | 0.17 | 0.03 | 0.12 | 0.02 | 0.22 | 0.04 | 0.18 | 0.06 |
| AS-29 | 0.36 | 0.06 | 0.29 | 0.07 | 0.27 | 0.06 | 0.24 | 0.09 |
| AS-30 | 0.08 | 0.02 | 0.08 | 0.01 | 0.24 | 0.05 | 0.20 | 0.07 |
| AS-31 | 0.20 | 0.02 | 0.61 | 0.99 | 0.28 | 0.07 | 0.25 | 0.06 |
| AS-32 | 0.12 | 0.05 | 0.13 | 0.09 | 0.19 | 0.06 | 0.18 | 0.05 |
| AS-33 | 0.10 | 0.04 | 0.07 | 0.01 | 0.20 | 0.06 | 0.19 | 0.05 |
| AS-34 | 0.11 | 0.05 | 0.07 | 0.01 | 0.21 | 0.03 | 0.18 | 0.04 |
| AS-36 | 0.29 | 0.05 | 0.21 | 0.04 | 0.26 | 0.03 | 0.23 | 0.06 |
| AS-37 | 0.24 | 0.05 | 0.15 | 0.04 | 0.24 | 0.05 | 0.26 | 0.10 |
| AS-38 | 0.45 | 0.09 | 0.47 | 0.12 | 0.48 | 0.11 | 0.54 | 0.25 |
| AS-40 | 0.28 | 0.05 | 0.30 | 0.06 | 0.42 | 0.12 | 0.44 | 0.16 |
| AS-41 | 0.18 | 0.06 | 0.21 | 0.03 | 0.23 | 0.04 | 0.25 | 0.11 |
| AS-42 | 0.14 | 0.05 | 0.12 | 0.01 | 0.24 | 0.04 | 0.21 | 0.05 |
| AS-43 | 0.12 | 0.04 | 0.08 | 0.02 | 0.22 | 0.04 | 0.21 | 0.07 |
| AS-44 | 2.23 | 0.69 | 2.38 | 0.73 | 0.56 | 0.41 | 0.52 | 0.40 |
| AS-45 | 0.10 | 0.02 | 0.14 | 0.04 | 0.25 | 0.05 | 0.25 | 0.05 |
| AS-46 | 0.10 | 0.04 | 0.45 | 0.91 | 0.23 | 0.03 | 0.20 | 0.04 |
| AS-48 | 0.15 | 0.04 | 0.16 | 0.03 | 0.20 | 0.06 | 0.21 | 0.06 |
| AS-49 | 0.16 | 0.06 | 0.11 | 0.02 | 0.24 | 0.04 | 0.22 | 0.04 |
| AS-50 | 0.56 | 0.18 | 1.48 | 0.49 | 0.38 | 0.22 | 1.33 | 1.64 |
| AS-51 | 2.93 | 0.64 | 6.16 | 1.23 | 1.66 | 1.62 | 3.10 | 2.97 |
| AS-52 | 0.46 | 0.21 | 2.07 | 0.93 | 0.45 | 0.08 | 2.20 | 1.03 |
| AS-53 | 0.42 | 0.12 | 0.65 | 0.20 | 0.24 | 0.06 | 0.33 | 0.13 |
| AS-54 | 0.13 | 0.06 | 0.09 | 0.03 | 0.23 | 0.03 | 0.23 | 0.04 |
| AS-55 | 0.14 | 0.04 | 0.10 | 0.02 | 0.23 | 0.02 | 0.25 | 0.05 |
| AS-56 | 0.10 | 0.03 | 0.20 | 0.02 | 0.23 | 0.03 | 0.28 | 0.08 |
| AS-57 | 0.11 | 0.03 | 0.10 | 0.02 | 0.21 | 0.01 | 0.24 | 0.05 |
| AS-58 | 0.13 | 0.02 | 0.24 | 0.13 | 0.23 | 0.08 | 0.24 | 0.09 |
| AS-59 | 6.74 | 0.84 | 8.38 | 1.87 | 2.64 | 2.71 | 3.89 | 4.02 |
| AS-60 | 0.13 | 0.04 | 0.09 | 0.01 | 0.21 | 0.10 | 0.21 | 0.08 |
| AS-61 | 0.16 | 0.07 | 0.21 | 0.16 | 0.30 | 0.06 | 0.26 | 0.04 |
| AS-62 | 0.14 | 0.07 | 0.08 | 0.01 | 0.29 | 0.04 | 0.24 | 0.03 |
| AS-63 | 0.11 | 0.05 | 0.07 | 0.01 | 0.22 | 0.03 | 0.24 | 0.05 |
| AS-64 | 0.13 | 0.06 | 0.18 | 0.03 | 0.30 | 0.09 | 0.39 | 0.30 |
| AS-65 | 0.24 | 0.06 | 0.24 | 0.09 | 0.28 | 0.07 | 0.41 | 0.28 |
| AS-66 | 0.16 | 0.07 | 0.12 | 0.04 | 0.24 | 0.04 | 0.24 | 0.05 |
| AS-67 | 0.13 | 0.04 | 0.11 | 0.04 | 0.26 | 0.03 | 0.62 | 0.56 |
| AS-68 | 0.09 | 0.03 | 0.06 | 0.01 | 0.24 | 0.04 | 0.29 | 0.14 |
| AS-69 | 0.14 | 0.04 | 0.15 | 0.04 | 0.24 | 0.03 | 0.24 | 0.06 |
| AS-70 | 0.10 | 0.01 | 0.63 | 0.92 | 0.26 | 0.04 | 0.29 | 0.05 |
| AS-71 | 0.11 | 0.04 | 0.44 | 0.60 | 0.25 | 0.09 | 0.27 | 0.05 |
| AS-72 | 0.11 | 0.04 | 0.12 | 0.06 | 0.15 | 0.11 | 0.21 | 0.10 |
| AS-73 | 0.19 | 0.05 | 0.16 | 0.05 | 0.28 | 0.03 | 0.27 | 0.05 |
| AS-74 | 0.36 | 0.03 | 0.26 | 0.03 | 0.31 | 0.04 | 0.28 | 0.04 |
| AS-75 | 0.49 | 0.12 | 0.53 | 0.17 | 0.46 | 0.19 | 0.44 | 0.13 |
| AS-76 | 0.14 | 0.07 | 0.09 | 0.03 | 0.18 | 0.14 | 0.27 | 0.14 |
| AS-77 | 0.12 | 0.06 | 0.07 | 0.03 | 0.26 | 0.03 | 0.29 | 0.13 |
| AS-78 | 0.88 | 1.02 | 0.41 | 0.84 | 0.29 | 0.04 | 0.29 | 0.08 |
| AS-79 | 0.87 | 0.46 | 6.62 | 1.17 | 1.31 | 0.57 | 7.42 | 2.72 |
| AS-80 | 0.15 | 0.03 | 0.96 | 0.14 | 0.29 | 0.05 | 0.60 | 0.46 |
| AS-81 | 0.12 | 0.04 | 0.19 | 0.06 | 0.31 | 0.03 | 0.26 | 0.05 |
| AS-82 | 0.10 | 0.02 | 0.32 | 0.18 | 0.20 | 0.10 | 0.27 | 0.10 |
| AS-83 | 2.28 | 0.99 | 9.06 | 0.67 | 1.04 | 1.49 | 3.85 | 4.56 |
| AS-84 | 0.25 | 0.07 | 0.82 | 0.31 | 0.08 | 0.08 | 0.69 | 0.68 |
| AS-85 | 0.13 | 0.05 | 0.24 | 0.12 | 0.28 | 0.07 | 0.33 | 0.03 |
| AS-86 | 0.24 | 0.06 | 1.85 | 0.81 | 0.25 | 0.13 | 1.47 | 1.65 |
| AS-87 | 0.12 | 0.05 | 0.11 | 0.03 | 0.26 | 0.05 | 0.30 | 0.06 |
| AS-88 | 0.23 | 0.05 | 0.40 | 0.06 | 0.28 | 0.07 | 0.42 | 0.12 |
| AS-89 | 2.53 | 0.54 | 3.74 | 0.19 | 2.10 | 1.91 | 5.06 | 2.88 |
| AS-90 | 0.18 | 0.07 | 0.16 | 0.05 | 0.29 | 0.07 | 0.33 | 0.06 |
| AS-91 | 0.31 | 0.05 | 0.29 | 0.07 | 0.32 | 0.06 | 0.33 | 0.09 |
| AS-92 | 0.15 | 0.05 | 0.12 | 0.02 | 0.38 | 0.11 | 0.45 | 0.25 |
| AS-93 | 0.17 | 0.07 | 0.26 | 0.22 | 0.27 | 0.06 | 0.30 | 0.06 |
| AS-94 | 0.51 | 0.13 | 0.58 | 0.15 | 1.67 | 0.25 | 2.89 | 1.24 |
| AS-95 | 6.79 | 1.94 | 9.28 | 1.26 | 3.02 | 1.74 | 4.90 | 3.90 |
| AS-96 | 0.13 | 0.06 | 0.61 | 0.11 | 0.22 | 0.13 | 0.36 | 0.19 |
| AS-97 | 0.14 | 0.06 | 0.25 | 0.06 | 0.37 | 0.10 | 0.32 | 0.07 |
| AS-98 | 0.12 | 0.06 | 0.12 | 0.04 | 0.30 | 0.12 | 0.28 | 0.05 |
| AS-99 | 6.54 | 0.91 | 9.17 | 0.99 | 3.11 | 2.69 | 6.25 | 4.93 |
| AS-100 | 0.23 | 0.08 | 1.74 | 0.16 | 0.33 | 0.12 | 1.85 | 1.67 |
| AS-101 | 0.12 | 0.06 | 0.13 | 0.05 | 0.27 | 0.07 | 0.30 | 0.06 |
| AS-102 | 0.19 | 0.09 | 1.01 | 0.32 | 0.32 | 0.10 | 0.61 | 0.45 |
| AS-103 | 0.14 | 0.06 | 0.18 | 0.04 | 0.35 | 0.08 | 0.35 | 0.10 |
| AS-104 | 0.10 | 0.04 | 0.08 | 0.01 | 0.25 | 0.05 | 0.26 | 0.06 |
| AS-105 | 0.27 | 0.04 | 0.88 | 0.17 | 0.29 | 0.11 | 0.48 | 0.30 |
| AS-106 | 0.27 | 0.12 | 0.87 | 0.36 | 0.24 | 0.05 | 0.32 | 0.11 |
| AS-107 | 0.32 | 0.06 | 2.49 | 0.45 | 0.30 | 0.09 | 0.89 | 0.21 |
| AS-108 | 0.16 | 0.04 | 0.22 | 0.04 | 0.25 | 0.07 | 0.28 | 0.06 |
| AS-109 | 0.16 | 0.04 | 0.12 | 0.03 | 0.26 | 0.06 | 0.30 | 0.07 |
| AS-110 | 0.22 | 0.06 | 0.24 | 0.05 | 0.25 | 0.08 | 0.34 | 0.09 |
| AS-111 | 4.74 | 0.60 | 6.27 | 0.98 | 3.90 | 2.25 | 5.31 | 4.01 |
| AS-112 | 0.12 | 0.03 | 0.09 | 0.01 | 0.29 | 0.11 | 0.26 | 0.11 |
| AS-113 | 0.20 | 0.03 | 0.14 | 0.02 | 0.32 | 0.13 | 0.31 | 0.11 |
| AS-114 | 0.14 | 0.04 | 0.10 | 0.02 | 0.32 | 0.06 | 0.28 | 0.09 |
| AS-115 | 0.19 | 0.24 | 0.24 | 0.43 | 0.29 | 0.06 | 0.28 | 0.08 |
| AS-116 | 0.39 | 0.16 | 0.33 | 0.03 | 0.36 | 0.12 | 0.35 | 0.19 |
| AS-117 | 0.20 | 0.07 | 0.15 | 0.05 | 0.38 | 0.17 | 0.40 | 0.18 |
| AS-118 | 0.10 | 0.04 | 0.08 | 0.02 | 0.29 | 0.08 | 0.29 | 0.10 |
| AS-119 | 0.13 | 0.05 | 0.10 | 0.04 | 0.30 | 0.09 | 0.29 | 0.12 |
| AS-120 | 0.11 | 0.04 | 0.23 | 0.36 | 0.31 | 0.08 | 0.29 | 0.10 |
| AS-121 | 2.86 | 0.50 | 3.63 | 1.39 | 1.58 | 0.27 | 3.28 | 1.08 |
| AS-122 | 0.17 | 0.05 | 1.35 | 1.45 | 0.29 | 0.08 | 0.36 | 0.10 |
| AS-123 | 1.70 | 1.56 | 2.65 | 2.70 | 0.39 | 0.08 | 0.37 | 0.11 |
| AS-124 | 0.21 | 0.05 | 0.15 | 0.02 | 0.30 | 0.22 | 0.35 | 0.30 |
| AS-125 | 0.15 | 0.07 | 0.11 | 0.02 | 0.30 | 0.11 | 0.30 | 0.07 |
| AS-128 | 1.57 | 0.42 | 1.86 | 1.10 | 1.08 | 1.08 | 1.24 | 1.30 |
| AS-129 | 0.17 | 0.05 | 0.19 | 0.02 | 0.31 | 0.06 | 0.32 | 0.07 |
| AS-131 | 0.13 | 0.04 | 0.08 | 0.02 | 0.31 | 0.06 | 0.31 | 0.08 |
| AS-132 | 0.44 | 0.06 | 0.81 | 0.17 | 0.37 | 0.08 | 0.57 | 0.16 |
| AS-133 | 0.16 | 0.06 | 0.08 | 0.02 | 0.29 | 0.11 | 0.29 | 0.12 |
| AS-134 | 1.98 | 0.69 | 1.91 | 0.85 | 1.21 | 0.62 | 1.72 | 1.41 |
| AS-135 | 2.95 | 0.74 | 4.52 | 1.23 | 1.36 | 1.64 | 1.39 | 1.71 |
| AS-136 | 0.13 | 0.05 | 1.62 | 2.06 | 0.30 | 0.08 | 0.37 | 0.09 |
| AS-137 | 0.41 | 0.56 | 1.61 | 1.81 | 0.44 | 0.36 | 0.44 | 0.28 |
| AS-138 | 4.15 | 0.84 | 4.85 | 1.83 | 2.48 | 1.34 | 3.23 | 1.94 |
| AS-139 | 3.29 | 0.76 | 5.98 | 2.29 | 1.39 | 1.33 | 2.24 | 2.30 |
| AS-140 | 0.16 | 0.06 | 0.33 | 0.07 | 0.34 | 0.05 | 0.35 | 0.07 |
| AS-141 | 0.57 | 0.24 | 1.54 | 0.73 | 0.45 | 0.13 | 0.68 | 0.32 |
| AS-142 | 0.17 | 0.06 | 0.21 | 0.06 | 0.36 | 0.08 | 0.35 | 0.14 |
| AS-143 | 0.16 | 0.07 | 0.18 | 0.06 | 0.33 | 0.07 | 0.31 | 0.08 |
| AS-144 | 0.17 | 0.09 | 0.17 | 0.09 | 0.34 | 0.10 | 0.31 | 0.14 |
| AS-145 | 0.17 | 0.08 | 0.26 | 0.11 | 0.33 | 0.08 | 0.41 | 0.18 |
| AS-146 | 0.45 | 0.15 | 3.93 | 0.54 | 0.51 | 0.23 | 1.64 | 1.43 |
| AS-147 | 0.21 | 0.09 | 0.49 | 0.48 | 0.30 | 0.09 | 0.34 | 0.12 |
| AT-1 | 1.73 | 0.32 | 3.15 | 0.89 | 1.40 | 0.37 | 1.80 | 0.68 |
| AT-2 | 7.31 | 2.05 | 8.04 | 1.53 | 4.91 | 0.38 | 10.14 | 0.55 |
| AT-4 | 0.38 | 0.11 | 0.61 | 0.14 | 0.33 | 0.18 | 0.39 | 0.16 |
| AT-5 | 0.17 | 0.03 | 0.62 | 0.15 | 0.21 | 0.04 | 0.48 | 0.15 |
| AT-6 | 0.12 | 0.02 | 0.33 | 0.18 | 0.20 | 0.04 | 0.22 | 0.04 |
| AT-7 | 0.44 | 0.12 | 0.55 | 0.19 | 0.56 | 0.25 | 0.63 | 0.26 |
| AT-8 | 0.07 | 0.01 | 0.24 | 0.19 | 0.19 | 0.06 | 0.22 | 0.05 |
| AT-9 | 1.88 | 1.01 | 1.24 | 0.89 | 0.94 | 1.05 | 1.18 | 1.45 |
| AT-10 | 0.94 | 0.38 | 1.04 | 0.45 | 1.35 | 0.99 | 1.88 | 1.72 |
| AT-11 | 2.42 | 1.00 | 1.92 | 0.61 | 2.62 | 1.09 | 3.90 | 1.71 |
| AT-12 | 4.61 | 0.93 | 5.35 | 2.25 | 2.03 | 1.77 | 4.01 | 3.23 |
| AT-13 | 0.23 | 0.06 | 0.38 | 0.11 | 0.22 | 0.09 | 0.23 | 0.10 |
| AT-14 | 4.88 | 1.34 | 7.17 | 1.03 | 3.04 | 1.06 | 8.19 | 1.79 |
| AT-16 | 2.79 | 0.95 | 3.27 | 0.73 | 1.03 | 0.70 | 0.98 | 1.11 |
| AT-17 | 0.73 | 0.07 | 0.62 | 0.16 | 0.75 | 0.31 | 0.69 | 0.28 |
| AT-19 | 3.27 | 1.75 | 4.17 | 1.41 | 0.38 | 0.22 | 0.46 | 0.31 |
| AT-20 | 0.19 | 0.09 | 0.22 | 0.23 | 0.17 | 0.08 | 0.18 | 0.09 |
| AT-21 | 0.80 | 0.16 | 0.68 | 0.09 | 1.33 | 0.40 | 1.30 | 0.48 |
| AT-22 | 0.14 | 0.08 | 0.14 | 0.13 | 0.30 | 0.15 | 0.28 | 0.09 |
| AT-23 | 1.01 | 0.27 | 0.94 | 0.42 | 0.90 | 0.51 | 1.27 | 0.88 |
| AT-24 | 0.16 | 0.05 | 0.26 | 0.16 | 0.24 | 0.06 | 0.23 | 0.04 |
| AT-26 | 0.14 | 0.04 | 0.28 | 0.13 | 0.37 | 0.15 | 0.40 | 0.27 |
| AT-27 | 0.14 | 0.07 | 0.30 | 0.31 | 0.27 | 0.07 | 0.28 | 0.09 |
| AT-28 | 0.90 | 0.14 | 1.42 | 0.31 | 0.81 | 0.32 | 1.21 | 0.59 |
| AT-29 | 0.17 | 0.03 | 0.22 | 0.07 | 0.29 | 0.06 | 0.29 | 0.07 |
| AT-30 | 2.10 | 0.31 | 2.16 | 0.49 | 0.92 | 0.71 | 1.55 | 1.21 |
| AT-31 | 0.77 | 0.18 | 0.62 | 0.17 | 0.65 | 0.14 | 0.93 | 0.34 |
| AT-32 | 0.20 | 0.06 | 0.19 | 0.03 | 0.25 | 0.05 | 0.25 | 0.06 |
| AT-33 | 0.17 | 0.05 | 0.13 | 0.03 | 0.24 | 0.04 | 0.26 | 0.06 |
| AT-34 | 0.15 | 0.07 | 0.10 | 0.05 | 0.25 | 0.05 | 0.24 | 0.07 |
| AT-36 | 0.28 | 0.05 | 0.29 | 0.04 | 0.39 | 0.09 | 0.44 | 0.12 |
| AT-38 | 0.70 | 0.30 | 0.45 | 0.13 | 0.71 | 0.27 | 0.75 | 0.31 |
| AT-39 | 0.14 | 0.05 | 0.12 | 0.05 | 0.26 | 0.08 | 0.25 | 0.09 |
| AT-40 | 2.28 | 0.31 | 2.55 | 0.90 | 2.39 | 0.95 | 3.83 | 1.61 |
| AT-41 | 1.32 | 0.15 | 1.61 | 0.17 | 0.63 | 0.37 | 0.94 | 0.83 |
| AT-42 | 2.03 | 0.30 | 2.90 | 0.82 | 2.64 | 1.24 | 3.95 | 1.91 |
| AT-43 | 1.28 | 0.43 | 0.85 | 0.17 | 1.32 | 0.23 | 1.35 | 0.27 |
| AT-44 | 2.39 | 0.47 | 2.53 | 0.88 | 1.97 | 1.09 | 2.26 | 1.23 |
| AT-45 | 1.42 | 0.32 | 3.70 | 0.31 | 0.95 | 0.58 | 2.07 | 1.86 |
| AT-46 | 1.49 | 0.28 | 3.18 | 0.40 | 1.07 | 0.31 | 2.36 | 0.99 |
| AT-47 | 0.16 | 0.07 | 0.08 | 0.02 | 0.61 | 0.96 | 0.60 | 1.01 |
| AT-48 | 1.03 | 0.18 | 1.03 | 0.10 | 0.85 | 0.27 | 1.17 | 0.37 |
| AT-49 | 0.33 | 0.34 | 0.29 | 0.42 | 0.47 | 0.33 | 0.49 | 0.34 |
| AT-50 | 0.61 | 0.19 | 1.68 | 0.13 | 0.48 | 0.18 | 1.08 | 0.50 |
| AT-51 | 0.27 | 0.11 | 0.47 | 0.11 | 0.32 | 0.10 | 0.43 | 0.13 |
| AT-52 | 1.11 | 0.24 | 3.04 | 0.38 | 0.83 | 0.46 | 1.55 | 1.07 |
| AT-53 | 0.92 | 0.15 | 3.37 | 0.45 | 0.43 | 0.17 | 0.70 | 0.47 |
| AT-54 | 0.14 | 0.15 | 0.18 | 0.06 | 0.34 | 0.18 | 0.32 | 0.16 |
| AT-55 | 1.25 | 0.27 | 3.51 | 0.56 | 1.15 | 0.66 | 1.79 | 1.40 |
| AT-56 | 4.23 | 0.60 | 5.49 | 0.97 | 4.05 | 1.44 | 4.27 | 1.56 |
| AT-57 | 4.23 | 0.64 | 4.88 | 0.19 | 2.33 | 1.02 | 3.34 | 1.95 |
| AT-58 | 5.02 | 0.64 | 6.82 | 0.40 | 4.44 | 0.33 | 7.62 | 0.62 |
| AT-59 | 4.88 | 0.46 | 5.18 | 0.99 | 4.95 | 1.72 | 5.75 | 2.02 |
| AT-60 | 0.61 | 0.09 | 1.10 | 0.14 | 0.71 | 0.17 | 0.95 | 0.23 |
| AT-61 | 3.18 | 0.25 | 4.83 | 0.36 | 2.84 | 1.02 | 4.99 | 1.82 |
| AT-62 | 1.73 | 0.40 | 2.45 | 0.68 | 1.82 | 0.56 | 2.76 | 0.84 |
| AT-63 | 0.36 | 0.12 | 1.30 | 0.19 | 0.46 | 0.17 | 1.06 | 0.53 |
| AT-64 | 1.61 | 0.33 | 2.21 | 0.53 | 1.14 | 0.52 | 1.74 | 0.85 |
| AT-65 | 2.43 | 0.39 | 4.20 | 1.67 | 2.14 | 0.74 | 5.40 | 1.68 |
| AT-66 | 1.43 | 0.23 | 2.35 | 0.58 | 0.88 | 0.40 | 1.21 | 0.49 |
| AT-67 | 0.53 | 0.05 | 0.88 | 0.18 | 0.62 | 0.09 | 0.79 | 0.08 |
| AT-68 | 0.75 | 0.34 | 1.29 | 0.46 | 0.74 | 0.44 | 1.02 | 0.69 |
| AT-69 | 1.72 | 0.27 | 1.44 | 0.30 | 1.35 | 0.75 | 1.67 | 1.06 |
| AT-70 | 0.23 | 0.09 | 0.17 | 0.06 | 0.26 | 0.05 | 0.30 | 0.03 |
| AT-71 | 0.53 | 0.25 | 0.70 | 0.37 | 1.40 | 0.56 | 2.24 | 1.11 |
| AT-72 | 0.19 | 0.07 | 0.14 | 0.03 | 0.30 | 0.06 | 0.33 | 0.07 |
| AT-73 | 3.50 | 0.28 | 5.60 | 0.54 | 4.06 | 1.64 | 4.48 | 1.66 |
| AT-74 | 1.25 | 0.11 | 1.35 | 0.20 | 1.30 | 0.43 | 1.70 | 0.60 |
| AT-75 | 0.36 | 0.07 | 0.38 | 0.07 | 0.44 | 0.08 | 0.47 | 0.11 |
| AT-76 | 0.24 | 0.06 | 0.35 | 0.13 | 0.44 | 0.11 | 0.53 | 0.14 |
| AT-78 | 1.08 | 0.25 | 1.49 | 0.21 | 1.02 | 0.38 | 1.65 | 0.92 |
| AT-79 | 2.70 | 1.16 | 5.09 | 0.67 | 3.66 | 1.28 | 7.10 | 2.55 |
| AT-80 | 0.27 | 0.03 | 0.71 | 0.05 | 0.40 | 0.03 | 0.61 | 0.07 |
| AT-81 | 2.33 | 0.37 | 4.23 | 0.34 | 0.86 | 0.82 | 2.59 | 2.56 |
| AT-82 | 1.93 | 0.40 | 1.85 | 0.23 | 1.51 | 0.09 | 2.37 | 0.67 |
| AT-83 | 2.66 | 0.49 | 6.32 | 1.23 | 2.32 | 0.43 | 8.14 | 0.79 |
| AT-84 | 3.06 | 0.39 | 3.84 | 0.59 | 2.79 | 1.09 | 3.14 | 2.36 |
| AT-85 | 1.44 | 0.20 | 1.92 | 0.10 | 1.29 | 0.41 | 2.38 | 1.14 |
| AT-86 | 0.68 | 0.06 | 1.56 | 0.19 | 0.60 | 0.10 | 1.14 | 0.37 |
| AT-87 | 0.21 | 0.08 | 0.45 | 0.16 | 0.33 | 0.04 | 0.35 | 0.06 |
| AT-88 | 1.61 | 0.20 | 3.60 | 0.47 | 1.10 | 0.30 | 2.45 | 1.16 |
| AT-89 | 1.53 | 0.14 | 4.46 | 0.39 | 1.65 | 0.42 | 4.00 | 1.38 |
| AT-90 | 3.10 | 0.84 | 5.44 | 0.80 | 3.98 | 1.41 | 5.64 | 2.16 |
| AT-91 | 0.81 | 0.22 | 3.12 | 0.34 | 1.22 | 0.28 | 3.50 | 1.08 |
| AT-92 | 1.43 | 0.32 | 2.35 | 0.40 | 1.51 | 0.28 | 1.57 | 0.20 |
| AT-93 | 0.36 | 0.07 | 0.36 | 0.05 | 0.79 | 0.04 | 0.86 | 0.16 |
| AT-94 | 0.21 | 0.06 | 0.19 | 0.03 | 0.50 | 0.06 | 0.54 | 0.06 |
| AT-95 | 5.18 | 0.67 | 5.48 | 0.60 | 5.83 | 0.76 | 10.20 | 0.83 |
| AT-96 | 0.20 | 0.05 | 0.24 | 0.03 | 0.36 | 0.07 | 0.40 | 0.05 |
| AT-97 | 1.08 | 0.12 | 1.65 | 0.25 | 1.04 | 0.34 | 2.58 | 1.03 |
| AT-98 | 0.17 | 0.09 | 0.25 | 0.12 | 0.32 | 0.08 | 0.31 | 0.06 |
| AT-99 | 0.17 | 0.08 | 0.30 | 0.17 | 0.34 | 0.09 | 0.34 | 0.06 |
| AT-100 | 0.94 | 0.12 | 1.65 | 0.59 | 0.73 | 0.28 | 1.62 | 0.71 |
| AT-101 | 3.49 | 0.30 | 4.77 | 1.02 | 2.21 | 1.05 | 5.60 | 2.94 |
| AT-102 | 0.85 | 0.17 | 1.96 | 0.38 | 0.37 | 0.18 | 0.60 | 0.44 |
| AT-103 | 1.13 | 0.21 | 1.50 | 0.25 | 0.56 | 0.38 | 0.89 | 0.71 |
| AT-104 | 0.32 | 0.07 | 0.70 | 0.14 | 0.30 | 0.13 | 0.41 | 0.24 |
| AT-105 | 0.25 | 0.06 | 0.81 | 0.25 | 0.24 | 0.08 | 0.32 | 0.18 |
| AT-106 | 0.27 | 0.05 | 0.40 | 0.07 | 0.21 | 0.11 | 0.20 | 0.12 |
| AT-107 | 2.10 | 0.43 | 3.28 | 0.27 | 0.57 | 0.42 | 1.16 | 0.96 |
| AT-108 | 2.81 | 0.60 | 3.77 | 0.70 | 0.72 | 0.61 | 1.63 | 1.90 |
| AT-109 | 0.89 | 0.11 | 1.95 | 0.49 | 0.28 | 0.10 | 0.56 | 0.24 |
| AT-110 | 1.24 | 0.44 | 3.55 | 1.05 | 0.23 | 0.11 | 0.40 | 0.43 |
| AT-111 | 0.63 | 0.40 | 0.38 | 0.17 | 0.18 | 0.07 | 0.16 | 0.06 |
| AT-112 | 0.20 | 0.09 | 0.24 | 0.10 | 0.24 | 0.11 | 0.23 | 0.15 |
| AT-113 | 1.82 | 0.35 | 1.70 | 1.13 | 0.77 | 0.42 | 0.96 | 0.75 |
| AT-114 | 2.01 | 0.48 | 2.61 | 0.64 | 2.13 | 0.92 | 3.17 | 1.40 |
| AT-115 | 0.18 | 0.04 | 0.19 | 0.03 | 0.20 | 0.10 | 0.18 | 0.08 |
| AT-116 | 1.36 | 0.54 | 2.97 | 0.47 | 1.06 | 0.42 | 1.42 | 0.64 |
| AT-117 | 1.32 | 0.21 | 1.66 | 0.14 | 1.22 | 0.49 | 1.75 | 0.92 |
| AT-118 | 1.10 | 0.82 | 1.45 | 0.73 | 0.42 | 0.53 | 0.58 | 0.89 |
| AT-119 | 0.55 | 0.22 | 0.90 | 0.22 | 0.40 | 0.20 | 0.51 | 0.43 |
| AT-120 | 0.78 | 0.26 | 0.66 | 0.22 | 1.05 | 0.09 | 1.02 | 0.17 |
| AT-121 | 1.09 | 0.29 | 1.35 | 0.26 | 0.49 | 0.33 | 0.69 | 0.68 |
| AT-122 | 0.12 | 0.04 | 0.25 | 0.06 | 0.26 | 0.11 | 0.24 | 0.10 |
| AT-123 | 5.43 | 1.34 | 8.75 | 1.18 | 0.38 | 0.21 | 0.41 | 0.36 |
| AT-124 | 0.16 | 0.07 | 0.11 | 0.03 | 0.25 | 0.08 | 0.25 | 0.09 |
| AT-126 | 1.83 | 0.81 | 1.60 | 0.99 | 0.66 | 0.36 | 0.76 | 0.41 |
| AT-127 | 2.87 | 3.87 | 3.81 | 4.05 | 1.63 | 2.19 | 2.34 | 3.62 |
| AT-128 | 1.45 | 0.29 | 4.19 | 0.41 | 0.47 | 0.48 | 0.95 | 1.20 |
| AT-129 | 0.13 | 0.04 | 0.18 | 0.03 | 0.24 | 0.07 | 0.26 | 0.07 |
| AT-131 | 0.19 | 0.05 | 0.18 | 0.03 | 0.28 | 0.08 | 0.26 | 0.11 |
| AT-132 | 3.41 | 1.31 | 8.24 | 2.03 | 0.91 | 0.65 | 2.97 | 2.50 |
| AT-133 | 1.97 | 0.12 | 1.52 | 0.14 | 0.68 | 0.49 | 0.51 | 0.51 |
| AT-135 | 2.14 | 0.40 | 2.74 | 0.45 | 2.72 | 0.38 | 4.69 | 0.49 |
| AT-136 | 0.39 | 0.08 | 0.34 | 0.13 | 0.35 | 0.09 | 0.37 | 0.11 |
| AT-137 | 2.03 | 0.34 | 4.56 | 0.51 | 0.27 | 0.07 | 0.32 | 0.10 |
| AT-138 | 6.44 | 1.06 | 10.23 | 1.40 | 1.79 | 1.36 | 2.32 | 1.99 |
| AT-139 | 5.44 | 0.52 | 9.77 | 0.99 | 1.19 | 0.30 | 2.74 | 1.42 |
| AT-140 | 0.25 | 0.28 | 0.43 | 0.36 | 0.42 | 0.45 | 0.67 | 0.98 |
| AT-141 | 0.19 | 0.04 | 0.96 | 0.40 | 0.29 | 0.06 | 0.34 | 0.17 |
| AT-142 | 0.20 | 0.09 | 0.69 | 0.41 | 0.27 | 0.07 | 0.40 | 0.24 |
| AT-143 | 0.78 | 0.12 | 2.25 | 0.56 | 0.20 | 0.11 | 0.22 | 0.11 |
| AT-144 | 0.25 | 0.06 | 0.80 | 0.23 | 0.26 | 0.06 | 0.26 | 0.08 |
| AT-145 | 0.11 | 0.04 | 0.20 | 0.04 | 0.25 | 0.07 | 0.27 | 0.08 |
| AT-146 | 1.15 | 0.41 | 1.94 | 0.49 | 0.33 | 0.08 | 0.32 | 0.11 |
| AT-147 | 0.30 | 0.07 | 0.77 | 0.25 | 0.24 | 0.07 | 0.22 | 0.06 |
| AT-148 | 0.39 | 0.10 | 0.64 | 0.10 | 0.26 | 0.11 | 0.30 | 0.18 |
| AT-149 | 1.66 | 0.15 | 4.14 | 0.38 | 0.28 | 0.09 | 0.46 | 0.18 |
| AT-150 | 1.12 | 0.16 | 1.32 | 0.50 | 0.83 | 0.24 | 1.04 | 0.51 |
| AT-151 | 5.76 | 0.75 | 7.88 | 1.17 | 1.46 | 0.84 | 2.30 | 1.71 |
| AT-153 | 5.93 | 1.82 | 11.79 | 1.45 | 2.27 | 2.30 | 4.14 | 4.50 |
| AT-154 | 2.03 | 0.37 | 5.73 | 1.48 | 0.97 | 0.64 | 2.10 | 1.89 |
| AT-155 | 0.26 | 0.03 | 0.12 | 0.01 | 0.23 | 0.11 | 0.21 | 0.11 |
| AT-156 | 0.18 | 0.04 | 0.20 | 0.03 | 0.30 | 0.07 | 0.32 | 0.11 |
| AT-157 | 0.15 | 0.06 | 0.15 | 0.03 | 0.25 | 0.05 | 0.30 | 0.06 |

### Example 16

### Mutant Intein Modified Proteins of Example 15

[0294] Sample AS-146 from example 15 was subjected to mutagenesis. The amino acid sequence of the intein modified protein of AS-146 (SEQ ID NO: 2518) is presented below followed by the amino acid sequences of eight AS-146 mutants (SEQ ID NOS: 3315-3322). The intein amino acid sequence in each SEQ ID NOS: 2518 and 3315-3322 is shown below by underlining. Mutations in the intein modified protein of SEQ ID NOS 3314-3322 relative to the intein modified protein of SEQ ID NO: 2518 are shown below in larger, bold font. Following the amino acid sequences, the nucleic acid encoding the intein modified protein of AS-146 (SEQ ID NO: 2832) is presented and followed by the nucleic acid sequences of SEQ ID NOS: 3323-3330, which encode the intein modified protein mutants of SEQ ID NOS: 3315-3322, resepectively. The intein encoding sequence in each of SEQ ID NOS: 2832 and 3323-3330 is shown below by underlining. Mutations in the intein modied protein encoding sequence in SEQ ID NOS: 3323-3330 are shown below in larger, bold font. All of the results were unexpected in that these inteins were screened for performance not knowing if they would work or not. Many had no previous experimental verification of their function as inteins.

AS-146(P77853_Tko_RadA_intein_5158)
(SEQ ID NO: 2518)
MQTSITLTSNASGTEDGYYYELWKDTGNTTMTVYTQGRFSCQWSNINNALFRTGKKYNQNWQSLGTIRITYSATYNPNGNSYL
CIYGWSTNPLVEFYIVESWGNWRPPGATSLGQVTIDGGTYDIYRTTRVNQPCFAKDTKVYYENDTLVHFESIEDMYHKYASLG
REVPFDNGYAVPLETVSVYTFDPKTGEVKRTKASYIYREKVEKLAEIRLSNGYLLRITLLHPVLVFRNGLQWVPAGMIKPGDL
IVGIRSVPANAATIEESEAYFLGLFVAEGTSNPLSITTGSEELKDFIVSFIEDHDGYTPTVEVRRGLYRILFRKKTAEWLGEL
ATSNASTKVVPERVLNAGESAIAAFLAGYLDGDGYLTESIVELVTKSRELADGLVFLLKRLGITPRISQKTIEGSVYYRIYIT
GEDRKTFEKVLEKSRIKPGEMNEGGVGRYPPALGKFLGKLYSEFRLPKRDNETAYHILTRSRNVWFTEKTLSRIEEYFREALE
KLSEARKALEMGDKPELPFPWTAITKYGFTDRQVANYRTRGLPKRPELKEKVVSALLKEIERLEGVAKLALETIELARRLEFH
EVSSVEVVDYNDWVYDLVIPETHNFIAPNGLVLHNSIVGTATFDQYWSVRTSKRTSGTVTVTDHFRAWANRGLNLGTIDQITL
CVEGYQSSGSANITQNTFSQGSSSGSSGGSSGSTTTTRIECENMSLSGPYVSRITNPFNGIALYANGDTARATVNFPASRNYN
FRLRGCGNNNNLARVDLRIDGRTVGTFYYQGTYPWEAPIDNVYVSAGSHTVEITVTADNGTWDVYADYLVIQ
AS-146-2(4 int)
(SEQ ID NO: 3315)
MQTSITLTSNASGTEDGYYYELWKDTGNTTMTVYTQGRFSCQWSNINNALFRTGKKYNQNWQSLGTIRITYSATYNPNGNSYL
CIYGWSTNPLVEFYIVESWGNWRPPGATSLGQVTIDGGTYDIYRTTRVNQPCFAKDTKVYYENDTLVHFESIEDMYHKYASLG
REVPFDNGYAVPLETVSVYTFDPKTGEVKRTKASYIYREKVEKLAEIRLSNGYLLRITLLHPVLVERNGLQWVPAGMIKPGDL
IVGIRSVPANAATIEESEAYFLGLFVAEGTSNPLSITTGSEELKDFIVSFIEDHDGYTPTVEVRRGLYRILFHKKTAEWLGEL
ATSNASTKVVPERVLNAGESAIAAFLAGYLDGDGYLTESIVELVTKSRELADGLVFLLKRLGITPWISQKTIEGSVYYRVYIM
GEDRKTFEKVLEKSRIKPGEMNEGGVGRYPPALGKFLGKLYSEFRLPKRDNETAYHILTRSRNVWFTEKTLSRIEEYFREALE
KLSEARKALEMGDKPELPFPWTAITKYGFTDRQVANYRTRGLPKRPELKEKVVSALLKEIERLEGVAKLALETIELARRLEFH
EVSSVEVVDYNDWVYDLVIPETHNFIAPNGLVLHNSIVGTATFDQYWSVRTSKRTSGTVTVTDHFRAWANRGLNLGTIDQITL
CVEGYQSSGSANITQNTFSQGSSSGSSGGSSGSTTTTRIECENMSLSGPYVSRITNPFNGIALYANGDTARATVNFPASRNYN
FRLRGCGNNNNLARVDLRIDGRTVGTFYYQGTYPWEAPIDNVYVSAGSHTVEITVTADNGTWDVYADYLVIQ
AS-146-4(5 int)
(SEQ ID NO: 3316)
MQTSITLTSNASGTFDGYYYELWKDTGNTTMTVYTQGRFSCQWSNINNALFRTGKKYNQNWQSLGTIRITYSATYNPNGNSYL
CIYGWSTNPLVEFYIVESWGNWRPPGATSLGQVTIDGGTYDIYRTTRVNQPCFAKDTKVYYENDTLVHFESIEDMYHKYASLG
REVPFDNGYAVPLETVSVYTFEPKTGEVKRTKASYIYREKVEKLAEIRLSNGYLLRITLLHPVLVFRNGLQWVPAGMINPGDL
IVGIRSVPANAATIEESEAYFLGLFVAEGTSNPLSITTGSEELKDFIVSFIEDHDGYTPTVEVRRGLYRILFRKKTAEWLGEL
ATSNASTKVVPERVLNAGESAIAAFLAGYLDGDGYLTESIVELVTKSRELADGLVFLLKRLGIAPRISQKTIEGSVYYRIYIT
GEDRKTFEKVLEKSRIKPGENNEGGVGRYPPALGKFLGKLYSEFRLPKRDNETAYHILTRSRNVWFTEKTLSRIEEYFREALE
KLSEAGKALEMGDKPELPFPWTAITKYGFTDRQVANYRTRGLPKRPELKEKVVSALLKEIERLEGVANLALETIELARRLEFH
EVSSVEVVDYNDWVYDLVIPETHNFIAPNGLVLHNSIVGTATFDQYWSVRTSKRTSGTVTVTDHFRAWANRGLNLGTIDQITL
CVEGYQSSGSANITQNTFSQGSSSGSSGGSSGSTTTTRIECENMSLSGPYVSRITNPFNGIALYANGDTARATVNFPASRNYN
FRLRGCGNNNNLARVDLRIDGRTVGTFYYQGTYPWEAPIDNVYVSAGSHTVEITVTADNGTWDVYADYLVIQ
AS-146-5(3 int)
(SEQ ID NO: 3317)
MQTSITLTSNASGTFDGYYYELWKDTGNTTMTVYTQGRFSCQWSNINNALFRTGKKYNQNWQSLGTIRITYSATYNPNGNSYL
CIYGWSTNPLVEFYIVESWGNWRPPGATSLGQVTIDGGTYDIYRTTRVNQPCFAKDTKVYYENDTLVHFESIEDMYHKYASLG
REVPFDNGYAVPLETVSVYTFDPKTGEVKRTKASYIYREKVEKLAEIRLSNGYLLRITLLHPVLVFRNGLQWVPAGMIMPGDL
IVGIRSVPANAATIEESEAYFLGLFVAEGTSNPLSITTGSEELKDFIVSFIEDHDGYTPTVEVRRGLYRILFRKKTAEWLGEL
ATSNASTKVVPERVLNAGESAIAAFLAGYLDGDGYLTESIVELVTKSRELADGLVFLLKRLGITPRISQKTIEGSVYYRIYIT
GEVRKTFEKVLEKSRIKPGEMNEGGVGRYPPALGKFLGKLYSEFRLPKRDNETAYHILTRSRNVWFTEKTLSRIEEYFREALE
KLSEARKALEMGDKPELPFPWTAITKYGFTDRQVANYRTRGLPKRPELKEKVVSALLKEIERLEGVAKLALETIELARRLEFH
EVSIVEVVDYNDWVYDLVIPETHNFIAPNGLVLHNSIVGTATFDQYWSVRTSKRTSGTVTVTDHFRAWANRGLNLGTIDQITL
CVEGYQSSGSANITQNTFSQGSSSGSSGGSSGSTTTTRIECENMSLSGPYVSRITNPFNGIALYANGDTARATVNFPASRNYN
FRLRGCGNNNNLARVDLRIDGRTVGTFYYQGTYPWEAPIDNVYVSAGSHTVEITVTADNGTWDVYADYLVIQ
AS-146-9(1 ext, 4 int)
(SEQ ID NO: 3318)
MQTSITLTSNASGTFDGYYYELWKDTGNTTMTVYTQGRFSCQWSNINNALFRTGKKYNQNWQSLGTIRITYSATYNPNGNSYL
CIYGWSTNPLVEFYIVESWGNWRPPGATSLGQVTIDGGTYDIYRTTRVNQPCFAKDTKVYYENDTLVHFESIEDMYHKYASLG
REVPFDNGYAVPLETVSVYTFDPKTGEVKRTKASYIYREKVEKLAEIRLSNGYLLRITLLHPVLLFRNGLQWVPAGMIKPGDL
IVGIRSVPANAATIEESEAYFLGLFVAEGTSNSLSITTGSEELKDFIVSFIEDHDGYTPTVEVRRGLYRILFRKKTAEWLGEL
ATSNASTKVVPERVLNAGESAIAAFLAGYLDGDGYLTESIVELVTKSRELADGLVFLLKRLGITPRISQMTIEGSVYYRIYIT
GEDRKTFEKVLEKSRIKPGEMNEGGVGRYPPALGKFLGKLYSEFRLPKRDNETAYHILTRSRNVWFTEKTLSRIEEYFREALE
KLSEARKALEMGDKPELPFPWTAITKYGFTDRQVANYRTRGLPKRPDLKEKVVSALLKEIERLEGVAKLALETIELARRLEFH
EVSSVEVVDYNDWVYDLVIPETHNFIAPNGLVLHNSNVGTATFDQYWSVRTSKRTSGTVTVTDHFRAWANRGLNLGTIDQITL
CVEGYQSSGSANITQNTFSQGSSSGSSGGSSGSTTTTRIECENMSLSGPYVSRITNPFNGIALYANGDTARATVNFPASRNYN
FRLRGCGNNNNLARVDLRIDGRTVGTFYYQGTYPWEAPIDNVYVSAGSHTVEITVTADNGTWDVYADYLVIQ
AS-146-11(2 ext, 1 int)
(SEQ ID NO: 3319)
MQTSITLTSNASGTFDGYYYELWKDTGNTTMTVYTQGRFSCQWSNINNALFRTGKKYNQNWQSLGTIRITYSATYNPNGNSYL
CIYGWSTNPLVEFYIVESWGNWRPPGATSLGQVTIDGGTYDIYRTTRVNQSCFAKDTKVYYENDTLVHFESIEDMYHKYASLG
REVPFDNGYAVPLETVSVYTFDPKTGEVKRTKASYIYREKVEKLAEIRLSNGYLLRITLLHPVLVFRNGLQWVPAGMIKPGDL
IVGIRSVPANAATIEESEAYFLGLFVAEGTSNPLSITTGSEELKDFIVSFIEDHDGYTPTVEVRRGLYRILFRKKTAEWLGEL
ATSNASTKVVPERVLNAGESAIAAFLAGYLDGDGYLTESIVELVTKSRELADGLVFLLKRLGITPRISQKTIKGSVYYRIYIT
GEDRKTFEKVLEKSRIKPGEMNEGGVGRYPPALGKFLGKLYSEFRLPKRDNETAYHILTRSRNVWFTEKTLSRIEEYFREALE
KLSEARKALEMGDKPELPFPWTAITKYGFTDRQVANYRTRGLPKRPELKEKVVSALLKEIERLEGVAKLALETIELARRLEFH
EVSSVEVVDYNDWVYDLVIPETHNFIAPNGLVLHNSIVGTATFDQYWSVRTSKRTSGTVTVTDHFRAWANRGLNLGTIDQITL
CVEGYQSSGSANITQNTFSQGSSSGSSGGSSGSTTTTRIECENMSLSGPYVSRITNPFNGIALYANGDTARATVNFPASRNYY
FRLRGCGNNNNLARVDLRIDGRTVGTFYYQGTYPWEAPIDNVYVSAGSHTVEITVTADNGTWDVYADYLVIQ
AS-146-12(1 ext, 2 int)
(SEQ ID NO: 3320)
MQTSITLTSNASGTFDGYYYELWKDTGNTTMTVYTQGRFSCQWSNINNALFRTGKKYNQNWQSLGTIRITYSATYNPNGNSYL
CIYGWSTNPLVEFYIVESWGNWRPPGATSLGQVTIDGGTYDIYRTTRVNQSCFAKDTKVYYENDTLVHFESIEDMYHKYASLG
REVPFDNGYAVPLETVSVYTFDPKTGEVKRTKASYIYREKVEKLAEIRLSNGYLLRITLLHPVLVFRNGLQWVPAGMIKPGDL
IVGIRSVPANAATIEESEAYFLGLFVAEGTSNPLSITTGSEELKDFIVSFIEDHDGYTPTVEVRRGLYRILFRKKTAEWLGEL
ATSNASTKVVPEMVLNAGESAIAAFLAGYLDGDGYLTESIVELVTKSRELADGLVFLLKRLGITPRISQKTIEGSVYYRIYIT
GEDRKTFEKVLEKSRIKPGEMNEGGVGRYPPALGKFLGKLYSEFRLPKRDNETAYHILTRSRNVWFTEKTLSRIEEYFREALE
KLSEARKALEMGDKPELPFPWTAITKYGFTDRQVANYRTRGLPKRPELKEKVVSALLKEIERLEGVAKLALETIELARRLEFH
EVSSVEVDDYNDWVYDLVIPETHNFIAPNGLVLHNSIVGTATFDQYWSVRTSKRTSGTVTVTDHFRAWANRGLNLGTIDQITL
CVEGYQSSGSANITQNTFSQGSSSGSSGGSSGSTTTTRIECENMSLSGPYVSRITNPFNGIALYANGDTARATVNFPASRNYN
FRLRGCGNNNNLARVDLRIDGRTVGTFYYQGTYPWEAPIDNVYVSAGSHTVEITVTADNGTWDVYADYLVIQ
AS-146-13(1 ext, 3 int)
(SEQ ID NO: 3321)
MQTSITLTSNASGTFDGYYYELWKDTGNTIMTVYTQGRFSCQWSNINNALFRTGKKYNQNWQSLGTIRITYSATYNPNGNSYL
CIYGWSTNPLVEFYIVESWGNWRPPGATSLGQVTIDGGTYDIYRTTRVNQPCFAKDTKVYYENDTLVHFESIEDMYHKYASLG
REVPFDNGYAVPLETVSVYTFDPKTGEVKRTKASYIYREKVEKLAEIRLSNGYLLRITLLHPVLVFRNGLQWVPAGMIKPGDL
TVGIRSVPANAATIEESEAYFLGLFVAEGTSNPLSITTGSEELKDFIVSFIEDHDGYTPTVEVRRGLYRILFRKKTAEWLGGL
ATSNASTKVVPERVLNAGESAIAAFLAGYLDGDEYLTESIVELVTKSRELADGLVFLLKRLGITPRISQKTIEGSVYYRIYIT
GEDRKTFEKVLEKSRIKPGEMNEGGVGRYPPALGKFLGKLYSEFRLPKRDNETAYHILTRSRNVWFTEKTLSRIEEYFREALE
KLSEARKALEMGDKPELPFPWTAITKYGFTDRQVANYRTRGLPKRPELKEKVVSALLKEIERLEGVAKLALETIELARRMEFH
EVSSVEVVDYNDWVYDLVIPETHNFIAPNGLVLHNSTVGTATFDQYWSVRTSKRTSGTVTVTDHFRAWANRGLNLGTIDQITL
CVEGYQSSGSANITQNTFSQGSSSGSSGGSSGSTTTTRIECENMSLSGPYVSRITNPFNGIALYANGDTARATVNFPASRNYN
FRLRGCGNNNNLARVDLRIDGRTVGTFYYQGTYPWEAPIDNVYVSAGSHTVEITVTADNGTWDVYADYLVIQ
AS-146-16(1 ext, 2 int)
(SEQ ID NO: 3322)
MQTSITLTSNASGTFDGYYYELWKDTGNTTMTVYTQGRFSCQWSNINNALFRTGKKYNQNWQSLGTIRITYSATYNPNGNSYL
CIYGWSTNPLVEFYIVESWGNWRPPGATSLGQVTIDGGTYDIYRTTRVNQPCFAKDTKVYYENDTLVHFESIEDMYHKYASLG
REVPFDNGYAVPLETVSVYTFDLKTGEVKRTKASYIYREKVEKLAEIRLSNGYLLRITLLHPVLVFRNGLQWVPAAMIKPGDL
IVGIRSVPANAATIEESEAYFLGLFVAEGTSNPLSITTGSEELKDFIVSFIEDHDGYTPTVEVRRGLYRILFRKKTAEWLGEL
ATSNASTKVVPERVLNAGESAIAAFLAGYLDGDGYLTESIVELVTKSRELADGLVFLLKRLGITPRISQKTIEGSVYYRIYIT
GEDRKTFEKVLEKSRIKPGEMNEGGVGRYPPALGKFLGKLYSEFRLPKRDNETAYHILTRSRNVWFTEKTLSRIEEYFREALE
KLSEARKALEMGDKPELPFPWTAITKYGFTDRQVANYRTRGLPKRPELKEKVVSALLKEIERLEGVAKLALETIELARRLEFH
EVSSVEVVDYNDWVYDLVIPETHNFIAPNGLVLHNSIVGTATFDQYWSVRTSKRTSGTVTVTDHFRAWANRGLNLGTIDQITL
CVEGYQSSGSANITQNTFSQGSSSGSSGGSSGSTTTTRIECENMSLSGPYVSRITNPFNGIALYADGDTARATVNFPASRNYN
FRLRGCGNNNNLARVDLRIDGRTVGTFYYQGTYPWEAPIDNVYVSAGSHTVEITVTADNGTWDVYADYLVIQ
AS-146(P77853_Tko_RadA_intein_S158)
(SEQ ID NO: 2832)
atgcaaacaagcattactctgacatccaacgcatccggtacgtttgacggttactattacgaactctggaaggatactggcaa
tacaacaatgacggtctacactcaaggtcgcttttcctgccagtggtcgaacatcaataacgcgttgtttaggaccgggaaga
aatacaaccagaattggcagtctcttggcacaatccggatcacgtactctgcgacttacaacccaaacgggaactcctacttg
tgtatctatggctggtctaccaacccattggtcgagttctacatcgttgagtcctgggggaactggagaccgcctggtgccac
gtccctgggccaagtgacaatcgatggcgggacctacgacatctataggacgacacgcgtcaaccagcctTGCTTCGCTAAGG
ACACTAAGGTCTACTACGAGAATGACACACTGGTTCATTTCGAGTCAATTGAGGACATGTACCATAAGTACGCTTCTCTCGGG
AGGGAGGTGCCATTCGACAACGGCTACGCTGTCCCACTGGAGACCGTGTCAGTCTACACGTTCGATCCGAAGACAGGCGAGGT
TAAGAGGACGAAGGCTAGCTACATCTACCGGGAGAAGGTGGAGAAGCTCGCCGAGATCCGCCTGTCGAACGGCTACCTCCTGA
GGATTACACTCCTGCACCCCGTTCTCGTGTTCCGGAATGGCCTGCAGTGGGTGCCAGCTGGCATGATCAAGCCTGGGGACCTC
ATCGTCGGCATTCGCTCGGTTCCAGCGAACGCCGCGACTATTGAGGAGTCTGAGGCCTACTTCCTCGGGCTGTTCGTGGCTGA
GGGCACCTCAAATCCTCTCTCCATCACCACGGGCTCCGAGGAGCTGAAGGACTTCATCGTCAGCTTCATTGAGGACCATGATG
GGTACACACCAACTGTCGAGGTTCGCAGGGGCCTCTACCGGATCCTGTTCCGCAAGAAGACGGCTGAGTGGCTCGGCGAGCTG
GCTACTTCGAACGCCTCTACCAAGGTGGTCCCTGAGAGGGTCCTCAATGCGGGGGAGTCCGCTATCGCTGCCTTCCTCGCTGG
CTACCTGGACGGCGATGGGTACCTCACTGAGTCTATTGTGGAGCTGGTCACCAAGTCACGGGAGCTCGCTGACGGGCTGGTGT
TCCTCCTGAAGCGCCTGGGCATCACGCCGAGGATTAGCCAGAAGACAATCGAGGGGTCGGTCTACTACCGGATCTACATTACG
GGCGAGGATCGCAAGACATTCGAGAAGGTCCTGGAGAAGTCCAGGATCAAGCCAGGGGAGATGAACGAGGGCGGGGTTGGCAG
GTACCCACCAGCTCTGGGCAAGTTCCTCGGGAAGCTGTACAGCGAGTTCAGGCTCCCCAAGCGGGACAACGAGACTGCGTACC
ACATCCTGACCAGGTCACGGAATGTGTGGTTCACCGAGAAGACGCTCTCCCGGATTGAGGAGTACTTCAGGGAGGCTCTGGAG
AAGCTGTCGGAGGCTAGGAAGGCTCTGGAGATGGGCGACAAGCCGGAGCTGCCATTCCCTTGGACAGCGATCACTAAGTACGG
GTTCACGGATCGCCAGGTCGCTAACTACAGGACAAGGGGCCTCCCAAAGAGGCCAGAGCTGAAGGAGAAGGTTGTGTCCGCCC
TCCTGAAGGAGATCGAGAGGCTGGAGGGCGTGGCTAAGCTCGCTCTGGAGACCATTGAGCTCGCTAGGCGCCTGGAGTTCCAT
GAGGTTTCCAGCGTGGAGGTCGTTGACTACAATGATTGGGTCTACGATCTCGTCATTCCAGAGACTCATAACTTCATTGCTCC
AAATGGGCTCGTGCTCCACAACtccattgtggggacagccacgttcgatcagtactggagcgtgcgcacctctaagcggactt
caggaacagtgaccgtgaccgatcacttccgcgcctgggcgaaccggggcctgaacctcggcacaatagaccaaattacattg
tgcgtggagggttaccaaagctctggatcagccaacatcacccagaacaccttctctcagggctcttcttccggcagttcggg
tggctcatccggctccacaacgactactcgcatcgagtgtgagaacatgtccttgtccggaccctacgttagcaggatcacca
atccctttaatggtattgcgctgtacgccaacggagacacagcccgcgctaccgttaacttccccgcaagtcgcaactacaat
ttccgcctgcggggttgcggcaacaacaataatcttgcccgtgtggacctgaggatcgacggacggaccgtcgggacctttta
ttaccagggcacatacccctgggaggccccaattgacaatgtttatgtcagtgcggggagtcatacagtcgaaatcactgtta
ctgcggataacggcacatgggacgtgtatgccgactacctggtgatacagtga
AS-146-2(2 ext, 3 int)
(SEQ ID NO: 3323)
ATGCAAACAAGCATTACTCTGACATCCAACGCATCCGGTACGTTTGACGGTTACTATTACGAGCTCTGGAAGGATACTGGCAA
TACAACAATGACGGTCTACACTCAAGGTCGCTTTTCCTGCCAGTGGTCGAACATCAATAACGCGTTGTTTAGGACCGGGAAGA
AATACAACCAGAATTGGCAGTCTCTTGGCACAATCCGGATCACGTACTCTGCGACTTACAACCCAAACGGGAACTCCTACTTG
TGTATCTATGGCTGGTCTACCAACCCATTGGTCGAGTTCTACATCGTTGAGTCCTGGGGGAACTGGAGACCGCCTGGTGCCAC
GTCCCTGGGCCAAGTGACAATCGATGGCGGGACCTACGACATCTATAGGACGACACGCGTCAACCAGCCTTGCTTCGCTAAGG
ACACTAAGGTCTACTACGAGAATGACACACTGGTTCATTTCGAGTCAATTGAGGACATGTACCATAAGTACGCTTCTCTCGGG
AGGGAGGTGCCATTCGACAACGGCTACGCTGTCCCACTGGAGACCGTGTCAGTCTACACGTTCGATCCGAAGACAGGCGAGGT
TAAGAGGACGAAGGCTAGCTACATCTACCGGGAGAAGGTGGAGAAGCTCGCCGAGATCCGCCTGTCGAACGGCTACCTCCTGA
GGATTACACTCCTGCACCCCGTTCTCGTGTTCCGGAATGGCCTGCAGTGGGTGCCAGCTGGCATGATCAAGCCTGGGGACCTC
ATCGTCGGCATTCGCTCGGTTCCAGCGAACGCCGCGACTATTGAGGAGTCTGAGGCCTACTTCCTCGGGCTGTTCGTGGCTGA
GGGCACCTCAAATCCTCTCTCCATCACCACGGGCTCCGAGGAGCTGAAGGACTTCATCGTCAGCTTCATTGAGGACCATGATG
GGTACACACCAACTGTCGAGGTTCGCAGGGGCCTCTACCGGATCCTGTTCCACAAGAAGACGGCTGAGTGGCTCGGCGAGCTG
GCTACTTCGAACGCCTCTACCAAGGTGGTCCCTGAGAGGGTCCTCAATGCGGGGGAGTCCGCTATCGCTGCCTTCCTCGCTGG
CTACCTGGACGGCGATGGGTACCTCACTGAGTCTATTGTGGAGCTGGTCACCAAGTCACGGGAGCTCGCTGACGGGCTGGTGT
TCCTCCTGAAGCGCCTGGGCATCACGCCGTGGATTAGCCAGAAGACAATCGAGGGGTCGGTCTACTACCGGGTCTACATTATG
GGCGAGGATCGCAAGACATTCGAGAAGGTCCTGGAGAAGTCCAGGATCAAGCCAGGGGAGATGAACGAGGGCGGGGTTGGCAG
GTACCCACCAGCTCTGGGCAAGTTCCTCGGGAAGCTGTACAGCGAGTTCAGGCTCCCCAAGCGGGACAACGAGACTGCGTACC
ACATCCTGACCAGGTCACGGAATGTGTGGTTCACCGAGAAGACGCTCTCCCGGATTGAGGAGTACTTCAGGGAGGCTCTGGAG
AAGCTGTCGGAGGCTAGGAAGGCTCTGGAGATGGGCGACAAGCCGGAGCTGCCATTCCCTTGGACAGCGATCACTAAGTACGG
GTTCACGGATCGCCAGGTCGCTAACTACAGGACAAGGGGCCTCCCAAAGAGGCCAGAGCTGAAGGAGAAGGTTGTGTCCGCCC
TCCTGAAGGAGATCGAGAGGCTGGAGGGCGTGGCTAAGCTCGCTCTGGAGACCATTGAGCTCGCTAGGCGCCTGGAGTTCCAT
GAGGTTTCCAGCGTGGAGGTCGTTGACTACAATGATTGGGTCTACGATCTCGTCATTCCAGAGACTCATAACTTCATTGCTCC
AAATGGGCTCGTGCTCCACAACTCCATTGTGGGGACAGCCACGTTCGATCAGTACTGGAGCGTGCGCACCTCTAAGCGGACTT
CAGGAACAGTGACCGTGACCGATCACTTCCGCGCCTGGGCGAACCGGGGCCTGAACCTCGGCACAATAGACCAAATTACATTG
TGCGTGGAGGGTTACCAAAGCTCTGGATCAGCCAACATCACCCAGAACACCTTCTCTCAGGGCTCTTCTTCCGGCAGTTCGGG
TGGCTCATCCGGCTCCACAACGACTACTCGCATCGAGTGTGAGAACATGTCCTTGTCCGGACCCTACGTTAGCAGGATCACCA
ATCCCTTTAATGGTATTGCGCTGTATGCCAACGGAGACACAGCCCGCGCTACCGTTAACTTCCCCGCAAGTCGCAACTACAAT
TTCCGCCTGCGGGGTTGCGGCAACAACAATAATCTTGCCCGTGTGGACCTGAGGATCGACGGACGGACCGTCGGGACCTTTTA
TTACCAGGGCACATACCCCTGGGAGGCCCCAATTGACAATGTTTATGTCAGTGCGGGGAGTCATACAGTCGAAATCACTGTTA
CTGCGGATAACGGCACATGGGACGTGTATGCCGACTACCTGGTGATACAGTGA
AS-146-4(5 int)
(SEQ ID No: 3324)
atgcaaacaagcattactctgacatccaacgcatccggtacgtttgacggttactattacgaactctggaaggatactggcaa
tacaacaatgacggtctacactcaaggtcgcttttcctgccagtggtcgaacatcaataacgcgttgtttaggaccgggaaga
aatacaaccagaattggcagtctcttggcacaatccggatcacgtactctgcgacttacaacccaaacgggaactcctacttg
tgtatctatggctggtctaccaacccattggtcgagttctacatcgttgagtcctgggggaactggagaccgcctggtgccac
gtccctgggccaagtgacaatcgatggcgggacctacgacatctataggacgacacgcgtcaaccagcctTGCTTCGCTAAGG
ACACTAAGGTCTACTACGAGAATGACACACTGGTTCATTTCGAGTCAATTGAGGACATGTACCATAAGTACGCTTCTCTCGGG
AGGGAGGTGCCATTCGACAACGGCTACGCTGTCCCACTGGAGACCGTGTCAGTCTACACGTTCGAACCGAAGACAGGCGAGGT
TAAGAGGACGAAGGCTAGCTACATCTACCGGGAGAAGGTGGAGAAGCTCGCCGAGATCCGCCTGTCGAACGGCTACCTCCTGA
GGATTACACTCCTGCACCCCGTTCTCGTGTTCCGGAATGGCCTGCAGTGGGTGCCAGCTGGCATGATCAATCCTGGGGACCTC
ATCGTCGGCATTCGCTCGGTTCCAGCGAACGCCGCGACTATTGAGGAGTCTGAGGCCTACTTCCTCGGGCTGTTCGTGGCTGA
GGGCACCTCAAATCCTCTCTCCATCACCACGGGCTCCGAGGAGCTGAAGGACTTCATCGTCAGCTTCATTGAGGACCATGATG
GGTACACACCAACTGTCGAGGTTCGCAGGGGCCTCTACCGGATCCTGTTCCGCAAGAAGACGGCTGAGTGGCTCGGCGAGCTG
GCTACTTCGAACGCCTCTACCAAGGTGGTCCCTGAGAGGGTCCTCAATGCGGGGGAGTCCGCTATCGCTGCCTTCCTCGCTGG
CTACCTGGACGGCGATGGGTACCTCACTGAGTCTATTGTGGAGCTGGTCACCAAGTCACGGGAGCTCGCTGACGGGCTGGTGT
TCCTCCTGAAGCGCCTGGGCATCGCGCCGAGGATTAGCCAGAAGACAATCGAGGGGTCGGTCTACTACCGGATCTACATTACG
GGCGAGGATCGCAAGACATTCGAGAAGGTCCTGGAGAAGTCCAGGATCAAGCCAGGGGAGATGAACGAGGGCGGGGTTGGCAG
GTACCCACCAGCTCTGGGCAAGTTCCTCGGGAAGCTGTACAGCGAGTTCAGGCTCCCCAAGCGGGACAACGAGACTGCGTACC
ACATCCTGACCAGGTCACGGAATGTGTGGTTCACCGAGAAGACGCTCTCCCGGATTGAGGAGTACTTCAGGGAGGCTCTGGAG
AAGCTGTCGGAGGCTGGGAAGGCTCTGGAGATGGGCGACAAGCCGGAGCTGCCATTCCCTTGGACAGCGATCACTAAGTACGC
GTTCACGGATCGCCAGGTCGCTAACTACAGGACAAGGGGCCTCCCAAAGAGGCCAGAGCTGAAGGAGAAGGTTGTGTCCGCCC
TCCTGAAGGAGATCGAGAGGCTGGAGGGCGTGGCTAACCTCGCTCTGGAGACCATTGAGCTCGCTAGGCGCCTGGAGTTCCAT
GAGGTTTCCAGCGTGGAGGTCGTTGACTACAATGATTGGGTCTACGATCTCGTCATTCCAGAGACTCATAACTTCATTGCTCC
AAATGGGCTCGTGCTCCACAACtccattgtggggacagccacgttcgatcagtactggagcgtgcgcacctctaagcggactt
caggaacagtgaccgtgaccgatcacttccgcgcctgggcgaaccggggcctgaacctcggcacaatagaccaaattacattg
tgcgtggagggttaccaaagctctggatcagccaacatcacccagaacaccttctctcagggctcttcttccggcagttcggg
tggctcatccggctccacaacgactactcgcatcgagtgtgagaacatgtccttgtccggaccctacgttagcaggatcacca
atccctttaatggtattgcgctgtacgccaacggagacacagcccgcgctaccgttaacttccccgcaagtcgcaactacaat
ttccgcctgcggggttgcggcaacaacaataatcttgcccgtgtggacctgaggatcgacggacggaccgtcgggacctttta
ttaccagggcacatacccctgggaggccccaattgacaatgtttatgtcagtgcggggagtcatacagtcgaaatcactgtta
ctgcggataacggcacatgggacgtgtatgccgactacctggtgatacagtga
AS-146-5(1 ext, 4 int)
(SEQ ID No: 3325)
atgcaaacaagcattactctgacatccaacgcatccggtacgtttgacggttactattacgaactctggaaggatactcgcaa
tacaacaatgacggtctacactcaaggtcgcttttectgccagtggtcgaacatcaataacgcgttgtttaggaccgggaaga
aatacaaccagaattggcagtctcttggcacaatccggatcacgtactctgcgacttacaacccaaacgggaactcctacttg
tgtatctatggctggtctaccaacccattggtcgagttctacatcgttgagtcctgggggaactggagaccgcctggtgccac
gtccctgggccaagtgacaatcgatggcgggacctacgacatctataggacgacacgcgtcaaccagcctTGCTTCGCTAAGG
ACACTAAGGTCTACTACGAGAATGACACACTGGTTCATTTCGAGTCAATTGAGGACATGTACCATAAGTACGCTTCTCTCGGG
AGGGAGGTGCCATTCGACAACGGCTACGCTGTCCCACTGGAGACCGTGTCAGTCTACACGTTCGATCCGAAGACAGGCGAGGT
TAAGAGGACGAAGGCTAGCTACATCTACCGGGAGAAGGTGGAGAAGCTCGCCGAGATCCGCCTGTCGAACGGCTACCTCCTGA
GGATTACACTCCTGCACCCCGTTCTCGTGTTCCGGAATGGCCTGCAGTGGGTACCAGCTGGCATGATCATGCCTGGGGACCTC
ATCGTCGGCATTCGCTCGGTTCCAGCGAACGCCGCGACTATTGAGGAGTCTGAGGCCTACTTCCTCGGGCTGTTCGTGGCTGA
GGGCACCTCAAATCCTCTCTCCATCACCACGGGCTCCGAGGAGCTGAAGGACTTCATCGTCAGCTTCATTGAGGACCATGATG
GGTACACACCAACTGTCGAGGTTCGCAGGGGCCTCTACCGGATCCTGTTCCGCAAGAAGACGGCTGAGTGGCTCGGCGAGCTG
GCTACTTCGAACGCCTCTACCAAGGTGGTCCCTGAGAGGGTCCTCAATGCGGGGGAGTCCGCTATCGCTGCCTTCCTCGCTGG
CTACCTGGACGGCGATGGGTACCTCACTGAGTCTATTGTGGAGCTGGTCACCAAGTCACGGGAGCTCGCTGACGGGCTGGTGT
TCCTCCTGAAGCGCCTGGGCATCACGCCGAGGATTAGCCAGAAGACAATCGAGGGGTCGGTCTACTACCGGATCTACATTACG
GGCGAGGTTCGCAAGACATTCGAGAAGGTCCTGGAGAAGTCCAGGATCAAGCCAGGGGAGATGAACGAGGGCGGGGTTGGCAG
GTACCCACCAGCTCTGGGCAAGTTCCTCGGGAAGCTGTACAGCGAGTTCAGGCTCCCCAAGCGGGACAACGAGACTGCGTACC
ACATCCTGACCAGGTCACGGAATGTGTGGTTCACCGAGAAGACGCTCTCCCGGATTGAGGAGTACTTCAGGGAGGCTCTGGAG
AAGCTGTCGGAGGCTAGGAAGGCTCTGGAGATGGGCGACAAGCCGGAGCTGCCATTCCCTTGGACAGCGATCACTAAGTACGG
GTTCACGGATCGCCAGGTCGCTAACTACAGGACAAGGGGCCTCCCAAAGAGGCCAGAGCTGAAGGAGAAGGTTGTGTCCGCCC
TCCTGAAGGAGATCGAGAGGCTGGAGGGCGTGGCTAAGCTCGCTCTGGAGACCATTGAGCTCGCTAGGCGCCTGGAGTTCCAT
GAGGTTTCCATCGTGGAGGTCGTTGACTACAATGATTGGGTCTACGATCTCGTCATTCCAGAGACTCATAACTTCATTGCTCC
AAATGGGCTCGTGCTCCACAACtccattgtggggacagccacgttcgatcagtactggagcgtgcgcacctctaagcggactt
caggaacagtgaccgtgaccgatcacttccgcgcctgggcgaaccggggcctgaacctcggcacaatagaccaaattacattg
tgcgtggagggttaccaaagctctggatcagccaacatcacccagaacaccttctctcagggctcttcttccggAagttcggg
tggctcatccggctccacaacgactactcgcatcgagtgtgagaacatgtccttgtccggaccctacgttagcaggatcacca
atccctttaatggtattgcgctgtacgccaacggagacacagcccgcgctaccgttaacttccccgcaagtcgcaactacaat
ttccgcctgcggggttgcggcaacaacaataatcttgcccgtgtggacctgaggatcgacggacggaccgtcgggacctttta
ttaccagggcacatacccctgggaggccccaattgacaatgtttatgtcagtgcggggagtcatacagtcgaaatcactgtta
ctgcggataacggcacatgggacgtgtatgccgactacctggtgatacagtga
AS-146-9(3 ext, 5 int)
(SEQ ID No: 3326)
atgcaaacaagcattactctgacatccaacgcatccggtacgtttgacggttactattacgaactctggaaggatactggcaa
tacaacaatgacggtctacactcaaggtcgcttttcctgccagtggtcgaacatcaataacgcgttgtttaggaccgggaaga
aatacaaccagaattggcagtctcttggTacaatccggatcacgtactctgcgacttacaacccaaacgggaactcctacttg
tgtatctatggctggtctaccaacccattggtcgagttctaTatcgttgagtcctgggggaactggagaccgcctggtgccac
gtccctgggccaagtgacaatcgatggcgggacctacgacatctataggacgacacgcgtcaaccagcctTGCTTCGCTAAGG
ACACTAAGGTCTACTACGAGAATGACACACTGGTTCATTTCGAGTCAATTGAGGATATGTACCATAAGTACGCTTCTCTCGGG
AGGGAGGTGCCATTCGACAACGGCTACGCTGTCCCACTGGAGACCGTGTCAGTCTACACGTTCGATCCGAAGACAGGCGAGGT
TAAGAGGACGAAGGCTAGCTACATCTACCGGGAGAAGGTGGAGAAGCTCGCCGAGATCCGCCTGTCGAACGGCTACCTCCTGA
GGATTACACTCCTGCACCCCGTTCTCCTGTTCCGGAATGGCCTGCAGTGGGTGCCAGCTGGCATGATCAAGCCTGGGGACCTC
ATCGTCGGCATTCGCTCGGTTCCAGCGAACGCCGCGACTATTGAGGAGTCTGAGGCCTACTTCCTCGGGCTGTTCGTGGCTGA
GGGCACCTCAAATTCTCTCTCCATCACCACGGGCTCCGAGGAGCTGAAGGACTTCATCGTCAGCTTCATTGAGGACCATGATG
GGTACACACCAACTGTCGAGGTTCGCAGGGGCCTCTACCGGATCCTGTTCCGCAAGAAGACGGCTGAGTGGCTCGGCGAGCTG
GCTACTTCGAACGCCTCTACCAAGGTGGTCCCTGAGAGGGTCCTCAATGCGGGGGAGTCCGCTATCGCTGCCTTCCTCGCTGG
CTACCTGGACGGCGATGGGTACCTCACTGAGTCTATTGTGGAGCTGGTCACCAAGTCACGGGAGCTCGCTGACGGGCTGGTGT
TCCTCCTGAAGCGCCTGGGCATCACGCCGAGGATTAGCCAGATGACAATCGAGGGGTCGGTCTACTACCGGATCTACATTACG
GGCGAGGATCGCAAGACATTCGAGAAGGTCCTGGAGAAGTCCAGGATCAAGCCAGGGGAGATGAACGAGGGCGGGGTTGGCAG
GTACCCACCAGCTCTGGGCAAGTTCCTCGGGAAGCTGTACAGCGAGTTCAGGCTCCCCAAGCGGGACAACGAGACTGCGTACC
ACATCCTGACCAGGTCACGGAATGTGTGGTTCACCGAGAAGACGCTCTCCCGGATTGAGGAGTACTTCAGGGAGGCTCTGGAG
AAGCTGTCGGAGGCTAGGAAGGCTCTGGAGATGGGCGACAAGCCGGAGCTGCCATTCCCTTGGACAGCGATCACTAAGTACGG
GTTCACGGATCGCCAGGTCGCTAACTACAGGACAAGGGGCCTCCCAAAGAGGCCAGACCTGAAGGAGAAGGTTGTGTCCGCCC
TCCTGAAGGAGATCGAGAGGCTGGAGGGCGTGGCTAAGCTCGCTCTGGAGACCATTGAGCTCGCTAGGCGCCTGGAGTTCCAT
GAGGTTTCCAGCGTGGAGGTCGTTGACTACAATGATTGGGTCTACGATCTCGTCATTCCAGAGACTCATAACTTCATTGCTCC
AAATGGGCTCGTGCTCCACAACtccaAtgtggggacagccacgttcgatcagtactggagcgtgcgcacctctaagcggactt
caggaacagtgaccgtgaccgatcacttccgcgcctgggcgaaccggggcctgaacctcggcacaatagaccaaattacattg
tgcgtggagggttaccaaagctctggatcagccaacatcacccagaacaccttctctcagggctcttcttccggcagttcggg
tggetcatccggctccacaacgactactcgcatcgagtgtgagaacatgtccttgtccggaccctacgttagcaggatcacca
atccctttaatggtattgcgctgtacgccaacggagacacagcccgcgctaccgttaacttccccgcaagtcgcaactacaat
ttccgcctgcggggttgcggcaacaacaataatcttgcccgtgtggacctgaggatcgacggacggaccgtcgggacctttta
ttaccagggcacatacccctgggaggccccaattgacaatgtttatgtcagtgcggggagtcatacagtcgaaatcactgtta
ctgcggataacggcacatgggacgtgtatgccgactacctggtgatacagtga
AS-146-11(2 ext, 1 int)
(SEQ ID No: 3327)
atgcaaacaagcattactctgacatccaacgcatccggtacgtttgacggttactattacgaactctggaaggatactggcaa
tacaacaatgacggtctacactcaaggtcgcttttcctgccagtggtcgaacatcaataacgcgttgtttaggaccgggaaga
aatacaaccagaattggcagtctcttggcacaatccggatcacgtactctgcgacttacaacccaaacgggaactcctacttg
tgtatctatggctggtctaccaacccattggtcgagttctacatcgttgagtcctgggggaactggagaccgcctggtgccac
gtccctgggccaagtgacaatcgatggcgggacctacgacatctataggacgacacgcgtcaaccagTctTGCTTCGCTAAGG
ACACTAAGGTCTACTACGAGAATGACACACTGGTTCATTTCGAGTCAATTGAGGACATGTACCATAAGTACGCTTCTCTCGGG
AGGGAGGTGCCATTCGACAACGGCTACGCTGTCCCACTGGAGACCGTGTCAGTCTACACGTTCGATCCGAAGACAGGCGAGGT
TAAGAGGACGAAGGCTAGCTACATCTACCGGGAGAAGGTGGAGAAGCTCGCCGAGATCCGCCTGTCGAACGGCTACCTCCTGA
GGATTACACTCCTGCACCCCGTTCTCGTGTTCCGGAATGGCCTGCAGTGGGTGCCAGCTGGCATGATCAAGCCTGGGGACCTC
ATCGTCGGCATTCGCTCGGTTCCAGCGAACGCCGCGACTATTGAGGAGTCTGAGGCCTACTTCCTCGGGCTGTTCGTGGCTGA
GGGCACCTCAAATCCTCTCTCCATCACCACGGGCTCCGAGGAGCTGAAGGACTTCATCGTCAGCTTCATTGAGGACCATGATG
GGTACACACCAACTGTCGAGGTTCGCAGGGGCCTCTACCGGATCCTGTTCCGCAAGAAGACGGCTGAGTGGCTCGGCGAGCTG
GCTACTTCGAACGCCTCTACCAAGGTGGTCCCTGAGAGGGTCCTCAATGCGGGGGAGTCCGCTATCGCTGCCTTCCTCGCTGG
CTACCTGGACGGCGATGGGTACCTCACTGAGTCTATTGTGGAGCTGGTCACCAAGTCACGGGAGCTCGCTGACGGGCTGGTGT
TCCTCCTGAAGCGCCTGGGCATCACGCCGAGGATTAGCCAGAAGACAATCAAGGGGTCGGTCTACTACCGGATCTACATTACG
GGCGAGGATCGCAAGACATTCGAGAAGGTCCTGGAGAAGTCCAGGATCAAGCCAGGGGAGATGAACGAGGGCGGGGTTGGCAG
GTACCCACCAGCTCTGGGCAAGTTCCTCGGGAAGCTGTACAGCGAGTTCAGGCTCCCCAAGCGGGACAACGAGACTGCGTACC
ACATCCTGACCAGGTCACGGAATGTGTGGTTCACCGAGAAGACGCTCTCCCGGATTGAGGAGTACTTCAGGGAGGCTCTGGAG
AAGCTGTCGGAGGCTAGGAAGGCTCTGGAGATGGGCGACAAGCCGGAGCTGCCATTCCCTTGGACAGCGATCACTAAGTACGG
GTTCACGGATCGCCAGGTCGCTAACTACAGGACAAGGGGCCTCCCAAAGAGGCCAGAGCTGAAGGAGAAGGTTGTGTCCGCCC
TCCTGAAGGAGATCGAGAGGCTGGAGGGCGTGGCTAAGCTCGCTCTGGAGACCATTGAGCTCGCTAGGCGCCTGGAGTTCCAT
GAGGTTTCCAGCGTGGAGGTCGTTGACTACAATGATTGGGTCTACGATCTCGTCATTCCAGAGACTCATAACTTCATTGCTCC
AAATGGGCTCGTGCTCCACAACtccattgtggggacagccacgttcgatcagtactggagcgtgcgcacctctaagcggactt
caggaacagtgaccgtgaccgatcacttccgcgcctgggcgaaccggggcctgaacctcggcacaatagaccaaattacattg
tgcgtggagggttaccaaagctctggatcagccaacatcacccagaacaccttctctcagggctcttcttccggcagttcggg
tggctcatccggctccacaacgactactcgcatcgagtgtgagaacatgtccttgtccggaccctacgttagcaggatcacca
atccctttaatggtattgcgctgtacgccaacggagacacagcccgcgctaccgttaacttccccgcaagtcgcaactacTat
ttccgcctgcggggttgcggcaacaacaataatcttgcccgtgtggacctgaggatcgacggacggaccgtcgggacctttta
ttaccagggcacatacccctgggaggccccaattgacaatgtttatgtcagtgcggggagtcatacagtcgaaatcactgtta
ctgcggataacggcacatgggacgtgtatgccgactacctggtgatacagtga
AS-146-12(1 ext, 6 int)
(SEQ ID No: 3328)
atgcaaacaagcattactctgacatccaacgcatccggtacgtttgacggttactattacgaactctggaaggatactggcaa
tacaacaatgacggtctacactcaaggtcgcttttcctgccagtggtcgaacatcaataacgcgttgtttaggaccgggaaga
aatacaaccagaattggcagtctcttggcacaatccggatcacgtactctgcgacttacaacccaaacgggaactcctacttg
tgtatctatggctggtctaccaacccattggtcgagttctacatcgttgagtcctgggggaactggagaccgcctggtgccac
gtccctgggccaagtgacaatcgatggcgggacctacgacatctataggacgacacgcgtcaaccagTctTGCTTCGCTAAGG
ACACTAAGGTCTACTACGAGAATGACACACTGGTTCATTTCGAGTCAATTGAGGACATGTACCATAAGTACGCTTCTCTCGGG
AGGGAGGTGCCATTCGACAACGGCTACGCTGTCCCACTGGAGACCGTGTCAGTCTACACGTTCGATCCGAAGACAGGCGAGGT
TAAGAGGACGAAGGCTAGCTACATCTACCGGGAAAAGGTGGAGAAGCTCGCCGAGATCCGCCTGTCGAACGGCTACCTCCTGA
GGATTACACTCCTGCACCCCGTTCTCGTGTTCCGGAATGGCCTGCAGTGGGTGCCAGCTGGCATGATCAAGCCTGGGGACCTC
ATCGTCGGCATTCGCTCGGTTCCAGCGAACGCCGCGACTATTGAGGAGTCTGAGGCCTACTTCCTCGGGCTGTTCGTGGCTGA
GGGCACCTCAAATCCTCTCTCCATCACCACGGGCTCCGAGGAGCTGAAGGACTTCATCGTCAGCTTCATTGAGGACCATGATG
GGTACACACCAACTGTCGAGGTTCGCAGGGGCCTCTACCGGATCCTGTTCCGCAAGAAGACGGCTGAGTGGCTCGGCGAGCTG
GCTACTTCGAACGCCTCTACCAAGGTGGTCCCTGAGATGGTCCTCAATGCGGGGGAGTCCGCTATCGCTGCCTTCCTCGCTGG
CTACCTGGACGGCGATGGGTACCTCACTGAGTCTATTGTGGAGCTGGTCACCAAGTCACGGGAGCTCGCTGACGGGCTGGTGT
TCCTCCTGAAGCGCCTGGGCATCACGCCGAGGATTAGCCAGAAGACAATCGAGGGGTCGGTCTACTACCGAATCTACATTACG
GGCGAGGATCGCAAGACATTCGAGAAAGTCCTGGAGAAGTCCAGGATCAAGCCAGGGGAGATGAACGAGGGCGGGGTTGGCAG
GTACCCACCAGCTCTGGGCAAGTTCCTCGGGAAGCTGTACAGCGAGTTCAGGCTCCCCAAGCGGGACAACGAGACTGCGTACC
ACATCCTGACCAGGTCACGGAATGTGTGGTTCACCGAGAAGACGCTCTCCCGGATTGAGGAGTACTTCAGGGAGGCTCTGGAG
AAGCTGTCGGAGGCTAGGAAGGCTCTGGAGATGGGCGACAAGCCGGAGCTGCCATTCCCTTGGACAGCGATCACTAAGTACGG
GTTCACGGATCGCCAGGTCGCTAACTACAGGACAAGGGGCCTCCCAAAGAGGCCAGAGCTGAAGGAGAAGGTTGTGTCCGCCC
TCCTGAAGGAGATCGAGAGGCTGGAGGGCGTGGCTAAGCTCGCTCTGGAGACCATTGAGCTCGCTAGGCGCCTGGAGTTCCAT
GAGGTTTCCAGCGTGGAGGTCGATGACTACAATGATTGGGTCTACGATCTCGTCATTCCAGAGACACATAACTTCATTGCTCC
AAATGGGCTCGTGCTCCACAACtccattgtggggacagccacgttcgatcagtactggagcgtgcgcacctctaagcggactt
caggaacagtgaccgtgaccgatcacttccgcgcctgggcgaaccggggcctgaacctcggcacaatagaccaaattacattg
tgcgtggagggttaccaaagctctggatcagccaacatcacccagaacaccttctctcagggctcttcttccggcagttcggg
tggctcatccggctccacaacgactactcgcatcgagtgtgagaacatgtccttgtccggaccctacgttagcaggatcacca
atccctttaatggtattgcgctgtacgccaacggagacacagcccgcgctaccgttaacttccccgcaagtcgcaactacaat
ttccgcctgcggggttgcggcaacaacaataatcttgcccgtgtggacctgaggatcgacggacggaccgtcgggacctttta
ttaccagggcacatacccctgggaggccccaattgacaatgtttatgtcagtgcggggagtcatacagtcgaaatcactgtta
ctgcggataacggcacatgggacgtgtatgccgactacctggtgatacagtga
AS-146-13(5 ext, 4 int)
(SEQ ID No: 3329)
atgcaaacaagcattactctgacatccaacgcatccggtacgtttgacggttactattacgaactctggaaggatactggcaa
tacaaTaatgacggtctacactcaaggtcgcttttcctgccagtggtcgaacatcaataacgcgttgtttaggaccgggaaga
aatacaaccagaattggcagtctcttggcacaatccggatcacgtactctgcgacttacaacccaaacgggaactcctacttg
tgtatctatggctggtctaccaacccattggtcgagttctacatcgttgagtcctgggggaactggagaccgcctggtgccac
gtccctgggccaagtgacaatcgatggcgggacctacgacatctataggacgacacgcgtcaaccagcctTGCTTCGCTAAGG
ACACTAAGGTCTACTACGAGAATGACACACTGGTTCATTTCGAGTCAATTGAGGACATGTACCATAAGTACGCTTCTCTCGGG
AGGGAGGTGCCATTCGACAACGGCTACGCTGTCCCACTGGAGACCGTGTCAGTCTACACGTTCGATCCGAAGACAGGCGAGGT
TAAGAGGACGAAGGCTAGCTACATCTACCGGGAGAAGGTGGAGAAGCTCGCCGAGATCCGCCTGTCGAACGGCTACCTCCTGA
GGATTACACTCCTGCACCCCGTTCTCGTGTTCCGGAATGGCCTGCAGTGGGTGCCAGCTGGCATGATCAAGCCTGGGGACCTC
ATCGTCGGCATTCGCTCGGTTCCAGCGAACGCCGCGACTATTGAGGAGTCTGAGGCCTACTTCCTCGGGCTGTTCGTGGCTGA
GGGCACCTCAAATCCTCTCTCCATCACCACGGGCTCCGAGGAGCTGAAGGACTTCATCGTCAGCTTCATTGAGGACCATGATG
GGTACACACCAACTGTCGAGGTTCGCAGGGGCCTCTACCGGATCCTGTTCCGCAAGAAGACGGCTGAGTGGCTCGGCGGGCTG
GCTACTTCGAACGCCTCTACCAAGGTGGTCCCTGAGAGGGTCCTCAATGCGGGGGAGTCCGCTATCGCTGCCTTCCTCGCTGG
CTACCTGGACGGCGATGAGTACCTCACTGAGTCTATTGTGGAGCTGGTCACCAAGTCACGGGAGCTCGCTGACGGGCTGGTGT
TCCTCCTGAAGCGCCTGGGCATCACGCCGAGGATTAGCCAGAAGACAATCGAGGGGTCGGTCTACTACCGGATCTACATTACG
GGCGAGGATCGCAAGACATTCGAGAAGGTCCTGGAGAAGTCCAGGATCAAGCCAGGGGAGATGAACGAGGGCGGGGTTGGCAG
GTACCCACCAGCTCTGGGCAAGTTCCTCGGGAAGCTGTACAGCGAGTTCAGGCTCCCCAAGCGGGATAACGAGACTGCGTACC
ACATCCTGACCAGGTCACGGAATGTGTGGTTCACCGAGAAGACGCTCTCCCGGATTGAGGAGTACTTCAGGGAGGCTCTGGAG
AAGCTGTCGGAGGCTAGGAAGGCTCTGGAGATGGGCGACAAGCCGGAGCTGCCATTCCCTTGGACAGCGATCACTAAGTACGG
GTTCACGGATCGCCAGGTCGCTAACTACAGGACAAGGGGCCTCCCAAAGAGGCCAGAGCTGAAGGAGAAGGTTGTGTCCGCCC
TCCTGAAGGAGATCGAGAGGCTGGAGGGCGTGGCTAAGCTCGCTCTGGAGACCATTGAGCTCGCTAGGCGCATGGAGTTCCAT
GAGGTTTCCAGCGTGGAGGTCGTTGACTACAATGATTGGGTCTACGATCTCGTCATTCCAGAGACTCATAACTTCATTGCTCC
AAATGGGCTCGTGCTCCACAACtccaCtgtggggacagccacgttcgatcagtactggagcgtgcgcacctctaagcggacAt
caggaacagtgaccgtgaccgatcacttccgcgcctgggcgaaccggggcctgaacctcggcacaatagaccaaattacattg
tgcgtggagggttaccaaagctctggatcagccaacatcacccagaacaccttctctcagggctcttcttccggcagttcggg
tggctcatccggctccacaacgactactcgcatcgagtgtgagaacatgtccttgtccggaccctacgttagcaggatcacca
atccctttaatggtattgcgctgtacgccaacggagacacagcccgcgctaccgttaacttccccgcaagtcgcaactacaat
ttccgcctgcggggttgcggcaacaacaataatcttgcccgtgtggacctgaggatcgacggacggaccgtcgggaccttCta
ttaccagggcacatacccctgggaggccccaattgacaatgtttatgtcagtgcAgggagtcatacagtcgaaatcactgtta
ctgcggataacggcacatgggacgtgtatgccgactacctggtgatacagtga
AS-146-16(3 ext, 2 int)
(SEQ ID NO: 3330)
atgcaaacaagcattactctgacatccaacgcatccggtacgtttgacggttactattacgaactctggaaggatactggcaa
tacaacaatgacggtctacactcaaggtcgcttttcctgccagtggtcgaacatcaataacgcgttgtttaggaccgggaaga
aatacaaccagaattggcagtctcttggcacaatccggatcacgtactctgcgacttacaacccaaacgggaactcctacttg
tgtatctatggctggtctaccaacccattggtcgagttctacatcgtAgagtcctgggggaactggagaccgcctggtgccac
gtccctgggccaagtgacaatcgatggcgggacctacgacatctataggacgacacgcgtcaaccagcctTGCTTCGCTAAGG
ACACTAAGGTCTACTACGAGAATGACACACTGGTTCATTTCGAGTCAATTGAGGACATGTACCATAAGTACGCTTCTCTCGGG
AGGGAGGTGCCATTCGACAACGGCTACGCTGTCCCACTGGAGACCGTGTCAGTCTACACGTTCGATCTGAAGACAGGCGAGGT
TAAGAGGACGAAGGCTAGCTACATCTACCGGGAGAAGGTGGAGAAGCTCGCCGAGATCCGCCTGTCGAACGGCTACCTCCTGA
GGATTACACTCCTGCACCCCGTTCTCGTGTTCCGGAATGGCCTGCAGTGGGTGCCAGCTGCCATGATCAAGCCTGGGGACCTC
ATCGTCGGCATTCGCTCGGTTCCAGCGAACGCCGCGACTATTGAGGAGTCTGAGGCCTACTTCCTCGGGCTGTTCGTGGCTGA
GGGCACCTCAAATCCTCTCTCCATCACCACGGGCTCCGAGGAGCTGAAGGACTTCATCGTCAGCTTCATTGAGGACCATGATG
GGTACACACCAACTGTCGAGGTTCGCAGGGGCCTCTACCGGATCCTGTTCCGCAAGAAGACGGCTGAGTGGCTCGGCGAGCTG
GCTACTTCGAACGCCTCTACCAAGGTGGTCCCTGAGAGGGTCCTCAATGCGGGGGAGTCCGCTATCGCTGCCTTCCTCGCTGG
CTACCTGGACGGCGATGGGTACCTCACTGAGTCTATTGTGGAGCTGGTCACCAAGTCACGGGAGCTCGCTGACGGGCTGGTGT
TCCTCCTGAAGCGCCTGGGCATCACGCCGAGGATTAGCCAGAAGACAATCGAGGGGTCGGTCTACTACCGGATCTACATTACG
GGCGAGGATCGCAAGACATTCGAGAAGGTCCTGGAGAAGTCCAGGATCAAGCCAGGGGAGATGAACGAGGGCGGGGTTGGCAG
GTACCCACCAGCTCTGGGCAAGTTCCTCGGGAAGCTGTACAGCGAGTTCAGGCTCCCCAAGCGGGACAACGAGACTGCGTACC
ACATCCTGACCAGGTCACGGAATGTGTGGTTCACCGAGAAGACGCTCTCCCGGATTGAGGAGTACTTCAGGGAGGCTCTGGAG
AAGCTGTCGGAGGCTAGGAAGGCTCTGGAGATGGGCGACAAGCCGGAGCTGCCATTCCCTTGGACAGCGATCACTAAGTACGG
GTTCACGGATCGCCAGGTCGCTAACTACAGGACAAGGGGCCTCCCAAAGAGGCCAGAGCTGAAGGAGAAGGTTGTGTCCGCCC
TCCTGAAGGAGATCGAGAGGCTGGAGGGCGTGGCTAAGCTCGCTCTGGAGACCATTGAGCTCGCTAGGCGCCTGGAGTTCCAT
GAGGTTTCCAGCGTGGAGGTCGTTGACTACAATGATTGGGTCTACGATCTCGTCATTCCAGAGACTCATAACTTCATTGCTCC
AAATGGGCTCGTGCTCCACAACtccattgtggggacagccacgttcgatcagtactggagcgtgcgcacctctaagcggactt
caggaacagtgaccgtgaccgatcacttccgcgcctgggcgaaccggggcctgaacctcggcacaatagaccaaattacattg
tgcgtggagggttaccaaagctctggatcagccaacatcacccagaacaccttctctcagggctcttcttccggcagttcggg
tggctcatccggctccacaacgactactcgcatcgagtgtgaAaacatgtccttgtccggaccctacgttagcaggatcacca
atccctttaatggtattgcgctgtacgccGacggagacacagcccgcgctaccgttaacttccccgcaagtcgcaactacaat
ttccgcctgcggggttgcggcaacaacaataatcttgcccgtgtggacctgaggatcgacggacggaccgtcgggacctttta
ttaccagggcacatacccctgggaggccccaattgacaatgtttatgtcagtgcggggagtcatacagtcgaaatcactgtta
ctgcggataacggcacatgggacgtgtatgccgactacctggtgatacagtga

[0295] It is understood, therefore, that this invention is not limited to the particular embodiments disclosed, but is intended to cover all modifications which are within the spirit and scope of the invention as defined by the appended claims; the above description; and/or shown in the attached drawings.

What is claimed is:

1. An isolated protein having an amino acid sequence with at least 90% identity to a sequence selected from the group consisting of SEQ ID NOS: 2373-2686 and 3315-3322.

2. The isolated protein of claim 1, wherein the amino acid sequence has at least 95% identity to the sequence selected from the group consisting of SEQ ID NOS: 2373-2686 and 3315-3322.

3. The isolated protein of claim 1, wherein the amino acid sequence is one sequence selected from the group consisting of SEQ ID NOS: 2373-2686 and 3315-3322.

4. An isolated nucleic acid having a nucleotide sequence encoding an amino acid sequence with at least 90% identity to a sequence selected from the group consisting of SEQ ID NOS: 2373-2686 and 3315-3322.

5. The isolated nucleic acid of claim 4, wherein the amino acid sequence has at least 95% identity to the sequence selected from the group consisting of SEQ ID NOS: 2373-2686 and 3315-3322.

6. The isolated nucleic acid of claim 4, wherein the amino acid sequence is one sequence selected from the group consisting of SEQ ID NOS: 2373-2686 and 3315-3322.

7. A transgenic plant including the isolated nucleic acid of claim 4.

8. The transgenic plant of claim 7, wherein the isolated nucleic acid further includes an expression construct.

9. The transgenic plant of claim 8, wherein the expression construct has the sequence of SEQ ID NO: 1.

10. An isolated nucleic acid having a nucleotide sequence that hybridizes under conditions of moderate stringency to a sequence selected from the group consisting of SEQ ID NOS: 2687-3000 and 3323-3330.

11. The isolated nucleic acid of claim 10, wherein the nucleotide sequence hybridizes under conditions of high stringency to the sequence selected from the group consisting of SEQ ID NOS: 2687-3000 and 3323-3330.

12. A transgenic plant including the isolated nucleic acid of claim 10.

13. The transgenic plant of claim 12, wherein the isolated nucleic acid further includes an expression construct.

14. The transgenic plant of claim 13, wherein the expression construct has the sequence of SEQ ID NO: 1.

15. An isolated amino acid sequence comprising a contiguous amino acid sequence having at least 90% identity to 6, 10 to 50, 10 to 100, 10 to 150, 10 to 300, 10 to 400, 10 to 500, or 10 to all contiguous amino acid residues of a protein having the sequence of any of SEQ ID NOS: 2373-2686 and 3315-3322, wherein the protein has an intein sequence, an enzyme sequence, an upstream intein-extein junction and a downstream intein-extein junction, and wherein the protein having the sequence of one of SEQ ID NOS: 3315-3322 has at least one amino acid change relative to SEQ ID NO: 2518,
the isolated amino acid sequence including at least one of the upstream intein-extein junction, the downstream intein-extein junction or one or more of the at least one amino acid change relative to SEQ ID NO: 2518.

16. The isolated amino acid sequence of claim 15, wherein the contiguous amino acid sequence has 100% identity to the 6, 10 to 50, 10 to 100, 10 to 150, 10 to 300, 10 to 400, 10 to 500, or 10 to all contiguous amino acid residues of the protein having the sequence of one of SEQ ID NOS: 2373-2686 and 3315-3322.

17. An antibody recognizing an epitope on the isolated amino acid sequence of claim 15.

18. An isolated nucleic acid having a sequence encoding a contiguous amino acid sequence having at least 90% identity to 6, 10 to 50, 10 to 100, 10 to 150, 10 to 300, 10 to 400, 10 to 500, or 10 to all contiguous amino acid residues of a protein having the sequence of one of SEQ ID NOS: 2373-2686 and 3315-3322, wherein the protein has an intein sequence, an enzyme sequence, an upstream intein-extein junction and a downstream intein-extein junction, and wherein the protein having the sequence of one of SEQ ID NOS: 3315-3322 has at least one amino acid change relative to SEQ ID NO: 2518,
the isolated amino acid sequence including at least one of the upstream intein-extein junction, the downstream intein-extein junction, or one or more of the at least one amino acid change relative to SEQ ID NO: 2518.

19. The isolated nucleic acid of claim 18, wherein the amino acid sequence has at least 95% identity to the 6, 10 to 50, 10 to 100, 10 to 150, 10 to 300, 10 to 400, 10 to 500, or 10 to all contiguous amino acid residues of the protein having the sequence of one of SEQ ID NOS: 2373-2686 and 3315-3322.

20. The isolated nucleic acid of claim 18, wherein the amino acid sequence has 100% identity to the 6, 10 to 50, 10 to 100, 10 to 150, 10 to 300, 10 to 400, 10 to 500, or 10 to 522 contiguous amino acid residues of the protein having the sequence of one of SEQ ID NOS: 2373-2686 and 3315-3322.

The application's sequence listing, which the Patent Office published only in electronic form, follows.

SEQUENCE LISTING (3330 sequences)

SEQ ID NO: 1 - DNA, 12311 bp, Artificial Sequence
  Synthetic Construct, pAG2005
aattcatactaaagcttgcatgcctgcaggtcgactctagtaacggccgccagtgtgctggaattaattcggcttgtcgaccacccaaccccatatcgacagaggatgtgaagaacaggtaaatcacgcagaagaacccatctctgatagcagctatcgattagaacaacgaatccatattgggtccgtgggaaatacttactgcacaggaagggggcgatctgacgaggccccgccaccggcctcgacccgaggccgaggccgacgaagcgccggcgagtacggcgccgcggcggcctctgcccgtgccctctgcgcgtgggagggagaggccgcggtggtgggggcgcgcgcgcgcgcgcgcgcagctggtgcggcggcgcgggggtcagccgccgagccggcggcgacggaggagcagggcggcgtggacgcgaacttccgatcggttggtcagagtgcgcgagttgggcttagccaattaggtctcaacaatctattgggccgtaaaattcatgggccctggtttgtctaggcccaatatcccgttcatttcagcccacaaatatttccccagaggattattaaggcccacacgcagcttatagcagatcaagtacgatgtttcctgatcgttggatcggaaacgtacggtcttgatcaggcatgccgacttcgtcaaagagaggcggcatgacctgacgcggagttggttccgggcaccgtctggatggtcgtaccgggaccggacacgtgtcgcgcctccaactacatggacacgtgtggtgctgccattgggccgtacgcgtggcggtgaccgcaccggatgctgcctcgcaccgccttgcccacgctttatatagagaggttttctctccattaatcgcatagcgagtcgaatcgaccgaaggggagggggagcgaagctttgcgttctctaatcgcctcgtcaaggtaactaatcaatcacctcgtcctaatcctcgaatctctcgtggtgcccgtctaatctcgcgattttgatgctcgtggtggaaagcgtaggaggatcccgtgcgagttagtctcaatctctcagggtttcgtgcgattttagggtgatccacctcttaatcgagttacggtttcgtgcgattttagggtaatcctcttaatctctcattgatttagggtttcgtgagaatcgaggtagggatctgtgttatttatatcgatctaatagatggattggttttgagattgttctgtcagatggggattgtttcgatatattaccctaatgatgtgtcagatggggattgtttcgatatattaccctaatgatgtgtcagatggggattgtttcgatatattaccctaatgatggataataagagtagttcacagttatgttttgatcctgccacatagtttgagttttgtgatcagatttagttttacttatttgtgcttagttcggatgggattgttctgatattgttccaatagatgaatagctcgttaggttaaaatctttaggttgagttaggcgacacatagtttatttcctctggatttggattggaattgtgttcttagtttttttcccctggatttggattggaattgtgtggagctgggttagagaattacatctgtatcgtgtacacctacttgaactgtagagcttgggttctaaggtcaatttaatctgtattgtatctggctctttgcctagttgaactgtagtgctgatgttgtactgtgtttttttacccgttttatttgctttactcgtgcaaatcaaatctgtcagatgctagaactaggtggctttattctgtgttcttacatagatctgttgtcctgtagttacttatgtcagttttgttattatctgaagatatttttggttgttgcttgttgatgtggtgtgagctgtgagcagcgctcttatgattaatgatgctgtccaattgtagtgtagtatgatgtgattgatatgttcatctattttgagctgacagtaccgatatcgtaggatctggtgccaacttattctccagctgcttttttttacctatgttaattccaatcctttcttgcctcttccagatccagataatgcagaaactcattaactcagtgcaaaactatgcctggggcagcaaaacggcgttgactgaactttatggtatggaaaatccgtccagccagccgatggccgagctgtggatgggcgcacatccgaaaagcagttcacgagtgcagaatgccgccggagatatcgtttcactgcgtgatgtgattgagagtgataaatcgactctgctcggagaggccgttgccaaacgctttggcgaactgcctttcctgttcaaagtattatgcgcagcacagccactctccattcaggttcatccaaacaaacacaattctgaaatcggttttgccaaagaaaatgccgcaggtatcccgatggatgccgccgagcgtaactataaagatcctaaccacaagccggagctggtttttgcgctgacgcctttccttgcgatgaacgcgtttcgtgaattttccgagattgtctccctactccagccggtcgcaggtgcacatccggcgattgctcactttttacaacagcctgatgccgaacgtttaagcgaactgttcgccagcctgttgaatatgcagggtgaagaaaaatcccgcgcgctggcgattttaaaatcggccctcgatagccagcagggtgaaccgtggcaaacgattcgtttaatttctgaattttacccggaagacagcggtctgttctccccgctattgctgaatgtggtgaaattgaaccctggcgaagcgatgttcctgttcgctgaaacaccgcacgcttacctgcaaggcgtggcgctggaagtgatggcaaactccgataacgtgctgcgtgcgggtctgacgcctaaatacattgatattccggaactggttgccaatgtgaaattcgaagccaaaccggctaaccagttgttgacccagccggtgaaacaaggtgcagaactggacttcccgattccagtggatgattttgccttctcgctgcatgaccttagtgataaagaaaccaccattagccagcagagtgccgccattttgttctgcgtcgaaggcgatgcaacgttgtggaaaggttctcagcagttacagcttaaaccgggtgaatcagcgtttattgccgccaacgaatcaccggtgactgtcaaaggccacggccgtttagcgcgtgtttacaacaagctgtaagagcttactgaaaaaattaacatctcttgctaagctgggagctctagatccccgaatttccccgatcgttcaaacatttggcaataaagtttcttaagattgaatcctgttgccggtcttgcgatgattatcatataatttctgttgaattacgttaagcatgtaataattaacatgtaatgcatgacgttatttatgagatgggtttttatgattagagtcccgcaattatacatttaatacgcgatagaaaacaaaatatagcgcgcaaactaggataaattatcgcgcgcggtgtcatctatgttactagatcgggaattggcgagctcgaattaattcagtacattaaaaacgtccgcaatgtgttattaagttgtctaagcgtcaatttgtttacaccacaatatatcctgccaccagccagccaacagctccccgaccggcagctcggcacaaaatcaccactcgatacaggcagcccatcagtccgggacggcgtcagcgggagagccgttgtaaggcggcagactttgctcatgttaccgatgctattcggaagaacggcaactaagctgccgggtttgaaacacggatgatctcgcggagggtagcatgttgattgtaacgatgacagagcgttgctgcctgtgatcaaatatcatctccctcgcagagatccgaattatcagccttcttattcatttctcgcttaaccgtgacaggctgtcgatcttgagaactatgccgacataataggaaatcgctggataaagccgctgaggaagctgagtggcgctatttctttagaagtgaacgttgacgatcgtcgaccgtaccccgatgaattaattcggacgtacgttctgaacacagctggatacttacttgggcgattgtcatacatgacatcaacaatgtacccgtttgtgtaaccgtctcttggaggttcgtatgacactagtggttcccctcagcttgcgactagatgttgaggcctaacattttattagagagcaggctagttgcttagatacatgatcttcaggccgttatctgtcagggcaagcgaaaattggccatttatgacgaccaatgccccgcagaagctcccatctttgccgccatagacgccgcgccccccttttggggtgtagaacatccttttgccagatgtggaaaagaagttcgttgtcccattgttggcaatgacgtagtagccggcgaaagtgcgagacccatttgcgctatatataagcctacgatttccgttgcgactattgtcgtaattggatgaactattatcgtagttgctctcagagttgtcgtaatttgatggactattgtcgtaattgcttatggagttgtcgtagttgcttggagaaatgtcgtagttggatggggagtagtcatagggaagacgagcttcatccactaaaacaattggcaggtcagcaagtgcctgccccgatgccatcgcaagtacgaggcttagaaccaccttcaacagatcgcgcatagtcttccccagctctctaacgcttgagttaagccgcgccgcgaagcggcgtcggcttgaacgaattgttagacattatttgccgactaccttggtgatctcgcctttcacgtagtgaacaaattcttccaactgatctgcgcgcgaggccaagcgatcttcttgtccaagataagcctgcctagcttcaagtatgacgggctgatactgggccggcaggcgctccattgcccagtcggcagcgacatccttcggcgcgattttgccggttactgcgctgtaccaaatgcgggacaacgtaagcactacatttcgctcatcgccagcccagtcgggcggcgagttccatagcgttaaggtttcatttagcgcctcaaatagatcctgttcaggaaccggatcaaagagttcctccgccgctggacctaccaaggcaacgctatgttctcttgcttttgtcagcaagatagccagatcaatgtcgatcgtggctggctcgaagatacctgcaagaatgtcattgcgctgccattctccaaattgcagttcgcgcttagctggataacgccacggaatgatgtcgtcgtgcacaacaatggtgacttctacagcgcggagaatctcgctctctccaggggaagccgaagtttccaaaaggtcgttgatcaaagctcgccgcgttgtttcatcaagccttacggtcaccgtaaccagcaaatcaatatcactgtgtggcttcaggccgccatccactgcggagccgtacaaatgtacggccagcaacgtcggttcgagatggcgctcgatgacgccaactacctctgatagttgagtcgatacttcggcgatcaccgcttccctcatgatgtttaactcctgaattaagccgcgccgcgaagcggtgtcggcttgaatgaattgttaggcgtcatcctgtgctcccgagaaccagtaccagtacatcgctgtttcgttcgagacttgaggtctagttttatacgtgaacaggtcaatgccgccgagagtaaagccacattttgcgtacaaattgcaggcaggtacattgttcgtttgtgtctctaatcgtatgccaaggagctgtctgcttagtgcccactttttcgcaaattcgatgagactgtgcgcgactcctttgcctcggtgcgtgtgcgacacaacaatgtgttcgatagaggctagatcgttccatgttgagttgagttcaatcttcccgacaagctcttggtcgatgaatgcgccatagcaagcagagtcttcatcagagtcatcatccgagatgtaatccttccggtaggggctcacacttctggtagatagttcaaagccttggtcggataggtgcacatcgaacacttcacgaacaatgaaatggttctcagcatccaatgtttccgccacctgctcagggatcaccgaaatcttcatatgacgcctaacgcctggcacagcggatcgcaaacctggcgcggcttttggcacaaaaggcgtgacaggtttgcgaatccgttgctgccacttgttaacccttttgccagatttggtaactataatttatgttagaggcgaagtcttgggtaaaaactggcctaaaattgctggggatttcaggaaagtaaacatcaccttccggctcgatgtctattgtagatatatgtagtgtatctacttgatcgggggatctgctgcctcgcgcgtttcggtgatgacggtgaaaacctctgacacatgcagctcccggagacggtcacagcttgtctgtaagcggatgccgggagcagacaagcccgtcagggcgcgtcagcgggtgttggcgggtgtcggggcgcagccatgacccagtcacgtagcgatagcggagtgtatactggcttaactatgcggcatcagagcagattgtactgagagtgcaccatatgcggtgtgaaataccgcacagatgcgtaaggagaaaataccgcatcaggcgctcttccgcttcctcgctcactgactcgctgcgctcggtcgttcggctgcggcgagcggtatcagctcactcaaaggcggtaatacggttatccacagaatcaggggataacgcaggaaagaacatgtgagcaaaaggccagcaaaaggccaggaaccgtaaaaaggccgcgttgctggcgtttttccataggctccgcccccctgacgagcatcacaaaaatcgacgctcaagtcagaggtggcgaaacccgacaggactataaagataccaggcgtttccccctggaagctccctcgtgcgctctcctgttccgaccctgccgcttaccggatacctgtccgcctttctcccttcgggaagcgtggcgctttctcatagctcacgctgtaggtatctcagttcggtgtaggtcgttcgctccaagctgggctgtgtgcacgaaccccccgttcagcccgaccgctgcgccttatccggtaactatcgtcttgagtccaacccggtaagacacgacttatcgccactggcagcagccactggtaacaggattagcagagcgaggtatgtaggcggtgctacagagttcttgaagtggtggcctaactacggctacactagaaggacagtatttggtatctgcgctctgctgaagccagttaccttcggaaaaagagttggtagctcttgatccggcaaacaaaccaccgctggtagcggtggtttttttgtttgcaagcagcagattacgcgcagaaaaaaaggatctcaagaagatcctttgatcttttctacggggtctgacgctcagtggaacgaaaactcacgttaagggattttggtcatgagattatcaaaaaggatcttcacctagatccttttaaattaaaaatgaagttttaaatcaatctaaagtatatatgagtaaacttggtctgacagttaccaatgcttaatcagtgaggcacctatctcagcgatctgtctatttcgttcatccatagttgcctgactccccgtcgtgtagataactacgatacgggagggcttaccatctggccccagtgctgcaatgataccgcgagacccacgctcaccggctccagatttatcagcaataaaccagccagccggaagggccgagcgcagaagtggtcctgcaactttatccgcctccatccagtctattaattgttgccgggaagctagagtaagtagttcgccagttaatagtttgcgcaacgttgttgccattgctgcaggggggggggggggggggttccattgttcattccacggacaaaaacagagaaaggaaacgacagaggccaaaaagctcgctttcagcacctgtcgtttcctttcttttcagagggtattttaaataaaaacattaagttatgacgaagaagaacggaaacgccttaaaccggaaaattttcataaatagcgaaaacccgcgaggtcgccgccccgtaacctgtcggatcaccggaaaggacccgtaaagtgataatgattatcatctacatatcacaacgtgcgtggaggccatcaaaccacgtcaaataatcaattatgacgcaggtatcgtattaattgatctgcatcaacttaacgtaaaaacaacttcagacaatacaaatcagcgacactgaatacggggcaacctcatgtccccccccccccccccctgcaggcatcgtggtgtcacgctcgtcgtttggtatggcttcattcagctccggttcccaacgatcaaggcgagttacatgatcccccatgttgtgcaaaaaagcggttagctccttcggtcctccgatcgttgtcagaagtaagttggccgcagtgttatcactcatggttatggcagcactgcataattctcttactgtcatgccatccgtaagatgcttttctgtgactggtgagtactcaaccaagtcattctgagaatagtgtatgcggcgaccgagttgctcttgcccggcgtcaacacgggataataccgcgccacatagcagaactttaaaagtgctcatcattggaaaacgttcttcggggcgaaaactctcaaggatcttaccgctgttgagatccagttcgatgtaacccactcgtgcacccaactgatcttcagcatcttttactttcaccagcgtttctgggtgagcaaaaacaggaaggcaaaatgccgcaaaaaagggaataagggcgacacggaaatgttgaatactcatactcttcctttttcaatattattgaagcatttatcagggttattgtctcatgagcggatacatatttgaatgtatttagaaaaataaacaaataggggttccgcgcacatttccccgaaaagtgccacctgacgtctaagaaaccattattatcatgacattaacctataaaaataggcgtatcacgaggccctttcgtcttcaagaattggtcgacgatcttgctgcgttcggatattttcgtggagttcccgccacagacccggattgaaggcgagatccagcaactcgcgccagatcatcctgtgacggaactttggcgcgtgatgactggccaggacgtcggccgaaagagcgacaagcagatcacgcttttcgacagcgtcggatttgcgatcgaggatttttcggcgctgcgctacgtccgcgaccgcgttgagggatcaagccacagcagcccactcgaccttctagccgacccagacgagccaagggatctttttggaatgctgctccgtcgtcaggctttccgacgtttgggtggttgaacagaagtcattatcgcacggaatgccaagcactcccgaggggaaccctgtggttggcatgcacatacaaatggacgaacggataaaccttttcacgcccttttaaatatccgattattctaataaacgctcttttctcttaggtttacccgccaatatatcctgtcaaacactgatagtttaaactgaaggcgggaaacgacaacctgatcatgagcggagaattaagggagtcacgttatgacccccgccgatgacgcgggacaagccgttttacgtttggaactgacagaaccgcaacgttgaaggagccactcagcttaattaagtctaactcgagttactggtacgtaccaaatccatggaatcaaggtaccgtcgactctagtaacggccgccagtgtgctggaattaattcggcttgtcgaccacccaaccccatatcgacagaggatgtgaagaacaggtaaatcacgcagaagaacccatctctgatagcagctatcgattagaacaacgaatccatattgggtccgtgggaaatacttactgcacaggaagggggcgatctgacgaggccccgccaccggcctcgacccgaggccgaggccgacgaagcgccggcgagtacggcgccgcggcggcctctgcccgtgccctctgcgcgtgggagggagaggccgcggtggtgggggcgcgcgcgcgcgcgcgcgcagctggtgcggcggcgcgggggtcagccgccgagccggcggcgacggaggagcagggcggcgtggacgcgaacttccgatcggttggtcagagtgcgcgagttgggcttagccaattaggtctcaacaatctattgggccgtaaaattcatgggccctggtttgtctaggcccaatatcccgttcatttcagcccacaaatatttccccagaggattattaaggcccacacgcagcttatagcagatcaagtacgatgtttcctgatcgttggatcggaaacgtacggtcttgatcaggcatgccgacttcgtcaaagagaggcggcatgacctgacgcggagttggttccgggcaccgtctggatggtcgtaccgggaccggacacgtgtcgcgcctccaactacatggacacgtgtggtgctgccattgggccgtacgcgtggcggtgaccgcaccggatgctgcctcgcaccgccttgcccacgctttatatagagaggttttctctccattaatcgcatagcgagtcgaatcgaccgaaggggagggggagcgaagctttgcgttctctaatcgcctcgtcaaggtaactaatcaatcacctcgtcctaatcctcgaatctctcgtggtgcccgtctaatctcgcgattttgatgctcgtggtggaaagcgtaggaggatcccgtgcgagttagtctcaatctctcagggtttcgtgcgattttagggtgatccacctcttaatcgagttacggtttcgtgcgattttagggtaatcctcttaatctctcattgatttagggtttcgtgagaatcgaggtagggatctgtgttatttatatcgatctaatagatggattggttttgagattgttctgtcagatggggattgtttcgatatattaccctaatgatgtgtcagatggggattgtttcgatatattaccctaatgatgtgtcagatggggattgtttcgatatattaccctaatgatggataataagagtagttcacagttatgttttgatcctgccacatagtttgagttttgtgatcagatttagttttacttatttgtgcttagttcggatgggattgttctgatattgttccaatagatgaatagctcgttaggttaaaatctttaggttgagttaggcgacacatagtttatttcctctggatttggattggaattgtgttcttagtttttttcccctggatttggattggaattgtgtggagctgggttagagaattacatctgtatcgtgtacacctacttgaactgtagagcttgggttctaaggtcaatttaatctgtattgtatctggctctttgcctagttgaactgtagtgctgatgttgtactgtgtttttttacccgttttatttgctttactcgtgcaaatcaaatctgtcagatgctagaactaggtggctttattctgtgttcttacatagatctgttgtcctgtagttacttatgtcagttttgttattatctgaagatatttttggttgttgcttgttgatgtggtgtgagctgtgagcagcgctcttatgattaatgatgctgtccaattgtagtgtagtatgatgtgattgatatgttcatctattttgagctgacagtaccgatatcgtaggatctggtgccaacttattctccagctgcttttttttacctatgttaattccaatcctttcttgcctcttccagcccgggtattcatcctaggtccccgaatttccccgatcgttcaaacatttggcaataaagtttcttaagattgaatcctgttgccggtcttgcgatgattatcatataatttctgttgaattacgttaagcatgtaataattaacatgtaatgcatgacgttatttatgagatgggtttttatgattagagtcccgcaattatacatttaatacgcgatagaaaacaaaatatagcgcgcaaactaggataaattatcgcgcgcggtgtcatctatgttactagatcgggaattgg

SEQ ID NO: 2 - protein, 134 aa, Methanothermobacter thermautotrophicus
  Mth
CVSGDTIVMTSGGPRTVAELEGKPFTALIRGSGYPCPSGFFRTCERDVYDLRTREGHCLRLTHDHRVLVMDGGLEWRAAGELERGDRLVMDDAAGEFPALATFRGLRGAGRQDVYDATVYGASAFTANGFIVHN

SEQ ID NO: 3 - protein, 537 aa, Pyrococcus species GB-D
  PspPol
SILPEEWVPLIKNGKVKIFRIGDFVDGLMKANQGKVKKTGDTEVLEVAGIHAFSFDRKSKKARVMAVKAVIRHRYSGNVYRIVLNSGRKITITEGHSLFVYRNGDLVEATGEDVKIGDLLAVPRSVNLPEKRERLNIVELLLNLSPEETEDIILTIPVKGRKNFFKGMLRTLRWIFGEEKRVRTASRYLRHLENLGYIRLRKIGYDIIDKEGLEKYRTLYEKLVDVVRYNGNKREYLVEFNAVRDVISLMPEEELKEWRIGTRNGFRMGTFVDIDEDFAKLLGYYVSEGSARKWKNQTGGWSYTVRLYNENDEVLDDMEHLAKKFFGKVKRGKNYVEIPKKMAYIIFESLCGTLAENKRVPEVIFTSSKGVRWAFLEGYFIGDGDVHPSKRVRLSTKSELLVNGLVLLLNSLGVSAIKLGYDSGVYRVYVNEELKFTEYRKKKNVYHSHIVPKDILKETFGKVFQKNISYKKFRELVENGKLDREKAKRIEWLLNGDIVLDRVVEIKREYYDGYVYDLSVDEDENFLAGFGFLYAHN

SEQ ID NO: 4 - protein, 167 aa, Artificial Sequence
  Synthetic Construct, mPspM1L1
SILPEEWVPLTKNGKSKTFRIGDFVDGLMKANQGKVKKTGDTEVLEVAGIHANSFDRKSKKSRTMAVKAVIRHRYSGNVYRIVLNSGRKITITEGHSLFVYRNGDLVEATGEDVKIGDNLAVPRSGDITEDRVVEIKREYYDGYVYDLSVDEDENFLAGHGYLMAHN

SEQ ID NO: 5 - protein, 168 aa, Artificial Sequence
  Synthetic Construct, mPspM1L2
SILPEEWVPLTKNGKSKTFRIGDFVDGLMKANQGKVKKTGDTEVLEVAGIHANSFDRKSKKSRTMAVKAVIRHRYSGNVYRIVLNSGRKITITEGHSLFVYRNGDLVEATGEDVKIGDNLAVPRSGGDITEDRVVEIKREYYDGYVYDLSVDEDENFLAGHGYLMAHN

SEQ ID NO: 6 - protein, 169 aa, Artificial Sequence
  Synthetic Construct, mPspM1L3
SILPEEWVPLTKNGKSKTFRIGDFVDGLMKANQGKVKKTGDTEVLEVAGIHANSFDRKSKKSRTMAVKAVIRHRYSGNVYRIVLNSGRKITITEGHSLFVYRNGDLVEATGEDVKIGDNLAVPRSGSGDITEDRVVEIKREYYDGYVYDLSVDEDENFLAGHGYLMAHN

SEQ ID NO: 7 - protein, 170 aa, Artificial Sequence
  Synthetic Construct, mPspM1L4
SILPEEWVPLTKNGKSKTFRIGDFVDGLMKANQGKVKKTGDTEVLEVAGIHANSFDRKSKKSRTMAVKAVIRHRYSGNVYRIVLNSGRKITITEGHSLFVYRNGDLVEATGEDVKIGDNLAVPRSNGSGDITEDRVVEIKREYYDGYVYDLSVDEDENFLAGHGYLMAHN

SEQ ID NO: 8 - protein, 171 aa, Artificial Sequence
  Synthetic Construct, mPspM1L5
SILPEEWVPLTKNGKSKTFRIGDFVDGLMKANQGKVKKTGDTEVLEVAGIHANSFDRKSKKSRTMAVKAVIRHRYSGNVYRIVLNSGRKITITEGHSLFVYRNGDLVEATGEDVKIGDNLAVPRSGDSNGDITEDRVVEIKREYYDGYVYDLSVDEDENFLAGHGYLMAHN

SEQ ID NO: 9 - protein, 172 aa, Artificial Sequence
  Synthetic Construct, mPspM1L6
SILPEEWVPLTKNGKSKTFRIGDFVDGLMKANQGKVKKTGDTEVLEVAGIHANSFDRKSKKSRTMAVKAVIRHRYSGNVYRIVLNSGRKITITEGHSLFVYRNGDLVEATGEDVKIGDNLAVPRSNGSDSGDITEDRVVEIKREYYDGYVYDLSVDEDENFLAGHGYLMAHN

SEQ ID NO: 10 - protein, 173 aa, Artificial Sequence
  Synthetic Construct, mPspM1L7
SILPEEWVPLTKNGKSKTFRIGDFVDGLMKANQGKVKKTGDTEVLEVAGIHANSFDRKSKKSRTMAVKAVIRHRYSGNVYRIVLNSGRKITITEGHSLFVYRNGDLVEATGEDVKIGDNLAVPRSSGDSGNGDITEDRVVEIKREYYDGYVYDLSVDEDENFLAGHGYLMAHN

SEQ ID NO: 11 - protein, 167 aa, Artificial Sequence
  Synthetic Construct, mPspM2L1
SILPEEWVPLTKNGKSKTFRIGDFVDGLMKANQGKVKKTGDTEVLEVAGIHANSFDRKSKKSRTMAVKAVIRHRYSGNVYRIVLNSGRKITITEGHSLFVYRNGDLVEATGEDVKIGDNLAVPRSGDITNDRVVEIKREYYDGYVYDLSVDEDENFLAGHGYLMAHN

SEQ ID NO: 12 - protein, 168 aa, Artificial Sequence
  Synthetic Construct, mPspM2L2
SILPEEWVPLTKNGKSKTFRIGDFVDGLMKANQGKVKKTGDTEVLEVAGIHANSFDRKSKKSRTMAVKAVIRHRYSGNVYRIVLNSGRKITITEGHSLFVYRNGDLVEATGEDVKIGDNLAVPRSGGDITNDRVVEIKREYYDGYVYDLSVDEDENFLAGHGYLMAHN

SEQ ID NO: 13 - protein, 169 aa, Artificial Sequence
  Synthetic Construct, mPspM2L3
SILPEEWVPLTKNGKSKTFRIGDFVDGLMKANQGKVKKTGDTEVLEVAGIHANSFDRKSKKSRTMAVKAVIRHRYSGNVYRIVLNSGRKITITEGHSLFVYRNGDLVEATGEDVKIGDNLAVPRSGSGDITNDRVVEIKREYYDGYVYDLSVDEDENFLAGHGYLMAHN

SEQ ID NO: 14 - protein, 170 aa, Artificial Sequence
  Synthetic Construct, mPspM2L4
SILPEEWVPLTKNGKSKTFRIGDFVDGLMKANQGKVKKTGDTEVLEVAGIHANSFDRKSKKSRTMAVKAVIRHRYSGNVYRIVLNSGRKITITEGHSLFVYRNGDLVEATGEDVKIGDNLAVPRSNGSGDITNDRVVEIKREYYDGYVYDLSVDEDENFLAGHGYLMAHN

SEQ ID NO: 15 - protein, 171 aa, Artificial Sequence
  Synthetic Construct, mPspM2L5
SILPEEWVPLTKNGKSKTFRIGDFVDGLMKANQGKVKKTGDTEVLEVAGIHANSFDRKSKKSRTMAVKAVIRHRYSGNVYRIVLNSGRKITITEGHSLFVYRNGDLVEATGEDVKIGDNLAVPRSGDSNGDITNDRVVEIKREYYDGYVYDLSVDEDENFLAGHGYLMAHN

SEQ ID NO: 16 - protein, 172 aa, Artificial Sequence
  Synthetic Construct, mPspM2L6
SILPEEWVPLTKNGKSKTFRIGDFVDGLMKANQGKVKKTGDTEVLEVAGIHANSFDRKSKKSRTMAVKAVIRHRYSGNVYRIVLNSGRKITITEGHSLFVYRNGDLVEATGEDVKIGDNLAVPRSNGSDSGDITNDRVVEIKREYYDGYVYDLSVDEDENFLAGHGYLMAHN

SEQ ID NO: 17 - protein, 173 aa, Artificial Sequence
  Synthetic Construct, mPspM2L7
SILPEEWVPLTKNGKSKTFRIGDFVDGLMKANQGKVKKTGDTEVLEVAGIHANSFDRKSKKSRTMAVKAVIRHRYSGNVYRIVLNSGRKITITEGHSLFVYRNGDLVEATGEDVKIGDNLAVPRSSGDSGNGDITNDRVVEIKREYYDGYVYDLSVDEDENFLAGHGYLMAHN

SEQ ID NO: 18 - protein, 167 aa, Artificial Sequence
  Synthetic Construct, mPspM3L1
SILPEEWVPLTKNGKSKTFRIGDFVDGLMKANQGKVKKTGDTEVLEVAGIHANSFDRKSKKSRTMAVKAVIRHRYSGNVYRIVLNSGRKITITEGHSLFVYRNGDLVEATGEDVKIGDNLAVPRSGDITEDRVVEIKREYYDGYVYDLSVDEDENFNAGHGYLMAHN

SEQ ID NO: 19 - protein, 168 aa, Artificial Sequence
  Synthetic Construct, mPspM3L2
SILPEEWVPLTKNGKSKTFRIGDFVDGLMKANQGKVKKTGDTEVLEVAGIHANSFDRKSKKSRTMAVKAVIRHRYSGNVYRIVLNSGRKITITEGHSLFVYRNGDLVEATGEDVKIGDNLAVPRSGGDITEDRVVEIKREYYDGYVYDLSVDEDENFNAGHGYLMAHN

SEQ ID NO: 20 - protein, 169 aa, Artificial Sequence
  Synthetic Construct, mPspM3L3
SILPEEWVPLTKNGKSKTFRIGDFVDGLMKANQGKVKKTGDTEVLEVAGIHANSFDRKSKKSRTMAVKAVIRHRYSGNVYRIVLNSGRKITITEGHSLFVYRNGDLVEATGEDVKIGDNLAVPRSGSGDITEDRVVEIKREYYDGYVYDLSVDEDENFNAGHGYLMAHN

SEQ ID NO: 21 - protein, 170 aa, Artificial Sequence
  Synthetic Construct, mPspM3L4
SILPEEWVPLTKNGKSKTFRIGDFVDGLMKANQGKVKKTGDTEVLEVAGIHANSFDRKSKKSRTMAVKAVIRHRYSGNVYRIVLNSGRKITITEGHSLFVYRNGDLVEATGEDVKIGDNLAVPRSNGSGDITEDRVVEIKREYYDGYVYDLSVDEDENFNAGHGYLMAHN

SEQ ID NO: 22 - protein, 171 aa, Artificial Sequence
  Synthetic Construct, mPspM3L5
SILPEEWVPLTKNGKSKTFRIGDFVDGLMKANQGKVKKTGDTEVLEVAGIHANSFDRKSKKSRTMAVKAVIRHRYSGNVYRIVLNSGRKITITEGHSLFVYRNGDLVEATGEDVKIGDNLAVPRSGDSNGDITEDRVVEIKREYYDGYVYDLSVDEDENFNAGHGYLMAHN

SEQ ID NO: 23 - protein, 172 aa, Artificial Sequence
  Synthetic Construct, mPspM3L6
SILPEEWVPLTKNGKSKTFRIGDFVDGLMKANQGKVKKTGDTEVLEVAGIHANSFDRKSKKSRTMAVKAVIRHRYSGNVYRIVLNSGRKITITEGHSLFVYRNGDLVEATGEDVKIGDNLAVPRSNGSDSGDITEDRVVEIKREYYDGYVYDLSVDEDENFNAGHGYLMAHN

SEQ ID NO: 24 - protein, 173 aa, Artificial Sequence
  Synthetic Construct, mPspM3L7
SILPEEWVPLTKNGKSKTFRIGDFVDGLMKANQGKVKKTGDTEVLEVAGIHANSFDRKSKKSRTMAVKAVIRHRYSGNVYRIVLNSGRKITITEGHSLFVYRNGDLVEATGEDVKIGDNLAVPRSSGDSGNGDITEDRVVEIKREYYDGYVYDLSVDEDENFNAGHGYLMAHN

SEQ ID NO: 25 - protein, 167 aa, Artificial Sequence
  Synthetic Construct, mPspM4L1
SILPEEWVPLTKNGKSKTFRIGDFVDGLMKANQGKVKKTGDTEVLEVAGIHANSFDRKSKKSRTMAVKAVIRHRYSGNVYRIVLNSGRKITITEGHSLFVYRNGDLVEATGEDVKIGDNLAVPRSGDITNDRVVEIKREYYDGYVYDLSVDEDENFNAGHGYLMAHN

SEQ ID NO: 26 - protein, 168 aa, Artificial Sequence
  Synthetic Construct, mPspM4L2
SILPEEWVPLTKNGKSKTFRIGDFVDGLMKANQGKVKKTGDTEVLEVAGIHANSFDRKSKKSRTMAVKAVIRHRYSGNVYRIVLNSGRKITITEGHSLFVYRNGDLVEATGEDVKIGDNLAVPRSGGDITNDRVVEIKREYYDGYVYDLSVDEDENFNAGHGYLMAHN

SEQ ID NO: 27 - protein, 169 aa, Artificial Sequence
  Synthetic Construct, mPspM4L3
SILPEEWVPLTKNGKSKTFRIGDFVDGLMKANQGKVKKTGDTEVLEVAGIHANSFDRKSKKSRTMAVKAVIRHRYSGNVYRIVLNSGRKITITEGHSLFVYRNGDLVEATGEDVKIGDNLAVPRSGSGDITNDRVVEIKREYYDGYVYDLSVDEDENFNAGHGYLMAHN

SEQ ID NO: 28 - protein, 170 aa, Artificial Sequence
  Synthetic Construct, mPspM4L4
SILPEEWVPLTKNGKSKTFRIGDFVDGLMKANQGKVKKTGDTEVLEVAGIHANSFDRKSKKSRTMAVKAVIRHRYSGNVYRIVLNSGRKITITEGHSLFVYRNGDLVEATGEDVKIGDNLAVPRSNGSGDITNDRVVEIKREYYDGYVYDLSVDEDENFNAGHGYLMAHN

SEQ ID NO: 29 - protein, 171 aa, Artificial Sequence
  Synthetic Construct, mPspM4L5
SILPEEWVPLTKNGKSKTFRIGDFVDGLMKANQGKVKKTGDTEVLEVAGIHANSFDRKSKKSRTMAVKAVIRHRYSGNVYRIVLNSGRKITITEGHSLFVYRNGDLVEATGEDVKIGDNLAVPRSGDSNGDITNDRVVEIKREYYDGYVYDLSVDEDENFNAGHGYLMAHN

SEQ ID NO: 30 - protein, 172 aa, Artificial Sequence
  Synthetic Construct, mPspM4L6
SILPEEWVPLTKNGKSKTFRIGDFVDGLMKANQGKVKKTGDTEVLEVAGIHANSFDRKSKKSRTMAVKAVIRHRYSGNVYRIVLNSGRKITITEGHSLFVYRNGDLVEATGEDVKIGDNLAVPRSNGSDSGDITNDRVVEIKREYYDGYVYDLSVDEDENFNAGHGYLMAHN

SEQ ID NO: 31 - protein, 173 aa, Artificial Sequence
  Synthetic Construct, mPspM4L7
SILPEEWVPLTKNGKSKTFRIGDFVDGLMKANQGKVKKTGDTEVLEVAGIHANSFDRKSKKSRTMAVKAVIRHRYSGNVYRIVLNSGRKITITEGHSLFVYRNGDLVEATGEDVKIGDNLAVPRSSGDSGNGDITNDRVVEIKREYYDGYVYDLSVDEDENFNAGHGYLMAHN

SEQ ID NO: 32 - protein, 167 aa, Artificial Sequence
  Synthetic Construct, mPspM5L1
SILPEEWVPLIKNGKVKTFRIGDFVDGLMKANQGKVKKTGDTEVLEVAGIHANSFDRKSKKSRVMAVKAVIRHRYSGNVYRIVLNSGRKITITEGHSLFVYRNGDLVEATGEDVKIGDNLAVPRSGDITEDRVVEIKREYYDGYVYDLSVDEDENFLAGHGYLMAHN

SEQ ID NO: 33 - protein, 168 aa, Artificial Sequence
  Synthetic Construct, mPspM5L2
SILPEEWVPLIKNGKVKTFRIGDFVDGLMKANQGKVKKTGDTEVLEVAGIHANSFDRKSKKSRVMAVKAVIRHRYSGNVYRIVLNSGRKITITEGHSLFVYRNGDLVEATGEDVKIGDNLAVPRSGGDITEDRVVEIKREYYDGYVYDLSVDEDENFLAGHGYLMAHN

SEQ ID NO: 34 - protein, 169 aa, Artificial Sequence
  Synthetic Construct, mPspM5L3
SILPEEWVPLIKNGKVKTFRIGDFVDGLMKANQGKVKKTGDTEVLEVAGIHANSFDRKSKKSRVMAVKAVIRHRYSGNVYRIVLNSGRKITITEGHSLFVYRNGDLVEATGEDVKIGDNLAVPRSGSGDITEDRVVEIKREYYDGYVYDLSVDEDENFLAGHGYLMAHN

SEQ ID NO: 35 - protein, 170 aa, Artificial Sequence
  Synthetic Construct, mPspM5L4
SILPEEWVPLIKNGKVKTFRIGDFVDGLMKANQGKVKKTGDTEVLEVAGIHANSFDRKSKKSRVMAVKAVIRHRYSGNVYRIVLNSGRKITITEGHSLFVYRNGDLVEATGEDVKIGDNLAVPRSNGSGDITEDRVVEIKREYYDGYVYDLSVDEDENFLAGHGYLMAHN

SEQ ID NO: 36 - protein, 171 aa, Artificial Sequence
  Synthetic Construct, mPspM5L5
SILPEEWVPLIKNGKVKTFRIGDFVDGLMKANQGKVKKTGDTEVLEVAGIHANSFDRKSKKSRVMAVKAVIRHRYSGNVYRIVLNSGRKITITEGHSLFVYRNGDLVEATGEDVKIGDNLAVPRSGDSNGDITEDRVVEIKREYYDGYVYDLSVDEDENFLAGHGYLMAHN

SEQ ID NO: 37 - protein, 172 aa, Artificial Sequence
  Synthetic Construct, mPspM5L6
SILPEEWVPLIKNGKVKTFRIGDFVDGLMKANQGKVKKTGDTEVLEVAGIHANSFDRKSKKSRVMAVKAVIRHRYSGNVYRIVLNSGRKITITEGHSLFVYRNGDLVEATGEDVKIGDNLAVPRSNGSDSGDITEDRVVEIKREYYDGYVYDLSVDEDENFLAGHGYLMAHN

SEQ ID NO: 38 - protein, 173 aa, Artificial Sequence
  Synthetic Construct, mPspM5L7
SILPEEWVPLIKNGKVKTFRIGDFVDGLMKANQGKVKKTGDTEVLEVAGIHANSFDRKSKKSRVMAVKAVIRHRYSGNVYRIVLNSGRKITITEGHSLFVYRNGDLVEATGEDVKIGDNLAVPRSSGDSGNGDITEDRVVEIKREYYDGYVYDLSVDEDENFLAGHGYLMAHN

SEQ ID NO: 39 - protein, 167 aa, Artificial Sequence
  Synthetic Construct, mPspM6L1
SILPEEWVPLTKNGKSKIFRIGDFVDGLMKANQGKVKKTGDTEVLEVAGIHANSFDRKSKKSRTMAVKAVIRHRYSGNVYRIVLNSGRKITITEGHSLFVYRNGDLVEATGEDVKIGDNLAVPRSGDITEDRVVEIKREYYDGYVYDLSVDEDENFLAGFGFLMAHN

SEQ ID NO: 40 - protein, 168 aa, Artificial Sequence
  Synthetic Construct, mPspM6L2
SILPEEWVPLTKNGKSKIFRIGDFVDGLMKANQGKVKKTGDTEVLEVAGIHANSFDRKSKKSRTMAVKAVIRHRYSGNVYRIVLNSGRKITITEGHSLFVYRNGDLVEATGEDVKIGDNLAVPRSGGDITEDRVVEIKREYYDGYVYDLSVDEDENFLAGFGFLMAHN

SEQ ID NO: 41 - protein, 169 aa, Artificial Sequence
  Synthetic Construct, mPspM6L3
SILPEEWVPLTKNGKSKIFRIGDFVDGLMKANQGKVKKTGDTEVLEVAGIHANSFDRKSKKSRTMAVKAVIRHRYSGNVYRIVLNSGRKITITEGHSLFVYRNGDLVEATGEDVKIGDNLAVPRSGSGDITEDRVVEIKREYYDGYVYDLSVDEDENFLAGFGFLMAHN

SEQ ID NO: 42 - protein, 170 aa, Artificial Sequence
  Synthetic Construct, mPspM6L4
SILPEEWVPLTKNGKSKIFRIGDFVDGLMKANQGKVKKTGDTEVLEVAGIHANSFDRKSKKSRTMAVKAVIRHRYSGNVYRIVLNSGRKITITEGHSLFVYRNGDLVEATGEDVKIGDNLAVPRSNGSGDITEDRVVEIKREYYDGYVYDLSVDEDENFLAGFGFLMAHN

SEQ ID NO: 43 - protein, 171 aa, Artificial Sequence
  Synthetic Construct, mPspM6L5
SILPEEWVPLTKNGKSKIFRIGDFVDGLMKANQGKVKKTGDTEVLEVAGIHANSFDRKSKKSRTMAVKAVIRHRYSGNVYRIVLNSGRKITITEGHSLFVYRNGDLVEATGEDVKIGDNLAVPRSGDSNGDITEDRVVEIKREYYDGYVYDLSVDEDENFLAGFGFLMAHN

SEQ ID NO: 44 - protein, 172 aa, Artificial Sequence
  Synthetic Construct, mPspM6L6
SILPEEWVPLTKNGKSKIFRIGDFVDGLMKANQGKVKKTGDTEVLEVAGIHANSFDRKSKKSRTMAVKAVIRHRYSGNVYRIVLNSGRKITITEGHSLFVYRNGDLVEATGEDVKIGDNLAVPRSNGSDSGDITEDRVVEIKREYYDGYVYDLSVDEDENFLAGFGFLMAHN

SEQ ID NO: 45 - protein, 173 aa, Artificial Sequence
  Synthetic Construct, mPspM6L7
SILPEEWVPLTKNGKSKIFRIGDFVDGLMKANQGKVKKTGDTEVLEVAGIHANSFDRKSKKSRTMAVKAVIRHRYSGNVYRIVLNSGRKITITEGHSLFVYRNGDLVEATGEDVKIGDNLAVPRSSGDSGNGDITEDRVVEIKREYYDGYVYDLSVDEDENFLAGFGFLMAHN

SEQ ID NO: 46 - protein, 167 aa, Artificial Sequence
  Synthetic Construct, mPspM7L1
SILPEEWVPLTKNGKSKTFRIGDFVDGLMKANQGKVKKTGDTEVLEVAGIHAFSFDRKSKKARTMAVKAVIRHRYSGNVYRIVLNSGRKITITEGHSLFVYRNGDLVEATGEDVKIGDNLAVPRSGDITEDRVVEIKREYYDGYVYDLSVDEDENFLAGHGYLMAHN

SEQ ID NO: 47 - protein, 168 aa, Artificial Sequence
  Synthetic Construct, mPspM7L2
SILPEEWVPLTKNGKSKTFRIGDFVDGLMKANQGKVKKTGDTEVLEVAGIHAFSFDRKSKKARTMAVKAVIRHRYSGNVYRIVLNSGRKITITEGHSLFVYRNGDLVEATGEDVKIGDNLAVPRSGGDITEDRVVEIKREYYDGYVYDLSVDEDENFLAGHGYLMAHN

SEQ ID NO: 48 - protein, 169 aa, Artificial Sequence
  Synthetic Construct, mPspM7L3
SILPEEWVPLTKNGKSKTFRIGDFVDGLMKANQGKVKKTGDTEVLEVAGIHAFSFDRKSKKARTMAVKAVIRHRYSGNVYRIVLNSGRKITITEGHSLFVYRNGDLVEATGEDVKIGDNLAVPRSGSGDITEDRVVEIKREYYDGYVYDLSVDEDENFLAGHGYLMAHN

SEQ ID NO: 49 - protein, 170 aa, Artificial Sequence
  Synthetic Construct, mPspM7L4
SILPEEWVPLTKNGKSKTFRIGDFVDGLMKANQGKVKKTGDTEVLEVAGIHAFSFDRKSKKARTMAVKAVIRHRYSGNVYRIVLNSGRKITITEGHSLFVYRNGDLVEATGEDVKIGDNLAVPRSNGSGDITEDRVVEIKREYYDGYVYDLSVDEDENFLAGHGYLMAHN

SEQ ID NO: 50 - protein, 171 aa, Artificial Sequence
  Synthetic Construct, mPspM7L5
SILPEEWVPLTKNGKSKTFRIGDFVDGLMKANQGKVKKTGDTEVLEVAGIHAFSFDRKSKKARTMAVKAVIRHRYSGNVYRIVLNSGRKITITEGHSLFVYRNGDLVEATGEDVKIGDNLAVPRSGDSNGDITEDRVVEIKREYYDGYVYDLSVDEDENFLAGHGYLMAHN

SEQ ID NO: 51 - protein, 172 aa, Artificial Sequence
  Synthetic Construct, mPspM7L6
SILPEEWVPLTKNGKSKTFRIGDFVDGLMKANQGKVKKTGDTEVLEVAGIHAFSFDRKSKKARTMAVKAVIRHRYSGNVYRIVLNSGRKITITEGHSLFVYRNGDLVEATGEDVKIGDNLAVPRSNGSDSGDITEDRVVEIKREYYDGYVYDLSVDEDENFLAGHGYLMAHN

SEQ ID NO: 52 - protein, 173 aa, Artificial Sequence
  Synthetic Construct, mPspM7L7
SILPEEWVPLTKNGKSKTFRIGDFVDGLMKANQGKVKKTGDTEVLEVAGIHAFSFDRKSKKARTMAVKAVIRHRYSGNVYRIVLNSGRKITITEGHSLFVYRNGDLVEATGEDVKIGDNLAVPRSSGDSGNGDITEDRVVEIKREYYDGYVYDLSVDEDENFLAGHGYLMAHN

SEQ ID NO: 53 - protein, 167 aa, Artificial Sequence
  Synthetic Construct, mPspM8L1
SILPEEWVPLTKNGKSKTFRIGDFVDGLMKANQGKVKKTGDTEVLEVAGIHANSFDRKSKKSRTMAVKAVIRHRYSGNVYRIVLNSGRKITITEGHSLFVYRNGDLVEATGEDVKIGDLLAVPRSGDIVLDRVVEIKREYYDGYVYDLSVDEDENFLAGHGYLMAHN

SEQ ID NO: 54 - protein, 168 aa, Artificial Sequence
  Synthetic Construct, mPspM8L2
SILPEEWVPLTKNGKSKTFRIGDFVDGLMKANQGKVKKTGDTEVLEVAGIHANSFDRKSKKSRTMAVKAVIRHRYSGNVYRIVLNSGRKITITEGHSLFVYRNGDLVEATGEDVKIGDLLAVPRSGGDIVLDRVVEIKREYYDGYVYDLSVDEDENFLAGHGYLMAHN

SEQ ID NO: 55 - protein, 169 aa, Artificial Sequence
  Synthetic Construct, mPspM8L3
SILPEEWVPLTKNGKSKTFRIGDFVDGLMKANQGKVKKTGDTEVLEVAGIHANSFDRKSKKSRTMAVKAVIRHRYSGNVYRIVLNSGRKITITEGHSLFVYRNGDLVEATGEDVKIGDLLAVPRSGSGDIVLDRVVEIKREYYDGYVYDLSVDEDENFLAGHGYLMAHN

SEQ ID NO: 56 - protein, 170 aa, Artificial Sequence
  Synthetic Construct, mPspM8L4
SILPEEWVPLTKNGKSKTFRIGDFVDGLMKANQGKVKKTGDTEVLEVAGIHANSFDRKSKKSRTMAVKAVIRHRYSGNVYRIVLNSGRKITITEGHSLFVYRNGDLVEATGEDVKIGDLLAVPRSNGSGDIVLDRVVEIKREYYDGYVYDLSVDEDENFLAGHGYLMAHN

SEQ ID NO: 57 - protein, 171 aa, Artificial Sequence
  Synthetic Construct, mPspM8L5
SILPEEWVPLTKNGKSKTFRIGDFVDGLMKANQGKVKKTGDTEVLEVAGIHANSFDRKSKKSRTMAVKAVIRHRYSGNVYRIVLNSGRKITITEGHSLFVYRNGDLVEATGEDVKIGDLLAVPRSGDSNGDIVLDRVVEIKREYYDGYVYDLSVDEDENFLAGHGYLMAHN

SEQ ID NO: 58 - protein, 172 aa, Artificial Sequence
  Synthetic Construct, mPspM8L6
SILPEEWVPLTKNGKSKTFRIGDFVDGLMKANQGKVKKTGDTEVLEVAGIHANSFDRKSKKSRTMAVKAVIRHRYSGNVYRIVLNSGRKITITEGHSLFVYRNGDLVEATGEDVKIGDLLAVPRSNGSDSGDIVLDRVVEIKREYYDGYVYDLSVDEDENFLAGHGYLMAHN

SEQ ID NO: 59 - protein, 173 aa, Artificial Sequence
  Synthetic Construct, mPspM8L7
SILPEEWVPLTKNGKSKTFRIGDFVDGLMKANQGKVKKTGDTEVLEVAGIHANSFDRKSKKSRTMAVKAVIRHRYSGNVYRIVLNSGRKITITEGHSLFVYRNGDLVEATGEDVKIGDLLAVPRSSGDSGNGDIVLDRVVEIKREYYDGYVYDLSVDEDENFLAGHGYLMAHN

SEQ ID NO: 60 - protein, 167 aa, Artificial Sequence
  Synthetic Construct, mPspM9L1
SILPEEWVPLTKNGKSKIFRIGDFVDGLMKANQGKVKKTGDTEVLEVAGIHAFSFDRKSKKARTMAVKAVIRHRYSGNVYRIVLNSGRKITITEGHSLFVYRNGDLVEATGEDVKIGDLLAVPRSGDIVLDRVVEIKREYYDGYVYDLSVDEDENFLAGFGFLMAHN

SEQ ID NO: 61 - protein, 168 aa, Artificial Sequence
  Synthetic Construct, mPspM9L2
SILPEEWVPLTKNGKSKIFRIGDFVDGLMKANQGKVKKTGDTEVLEVAGIHAFSFDRKSKKARTMAVKAVIRHRYSGNVYRIVLNSGRKITITEGHSLFVYRNGDLVEATGEDVKIGDLLAVPRSGGDIVLDRVVEIKREYYDGYVYDLSVDEDENFLAGFGFLMAHN

SEQ ID NO: 62 - protein, 169 aa, Artificial Sequence
  Synthetic Construct, mPspM9L3
SILPEEWVPLTKNGKSKIFRIGDFVDGLMKANQGKVKKTGDTEVLEVAGIHAFSFDRKSKKARTMAVKAVIRHRYSGNVYRIVLNSGRKITITEGHSLFVYRNGDLVEATGEDVKIGDLLAVPRSGSGDIVLDRVVEIKREYYDGYVYDLSVDEDENFLAGFGFLMAHN

SEQ ID NO: 63 - protein, 170 aa, Artificial Sequence
  Synthetic Construct, mPspM9L4
SILPEEWVPLTKNGKSKIFRIGDFVDGLMKANQGKVKKTGDTEVLEVAGIHAFSFDRKSKKARTMAVKAVIRHRYSGNVYRIVLNSGRKITITEGHSLFVYRNGDLVEATGEDVKIGDLLAVPRSNGSGDIVLDRVVEIKREYYDGYVYDLSVDEDENFLAGFGFLMAHN

SEQ ID NO: 64 - protein, 171 aa, Artificial Sequence
  Synthetic Construct, mPspM9L5
SILPEEWVPLTKNGKSKIFRIGDFVDGLMKANQGKVKKTGDTEVLEVAGIHAFSFDRKSKKARTMAVKAVIRHRYSGNVYRIVLNSGRKITITEGHSLFVYRNGDLVEATGEDVKIGDLLAVPRSGDSNGDIVLDRVVEIKREYYDGYVYDLSVDEDENFLAGFGFLMAHN

SEQ ID NO: 65 - protein, 172 aa, Artificial Sequence
  Synthetic Construct, mPspM9L6
SILPEEWVPLTKNGKSKIFRIGDFVDGLMKANQGKVKKTGDTEVLEVAGIHAFSFDRKSKKARTMAVKAVIRHRYSGNVYRIVLNSGRKITITEGHSLFVYRNGDLVEATGEDVKIGDLLAVPRSNGSDSGDIVLDRVVEIKREYYDGYVYDLSVDEDENFLAGFGFLMAHN

SEQ ID NO: 66 - protein, 173 aa, Artificial Sequence
  Synthetic Construct, mPspM9L7
SILPEEWVPLTKNGKSKIFRIGDFVDGLMKANQGKVKKTGDTEVLEVAGIHAFSFDRKSKKARTMAVKAVIRHRYSGNVYRIVLNSGRKITITEGHSLFVYRNGDLVEATGEDVKIGDLLAVPRSSGDSGNGDIVLDRVVEIKREYYDGYVYDLSVDEDENFLAGFGFLMAHN

SEQ ID NO: 67 - protein, 167 aa, Artificial Sequence
  Synthetic Construct, mPspM10L1
SILPEEWVPLIKNGKVKTFRIGDFVDGLMKANQGKVKKTGDTEVLEVAGIHAFSFDRKSKKARVMAVKAVIRHRYSGNVYRIVLNSGRKITITEGHSLFVYRNGDLVEATGEDVKIGDLLAVPRSGDIVLDRVVEIKREYYDGYVYDLSVDEDENFLAGHGYLMAHN

SEQ ID NO: 68 - protein, 168 aa, Artificial Sequence
  Synthetic Construct, mPspM10L2
SILPEEWVPLIKNGKVKTFRIGDFVDGLMKANQGKVKKTGDTEVLEVAGIHAFSFDRKSKKARVMAVKAVIRHRYSGNVYRIVLNSGRKITITEGHSLFVYRNGDLVEATGEDVKIGDLLAVPRSGGDIVLDRVVEIKREYYDGYVYDLSVDEDENFLAGHGYLMAHN

SEQ ID NO: 69 - protein, 169 aa, Artificial Sequence
  Synthetic Construct, mPspM10L3
SILPEEWVPLIKNGKVKTFRIGDFVDGLMKANQGKVKKTGDTEVLEVAGIHAFSFDRKSKKARVMAVKAVIRHRYSGNVYRIVLNSGRKITITEGHSLFVYRNGDLVEATGEDVKIGDLLAVPRSGSGDIVLDRVVEIKREYYDGYVYDLSVDEDENFLAGHGYLMAHN

SEQ ID NO: 70 - protein, 170 aa, Artificial Sequence
  Synthetic Construct, mPspM10L4
SILPEEWVPLIKNGKVKTFRIGDFVDGLMKANQGKVKKTGDTEVLEVAGIHAFSFDRKSKKARVMAVKAVIRHRYSGNVYRIVLNSGRKITITEGHSLFVYRNGDLVEATGEDVKIGDLLAVPRSNGSGDIVLDRVVEIKREYYDGYVYDLSVDEDENFLAGHGYLMAHN

SEQ ID NO: 71 - protein, 171 aa, Artificial Sequence
  Synthetic Construct, mPspM10L5
SILPEEWVPLIKNGKVKTFRIGDFVDGLMKANQGKVKKTGDTEVLEVAGIHAFSFDRKSKKARVMAVKAVIRHRYSGNVYRIVLNSGRKITITEGHSLFVYRNGDLVEATGEDVKIGDLLAVPRSGDSNGDIVLDRVVEIKREYYDGYVYDLSVDEDENFLAGHGYLMAHN

SEQ ID NO: 72 - protein, 172 aa, Artificial Sequence
  Synthetic Construct, mPspM10L6
SILPEEWVPLIKNGKVKTFRIGDFVDGLMKANQGKVKKTGDTEVLEVAGIHAFSFDRKSKKARVMAVKAVIRHRYSGNVYRIVLNSGRKITITEGHSLFVYRNGDLVEATGEDVKIGDLLAVPRSNGSDSGDIVLDRVVEIKREYYDGYVYDLSVDEDENFLAGHGYLMAHN

SEQ ID NO: 73 - protein, 173 aa, Artificial Sequence
  Synthetic Construct, mPspM10L7
SILPEEWVPLIKNGKVKTFRIGDFVDGLMKANQGKVKKTGDTEVLEVAGIHAFSFDRKSKKARVMAVKAVIRHRYSGNVYRIVLNSGRKITITEGHSLFVYRNGDLVEATGEDVKIGDLLAVPRSSGDSGNGDIVLDRVVEIKREYYDGYVYDLSVDEDENFLAGHGYLMAHN

SEQ ID NO: 74 - protein, 167 aa, Artificial Sequence
  Synthetic Construct, mPspM11L1
SILPEEWVPLIKNGKVKIFRIGDFVDGLMKANQGKVKKTGDTEVLEVAGIHANSFDRKSKKSRVMAVKAVIRHRYSGNVYRIVLNSGRKITITEGHSLFVYRNGDLVEATGEDVKIGDLLAVPRSGDIVLDRVVEIKREYYDGYVYDLSVDEDENFLAGFGFLMAHN

SEQ ID NO: 75 - protein, 168 aa, Artificial Sequence
  Synthetic Construct, mPspM11L2
SILPEEWVPLIKNGKVKIFRIGDFVDGLMKANQGKVKKTGDTEVLEVAGIHANSFDRKSKKSRVMAVKAVIRHRYSGNVYRIVLNSGRKITITEGHSLFVYRNGDLVEATGEDVKIGDLLAVPRSGGDIVLDRVVEIKREYYDGYVYDLSVDEDENFLAGFGFLMAHN

SEQ ID NO: 76 - protein, 169 aa, Artificial Sequence
  Synthetic Construct, mPspM11L3
SILPEEWVPLIKNGKVKIFRIGDFVDGLMKANQGKVKKTGDTEVLEVAGIHANSFDRKSKKSRVMAVKAVIRHRYSGNVYRIVLNSGRKITITEGHSLFVYRNGDLVEATGEDVKIGDLLAVPRSGSGDIVLDRVVEIKREYYDGYVYDLSVDEDENFLAGFGFLMAHN

SEQ ID NO: 77 - protein, 170 aa, Artificial Sequence
  Synthetic Construct, mPspM11L4
SILPEEWVPLIKNGKVKIFRIGDFVDGLMKANQGKVKKTGDTEVLEVAGIHANSFDRKSKKSRVMAVKAVIRHRYSGNVYRIVLNSGRKITITEGHSLFVYRNGDLVEATGEDVKIGDLLAVPRSNGSGDIVLDRVVEIKREYYDGYVYDLSVDEDENFLAGFGFLMAHN

SEQ ID NO: 78 - protein, 171 aa, Artificial Sequence
  Synthetic Construct, mPspM11L5
SILPEEWVPLIKNGKVKIFRIGDFVDGLMKANQGKVKKTGDTEVLEVAGIHANSFDRKSKKSRVMAVKAVIRHRYSGNVYRIVLNSGRKITITEGHSLFVYRNGDLVEATGEDVKIGDLLAVPRSGDSNGDIVLDRVVEIKREYYDGYVYDLSVDEDENFLAGFGFLMAHN

SEQ ID NO: 79 - protein, 172 aa, Artificial Sequence
  Synthetic Construct, mPspM11L6
SILPEEWVPLIKNGKVKIFRIGDFVDGLMKANQGKVKKTGDTEVLEVAGIHANSFDRKSKKSRVMAVKAVIRHRYSGNVYRIVLNSGRKITITEGHSLFVYRNGDLVEATGEDVKIGDLLAVPRSNGSDSGDIVLDRVVEIKREYYDGYVYDLSVDEDENFLAGFGFLMAHN

SEQ ID NO: 80 - protein, 173 aa, Artificial Sequence
  Synthetic Construct, mPspM11L7
SILPEEWVPLIKNGKVKIFRIGDFVDGLMKANQGKVKKTGDTEVLEVAGIHANSFDRKSKKSRVMAVKAVIRHRYSGNVYRIVLNSGRKITITEGHSLFVYRNGDLVEATGEDVKIGDLLAVPRSSGDSGNGDIVLDRVVEIKREYYDGYVYDLSVDEDENFLAGFGFLMAHN

SEQ ID NO: 81 - protein, 167 aa, Artificial Sequence
  Synthetic Construct, mPspM12L1
SILPEEWVPLIKNGKVKIFRIGDFVDGLMKANQGKVKKTGDTEVLEVAGIHAFSFDRKSKKARVMAVKAVIRHRYSGNVYRIVLNSGRKITITEGHSLFVYRNGDLVEATGEDVKIGDNLAVPRSGDITEDRVVEIKREYYDGYVYDLSVDEDENFLAGFGFLMAHN

SEQ ID NO: 82 - protein, 168 aa, Artificial Sequence
  Synthetic Construct, mPspM12L2
SILPEEWVPLIKNGKVKIFRIGDFVDGLMKANQGKVKKTGDTEVLEVAGIHAFSFDRKSKKARVMAVKAVIRHRYSGNVYRIVLNSGRKITITEGHSLFVYRNGDLVEATGEDVKIGDNLAVPRSGGDITEDRVVEIKREYYDGYVYDLSVDEDENFLAGFGFLMAHN

SEQ ID NO: 83 - protein, 169 aa, Artificial Sequence
  Synthetic Construct, mPspM12L3
SILPEEWVPLIKNGKVKIFRIGDFVDGLMKANQGKVKKTGDTEVLEVAGIHAFSFDRKSKKARVMAVKAVIRHRYSGNVYRIVLNSGRKITITEGHSLFVYRNGDLVEATGEDVKIGDNLAVPRSGSGDITEDRVVEIKREYYDGYVYDLSVDEDENFLAGFGFLMAHN

SEQ ID NO: 84 - protein, 170 aa, Artificial Sequence
  Synthetic Construct, mPspM12L4
SILPEEWVPLIKNGKVKIFRIGDFVDGLMKANQGKVKKTGDTEVLEVAGIHAFSFDRKSKKARVMAVKAVIRHRYSGNVYRIVLNSGRKITITEGHSLFVYRNGDLVEATGEDVKIGDNLAVPRSNGSGDITEDRVVEIKREYYDGYVYDLSVDEDENFLAGFGFLMAHN

SEQ ID NO: 85 - protein, 171 aa, Artificial Sequence
  Synthetic Construct, mPspM12L5
SILPEEWVPLIKNGKVKIFRIGDFVDGLMKANQGKVKKTGDTEVLEVAGIHAFSFDRKSKKARVMAVKAVIRHRYSGNVYRIVLNSGRKITITEGHSLFVYRNGDLVEATGEDVKIGDNLAVPRSGDSNGDITEDRVVEIKREYYDGYVYDLSVDEDENFLAGFGFLMAHN

SEQ ID NO: 86 - protein, 172 aa, Artificial Sequence
  Synthetic Construct, mPspM12L6
SILPEEWVPLIKNGKVKIFRIGDFVDGLMKANQGKVKKTGDTEVLEVAGIHAFSFDRKSKKARVMAVKAVIRHRYSGNVYRIVLNSGRKITITEGHSLFVYRNGDLVEATGEDVKIGDNLAVPRSNGSDSGDITEDRVVEIKREYYDGYVYDLSVDEDENFLAGFGFLMAHN

SEQ ID NO: 87 - protein, 173 aa, Artificial Sequence
  Synthetic Construct, mPspM12L7
SILPEEWVPLIKNGKVKIFRIGDFVDGLMKANQGKVKKTGDTEVLEVAGIHAFSFDRKSKKARVMAVKAVIRHRYSGNVYRIVLNSGRKITITEGHSLFVYRNGDLVEATGEDVKIGDNLAVPRSSGDSGNGDITEDRVVEIKREYYDGYVYDLSVDEDENFLAGFGFLMAHN

SEQ ID NO: 88 - protein, 168 aa, Artificial Sequence
  Synthetic Construct, RecA
CLAEGTRIFDPVTGTTHRIEDVVDGRKPIHVVAAAKDGTLHARPVVSWFDQGTRDVIGLRIAGGAIVWATPDHKVLTEYGWRAAGELRKGDRVAQPRRFDGFGDSAPIPARVQALADALDDKFLHDMLAEELRYSVIREVLPTRRARTFDLEVEELHTLVAEGVVVHN

SEQ ID NO: 89 - protein, 173 aa, Thermoplasma acidophilum, ATCC 25905
  Tac
CVSGDTPVLLDAGERRIGDLFMEAIRPKERGEIGQNEEIVRLHDSWRIYSMVGSEIVETVSHAIYHGKSNAIVNVRTENGREVRVTPVHKLFVKIGNSVIERPASEVNEGDEIAWPSVSENGDSQTVTTTLVLTFDRVVSKEMHSGVFDVYDLMVPDYGYNFIGGNGLIVLHN

SEQ ID NO: 90 - protein, 157 aa, Thermococcus aggregans
  Tag
SVTGDTEIIVKRNGRIEFVPIEKLFERVDYRIGEKEYCILEDVEALTLDNRGKLIWKKVPYVMRHRAKKKVYRIWITNSWYIDVTEDHSLIVAEDGLKEARPMEIEGKSLIATKDDLSGVEYIKPHAIEEISYNGYVYDIEVEGTHRFFANGILVHN

SEQ ID NO: 91 - protein, 423 aa, Thermus thermophilus HB27
  Tth
CLAEGSLVLDAATGQRVPIEKVRPGMEVFSLGPDYRLYRVPVLEVLESGVREVVRLRTRSGRTLVLTPDHPLLTPEGWKPLCDLPLGTPIAVPAELPVAGHLAPPEERVTLLALLLGDGNTKLSGRRGTRPNAFFYSKDPELLAAYRRCAEALGAKVKAYVHPTTGVVTLATLAPRPGAQDPVKRLVVEAGMVAKAEEKRVPEEVFRYRREALALFLGRLFSTDGSVEKKRISYSSASLGLAQDVAHLLLRLGITSQLRSRGPRAHEVLISGREDILRFAELIGPYLLGAKRERLAALEAEARRRLPGQGWHLRLVLPAVAYRVSEAKRRSGFSWSEAGRRVAVAGSCLSSGLNLKLPRRYLSRHRLSLLGEAFADPGLEALAEGQVLWDPIVAVEPAGKARTFDLRVPPFANFVSEDLVVHN

SEQ ID NO: 92 - protein, 135 aa, Artificial Sequence
  Synthetic Construct, mTth001
CLAEGSLVLDAATGQRVPIEKVRPGMEVFSLGPDYRLYRVPVLEVLESGVREVVRLRTRSGRTLVLTPDHPLLTPEGWKPLCDLPLGTPIAVPGTDGDVLWDPIVAVEPAGKARTFDLRVPPFANFVSEDLVVHN

SEQ ID NO: 93 - protein, 135 aa, Artificial Sequence
  Synthetic Construct, mTth002
CLAEGSLVLDAATGQRVPIEKVRPGMEVFSLGPDYRLYRVPVLEVLESGVREVVRLRTRSGRTLVLTPDHPLLTPEGWKPLCDLPLGTPIAVPGPDQKVLWDPIVAVEPAGKARTFDLRVPPFANFVSEDLVVHN

SEQ ID NO: 94 - protein, 135 aa, Artificial Sequence
  Synthetic Construct, mTth003
CLAEGSLVLDAATGQRVPIEKVRPGMEVFSLGPDYRLYRVPVLEVLESGVREVVRLRTRSGRTLVLTPDHPLLTPEGWKPLCDLPLGTPIAVPEPGKGVLWDPIVAVEPAGKARTFDLRVPPFANFVSEDLVVHN

SEQ ID NO: 95 - protein, 135 aa, Artificial Sequence
  Synthetic Construct, mTth004
CLAEGSLVLDAATGQRVPIEKVRPGMEVFSLGPDYRLYRVPVLEVLESGVREVVRLRTRSGRTLVLTPDHPLLTPEGWKPLCDLPLGTPIAVPDSEGNVLWDPIVAVEPAGKARTFDLRVPPFANFVSEDLVVHN

SEQ ID NO: 96 - protein, 135 aa, Artificial Sequence
  Synthetic Construct, mTth005
CLAEGSLVLDAATGQRVPIEKVRPGMEVFSLGPDYRLYRVPVLEVLESGVREVVRLRTRSGRTLVLTPDHPLLTPEGWKPLCDLPLGTPIAVPSSDGLVLWDPIVAVEPAGKARTFDLRVPPFANFVSEDLVVHN

SEQ ID NO: 97 - protein, 135 aa, Artificial Sequence
  Synthetic Construct, mTth006
CLAEGSLVLDAATGQRVPIEKVRPGMEVFSLGPDYRLYRVPVLEVLESGVREVVRLRTRSGRTLVLTPDHPLLTPEGWKPLCDLPLGTPIAVPGPNNIVLWDPIVAVEPAGKARTFDLRVPPFANFVSEDLVVHN

SEQ ID NO: 98 - protein, 135 aa, Artificial Sequence
  Synthetic Construct, mTth007
CLAEGSLVLDAATGQRVPIEKVRPGMEVFSLGPDYRLYRVPVLEVLESGVREVVRLRTRSGRTLVLTPDHPLLTPEGWKPLCDLPLGTPIAVPGETNGVLWDPIVAVEPAGKARTFDLRVPPFANFVSEDLVVHN

SEQ ID NO: 99 - protein, 135 aa, Artificial Sequence
  Synthetic Construct, mTth008
CLAEGSLVLDAATGQRVPIEKVRPGMEVFSLGPDYRLYRVPVLEVLESGVREVVRLRTRSGRTLVLTPDHPLLTPEGWKPLCDLPLGTPIAVPQEGVGVLWDPIVAVEPAGKARTFDLRVPPFANFVSEDLVVHN

SEQ ID NO: 100 - protein, 165 aa, Artificial Sequence
  Synthetic Construct, mTth009
CLAEGSLVLDAATGQRVPIEKVRPGMEVFSLGPDYRLYRVPVLEVLESGVREVVRLRTRSGRTLVLTPDHPLLTPEGWKPLCDLPLGTPIAVPRRFDGFGDSAPIPARVQALADALDDKFLHDMLAEEVLWDPIVAVEPAGKARTFDLRVPPFANFVSEDLVVHN

SEQ ID NO: 101 - protein, 136 aa, Artificial Sequence
  Synthetic Construct, mTth010
CLAEGSLVLDAATGQRVPIEKVRPGMEVFSLGPDYRLYRVPVLEVLESGVREVVRLRTRSGRTLVLTPDHPLLTPEGWKPLCDLPLGTPIAVRDVETGEVLWDPIVAVEPAGKARTFDLRVPPFANFVSEDLVVHN

SEQ ID NO: 102 - protein, 184 aa, Artificial Sequence
  Synthetic Construct, mTth011
CLAEGSLVLDAATGQRVPIEKVRPGMEVFSLGPDYRLYRVPVLEVLESGVREVVRLRTRSGRTLVLTPDHPLLTPEGWKPLCDLPLGTPIAVPRSAFSVDCAGFARGKPEFAPTTYTVGVPGLVRFLEAHHRDPDAQAIADELTDGRVLWDPIVAVEPAGKARTFDLRVPPFANFVSEDLVVHN

SEQ ID NO: 103 - protein, 172 aa, Artificial Sequence
  Synthetic Construct, mTth012
CLAEGSLVLDAATGQRVPIEKVRPGMEVFSLGPDYRLYRVPVLEVLESGVREVVRLRTRSGRTLVLTPDHPLLTPEGWKPLCDLPLGTPIAVPKCLPSSNLQLMSDAELGFIDERTGKLAQVVKSKTVALLANSDVLWDPIVAVEPAGKARTFDLRVPPFANFVSEDLVVHN

SEQ ID NO: 104 - protein, 360 aa, Dictyoglomus thermophilum
  P77853
MFLKKLSKLLLVVLLVAVYTQVNAQTSITLTSNASGTFDGYYYELWKDTGNTTMTVYTQGRFSCQWSNINNALFRTGKKYNQNWQSLGTIRITYSATYNPNGNSYLCIYGWSTNPLVEFYIVESWGNWRPPGATSLGQVTIDGGTYDIYRTTRVNQPSIVGTATFDQYWSVRTSKRTSGTVTVTDHFRAWANRGLNLGTIDQITLCVEGYQSSGSANITQNTFSQGSSSGSSGGSSGSTTTTRIECENMSLSGPYVSRITNPFNGIALYANGDTARATVNFPASRNYNFRLRGCGNNNNLARVDLRIDGRTVGTFYYQGTYPWEAPIDNVYVSAGSHTVEITVTADNGTWDVYADYLVIQ

SEQ ID NO: 105 - protein, 1077 aa, Clostridium thermocellum
  P51584
MKNKRVLAKITALVVLLGVFFVLPSNISQLYADYEVVHDTFEVNFDGWCNLGVDTYLTAVENEGNNGTRGMMVINRSSASDGAYSEKGFYLDGGVEYKYSVFVKHNGTGTETFKLSVSYLDSETEEENKEVIATKDVVAGEWTEISAKYKAPKTAVNITLSITTDSTVDFIFDDVTITRKGMAEANTVYAANAVLKDMYANYFRVGSVLNSGTVNNSSIKALILREFNSITCENEMKPDATLVQSGSTNTNIRVSLNRAASILNFCAQNNIAVRGHTLVWHSQTPQWFFKDNFQDNGNWVSQSVMDQRLESYIKNMFAEIQRQYPSLNLYAYDVVNEAVSDDANRTRYYGGAREPGYGNGRSPWVQIYGDNKFIEKAFTYARKYAPANCKLYYNDYNEYWDHKRDCIASICANLYNKGLLDGVGMQSHINADMNGFSGIQNYKAALQKYINIGCDVQITELDISTENGKFSLQQQADKYKAVFQAAVDINRTSSKGKVTAVCVWGPNDANTWLGSQNAPLLFNANNQPKPAYNAVASIIPQSEWGDGNNPAGGGGGGKPEEPDANGYYYHDTFEGSVGQWTARGPAEVLLSGRTAYKGSESLLVRNRTAAWNGAQRALNPRTFVPGNTYCFSVVASFIEGASSTTFCMKLQYVDGSGTQRYDTIDMKTVGPNQWVHLYNPQYRIPSDATDMYVYVETADDTINFYIDEAIGAVAGTVIEGPAPQPTQPPVLLGDVNGDGTINSTDLTMLKRSVLRAITLTDDAKARADVDKNGSINSTDVLLLSRYLLRVIDKFPVAENPSSSFKYESAVQYRPAPDSYLNPCPQAGRIVKETYTGINGTKSLNVYLPYGYDPNKKYNIFYLMHGGGENENTIFSNDVKLQNILDHAIMNGELEPLIVVTPTFNGGNCTAQNFYQEFRQNVIPFVESKYSTYAESTTPQGIAASRMHRGFGGFSMGGLTTWYVMVNCLDYVAYFMPLSGDYWYGNSPQDKANSIAEAINRSGLSKREYFVFAATGSDHIAYANMNPQIEAMKALPHFDYTSDFSKGNFYFLVAPGATHWWGYVRHYIYDALPYFFHE

SEQ ID NO: 106 - protein, 405 aa, Bacillus sp. NG-27
  O30700
MLKTLRKPFIAGLALSLLLTGGASSVFAQGNGQAGPPKGGIFKEGEKGNGNVQPFAWQVASLADRYEESFDIGAAVEPHQLNGRQGKVLKHHYNSIVAENAMKPISLQPEEGVFTWDGADAIVEFARKNNMNLRFHTLVWHNQVPDWFFLDEEGNPMVEETNEAKRQANKELLLERLETHIKTVVERYKDDVTAWDVVNEVVDDGTPNERGLRESVWYQITGDEYIRVAFETARKYAGEDAKLFINDYNTEVTPKRDHLYNLVQDLLADGVPIDGVGHQAHIQIDWPTIDEIRTSMEMFAGLGLDNQVTELDVSLYGWPPRPAFPTYDAIPQERFQAQADRYNQLFELYEELDADLSSVTFWGIADNHTWLDDRAREYNDGVGKDAPFVFDPNYRVKPAFWRIID

SEQ ID NO: 107 - protein, 225 aa, Thermomyces lanuginosus
  O43097
MVGFTPVALAALAATGALAFPAGNATELEKRQTTPNSEGWHDGYYYSWWSDGGAQATYTNLEGGTYEISWGDGGNLVGGKGWNPGLNARAIHFEGVYQPNGNSYLAVYGWTRNPLVEYYIVENFGTYDPSSGATDLGTVECDGSIYRLGKTTRVNAPSIDGTQTFDQYWSVRQDKRTSGTVQTGCHFDAWARAGLNVNGDHYYQIVATEGYFSSGYARITVADVG

SEQ ID NO: 108 - protein, 387 aa, Clostridium stercorarium
  P40942
MNKFLNKKWSLILTMGGIFLMATLSLIFATGKKAFNDQTSAEDIPSLAEAFRDYFPIGAAIEPGYTTGQIAELYKKHVNMLVAENAMKPASLQPTEGNFQWADADRIVQFAKENGMELRFHTLVWHNQTPTGFSLDKEGKPMVEETDPQKREENRKLLLQRLENYIRAVVLRYKDDIKSWDVVNEVIEPNDPGGMRNSPWYQITGTEYIEVAFRATREAGGSDIKLYINDYNTDDPVKRDILYELVKNLLEKGVPIDGVGHQTHIDIYNPPVERIIESIKKFAGLGLDNIITELDMSIYSWNDRSDYGDSIPDYILTLQAKRYQELFDALKENKDIVSAVVFWGISDKYSWLNGFPVKRTNAPLLFDRNFMPKPAFWAIVDPSRLRE

SEQ ID NO: 109 - protein, 895 aa, Clostridium thermocellum (strain ATCC 27405 / DSM 1237)
  O68438
MNFRRMLCAAIVLTIVLSIMLPSTVFALEDKSPKLPDYKNDLLYERTFDEGLCFPWHTCEDSGGKCDFAVVDVPGEPGNKAFRLTVIDKGQNKWSVQMRHRGITLEQGHTYTVRFTIWSDKSCRVYAKIGQMGEPYTEYWNNNWNPFNLTPGQKLTVEQNFTMNYPTDDTCEFTFHLGGELAAGTPYYVYLDDVSLYDPRFVKPVEYVLPQPDVRVNQVGYLPFAKKYATVVSSSTSPLKWQLLNSANQVVLEGNTIPKGLDKDSQDYVHWIDFSNFKTEGKGYYFKLPTVNSDTNYSHPFDISADIYSKMKFDALAFFYHKRSGIPIEMPYAGGEQWTRPAGHIGVAPNKGDTNVPTWPQDDEYAGRPQKYYTKDVTGGWYDAGDHGKYVVNGGIAVWTLMNMYERAKIRGIANQGAYKDGGMNIPERNNGYPDILDEARWEIEFFKKMQVTEKEDPSIAGMVHHKIHDFRWTALGMLPHEDPQPRYLRPVSTAATLNFAATLAQSARLWKDYDPTFAADCLEKAEIAWQAALKHPDIYAEYTPGSGGPGGGPYNDDYVGDEFYWAACELYVTTGKDEYKNYLMNSPHYLEMPAKMGENGGANGEDNGLWGCFTWGTTQGLGTITLALVENGLPSADIQKARNNIAKAADKWLENIEEQGYRLPIKQAEDERGGYPWGSNSFILNQMIVMGYAYDFTGNSKYLDGMQDGMSYLLGRNGLDQSYVTGYGERPLQNPHDRFWTPQTSKKFPAPPPGIIAGGPNSRFEDPTITAAVKKDTPPQKCYIDHTDSWSTNEITINWNAPFAWVTAYLDEIDLITPPGGVDPEEPEVIYGDCNGDGKVNSTDAVALKRYILRSGISINTDNADVNADGRVNSTDLAILKRYILKEIDVLPHK

SEQ ID NO: 110 - protein, 441 aa, Thermomonospora fusca
  P26222
MSPRPLRALLGAAAAALVSAAALAFPSQAAANDSPFYVNPNMSSAEWVRNNPNDPRTPVIRDRIASVPQGTWFAHHNPGQITGQVDALMSAAQAAGKIPILVVYNAPGRDCGNHSSGGAPSHSAYRSWIDEFAAGLKNRPAYIIVEPDLISLMSSCMQHVQQEVLETMAYAGKALKAGSSQARIYFDAGHSAWHSPAQMASWLQQADISNSAHGIATNTSNYRWTADEVAYAKAVLSAIGNPSLRAVIDTSRNGNGPAGNEWCDPSGRAIGTPSTTNTGDPMIDAFLWIKLPGEADGCIAGAGQFVPQAAYEMAIAAGGTNPNPNPNPTPTPTPTPTPPPGSSGACTATYTIANEWNDGFQATVTVTANQNITGWTVTWTFTDGQTITNAWNADVSTSGSSVTARNVGHNGTLSQGASTEFGFVGSKGNSNSVPTLTCAAS

SEQ ID NO: 111 - protein, 562 aa, Acidothermus cellulolyticus (strain ATCC 43068 / 11B)
  P54583
MPRALRRVPGSRVMLRVGVVVAVLALVAALANLAVPRPARAAGGGYWHTSGREILDANNVPVRIAGINWFGFETCNYVVHGLWSRDYRSMLDQIKSLGYNTIRLPYSDDILKPGTMPNSINFYQMNQDLQGLTSLQVMDKIVAYAGQIGLRIILDRHRPDCSGQSALWYTSSVSEATWISDLQALAQRYKGNPTVVGFDLHNEPHDPACWGCGDPSIDWRLAAERAGNAVLSVNPNLLIFVEGVQSYNGDSYWWGGNLQGAGQYPVVLNVPNRLVYSAHDYATSVYPQTWFSDPTFPNNMPGIWNKNWGYLFNQNIAPVWLGEFGTTLQSTTDQTWLKTLVQYLRPTAQYGADSFQWTFWSWNPDSGDTGGILKDDWQTVDTVKDGYLAPIKSSIFDPVGASASPSSQPSPSVSPSPSPSPSASRTPTPTPTPTASPTPTLTPTATPTPTASPTPSPTAASGARCTASYQVNSDWGNGFTVTVAVTNSGSVATKTWTVSWTFGGNQTITNSWNAAVTQNGQSVTARNMSYNNVIQPGQNTTFGFQASYTGSNAAPTVACAAS

SEQ ID NO: 112 - protein, 448 aa, Nasutitermes takasagoensis
  O77044
MRVFLCLLSALALCQAAYDYKQVLRDSLLFYEAQRSGRLPADQKVTWRKDSALNDQGDQGQDLTGGYFDAGDFVKFGFPMAYTATVLAWGLIDFEAGYSSAGALDDGRKAVKWATDYFIKAHTSQNEFYGQVGQGDADHAFWGRPEDMTMARPAYKIDTSRPGSDLAGETAAALAAASIVFRNVDGTYSNNLLTHARQLFDFANNYRGKYSDSITDARNFYASADYRDELVWAAAWLYRATNDNTYLNTAESLYDEFGLQNWGGGLNWDSKVSGVQVLLAKLTNKQAYKDTVQSYVNYLINNQQKTPKGLLYIDMWGTLRHAANAAFIMLEAAELGLSASSYRQFAQTQIDYALGDGGRSFVCGFGSNPPTRPHHRSSSCPPAPATCDWNTFNSPDPNYHVLSGALVGGPDQNDNYVDDRSDYVHNEVATDYNAGFQSALAALVALGY

SEQ ID NO: 113 - protein, 346 aa, Aquifex aeolicus strain VF5
  Aae RIR2 intein
CFIEGTEVLTKRGFVDFRELREDDLVAQYDIETGEISWTKPYAYVERDYEGSMYRLKHPKSNWEVVATEGHEFIVRNLKTGKERKEPIEKVKLHPYSAIPVAGRYTGEVEEYDLWELVSGKGITLKTRSAVKNKLTPIEKLLIVLQADGTIDSKRNGKFTGFQQLKFFFSKYRKINEFEKILNECAPYGIKWKKYERQDGIAYTVYYPNDLPIKPTKFFDEWVRLDEITEEWIREFVEELVKWDGHIPKDRNKKKVYYYSTKEKRNKDFVQALCALGGMRTVVSRERNPKAKNPVYRIWIYLEDDYINTQTMVKEEFYYKGKVYCVSVPKGNIVVRYKDSVCIAGN

SEQ ID NO: 114 - protein, 333 aa, Acidovorax avenae subsp. citrulli AAC00-1
  Aave Hyp-1721 intein
CVDDTTEALTQRGWVGPDHLVPGDMLASFDMTTERLIWAPMASVHIFDHDGEMVHAKSKTLDMLMTPDHRVVHYKRKRTKGAQRGTTHWELGVAEAQDIPASHRVQIPTAAPFDHLPTGEPITDAQARVLGWVVTEGWFTKKNRGREEWGGALKLYQNEGRTADLIRADLDAAGLEYTETTWNYVGGNAAHIRFNIKKSSAAVLRKMLPGKQLTPALLMRMTKAQIELLVDRMIEGDGSESAAGQRCLIQNPGQTLETFQMALTILGKSFRVSKHGPSCRKVLIRESQRTENGRYSVKESERVRYTGRVWCPIVPGTSTWVARRNGMPFITHN

SEQ ID NO: 115 - protein, 388 aa, Acidovorax avenae subsp. citrulli AAC00-1
  Aave RIR intein
CVTADTWVMTDAGPAQVADLVGRPFTAIVDGRAFPTLSAGFFATGHKPVLRLRTRQGHALRLTEDHLVRRVAKQTRYVRELEWVAAGALQPGDDIVLNDHRALPGWRGEGTGAEGYLLGLLIGDGTLKADKAVISVWLAQEQEEDALLVANGAPAPSSGAHGILRAAEAAAATLSHRADFRGFQRTVARSGGACAERRMASGAVRALALHMGMRPGAKTITAAMERASSAFSVGLLRGLFDTDGSVQGRQDKGVSVRLAQSNPALLQTVQRMLLRLGIASTLYPDRRTAGLRLLPDGRGGQEPYAIRAQHELVVSGDNLRVFAERIGFEDADKAERLATALSGYRRALNREPFTATVQDVLPDGHEDVYDVTVADCHAFDANGLCVHN

SEQ ID NO: 116 - protein, 165 aa, Aspergillus brevipes FRR2439
  Abr PRP8 intein
CLAKGTRLLRYDGTEIEVQDVKEGDLLLGPDGGPRRAFNIVNGEDRLYRIKIDEGIEDLVVTPNHILVLHREKKARNNEDEASAAERYDTVEMTAAEFAALSTEERSQYRAFRCPGFESPEKAVPENHSFMIQDIRLELETTEWAGFRVDKDQLYLRHDYLVLHN

SEQ ID NO: 117 - protein, 153 aa, Acidothermus cellulolyticus 11B
  Ace RIR1 intein
CQPYSAPVSTPDGPIPIGKLVDANAVGEKVFDASGVTRIVATTCNGRKPVLRIRTSGGHVLDVTPDHLVWQVVDQTAGRFVPAGQLRVGDRLEWHDRANSDAMVAAFTADSAAAAQPGQIVDILAIDELGVMPVYDIQTESGEYLSDGIRVHN

SEQ ID NO: 118 - protein, 501 aa, Alkalilimnicola ehrlichei MLHE-1
  Aeh DnaB-1 intein
CIMAGSRLVDPRTGGRVTIDELVARQEAEVLTLGDDFRLGMARPAAFVDDGIKPVYRVRTASGREIATTLTHPFLTGDGWRPLSEIGVGEHVAVPRRIPVFGRERLPEHQVKLLAYFLGDGGTTQTSPLFTNADERVRGDFTDAVTAMGGVRCVPVGSPGRTPSLRVSRCRTALQSGRDVFAKALKGAMQQLQLTGEALADALGVSKAAVSGWINARTVPAPATYQRLCATLASSGQALPGTDYADIGKNSPNPVAAFLDRHRLWGRLATEKAVPEVVFRLKRGQLALFLSRLFACDGSAFVQGNGQARISYATSSRALARDVQHLLLRFGILSKLREKRNRYPGLQHAPWELEVMDQASLRAFCEEIGIFSKEEQVRGVREALAGKRRHNNVGGLPWSVSRYVLAAKGERSWGDIYQAAGRVLPEGFNAHLTGRSARRLSRHRASELADLLQDDYLARLATSDLHWDEIVEIEYIGAHQVYDLTVDGTHNFVAEDVCVHN

SEQ ID NO: 119 - protein, 418 aa, Alkalilimnicola ehrlichei MLHE-1
  Aeh DnaB-2 intein
CVTGDTRVLLADGQRVPIRDLVGQTPEVISVNAEGRLEPAKTDLVWSVGVRPLLQVRLASGRTIRCTPEHRLRGLWDWKEARDIRVGDRLGIARELPAPKVTKRWAEHELVLLAHLVGDGSYIKGQPLRYTTASEANSEAVSRAAEAMGSTVTRHPGRGQWHQLVISGNGNRWHPQGVGKWLKQLGVFGQRSREKHLPQEVFQLDNDQLALFLRHLWATDGSITQGSAGRPRIYFSTASRHLIQDVAALLLRFGIVGRTKHITHGDGEGWFTLDISGAVQQQRYLEKIGAFGHQAHNARRALQHLRGLVENTNVDTLPEEVFNYIRERMREEGITHRQMAALRGTAYGGSAHFTFSPSRETLLSYADILNDQRLRMLANQHVFWDRVVSVEPAGEEEVFDLTVPGNACWLADGIVSHN

SEQ ID NO: 120 - protein, 377 aa, Alkalilimnicola ehrlichei MLHE-1
  Aeh Rir1 intein
CVTADTWVQTADGPRRVAALVGRRFSARVDGTDHPSGDEGFFRTATKEVVELRTAEGYRLKLTADHRVRRVSAFTRYRTETEWCEAGQLQAGDRVLLNDHRTNAEWAGRHGRNEGYLMGLLLGDGTLKSDKAVLSVWRTAAAANGVPAGLPGGVEEVMAEGLEAARSLPHRADFTGWCEVPGRGEYRLATSAIRDLALELGIRPGSKRITDGVEQGSSDFYKGFLRGLYDADGSVQGSQRKGVSVRLAQSDSDNLEAAQRMLLRLGIASTLYRDRRPAGNTVLPDGNGGSAEYATRAQHELVISGENLARFRDLIGFANSDKQARLEALLDRYQRTLNRERFVARVVAVEAAGTEEVYDVQVPGINTFDANGLHAHN

SEQ ID NO: 121 - protein, 306 aa, Acyrthosiphon pisum secondary endosymbiot phage 1
  AP-APSE1 dpol intein
CLAKGTLVLTITGWMPIEIVSQDAYVWDGIEWVRTDGSVFNGNQEVIQAYGVGMTADHQVLTEKGWKSASQSKRYNRSSCRLPDGYKLPRFRRKEINLESTLHLWTRNNHSSNRITKTKKTRYNCLLRMPKGTNNIMQKPKARNVKTPRFCCMEQHVSQMYSPFPQSMVKLWWSGNNGLQTLAKKFQQFLGRHGQDIPTRLIFRSHQQQCRLPPQKLPLGYVASTSSKYSTSTIRANSPRHNEYTGISSPNRDCSKHALLSPGKKGKSSTTSGAPKHIAEVYDLINCGPRNRFVIATPDGPLIVHN

SEQ ID NO: 122 - protein, 468 aa, Aeropyrum pernix K1
  Ape APE0745 intein
SLPPWEPIVVRRGDEVRVTSIGEFVDSFLEGEGGLDIGGLGYYTLSLDTRTLKPVWRRIRGVIKHRIRGRLLRVKASKGRSIDLTGSHSIYRISRGGGLEVVGSSDLRPGDSLVTPASVELPESAPSSINAARELWSRGVEGIFVVGLPGEAAGYRGVERSRGYDGGHAIPLETLVERYGDSVWSLVSGAKLAVSRGAAGDHPVPATIPLDTGFYLLLGFIVSAGSVDVEGGHVTVTLGPGREGYVGDVVEAVNSTAPGAGVRISSGARGMEVTIRSRVLSELLARVFGAGPGPNRDIPSIVFRAPKPMKRVFLKGLYAGGGVFDRSSGSLIYATDSRSLLNGLALLLLNVGAGGYRIDSGDSGRALALIVENAGRLDAIGEVLEHLGFHGGREAVQGVGALERATAGLAGQATVAVQRPATRGGPGVDVAGVTGLEHLEASTEFVYDLSVEGDENFFAGLGWILVHN

SEQ ID NO: 123 - protein, 351 aa, Acanthomoeba polyphaga Mimivirus
  APMV Pol intein
SVTGDTPIITRHQNGDINITTIEELGSKWKPYEIFKAHEKNSNRKFKQQSQYPTDSEVWTAKGWAKIKRVIRHKTVKKIYRVLTHTGCIDVTEDHSLLDPNQNIIKPINCQIGTELLHGFPESNNVYDNISEQEAYVWGFFMGDGSCGSYQTKNGIKYSWALNNQDLDVLNKCKKYLEETENIQFKILDTMKSSSVYKLVPIRKIKYMVNKYRKIFYDNKKYKLVPKEILNSTKDIKNSFLEGYYAADGSRKETENMGCRRCDIKGKISAQCLFYLLKSLGYNVSINIRSDKNQIYRLTFSNKKQRKNPIAIKKIQLMNETSNDHDGDYVYDLETESGSFHAGVGEMIVKN

SEQ ID NO: 124 - protein, 347 aa, Burkholderia cenocepacia
  Bce DnaB intein
AQPLDARVRTLTGWKPMGELTVGDALASVDGAPSIVTGIYPQGERQVYRVRFSDGRSAECCDEHLWCVHFREWEKPRVLSTAEIRTLLTRERYRNRLWIDMPSGEFGHREVLPVDPWVLGALLGDGALGGTAVRFSVKAEETLNRMRERVDASLELEYAGQYDWRIKRRPSTATAARPSANPLKAALEQLGVWGRTSYDKFIPRLYLDADKDTRLDVLRGLLDADGWVESWGTVRYSTASAQLASDVRELARSLGAWCQVAEKATSFTVDGERKAGATAYICTISHPDPQNLFLFEGKRERLTAGRTRRKLPVITGIEPSRRTATQCISVSHPSRLYVTDDYVVTHN

SEQ ID NO: 125 - protein, 488 aa, Batrachochytrium dendrobatidis JEL197
  Bde-JEL197 RPB2 intein
CLSGDTEVVLGNGMDVVLLTDLVDGACVSTIEPRTGVVSPSLIDHYFAKDATRVLKITLDDGRVIKADPEHPLFAAKVDETTRGLTGQWLRVEELTVGHHALLVSPQQAYCTSEQWTLTLSEKEVCTASTAQLAKQLSEIGLVGVPIPLSKVKSAARLFGLVLSAGDFSGKLYVEKDEDVTAVNSDLTALGFSPAHWVRYQDDQQKWFKCDDSNGKAICITLVPTANALLQTLGAHDAEKQHRYCLLPKWLLDAPTSIKREFLGALFGGNGAHITISCNEGKWEPTMSALTQHTDADHLESTVVYLKQVATLLGMLNICSSVSSEKHITAEKTGYAVHLHVDNTAENLVRFYEQVGYRYCFNKTSQSSAPVQWIKGSLFFIEQHRSKCQHAFELLHTGLGTKAAVSAEINMPHHNPSHMLNVKEIPTAPADEYITWIEFKDRYVHKESPRFVWVTIHSIEEAPAERLYDFNTVSQNHSFFANSIVSHN

SEQ ID NO: 126 - protein, 385 aa, B.subtilis M1918 (prophage)
  BsuP-M1918 RIR1 intein
CVTGETLLLTENGYEKAADLYKKQNNLKVVIDNRTKDFAVDSKGTTIVDAIPMQLTKKDAEIFKVKTKQGYEIRATEWHKFYVKRDGEIQKLQLNQLKTGDKLLVQSAEGAYGKIHEPDLAYIMGIIAGDGTITEKTAKIYLYDNKKVLEQKVTDAVHRIIHKHKVDRAYKHNTSLLPTFNMANPEKQDLLYMNSTVLFDILKKFGMNKERKTRVPEFIFQANKETQAAYLSGLFQTDGCVNANHKAKALTIELTSIHYESLQDVQKLLLNMGVYTTIYSNNKRSQELLPDGKGGSKLYNVKPTHKISIQDRNSRELFMSIVELKDYDVYKFNLLTETLQPKSRKPKHDFTAEIISIEEDGVEDVYDTTQEDYHSLIFNGIVTGN

SEQ ID NO: 127 - protein, 385 aa, B.subtilis strain 168 Sp beta c2 prophage
  BsuP-SPBc2 RIR1 intein
CVTGETLLLTENGYEKAADLYKKQNDLKVVIDNRTKDFAVGSKGTTIVDAIPMQLTKKDAEIFKVKTKQGYEIRATEWHKFYVKRDGEIQKLQLNQLKTGDKLLVQSAEGAYGKIHEPDLAYIMGIIAGDGTITEKTAKIYLYDNKKVLEQKVTDAVHRIIQKHKVDRAYKHNTSLLPTFNMANPEKQDLLYMNSTVLFDILKKFGMNKETKTRVPEFIFQANKETQAAYLSGLFQTDGCVNANHKAKALTIELTSIHYESLQDVQKLLLNMGVYTTIYSNNKRSQELLPDGKGGSKLYNVKPTHKISIQDRNSRELFMSIVEMKEYDVYKFNLLTETLQPKSRKPKHDFTAEIISIEEDGVEDVYDTTQEDYHSLIFNGIVTGN

SEQ ID NO: 128 - protein, 330 aa, Clostridium botulinum phage C-St
  CbP-C-St RNR intein
CFDGQQKTLTKSSHGVNYLSFKDLYDTKYKDKERRNFKVFHNGNWVEGKPIRLLRNDKKMYKITTVNNKEILVTEDHINVTDKGDKYTTQLTENDYIAFNTRPTNAIPEKDEKLTYEQGVLIGAYLGDGSKQRNEHKIQLSINEEKYNILRPLIEKALKQWNIQAQYRLYTPHNNFYPTAITSEDLLNIIEHWVKGDYSYNKRLNLEILHQSIEFRKGVLDGIYFTDGGNSNRIYTTSDSLKEDLEILIHSLGMVSIINTTDRTDEKVIIRGEEFNRNQKGLYKVINNTMFFKIKTIQQYISNDEYVYCFEMKNIEEPYFTLPNGIITHN

SEQ ID NO: 129 - protein, 330 aa, Clostridium botulinum phage D
  CbP-D RNR intein
CFDGQQKTLTKSSHGVNYLSFKDLYDTKYKDKERRNFKVFHNGNWVEGKPIRLLRNDKKMYKITTVNNKELLVTEDHINVTDKGDKYTTQLTENDYIAFNTRPTNAIPEKDEKLTYEQGVLIGAYLGDGSKQRNEHKIQLSINEEKYNILRPLIEKALKQWNIQAQYKLYTPHNNAYPTAIISEDLLNTIEHWVKGDYSYNKRLNLEILHQSIEFRKGVLDGIYFTDGGNSNRIYTTSDSLKEDLEILINSLGMVSIINTTDGTDEKMIIRSEEFNRNQKGLYKVINNTMFFKIKTIQQYISNDEYVYCFEMKNIEEPYFTLPNGVITHN

SEQ ID NO: 130 - protein, 146 aa, Coxiella burnetii
  Cbu DnaB intein
CVTGDTLICLADGRRVPIQDLVGHSPEVIAVDDKGRLVCAKSEVIWKVGERSVFEIKLASGRSIKATAEHRLLAFKGWRHVKDFKVGDRLAIAHQVPEPDRLLQHCQSDLFWDRIVSIEEKGSEEVYDLTVPKYASWLADGVVSHN

SEQ ID NO: 131 - protein, 370 aa, Chlorobium chlorochromatii CaD3
  Cch RIR1 intein
CVTADTLIATDRGLERIGNIVGESRGIKSIDGKLHWVENIFPTGTKPVYQLRTKSGYQLKLTGDHVVFTENRGDVKACELRKDDMVRLVGAPFGKETTGSTDIAQLIGLLTGDGCITTANEIAASGEQRRTAFLTVSKAEQEIAEWANQFINTLRPELGEHNKSGSVTETATTARVAVGSPRILKQFEAFAVLDKGSVHKLFTDKVFQLAQSEQAALLRGLFTADGTVANYSDKSQYIALDATSLELLQQVQLLLFNFGIKSKIYENRRVGELVSLLPDGKGGIKEYPVQQMHSLRISRSSRILFEQQIGFMAESKKYEALAELNRTVSTYRDSAYDAVASLTYSGEEAVFDLTEPETDHFIANGIGVHN

SEQ ID NO: 132 - protein, 456 aa, Chlamydomonas eugametos (chloroplast)
  Ceu ClpP intein
CLTSDHTVLTTRGWIPIADVTLDDKVAVLDNNTGEMSYQNPQKVHKYDYEGPMYEVKTAGVDLFVTPNHRMYVNTTNNTTNQNYNLVEASSIFGKKVRYKNDAIWNKTDYQFILPETATLTGHTNKISSTPAIQPEMNAWLTFFGLWIANGHTTKIAEKTAENNQQKQRYKVILTQVKEDVCDIIEQTLNKLGFNFIRSGKDYTIENKQLWSYLNPFDNGALNKYLPDWVWELSSQQCKILLNSLCLGNCLFTKNDDTLHYFSTSERFANDVSRLALHAGTTSTIQLEAAPSNLYDTIIGLPVEVNTTLWRVIINQSSFYSYSTDKSSALNLSNNVACYVNAQSALTLEQNSQKINKNTLVLTKNNVKSQTMHSQRAERVDTALLTQKELDNSLNHEILINKNPGTSQLECVVNPEVNNTSTNDRFVYYKGPVYCLTGPNNVFYVQRNGKAVWTGN

SEQ ID NO: 133 - protein, 415 aa, Candida glabrata
  Cgl VMA intein
CFAKGTQVLMADGSNQSIENIKIGDKVMGQDGKPRNVTALPRGYDDMYNVELDGETDLSYTCNSNHTLVLKTEQNVLLAGNTVSYFALGALIDETNGRAVEIVQEVQETFESNISASDFAANINREPISWTLEIRDIDYLSERVRMFTKQSVNPVLLETPTLAKQLESNESTATNLAYLLGTWIASKATTAGTISVPTTKADLLSKVKSALSSLSIDYSSESINSVSTYRRTQSIPLMENGKHVGNANITAEQEIEETMEVLSLNVTNHSSKLFHDLALSMINQDGSRSIPSAFTHEQLCVRESFVAGILDMQGCNIENGVEIDSSINGLAKLSRSLGLRCNKSSNLLKLSGNMSNISAQSTNNWTSTEDNSSAYKAQLMDFSVQKLPKDNYYGVTLDDDSDHQFLLSNLVLVHN

SEQ ID NO: 134 - protein, 339 aa, Chilo iridescent virus
  CIV RIR1 intein
CVAPETMILTEDGQFPIKDLEGKIIKVWNGNEFSSVTVVKTGTEKELLEVELSNGCTLSCTPEHKFIIVKSYTEAKKQKTDDNAIANAERVDAQDLKPRMKLIKFDLPTLFGNSEHDIKYPYTHGFFCGDGTYTKYGKPQLSLYGDKKELLTYLDVRTMTGLEDASGRLNTWLPLDLAPKFDVPINSSLECRMEWLAGYLDADGCVFRNGTNESIQVSCIHLDFLKRIQLLLIGMGVTSKITKLHDEKITTMPDGKGGQKPYSCKPIWRLFISSSGLYHLSEQGFETRRLKWEPRQPQRNAERFVEVLKVNKTGRVDDTYCFTEPINHAGVFNGILTGQ

SEQ ID NO: 135 - protein, 522 aa, Cryptococcus laurentii strain CBS139
  Cla PRP8 intein
CHAEGTELIKFDRSVVKVEDVVEGDRLLGPDGSPRLVSNLVSGCDRLYRFEFSRSGGEVESLVVTDNHIMMLKRANVVLSGSGDAGQLEVLDQISVREQFEIVQKTAAEVAAMSEAEREQYRVYRSEGFEHYEQPVDVHPYFLGLWLGDDSRSANAATNGEPEVRKFLTDYAGELDMHLAHHGDEKRDRRTVKAARLAAGWTLLPRTEGKAGAWIPPATAGYVAPTHSPAPNLRDADGHRSVSAPSQVDEKPEVSHDDEDMEISDTEEEQSDAIEEIEADDDDAAIVMEGPHGQLTPGGRRDEMQPAKARRRVRRLNRNQRYGDLADAEVEALLEDVVSGGQSDGQVVRSAQLLDKLQSLGVATSNEKEKPAQGSKHIPQVYLENTRDVRLRVLAGLLDSHGCLVSPENCYMFSQPETDGRLFWDAVHLARSLGFGVSTDRKTQMNPGSDVATPHLLALITGDLTQVPCLLRRQQAVQRYLPQQHTFRIKSVTLESKSTPWYGFAVDSDRQYLRHDWMVLHN

SEQ ID NO: 136 - protein, 171 aa, Filobasidiella neoformans (Cryptococcus neoformans) Serotype A, PHLS_8104
  Cne-A PRP8 (Fne-A PRP8) intein
CLQNGTRLLRADGSEVLVEDVQEGDQLLGPDGTSRTASKIVRGEERLYRIKTHEGLEDLVCTHNHILSMYKERFGREGAHSPSAGTSLTESHERVDVTVDDFVRLPQQEQQKYKLFRSTDFVRREQPSASKLATLLHINSIELEEEPTKWSGFVVDKDSLYLRYDYLVLHN

SEQ ID NO: 137 - protein, 172 aa, Cryptococcus neoformans (Filobasidiella neoformans), Serotype AD, CBS132).
  Cne-AD PRP8 (Fne-AD PRP8) intein
CLQNGTRLLRADGSEVLVEDVQEGDQLLGPDGTSRTASKIVRGEERLYRIKTHEGLEDLVCTHNHILSMYKERSGSERAHSPSADLSLTDSHERVDVTVDDFVRLPQQEQQKYQLFRSTASVRHERPSTSKLDTTLLRINSIELEDEPTKWSGFVVDKDSLYLRHDYLVLHN

SEQ ID NO: 138 - protein, 172 aa, Cryptococcus neoformans var. neoformans JEC21; identical to SEQ ID NO: 137
  Cne-JEC21 PRP8 intein

SEQ ID NO: 139 - protein, 333 aa, Clostridium thermocellum
  Cth TerA intein
QLALDTPIPTPDGWTTMGEIKAGDKVIDEKGRPCNVVAISEIDDTEQAYKINFRDGTSIVAGERHLWKVQVTNNGRREKLLTTGEMYQKQFKTKSKENRALFRIPIADAFILPENKLPIDPYLFGYWIGNGNAVKPEITVMRDDVDEVIKNIPYKLHNRYKQEGNSDILVYKELKSILVKNFREKRIPIEYLRASAQQRKRLLQGLIDSDGCVSTAKSQAIYVTILFELAKDVQDLLWSLGIKNTLKTAPSARYGIETGEICYLIKFTAFNDLEVSGLDRKLKRGRERNIKTRSHFHYIKSIEKTGKTKMRCIQVDSPSRLYLAGKSMIPTHN

SEQ ID NO: 140 - protein, 471 aa, Candida tropicalis (nucleus)
  Ctr VMA intein
CFTKGTQVMMADGADKSIESIEVGDKVMGKDGMPREVVGLPRGYDDMYKVRQLSSTRRNAKSEGLMDFTVSADHKLILKTKQDVKIATRKIGGNTYTGVTFYVLEKTKTGIELVKAKTKVFGHHIHGQNGAEEKAATFAAGIDSKEYIDWIIEARDYVQVDEIVKTSTTQMINPVHFESGKLGNWLHEHKQNKSLAPQLGYLLGTWAGIGNVKSSAFTMNSKDDVKLATRIMNYSSKLGMTCSSTESGELNVAENEEEFFNNLGAEKDEAGDFTFDEFTDAMDELTINVHGAAASKKNNLLWNALKSLGFRAKSTDIVKSIPQHIAVDDIVVRESLIAGLVDAAGNVETKSNGSIEAVVRTSFRHVARGLVKIAHSLGIESSINIKDTHIDAAGVRQEFACIVNLTGAPLAGVLSKCALARNQTPVVKFTRDPVLFNFDLIKSAKENYYGITLAEETDHQFLLSNMALVHN

SEQ ID NO: 141 - protein, 336 aa, Chlorella virus NY2A infects Chlorella NC64A, which infects Paramecium bursaria
  CV-NY2A RIR1 intein
CVAGDTKILTSSGYHPIKDMEGKQVRVWNGYEFSETIVHKTGVNQKLIMVSLDDGTELRCTPYHKFYIETGSRPADKSRVMEVRAGDLEKGDRIIRFELPTITVGETTMSDKEAYTKGFFSADGCVIKSKYGEDEYRISVKREDKIEALTKYVDVIKSHTNRFRTHFYVPDYVQNKFEVPINSMVNEKISWLAGFMDGDGCVIRYKDIENMQAVSINKSFLQDIRLMLQTIGIHSTINKFMPNRVMKMPDGRGGTDMYNGAESWRLQIDSEGVRKLFALGFTPRRLKMNGSRKRHHKTNKFTRVVSVTDHGDVEDTYCFNEPKRHMGVFNGVITGQ

SEQ ID NO: 142 - protein, 394 aa, Crocosphaera watsonii WH 8501 (Synechocystis sp. WH 8501)
  Cwa PEP intein
CFDGKTKILTNQGFMTLRQVYEQGYEGLSTLSLNTKTHKIEWKPILDTMKRQSEMIDISVSQTGRITDNTLRLTPDHKMVNLRGGKYTKTEIQDLLKQQEMLTVAQTIPSLGNNKHQEADLAYFLGGIITDGSIYTSSTRGEVQFIQKDVPEKQAFISKMNDLANSLYGKSFTAHIKPVSSSYIRGQKVTGQATAYRLHSKAIAYDVKERENNITQLLLENEAELSYHFLGGVIDGDGCYHKNRLHIYISEENLLQAVIIACLKMNTVPQVTKNRNIYHLQIVEKLEVILRYTQRVKGEVTPRTIQTRFFATRQLFENQETGQIKLRQDNNCLISDKQLREMGEFEELIDGDTRMQRVIQVGEKSDGDVYNITVAEHHNYVVFTAKYTPVVVCN

SEQ ID NO: 143 - protein, 347 aa, Crocosphaera watsonii WH 8501 (Synechocystis sp. WH 8501)
  Cwa RIR1 intein
CVAPETKILTDRGQIAIADVAGEKVNIWNGSEWSEVLVKKTGENQPLLKVHFSNGESLDCTYYHKFHVQENYKGKVKIVEAKDLQEGDKLIKYRLPLVESENDIDFPYAYTSGFFSGDGSHDGMGKPEIDLYGEKKELLPFVTVRNKYYGGSYGDKSWRIERDEVAVYDDVNQDRIVCKLPLDIPAKFTVPVNGYTIQSRLEWLAGLLDADGTVARNGDNESLQVASTHQQFLLDIRLMLQTLGVDSKVVKMDEMGYRSLPDGKGGYQDYFCQAKYRLLISSNGLFQLGELGLKTNRLQWNLREPQREASQFIRVEKVELTCRYDDTYCFSEPKRHLGMFNGILTGQ

SEQ ID NO: 144 - protein, 139 aa, Costelytra zealandica iridescent virus
  CZIV RIR1 intein
CVVGETLVLTQNGQFPIKYLVNQYVKVWNGEEWSEVVVKKTGFNQELVRVDFNNGTSIICTPYHNFLSLEDDSTIKNLKRICAQDLPCNFKVLYFYQNLDFVTTVKVTKITHLSQRADTYCFSEPLNNAGVFNGILTGQ

SEQ ID NO: 145 - protein, 464 aa, Dictyostelium discoideum strain AX4 (nucleus)
  Ddi RPC2 intein
CLHPDTIITMSNGQQKPIRQLKDGDSIITLDPITMEAHSTRIYSHFIKSSSQYGKQLLKITTITGKEIICTNDHRFLTSNGNWKQSKDLLLNDKLFLISSSNQLEFNNNNNENNNENNNDIIEILNENQLINQGVVPIKIIQELKSIELLPLLNNNEKLITISRIIGSIDKIGSNKQNEPIIQYQFNLISDFDQFLKDLQYLGFINPIYKLNEEQQQQQQQKIDHQQQQQQQVEQQQKSIIIDFIGSSFGYFIQSLLNEKNWIEKSNNQFVKKEFLSSFISNVNRIQFNIIEEINQQNNDSNFKILLNYKQQKQQQNEKEERAVVDHDNEIFNIKSLQILLNQFNVISSIDFEESNLIIINSSLKKFIDLINIKFNQKLNNQIIQIREYLNYINYNNNNNNNEEINIKKKDFGYFKKLKIKRNSFEIEIEKIEQLNYQDCPEISDFTTESDYHSMISNGFVSHN

SEQ ID NO: 146 - protein, 401 aa, Deinococcus geothermalis DSM11300
  Dge DnaB intein
CVTADTLIDVPGTGERITVEAFVRRQWPVVLSVSADGRVRESRVGAWIDSGVKPVRRVTTRTGRVVETTPHHPFLGVDGWTPLYDLKVGDRIAVPRAVPVFGQRDVLSAERVRLLAYLLAEGGLTQSGPRWTNADPELVQDFRACLAAEFPEVEMMADAWTGIDDRLSRRWQPGERQDRPNPLIGWLRELGVWGQPTDAKRFPAVVWTFTRPSLAAFLRVLLSCDGTLSTLAGKARIEFTVASEGLARDVHHALVRFGIVSKLWRKGERSWRVEITDPRSVADYQLQIGWLGEKALRTIPVSAETRSHVGHPPAGAWAHVRRAAGERTASGFNAHTGRSLPQSRAARYAAVLDDTQLTLLGSDALYWDDIVSIEDVGERQVYDLTVPGDANFIAADICLHN

SEQ ID NO: 147 - protein, 366 aa, Desulfitobacterium hafniense DCB-2
  Dha-DCB2 RIR1 intein
CVTGDTWVLTEEGAAQVRDLLGSQVKLALNGEYHETSKEGFFATGVKQVLTLKTQQGYELKVTADHLVRVASDMTRYKVTQEWKPAGELKPGDTIVLSNNRSIQWQGKGTKEEGYLLGLLLGDGTLKEEGAVISVWGEGEEAKSMMEAAEKAAFSLTHRQDFQGFQKEISERHEHRMRFAALRDLAQQYGILPGSKAITQELEKTGQDFYQGLLRGLYDTDGTVTGTQEKGVSVRLWQTDLAGLKVVQRMLQRLGIISTLYEERKPAGQKLMPDGQGGSKEYPVQAGHELVISQDNIEIFAEKVGFSNSKKAQLLAEKLNVYQRSLNRERFVDNIVACVPGDAEEVFDAQVPGINAFDANGIYVHN

SEQ ID NO: 148 - protein, 366 aa, Desulfitobacterium hafniense Y51; identical to SEQ ID NO: 147
  Dha-Y51 RIR1 intein

SEQ ID NO: 149 - protein, 607 aa, Debaryomyces hansenii CBS767
  Dhan GLT1 intein
CLASDTLVRTSEGDKPVAEVAIGDYLLDAEDKPVLCMGANPSQTGRMKEIAYQDFDSKKRVSFKCTPDHHLELTLTDSTPSLSGKSVTWFSRCTGAHLSEEVSEVYLDNMVSIFYNDLVDSTDSAVDKDSIHEAVDLALEDHYHRGNSDQYSIHLNEYISRIADKELQNEPEFIRECIHDAANRFVITSSGNRNIKSESFDDKLLLSRSRSSTADSDSDYVITDASVHSHSNNSSVYLASPDSMIPDGAANRFENIASKLKEPVCNCGGIRKIFRSFGTTEDAELAYSLLLSEHYYRLDPRFVTDGYTFQASVEQYENMCSQEVQNMHLKLYRSPLKFVEREHNSAELPVDPYFLGLWLGDGDSSGTTIMTTDREIVVWLNSYVERLNQNKPEGCFPLKLTEQLIYGAGHTSKSGHTTKVDVRNYKISSGDAFVRSGTYWNPIFDGLKKLGLLNNKSAGIPQEYMNSDEQNRLSVIAGLMDSDGCYVKSHNTYRFTQLTEDHKKIVYDLKELALSCGINTTGVELSVKPLGFNKHKHSTEYVVYLGNGSQKFQELLLLPRKKMEISKKHVSLDARPFTVSDVEDGEFRAIEVSGGVFQLANRLVVAN

SEQ ID NO: 150 - protein, 394 aa, Debaryomyces hansenii CBS767
  Dhan VMA intein
CFAKGTEVLMADGSNKNIEEVQIGESVLGKDGEARNVVALPRGNETMYEINESTPEEEADLARIAFTCNAKHELVVNTKQDIAVEQNCVTYFALESVTDEANGREFSVVKSQTKTFEESSMAKEFASTISKNSIDWTIEARDVGHMSDDVRCATQQSWAPVLASKEVLAPVVQEAGFDATIAPYVSYLLGLWIGNGYSDRVQYLIDGKNTELINRVREYDEAIENNNQTSAKTVDFLWDVINSMSFKVEGKSGKAIPSFLRTESFEVREQFLAGLIDSDGIVTKNPLSASVRTNSSKVGEGVIAVSRSLGICTSVKAENESYIISMTRNSALESVLSKCALAEKTTSVPSHITRTGQNFDFSVKKIEAADYYGVTLPDNSDHQFMLANQAVVHN

SEQ ID NO: 151 - protein, 288 aa, Desulfovibrio vulgaris subsp. vulgaris DP4
  Dvul ParB intein
CQPAGTMVQKVIDPGAGSQSARIAEVPIETLRAGDFVVSYNPYESVIRRRGRQITRFGERQFDGLMHTISAAGRVTRATPEHRFTVRLNPSAADKQLVYLMRRGNWWRVGRVSLFSSRGFGLATRLADNKGEDAWIISVHDNAIEAQCAEQVLSCRYGIPTTHWEVDNWTKVPARQRSPGMIAGIYSCLNLGALSARATLLLRDHRLEREYPFITCGDQLMFSRRTTRLVRACNIHPGIMQIPMPSTGEDFDWITITGNDAAPFSGKVYSMDVDKDLHYVADGLVTHN

SEQ ID NO: 152 - protein, 605 aa, Emericella nidulans (anamorph: Aspergillus nidulans) FGSC A4
  Eni-FGSCA4 PRP8 intein
CLANGTQLLRYDGTKVNVEDVKEGDLLLGPDGGPRRAFNVVSGKDRLYRIKIDGDKEDLVVTANHILVLHRAKAMNTSVCFDRSKEQQGGAGEQLDISEVSAAERYDTVEMTAAEFAALHPQERSWYRAIRCPGFELPEQDVPVNPYFLGLWLGDESRNQSAIYSNHEEALREFLVSHAAELDMHLVYHGQSAYSTVCNKDRPTNKRIGPANQTQTVRPTIRQTRRTIRQQRLAAEHAAAEYTTQRETASLTPLLESPTSDKHGLLSSVETPGRLSDSVTTELPMSRSASAMRSIRTASGLSEFNDVTNVSASMPDIQNSGIKNQGRIAKVTRQQDSKGEVDFRQQYSQAIKDDLELLETDIEDDVASSDEIEDVCVVGSENELIGSEKQDQSGRRRQIHRLRTGHRGYGDLSDDEQEQLLDSVVERYAGDSRLNTLQQELSKMGILNPETGPINDKKRIPQVFMQNSRSVRLSVLAGLLDSDGWYIYPENMFGFAQSELCHKELFWDVVTLARSLGFGVWTKKRMMPDPTGKRMSPMLVAQISGDLAEIPCVLARKKAMPRLIPQSHSFAIKDISLESEATEWAGFRVDKDQLYLRHDYVVLHN

SEQ ID NO: 153 - protein, 366 aa, Ferroplasma acidarmanus, taxon:97393 and taxon 261390
  Fac-Fer1 RIR1 intein
CVTGDTKIFTSEGVKKARQLYEEGNPLNVKIDGRFGGEFKPSSNVIYTGFKDIYKIQTKEGFEIKVTGDHKIYSEKNGWTEALNLKENEKIRILNEGGSFGSSGTLEEGRVLGWLVGDGHINNGNNNDRAVLNFYSQDRVFADTFRKYVNDIVRPATNNREYNVGMVNIESRNCITIASERLKEFASEYDLIEEKLNVPDKVFAGSMELQRGFLQALFEADGTVYSGQKSRHSVRLGSISLNLLKQVQMLLLNFGIYSRIYQNRKKAGMRMLPDSNREMRLYATQDFHELNISAENLIKYADSIGFISERKNSKLNGAVNSYKKAPVKPSWLARVDKIEYVGREDVYDLVEPSTHSFVANGIVVHN

SEQ ID NO: 154 - protein, 356 aa, Ferroplasma acidarmanus
  Fac-Fer1 SufB (Fac Pps1) intein
CLPEDELISQGDKFVPINELLTDDSVVSNTGNQRKITRKYVHPYSGLMYKITPLSPGNAFRATSEHPVLSIKKEDVTSRIRDGHYEISTKKLMEAIPEYRRMDELSEGDFIVYVSPVETEDDASIDEDMLKILGLYTAEGSISFNKSLNLYQMSFSFGLSAKEEKIAYELYNIIKEKGERANIFKADKKYYTVSTYSKTLIDFCLNNAGKYADKKAFSEKIMKLPPEKQKLLIDYYLKGDGNVYIKKGKSKMIRAGTASKILALQLQEMLSRNNTFASIMIRKASDDVILGRNIKRKEQYIVEYTENIKFSRVRHKDNYYYVPIKKMEAEVYDDIVYNMEVETDDSYLVKGFAVHN

SEQ ID NO: 155 - protein, 408 aa, Frankia alni ACN14a
  Fal DnaB intein
ALALGTALPTPTGWTTMGRVAVGDMLIGADGRPTRVVAATDVMHGRPCYEVEFSDGSVIVADGQHQWITQTRAEPRRDGPVRSGSRTATLTRPVTTEEIARTLRCRTADRRCTHAVRVAGPFQLPAVDLPVDPYVLGSWLGDETAACASLTSADPEISEEIRRRGHEVVGSTSARHRPGLRRSAATERACTVCGRPFTAAMPGVRTCGQSCGGKLRFLAEPLSVRSCVDCGGRTTGFGPRCRSCHARAGTLQARLRTLGVLGDRHIPAGYLRASEQQRRDLLAGLLDADGTVASNGSTAQFATTNPRLAREVRELVLSLGCRATVTTTRTRGRSEETSTCFTVNFAPQDQVFRLARKAARLRPTGHPAAAVRYITDVRPIASVPVRCVEVDSPDHLYLAGETCIPTHN

SEQ ID NO: 156 - protein, 160 aa, Guillardia theta (plastid)
  Gth DnaB intein
CLSYATNQPYFLKSDNVNFSKLTSLKVSNHYILSATLELLIPFQYNRIYPIVSLIKRELQTGYKVVYELDFYISVIVSTVEHYVLTLNGWKRILELTVDDLVATLDIQYLIYNNTEVDLFSSNVIFSSVINLICMNRINVYDFWIPKTNNFFVNALLVHN

SEQ ID NO: 157 - protein, 258 aa, Gloeobacter violaceus, PCC 7421
  Gvi DnaB intein
CCAADTPIADPVTGALVTIEEIYRRGEAGKLVEVLTLLGDGRLARVEPSHFVDDGIKPVYRVRTGLGREVKTTLTHPYLTPTGWKPLAEIAAGARIAVPCRIPVFGSESLPPKEISLLCSRATRDNRIPDPVFRLPRAQLVAFLKQLCITADSARVSDRTVEFTSPSKSFCHQLQHLLLRLGVLSALREVSGIFYLDIKPAAETPIKPASLWSQDLAHHCDLHWDEIASIEYVGNEQVYDLTVPVTHNFVAADICLHN

SEQ ID NO: 158 - protein, 367 aa, Gloeobacter violaceus, PCC 7421
  Gvi RIR1-2 intein
CVTADTWVHTGDGPRQARDLIGVQHSTYVNGELFSTTSAGFFATGVKPVLRLRTKEGHQLRLTGNHQVLKLTAQTRHRQYTEWVPAEQLNPGDRVMLHDHRGLQPWDGPGDAETGWLLGTLVGDGCFVRDNNGTLCAKLSFWEASAPEMPGRAVTLATSRANVGRKLAGTINAQGVASVQSSGLARLAATFKIVPGCKRVTSRVEQGSFEFYRGFLRGLFDADGSVQGDQQKGVSVRLSQSDLPTLEAVQRMLLRLGIASDIYKRREAQVRMLPDSRRQSAPYPCKSQYELVIAKDNLQVFAQLVGFEHPAKAARLAKLVDTYSRTPNRERFSATVESLTPDGIEEVYDCTVPGPARFDANGLVVHN

SEQ ID NO: 159 - protein, 232 aa, Heterosigma akashiwo virus 01
  HaV01 Pol intein
SVTKETPLMLRTMETCGNHKHEVISIENVFTDNMRSIDMYSIIGEKEHVMLSRNEEIWTGENWSRIIRVIRHKTQKKIYGVLTENGYVEVTEDHSLISSDYELLKPKNCIVKETQLLQSFPDIVENSTIENNMIDIPKGQPCRLTVFGQVSAMIIYTYLKRKNYSITLNVCNVNSNKFYISFMERPRFKNTKKNIIKKIFFIRNTDNEEYVYDVETEDGIFHAGIGEIIVKN

SEQ ID NO: 160 - protein, 492 aa, Halorhodospira halophila SL1
  Hhal DnaB-1 intein
CLAYDAEIVQADGGVKTIEQIVRERRAHLATVGADWRLTWTEPCDYVDDGHKPVFEVTTRLGRRIETTLTHPFLTVHGWQRLEDLAEGDAIGVPRQLPVFGQEPIRDCEVRLLGHLIGDGGLTGSPPRLTSGQEAMTADFLEAVDAFGGVEAKPIRASRRTQSWVVVGAAQARAAARSSFASLVDALIRRSPLTGRAIARNLGVAPATLTYWRQGVNVPDAAMVGLLAGELGVDVGELRPEPVARRNDRNPLQAWLDRLGLAGKSAHEKTVPDCVFRLPREQLARFLNRLFSSDGWVTHLASGQGQIGYTTVSEALARQIQHLLLRFGVLAKLRHRSVRYQDGRRPAWQLDITHAESILTFAEQIGILGKEQRLASVAASVRGRRRQSHTDHIPCEIWQFIDRARGEWTWAELARRAGVASSNIHAYRRGMSRQRLAAFADALGSRELRQLASSDLYWDRIASIRPLGHKQVYDLTIPETHNFIANDVCVHN

SEQ ID NO: 161 - protein, 477 aa, Haloarcula marismortui ATCC 43049
  Hma CDC21 intein
CVHGDTRVTLADGHERPIREVVESNLDDPKPVDDGVWDTVDFDVPSLQSDGTVATQNATKVWKRKAPETLYRIRTATGRELDVTPSHPLFVQSDGRFQARKAEELESGTHVAVPRKVSTNACNELDVTFRQSQAHNRIDLDLPPQWTPELARLIGYIVAEGYVEQRPDNTGYVSITNNDREVLDDAKSVLETLNLNVTERSSHEGKTARELLCSAGEFVSFLASLDETLLQSSAERRVPQDIMRASDNVVTGFIRGYIEGEGHVSTSQREITVASMSKPLLEDVRTLLVTQGITAQLQPRNNGSYRLRISGQSFHDYAEQIGFITARKTEACRQFEGTHGNTNLDIVPNLGPELRRIREALGLTQSECGLPRSTYQHYERGRRNPSRDSLESVLDAFETRLAEMNNDTPISDTARSDGGGTGSLRQDLNGLAALVEGDIAWDRIESIEPIEHDEKWVYDLEIEGTHNYLTNGVVSHN

SEQ ID NO: 162 - protein, 180 aa, Haloarcula marismortui ATCC 43049
  Hma Pol-II intein
CFHPDTRLWYEDENDDWEYGTIEELVESRLDDPQEDDFGTLVQELDGDLTVSSLGENGPCRQPVDAVSKHPAPDHLVEVAVGDRTLRVTPDHTMLRAGPDGIEEVPASDLAAGDDLPAYDGGETTTMTARGEASTAATDGAAPTDTVEAVEYVESDVDHVYCLTVADTHRVAVEGTYVGQ

SEQ ID NO: 163 - protein, 409 aa, Haloarcula marismortui ATCC 43049
  Hma PolB intein
CFTPDTDVLTPEGVQNIRDLDIGDEVYSLDPETEEMEVKPVVETQSYPDYRGDLVDIETSKMDFRVTPNHRMLVRKNETNGITEDGYSFVEAGDLDDATNYELPHDWDGPDGDPLDTVDLTEYVDDYEVWVRPSVHGHTFAAEIGHYPDTVLKNDIGEEGYVFGPKEFEANREYIESVAERTYIHAESGRKWIPRTFDGDDFLELLAWYITEGNVYTSETKQFGEKTRGASTTVKIAQQAIADGGESDHAAIGDLLDRLGFDYYVDDRSYQFTSALLGDLLCNICGEDSFEKRIPEFVFDLSHRQKRRFLDTLIAGDGDRQKNSWRYTTSSDQLRDDVLRLCAHLGLTANYNRDSGSWRIYVTEDNKNTLRMHRSGSRSTADDGVYCVTVADNHTLMAGRNGKFQFVGQ

SEQ ID NO: 164 - protein, 538 aa, Haloarcula marismortui ATCC 43049
  Hma TopA intein
CLTADSDVLVRSENGDIERQTVDSLFSDGQVVLADGDTDIAVSKETPTVLSLDEATERVSEQESTLVSERPLRDDESVRTIETSRGAVTVTDDHPMYIRQDGEVTVRPASDIEAGTDLVAARRPPDTMVEPSDETVLSWETFAADCDKHSKLYGVDCGTELAAQRAARDESQTAFAERYGSYGSAVGKYERGEKDVPVWLLGELDIRPDRIHGLNYETSFENPFPLEWSPELAQVIGCLLGDGSIHRNDDENVVDVRYHNTDEALIERFARDIERLFDIEPTVTDRPGRESHHKRKYQVDVPSAVGRVLVCVLEAVTENGTPGLPDAVRPAFVGALFDDEGHISREGKAFISNTDHTLLTGVGEMLAEMGIETKLAPDQHKLHIRGRRNLEQFLDRIPIASDEKFYRGLDALDAYDVTTRKAELLEAIRQEPKTSAALAQTLGVTRGSVNKYLRELRESGHIEKQIEGSNRSLDENRTVQYVAADFEGSVYATLRGEPSSVTVEDVERREYDGPVYDLTVSENAPNFAVNGGAVVHNS

SEQ ID NO: 165 - protein, 182 aa, Halobacterium salinarum NRC-1
  Hsa-NRC1 CDC21 intein
CVRGDTTVALADGSEREIRDLVEANLDDPRPVDDGVWDGVDVAVPSLAADGRLVQRRATKVWKREAPETMYRVRTAAGHRLTVTPSHPLFVAGSHGPDAVRTEDLEVGQLVGVAPDGDGSGQVAPDGGVIRDAQPAPVGDAETVAWSAIESITEVEPDEEWVYDLEVEGTHSYLTDGVVSHN

SEQ ID NO: 166 - protein, 195 aa, Halobacterium salinarum NRC-1
  Hsa-NRC1 Pol-II intein
CFHPETNVWFRDESGEWHHDPIETLVEARLDPDTADEDDFGALVQALDGDVFVPSVTEDGEETLQRVEAVSKHPAPDHLLAVETKRGRELTVTPDHSMRRWTGDGIERVDARELTAGDALPAPTQVPGDGETATSELRSESLDGTHPQRRFGDGGSVRTDEVVSVEPVRSSVDHTYSLTVAETNTLVANGLFTGQ

SEQ ID NO: 167 - protein, 437 aa, Haloferax volcanii DS70
  Hvo PolB intein
SVTGDRPVVVRDPGGTVRILPIEDLFARGTTESEVLIAADGDVVASATPGKTRRALDGWDALSVNEDGEAEWQPIAQAIRHNTDKPVVNLQHKFGESTTTRDHSYVVPGEDGLTTVSPDDVAEPYRVSGVPDVEPVEQVDVYEVLRGYEREYEDGRSVGSDNSITKRKQIHADDEYVWFGHEHHRDVDSTVKVKRFVDIDSEDGAALIRLLGAYVPEGSASTGETATSKFGASLAESDREWLAQLQRDYSRLFENTTAGIITSDRRAERTVEYQTDTGGASVTYNDETLKLQMMNELAAVFFREFAGQTSRGKRIPSFVFHLPEEKQDLFLTLLVEGDGSREFPRYTEAYAQRNFDFETTSRELAAGLSMLLTQRGQKHSLKYRDSKDSYTIRTCSTYREGRDPVLTEADHDGYVYDLSVEENENFVDGVGGIVLHN

SEQ ID NO: 168 - protein, 215 aa, Haloquadratum walsbyi DSM 16790
  Hwa GyrB intein
CFSGDTEIALASGDSITFESLVDAYERGETHYCYTIGDDGRIRIEEIMNPRVTQEDAALLAVTLDNGEVIRCTPDHEFMLRDGNYCEAQNLTDGQSLMPLYRTTTEMTETTETTETTGTAEMVKQPFAQNNWESVSQLANRYNRRHTTTDHIVETQQIQSQQQSQIETVQISERADVHNHTVISVESLTETADVYDLEVPVTHNFALASGVFVHN

SEQ ID NO: 169 - protein, 521 aa, Haloquadratum walsbyi DSM 16790
  Hwa MCM-2 intein
CVTGETRIHTTDGFVPLKQLATQHHPKKVTTETAAAYERELYTVDPTTQSAEVTQSKSSHVWRMPEKHCRRIRTASGKQLEASVNTPVLTVDDAEIKWKPISAIESNDSVVIPQYNNVERSSVSITDIFEFTQEQLKLTEKSITILRTEIVSQYQNIAAAADALNIDVNSVEALITGQPVVSDVIDRVCDAISVSSEDITIHHVIGPTGTAIELPEVLNDDLLYLLGAAFACGNIMTGETCEERWIQFHAPEESIRSHIIDAAVATFGSESIQTDTEQANTVQVISATVTRLFETLGLEQITDAAPREIHPRLTAVSGADAFIRGLFDTGGRIDNKNTPQIAIGTASEPLAEQIQLLLETYGIGSCRDTGDQSHTGTSTTQGQYLTLTGSDAQAYRTTIGTRTDSGSSWDRQVSSSHADSEPSVRSTTTDTRKRTDMHEHEIISAGDVSTVSSVESDGGTPQMPRSNIEPQSIGYDYESSRVNEIQTETVVEAVNTGKKEVFDLTVPNTQNFIGGGIVTHN

SEQ ID NO: 170 - protein, 211 aa, Haloquadratum walsbyi DSM 16790
  Hwa MCM-3 intein
CVTGETLVSLADGRHVPIASLATDASKTGTIESKPDGVGRTIRGIDDLTVWTMTENKQLTGRPVTAIHQYDSPDTLWQITLSDGSEVTTTADHPFIIINRDGVHECPAKHLSENDEVYTPADGYTASTSDITPDSETSSDSLPDGGITQTRTNQYSSHRCDADLSDDELLDITTKTIKSIETVHPSDGTDVYDLTVSGTHNFVANGMIVHN

SEQ ID NO: 171 - protein, 572 aa, Haloquadratum walsbyi DSM 16790
  Hwa MCM-4 intein
SYHPRSEVLLADGQRIDIGTFVDSRIEKNNANVIDGINCEILPVDDIDVYTVDTDTGSASTVSIDRVSRHPAPSEFIRVKFSNGRSVLVTPEHPMFIDDGSETKTVQANALSGGEFVPAPHHLPGVNTDASSVSDDINDVSTIRTHVRSRARAKAEVEVRATDGEFKLIDAAQTLGIITAVGKVSVDAPERGIIVDMDRTVDSSKDSINNVLGSVIPSNDNDSITRVQDTGSTGNQWRWSVNTFIERMIEIAPAVTADRPNRRVPDAVLGGSEAVVQQFLTGVIIAAGRILDETIRIYASSNELACDYADAFLRLGITASVEDGPAEIAAQTVIKCDSDYERACGMFDISSSRTTPSDTSSQNNQSSVTAQNEDTHQTTSHEILPSGIADELQSIRQLLNIPASEQLASITAGDDGIALSIARAEINLLRDHIETLRMDTENVSIGRDDCVTPTISSSSKYKYAKNSITSDENLQLFGQSQAQLSERTKTTESSSISASTDLVSIPANISENRLVAATQRLDEVETRCNRRYHRVIAVDTVSNAGPHACEWVYDITVEPTNTFISSGVVLHN

SEQ ID NO: 172 - protein, 209 aa, Haloquadratum walsbyi DSM 16790
  Hwa MCM-1 intein
CVSGETDIALVEGKTATIGELVESALTDPKPVDDGVWDTADFTVTSAIETGELIERDVTRVWKRQSPETMRQIQIAGGRSVTVTPSHPVFVEHNGSYTARRADSLSAGESVAIADDVADSHPISVDNTANTLNPRSMSTPGITTDGGLYRTGSDGGIVHAEVGKEDVTDCLTTDRITAVKTVTPTAEWVYDLEVEGTHAYLTNGVLSHN

SEQ ID NO: 173 - protein, 529 aa, Haloquadratum walsbyi DSM 16790
  Hwa Pol-II-1 intein
CFHPETKIWFRDTDNEWHHETIQTFVEDRLDDPEIDAVGTLVQEVDDNTDREISVPSIDDNGNERLQSVTAVSKHRAPNHLVQIETISGREITITPDHEMHIFEQGNLVSKQASKITSGEYAVIPKRLQTISPSSHTPQHDLLREFLTRDELTADRLIIHTSDPVRLCNRVFPEEVTSCKDAVEIMQNTACHLDKNKETLIGWLGEGRIPVALLRGFVETDEALLMSIPDDVQIGLRGEKVRIDRHIGFTEELTSLLGYYAAAGIVHTQTNPISYESAQQEQSRITFYNIDTQTQTDLLNALNSVFEIEPIQYNLDGEILGVPGELIRRVFDTVFDVGTQPSHKRIPQALFDASESHITSYLRCFFSTHDSLTTDTRDISATTVSREFKEDIIAALRRLGITAEVTTQQSRSVPEVLPDWYAIDDITHHDADNSLNLTRSYVISIASSDAVTLQRDRQAQEQIKYDAQGLIANNNAIHQSRQVTDGGRKDYITEPITDIEYVDADIDYTYCLTVSETHSLIVNDLSQKQ

SEQ ID NO: 174 - protein, 544 aa, Haloquadratum walsbyi DSM 16790
  Hwa Pol-II-2 intein
SVAADSRLVAVSPDDKIVFTTIEDFWKKLNTPIERNGKFRKRTCVSEGWQTYAFDENHEASLRPIEKAIRYTADESEQLRRITTQLGRSLDITDEHSLFRYDDGIEEVAGDDLTAGDIIVAPRTLDVEVTQTTLDLSEYIHDNERCPSEQTGSGELNLASKSAISDSRNKETPGVTHNILPQRSKFTDEMTTLSPTAVGGLESEQNETLRVGESTGAIERYINVDDSFGWLLGQFIAQRSISTDALTMTVHTAAEKHAERIVATSDSVFGIKPTVNSIERGYEIVFPSVFDTIVSGLTAKEQSEPEQDVDHTHTDEIGIPECILHAPDDIVLSFLQGFILAENAQRKGNAASEASEMVSESETTVTLETPSVGVKDGLVFLCHRLGVITDISEKSGEEYSVHFEESRYTVSIATEGKTNPLDQILNGERPTMPEGVSVPVPDALLTIHESIANSPHIDQVIPDTVVQQETVSLETLQSLLTGLSTVDLPAQLEAKRDELTLLTEGDLSYLRVESVECVDYDGYLYDLQVGGEPVFTANWLYAHN

SEQ ID NO: 175 - protein, 434 aa, Haloquadratum walsbyi DSM 16790
  Hwa PolB-1 intein
CLPSDARIQMADGTETEIHAVEIGDNVIGTTDQRSVTATVTNKWKSEREIYEFSLADGTSLRSSGDHRIMISDSNTVDWKSGSDIEQGEYVLKPRQLPVDDPTIPIINNLLSSESANIIDTLEVDALDSTGRSMNIHSSNPRESIAHTATLSMADGGDQKQRNETTNNTLDLNRTVTKQDLYAIGRVLHNRITPRQDGITPVSQATLIDNSVLSSPSPANTQHQSDSILTEVISSLRGLVSPGAHAIDFSAIYEMPKSHIAQFLAGTLDGSETGETTSSNLTVTTESASIARWYAQLYRRLGIYAQYQADAVHIANNACDLQRLSDAILPRLRCSDTIDYVKTQIDTVCDSSLKHSRASSTGLSGDEANIRQFSDDGPQNKSYAAQPDSSDYDDDWNAYVFVEIEAITLNGTETTYDIETTTHNFVADDCLVHN

SEQ ID NO: 176 - protein, 431 aa, Haloquadratum walsbyi DSM 16790
  Hwa PolB-3 intein
SVTGDRPVVVRDPSDYIQIVPIKLLFEQATAPEQNMRLTADGAPSVNSELPKERRHLDQWEALSLSDTGETEWQPINQIIRHQTDKEILTLQHEYGESTTTRDHSYITADDGEYVETSPENVDEPLPIPNIASVKTIETIDIYQTLTTDTQAQIGNDTEPDKWLPSADCIHANDEYVWIGTTDKQQDRDDSTPAIPRYIDLTSDTGHALIRFLAVYLSDWSKSTITTTERGQCLHITGPQESALKTCAADADQLFTHITPSIAVDAESNTNTVDSGFRCHIPTTLATTLISAFAGHPAHTKQIPSIVYHLPAAEQSLFIRHLIQAESTPESDGVSGRPQKSDKPILLENEFITTNRELAAGVSMLLTQCGQSYTISKQDTKGAYTIHINNSSSSGCTPTLTETTHSGYVYDLSVATNQNFVDGLGGLVLHN

SEQ ID NO: 177 - protein, 408 aa, Haloquadratum walsbyi DSM 16790
  Hwa RIR1-1 intein
CLTADSTVMLKEKGMVSVSEVETGDQIAQRSDTGFQYKPVEETHAYENAETLTVTLTNGCSIRGTPNHRLMVDDEWTRIDEIQPDQEVHYTLGWLRETNQSPPKLHSQSHTTVNQTADSISPDSSEPIELSESENADTGNRHNSAVAVKQSRTQTQLISDEVVSRPEHTRRPDQLSEELAELLGLWIDTGLWHQSGVQFNVERENIAEYIDQLSQQLFDTPAAISDTDGTYTVDITDHKLKEWWKANFGGKPDGTQSSYVPQMIKEAPTNVIEAFLRGCFTAEGGLRKDMRPRLCTSSEDSIDDIAVLMMGLGYPVEKSVIRNADGEPYYSVMPATDDGLSAFLHDVGFIDERREIGLSNIESSDSRALNNTHKIEVESIVESPPATVYDITVADNHEYVTDGIISHN

SEQ ID NO: 178 - protein, 438 aa, Haloquadratum walsbyi DSM 16790
  Hwa RIR1-2 intein
CVEENSLVSTDEGLRPIKDLDNTTAEFEQWDEIDVGVTTDGGTKTATAVYDNGFANVRQIQTESGFNIAATPNHRFRTLSSDGTYTWKEAGKFESGDRVILQRNTFDAGSRVSLEANERADDAQDTTEGPELPGRMTSELAEFLGYFMGSGYISDETHASVDLVVDSDATELNSYLSNLGEQLFRITPAVESQEMSQVLSFRDCHLSRYFEDNGWKKTDTGHNGDASAAFVPEQILEGDEQVVNGFLRGVFEAIGTVSEKIEILTTSTTLADQLQSLLLSLGHVFTRDSTKLVETNNYHDDQLRQRLCGATRREDERFMNEIGSLIEPDELNLSTRADKNDTYPSSVIDHVQTLDGYDSVSESLKSRINQSQVDGTVSRKLIKDIEAETAETVSIADHELTGFYAATVESVTEDTAYTKDISVPSNNTYIADGFVTHN

SEQ ID NO: 179 - protein, 214 aa, Haloquadratum walsbyi DSM 16790
  Hwa rPol A'' intein
SIEADESIVIRRDGETELTEIGSFVDTILAADNQETRITDGHEIALAPNGLEVPSLDTDEQIRWKHIEAVSRHASPDEILLIELESGRSIRATKAHSFVTRRDGDVLPVAGETLVVGDVLPTVGSYDHASGSISVPLQSQSVAADGGTVEPNTNITANAERDSASITSAGIIGSATWERISSIETVAPEYEYVYDLSVSGLETFTTGEGVVTHN

SEQ ID NO: 180 - protein, 492 aa, Haloquadratum walsbyi DSM 16790
  Hwa Top6B intein
SLTPTQTLLIRRDGDVTFTSIGDFCDSYLPADGPASAPIPVDANIEVPSFDRATHEMTWQPVTNAIRHRTDERVYRISTACGRTLEITGNHSLFSLSSDNETIEVNAGELSPGDSILAPKQLPMASESVDTSTTVDEKTQSSTGAQTQRINILEHIKPDDLKESAATFRIHEADQASLSSGGNHKSPSASLASSQLASSEVIASAGGQQIQSSADQRQSKGHTPGGDHHNNECLLIKSVCENDKMSTVADYTLEIVTPDGESSRLPVSVSIDNVFITSLVRYIATASTSDISPVSDSSVDYTTEERHNTVDRSFSDTMRPLDSVIPLICEDDGEIELPSFVFESDPKRQQQLLTQLYRYPEASNGRNAGDDTVTYTTTSATLARQLTTLWNMNGVVATTNTQTETSQSDEIENESAQTTIYEVSVDRAEIETDIAGSDSDCQQGDGDLCLVSVSSVEEIDAPPYVYDISVPGASGHDENFVTANDGAICVKN

SEQ ID NO: 181 - protein, 339 aa, Invertebrate iridescent virus 6; identical to SEQ ID NO: 134
  IIV6 RIR1 intein

SEQ ID NO: 182 - protein, 502 aa, Kazachstania exigua, formerly Saccharomyces exiguus, strain CBS379
  Kex-CBS379 VMA intein
CFAKGTQVMMADGTDKSIEDIQLGENVMGKDGTPRTVISLPRGKETMYEVCHSSIKGTTNETLMNYVCSGNHKIVMQTPQQIGITEHAIDGKTYTSVSYFALRDSQDGYPIVKKLTKSFEHQQNGGKEQTLITVNNFVASLKSEPINWDVEAKHYESLGHYVKKCSYQLINPVFHQSGKLAQEIASLNYSKDKAPLLAWLIGFWVGNGAMRHSQFVIDSQDIELVNRIQEIATLLNLSATTACYYSGSVDDQDKLAKLNTATGEGFEDDLQSNPTAKELADMDILSESKTATLPTAFGVEKIDELIISLGEGRGNGNVFAQVIGSFGIDLADKDTLVSKIAHELAGDAFEVREQFVAGLVDATGYVRKDVYDHASEATVSIESKSTVLGLVKIARSLGIKIVVTSNDYQDPEDHDHGHDHGSCGHDEVATGYTAVMTGDALTNSMRFCAIGRNRVTAKQFMRQAIPFYFSLEKKSEDDYYGITVPDNTDKQYLLSSMALVHN

SEQ ID NO: 183 - protein, 410 aa, Kluyveromyces lactis IFO1267
  Kla-IFO1267 VMA intein
CFSKGTEVMMGDGKDELIENIQVGDEVMGRDGLPRQVVGLPRGHDDMYQVTEKSEDNETAKISFQCNSSHKLVLVTPQDIRLTESKEKVTVAFNRLADISVGNGTESRTVRLVERAEKSFANAESNQAIINAAEFVTTIDTTSIEWTLEARDMLLVDSSIREVTQQLINPVLLEKEHLAGVLKSNDFQSSLAPQFSYLLGAFVGSSGKDNSEYLQQLSAQFDKKIVAEKSIDVQSNGKTVGTASIVISQEPVQENKRRKVAQVSLVSKIVQESFSSGIPSFMMSENINVRESFLAGIVDSQNQKLDDTVALKTLSVKTHDGIARLARSLGIRVSGKKQNQEYTLTLSGDALKSVSNWTSTSNIEKVDVIHKAQPISFDLEKIESADYFGVTLAEESDHKFLLSNMTLVHN

SEQ ID NO: 184 - protein, 410 aa, Kluyveromyces lactis NRRL Y-1140; identical to SEQ ID NO: 183
  Kla-NRRLY1140 VMA intein

SEQ ID NO: 185 - protein, 428 aa, Kineococcus radiotolerans SRS30216
  Kra DnaB intein
CLTAGTRVLRADTGAETTMGELFALQARDVPVWSLDESLRYVRRHLTRVFPTGVKPVFRLRTASGKTVRATANHPFLTYDGWKPLGELSVADRLAVPRHVPAPERVASWTDDQVLLLGHLIGDGSFVKRQPLRYASVDEANLSAVTEAAANAFSIVAVRDEYAAARCTTLRLPAPYRLTHGRRNPLAAWLDELGLFGLRSYEKFVPQEVFHLPKRQIALFLRHLWATDGSVTLTRQSRGGRIYYASTSLQLIQDVSRLLLRFGISTRVRTTTPKGDHRPGYTLDVSGVDDQRRFLQEIGVHGARGATADRLLEVIRDVSANTNVDTVPRQVWDDVRRLLVEKEMTHREFAAAMGTSFGGSSLWKHAPSRERLGRVAQVLDSAELDVLAVNDVLWDEVVAIEPDGEEQVYDATVLGGHNFVADGIAVHN

SEQ ID NO: 186 - protein, 339 aa, Listonella pelagia phage phiHSIC
  LP-phiHSIC helicase intein
CHAYGHDIMMSDGTKKQVQDIAVGDKVMGPDGNPRKVIRLVKGQDEMFRVTPTKGESFVVNGGHILSLYQTPRRAGQTPGYTEISVNEYIRSSSTFKHRSKLQRFGFDLPGKNLPIPPYILGLLLGDGCITGVGQMSFTSQDHAAITEIERYLMSIGASNRLHFDSREAVGVCFRDYHRLEDHLTELGLYGRNSGDKFIPSEYLTSSNEDALEMIAGLLDTDGSLCPHGVYDYISKSRELSEGLVYLCRRVGLAAYISECEKSCQNGFKGTYYRVCVSGDLSKVPCRVSHKKCIFDRKQKKRVDVTGFKVEPIGVGDYYGFTVDGDHLYLDGDFVRHHN

SEQ ID NO: 187 - protein, 337 aa, Mycobacterium avium
  Mav DnaB intein
ALALDTPLPTPTGWTTMGDVAVGDELLGDDGRPTRVVAATDVMLGRPCYEVEFSDGTVIVADAAHQWLTETRVSRKSAQAAAVGYNRYKNQRTFAAVRTTAEIAETLRCPAQDRRLNHSVVNARALELPDREFLVPPYTLGAWLGDGTSAAAQITAADPEIIMRIEAEDSGAGVGTLQARLRTIGVLGNKHIPTEYLRGSEAQRRALLAGLLDTDGTVTVGGAVQFSVTNQRLARDVNELIVSLGYRCQTSTKRVQGRSETSSIAYTLTFSTADKVFALERKAIAHKERRAVTGTSRGGSRFIVDVRPIEPVAVRCVEVDNDSHMYLASRAMVPTHN

SEQ ID NO: 188 - protein, 337 aa, Mycobacterium avium 104; identical to SEQ ID NO: 187
  Mav-104 DnaB intein

SEQ ID NO: 189 - protein, 417 aa, Mycobacterium avium subsp. paratuberculosis str. k10
  Mav-PT DnaB intein
ALALDTPLPTPTGWTTMGDVAVGDELLGDDGRPTRVVAATDVMLGRPCYEVEFSDGTVIVADAAHQWLTETRASRKSAQAAAVGYNRHKNQRTFAAVRTTAEIAETLRCPTQDRRLNHSVVNARALELPDREFLVPPYTLGAWLGDGTSAAAQITAADPEIIMRIEADGVVAVPSGSAPYRYQLRLPPGAEQAPRRCVVCGKSFIPQTSQVRTCGRSCGGRARFMSDPVPSPTCVRCGGPSAGMRLCLKCHSTVGTLQARLRTIGVLGNKHIPTEYLRGSEAQRRALLAGLLDTDGTVTVGGAVQFSVTNQRLARDVNELIVSLGYRCQTSTKRVQGRSETSSIAYTLTFSTEDKVFALERKAIAHKERRAVTGTSRCGSRFIVDVRPIESVAVRCVEVDNDSHMYLASRAMVPTHN

SEQ ID NO: 190 - protein, 416 aa, Mycobacterium bovis subsp. bovis AF2122/97
  Mbo-AF2122 DnaB intein
CLTASTRILRADTGAEVAFGELMRSGERPMVWSLDERLRMVARPMINVFPSGRKEVFRLRLASGREVEATGSHPFMKFEGWTPLAQLKVGDRIAAPRRVPEPIDTQRMPESELISLARMIGDGSCLKNQPIRYEPVDEANLAAVTVSAAHSDGAAIRDDYLAARVPSLRPARQRLPRGRCTPIAAWLAGLGLFTKRSHEKCVPEAVFRAPNDQVALFLRHLWSAGGSVRWDPTNGQGRVYYGSTSRRLIDDVAQLLLRVGIFSWITHAPKLGGHDSWRLHIHGAKDQVRFLRHVGVHGAEAVAAQEMLRQLKGPVRNPNLDSAPKKVWAQVRNRLSAKQMMDIQLHEPTMWKHSPSRSRPHRAEARIEDRAIHELARGDAYWDTVVEITSIGDQHVFDGTVSGTHNFVANGISLHN

SEQ ID NO: 191 - protein, 359 aa, Mycobacterium bovis subsp. bovis AF2122/97
  Mbo Pps1 intein
CLPAGELITTADGDLRPIESIRVGDFVTGHDGRPHRVTAVQVRDLDGELFTFTPMSPANAFSVTAEHPLLAIPRDEVRVMRKERNGWKAEVNSTKLRSAEPRWIAAKDVAEGDFLIYPKPKPIPHRTVLPLEFARLAGYYLAEGHACLTNGCESLIFSFHSDEFEYVEDVRQACKSLYEKSGSVLIEEHKHSARVTVYTKAGYAAMRDNVGIGSSNKKLSDLLMRQDETFLRELVDAYVNGDGNVTRRNGAVWKRVHTTSRLWAFQLQSILARLGHYATVELRRPGGPGVIMGRNVVRKDIYQVQWTEGGRGPKQARDCGDYFAVPIKKRAVREAHEPVYNLDVENPDSYLAYGFAVHN

SEQ ID NO: 192 - protein, 440 aa, Mycobacterium bovis subsp. bovis AF2122/97
  Mbo RecA intein
CLAEGTRIFDPVTGTTHRIEDVVDGRKPIHVVAAAKDGTLHARPVVSWFDQGTRDVIGLRIAGGAIVWATPDHKVLTEYGWRAAGELRKGDRVAQPRRFDGFGDSAPIPADHARLLGYLIGDGRDGWVGGKTPINFINVQRALIDDVTRIAATLGCAAHPQGRISLAIAHRPGERNGVADLCQQAGIYGKLAWEKTIPNWFFEPDIAADIVGNLLFGLFESDGWVSREQTGALRVGYTTTSEQLAHQIHWLLLRFGVGSTVRDYDPTQKRPSIVNGRRIQSKRQVFEVRISGMDNVTAFAESVPMWGPRGAALIQAIPEATQGRRRGSQATYLAAEMTDAVLNYLDERGVTAQEAAAMIGVASGDPRGGMKQVLGASRLRRDRVQALADALDDKFLHDMLAEELRYSVIREVLPTRRARTFDLEVEELHTLVAEGVVVHN

SEQ ID NO: 193 - protein, 314 aa, Methylococcus capsulatus Bath, prophage MuMc02
  Mca MupF intein
CFPAETPVRAAARLGLKTWYAGKVVELQTRLGHRLTLTANHPVLTVRGWIAACQLQKGDQLIGDASGVNPRLAGVVNDEQPPARAEDLFQTLAAQGFRIVPMAPHDFHGDAGLRKPEIHIAGPDVHLMDEVQAAPGQFVGQQQLRRADACAIMDADRPDGPPPARMILADAVAPQNPADVAEAGAELAADGAFGDQPVAVQGQHPAFEMGVAVAGALPGGGALASNGGGVLFDGSPFDALGFRAPPQGDVAGTEQPAQGVTAASGLVRQLLEANAGLIALDEIVQIRQFDWAGHVYDFETETGLIMAGGVIVHN

SEQ ID NO: 194 - protein, 380 aa, Methylococcus capsulatus Bath
  Mca RIR1 intein
CVTADTWVMTASGARQVRDLIDRPFEAVVDGECHPTESRGFFFTGDKPVLRLSTAEGHTLRLTANHPVLRVSKMTRQLRETEWVKAGELRPHDKIVLHDHRALPSWDGAHTEAEGYLIGLLIGGGTLTRDKAILSIWDAAAPKVANGGGSVPAAGVAGVMRAAELAARTLPHRTDFNGWQTTMEGRGEYHMATGALHTLALELGLTPGDKRLTAPLETTSSAFHRGLLRGMFDADGSVQGSQRKGVSIRLPQTDLGNLQTVQRMLLRLGVASTIHQNRRPGGTKVLPDGEGGAKGHSCQAAHELIISGENVVRYAERIGFADSDKMDRLTALLQRYRHTRHAERFIATVQSLEDDGMEAVYDVTVADVHAFDANGLYVHN

SEQ ID NO: 195 - protein, 364 aa, Mycobacterium chitae
  Mch RecA intein
CFNYSTRVQLADGTTEKIGKIVNNKMDVEVLSYDPVADQVVPRKVVNWFNNGPAEQFLQFTVEKSGGNGRSQFAATPNHLIRTPAGWSEAGDLIAGDRVMASEPHRLSDQQFQVVLGSLMGDGNLSPNRRDRNGVRFRMGHGAKQGDYLQWKTDLLANIAHSAHENAKGARFVDFTPLPELAELQRAVYLGDGKKFLSEEYLKALTPLALAIWYMDDGGFTVRSKGLQQRTEGGSGRIEICVEAMSVGSRDRLRDYLRDTHGLDVRLRHAGAAGKAMLVFTTAASAKFQEIVAPYMAPSMEYKLLPRFRGQGTVAPQFVEPTERLVPARILDIHVKPHTRSMNRFDIEVEGNHNYFVDGVMVHN

SEQ ID NO: 196 - protein, 358 aa, Methanoculleus marisnigri JR1
  Memar MCM2 intein
CYDDETEVLTESGWKLFRDVTADDRVATLSADGRLEYAPPSNFVASEYDGEMYYVKSRQVDLAVTPNHRMYVNLNRRADEWEGFRLIRMDELPIHKRMRFKKNAAWTGERHETHWIPPVVKFANQNAEGKLTDPITVGMDDWLEFLGYFLSEGSVQRHHQTGVPYRVIISQTNPESAETIRQCLERLPFRFSYDGKNFSINAKQLAEHLAPFGKCHEKYVPDYAKSLPPEQIGILLDALMLGDGYINKTTGVSIYTTSSRRLADDVTELLLKKGLSGNVYLRREAGTVAANPRGGTSTATHDIFQVTFIRDGQNEPNINTNGKQHIEKRPYKGTIYCLEVPNHTLYVRRSGIPVWCGN

SEQ ID NO: 197 - protein, 165 aa, Methanoculleus marisnigri JR1
  Memar Pol-II intein
CFAGDTEITVSDGRRWMSLPIRQFVTENFDISKPGLDHVGTFYSDPRQPFYVRSIDSQGKTSLKRVTSVSVHRAPAHLVRFATRRGRVLTVTPDHAMLVWDTDYLRKIKALEVAVGDRVPVEEGGLVVADEVVSRETVQALDDRVYCLTVAENHTLVANGIFCGQ

SEQ ID NO: 198 - protein, 363 aa, Mycobacterium fallax
  Mfa RecA intein
CFSYGTRVQLADGSTEKIGKIVNQKMDVEVMSYDPVTDQIVPRKVVNWFNNGPAEQFLQFTVEKSGGNGRSQFAATPNHLIRTPAGWTEAGDLIAGDRVLAAERHLLSDQQFQVILGSLMGGGNLSPNLHDRNGVRFRMGHGARQADYLEWKTALLGNIGHSVRENDQGARFVDFTPLPELGELRRAVYLGDGKKFLSEDYLKALTPLALAVWYMDDGSFTVRSKGVQQRTQGGSGRIEICVEAMAEGTRERLRDYLRDTHGLDVRLRSAGSGKSMLTFSTEATAKFQELVAPHMAPSMEHKLLPRFRGLGTVEPRFVEPAQRLVPARVLDVQVKPRTRSMNRFDIEVEGNHNYFVDGVMVHN

SEQ ID NO: 199 - protein, 421 aa, Mycobacterium flavescens Fla0
  Mfl GyrA intein
CVTGDALVRLPFGQSVRLRDVVAGARSSSDNAIDLKVLNRHGDPVVADKLFHSGEHETYTVRTAEGYEVTGTANHPLLCLVDVGGVPTLLWKLTEEIRPGDHVVLQRTPPTEFGPADWQDAFEALHLGAFISEGFVSENRAGFNNLDREFFNAVLTAYDTIVGGPRYVSSRTIASDSLLHELDVHNLTALKKSRLGELVGQRSADKAVPEWLWKAPAVVKRVFLQALFEGDGSCSALPRNTIQVSYSTRSGRLAKDIQQMLLEFGVISRRYVHATGEHKVVLTSRAQAELFAAQIGFGGIKQAKLQGLLDALPQAAAGRDGDYVPGLAQFVRKHSGSRWVDKDWLNRHNIDRLSRWQRDGAEILGRIADPDVRAIAQELTDGRFYYARVASVTDSGVQPVYSLRVDTDDHSFITNGFVSHN

SEQ ID NO: 200 - protein, 364 aa, Mycobacterium flavescens, ATCC14474
  Mfl-ATCC14474 RecA intein
CFNYSTRVQLADRTTEKIGKIVTQKMDVEVLSYDPDTDRVVPRKVVNWFNNGPAEQFLQFTVEKSGGNGKSQFAATPNHLIRTPGGWTEAGDLIAGDRVMATEPHRLSDQQFQVVLGSLMGDGNLSPNRRDRNGVRFRMGHGAKQVDYLRWKTELLGNIKHSTRVNDKGATFVDFTPLPELAELQRAVYLGDGKKFLSEEYLKALTPLALAIWYMDDGAFTVRSKGLQERTAGGSGRIEICVEAMSEGTRVRLRDYLHDTHGLEVRLRQSGKAGKAVLVFSTASSAKFQELVAPYMAPSMEYKLLPRFRGQSTVSPQFVESTQRLVPARILDVHVKPHTRSMNRFDIEVEGNHNYFVDGVMVHN

SEQ ID NO: 201 - protein, 420 aa, Mycobacterium gastri
  Mga GyrA intein
CTTGDTLVRLPFGQSMRIADVVPGASPNSDNAVELKVLDRHGNPVVADHLFHSGDHQTYTVRTAEGYEVTGTANHPLLCLVDVGGVPTLLWKLIGEIHANDYVALQRTPPMELGPADWHGTMEALLLGAFISEGYVSETRTGFANLDRDYFTTAAGAYDGVVGGKRYVYQQTIGSGSPQHTLYTQKVTALKQSRLWQMVGVRSADKYVPEWMWHSPAAVKRTFLRALFEGGGSCSRLPRKTIQISYTTISKQLAMDVQQMLLEFGVISRRYLHAVGEYKVVITNRAQAELFATQIGFGGAKQTKLTKILASMPPCAGRDSDHVPGLALFIRRHCGSRWVDKEWLHKHNIDRLSRWRRDGAEILSHIADPDVRTIATELTDGRFYYARVASVTDAGVQPVYSLRVDTDDHAFLTNGFVSHN

SEQ ID NO: 202 - protein, 368 aa, Mycobacterium gastri
  Mga RecA intein
CGSWYTNVTLADGSTEKLGKIVNQKMDVEVLSYDFESGQIVPRRVTNWFNNGKAEEFLHFKVDRAGSGTGRGHASLAMTRNHLIRTPVGWREAEDINVGDRVMLAQPRLLSDQQWEIVLGSLMGDGCLSPPVRQDSESARLRIGHGAQQSAYFDWKVSLLANIPHSRTVNGKGAAFVDFSPLAELHELRSAVYLGDGKKFLSEEYLKGLTPLSLAIWYMDDGSFSLRSKGLQQRTQGGSGRIEICVEAMSEGSQVRLRDYLHDTHGLDVRLRKAGAAAKAVLVFSTAATAKFQQLVAPYMAPCMAYKLLPRFHGRSMVTPQFVEPIMELMPARVTEIESKTDYPIMSRFDIEVEGSHNYFADGVMVHN

SEQ ID NO: 203 - protein, 378 aa, Mycobacterium gastri
  Mga SufB (Mga Pps1) intein
CLAGDTLVWTANRGQVPIKEIEFGDRVFSYDESAERFVVAPVKASAQTDTRLTYEVKTTRRSVRATDNHPMLVLRDERKEGRQRARYARRWVTVGQIKPGDFIAVPRAVPNFGVAEQLPSVAGLTTPATSSADLMWLLGLYVGDGNLHLSTKTYRVQFAIPATDRELRAELTRVIKDLFGLRCIEADEYRVVVNSKALTEWIAALGFGGLSLTKRVPDWVYGLPVDQRLAFLGGWVDADGYVSPDKSGSILLTCANQALIGQARELAELAGLRAGGPWSFTQPYRHAPDRMQIAWRLGISGDFERLGCRNPKRTDRFGRRRYMHSSSGAHGTTIRAHCNDWLGFERVKAVEPYAVEPVYDIEVDGPHNFVAEGLVVHN

SEQ ID NO: 204 - protein, 165 aa, Methanospirillum hungateii JF-1
  Mhu Pol-II intein
CFHGDTLIEIYADGILEEIPIRRFVLEHLDLSQAGVDALGTFYADPVRPAHVRSVDTGGIPHLRKITSVSVHKAPANLIQFSTSRGKNLLVTPDHAMLVWDVSYLRKIRALEVKIGDAVPVWESGVVISDRIVSIDYVPCEDERVYCLTVDRDHNVVGNGIFTGQ

SEQ ID NO: 205 - protein, 499 aa, Methanococcus jannaschii (Methanocaldococcus jannaschii DSM 2661)
  Mja GF-6P intein
CLHPDTYVILPDGRMKKISEIDEDEVLSVNFEDLKLYNKKIKKFKHKAPKILYKIKTAFSELITTGEHKLFVVENGKIVEKCVKDLNGSELIGVVRKLNYSFNDNVEFKDVYVERHYKLDETIRNKLRKVREKLGLTRKDVEKLCGVKEIYIVKIETGKLESIEEERLKKLCSLYGINFEEIIYRDNLHYTNPVKFPKTPTPELMQIIGYIIGDGHFPSNRMLRLKDERKEVLEEYNQLFKTVFNLEGNIKKGDGNYYILEINSKYLIDWFRENIPELFNKTGNERTPEFVFRLNNDLVASYLRGIFDAEGYIRAEAKQIGIGMTSKCFIKEIQFLLLRFGILASYSKIKRKEENWNNTHKLLISDKKSFELFKKYIGFTAKDKMEKLEAILNKMKGLNFRYISIPLTKKEIREFVGVPLKTIKNGDNYCTDYTIEKIIEELNSKGLYDKAEYLKRFLDADIVWTKFKIEEVESDVEYVYDLEVEDYHNFIGNLIINHN

SEQ ID NO: 206 - protein, 501 aa, Methanococcus jannaschii (Methanocaldococcus jannaschii DSM 2661)
  Mja Helicase intein
CLNANTEILQESGFRKITELNKDEKVFALCGKEIKPVDGWKVHKTPQHEYNIVVKTVNGLEITTTPNHIFLVKENGSLKEKEAKDLKVGDYVATVDRIRVKEKDIDLSNGDLYFIGYFIGDGYTGVIEKNTLKATPDLAFNPKYPPNFDDSELHKKYFLKCRISKGVAHYIYSKKLRKIFNKLNMLTKDNKNIDAFCNLPLDKLAYLIAGLFDSDGYIYLNRKNIEFYSISEKLVEQLQFVLLRFGIHSSIRKKKTKTMVSPTNGKEYKCKDIYVLTIRDFMSIKRFYENIPLRHEEKRRKLEEIIKNKEIGQIPSEFVALRFTPIAKIWCDCGFSVDLTMFKPRTKRQRELNKKRVKLLFELLDGKKLITNYKEYYSKRKNPYFDFIVREKINGNNYYSLNEKGRVLMSLLNKHIKDKENLEEMYNFLVNLEKCPICGKPIHKEMRYSWKKECYDGDIYWDRIKEIKKIKVNDKYAYDIELPDDGSNSHYIVANGFIVHN

SEQ ID NO: 207 - protein, 392 aa, Methanococcus jannaschii (Methanocaldococcus jannaschii DSM 2661)
  Mja Hyp-1 intein
CVPPDTLLILENGFKRIVDIKVGDKVLTHENRFKKVEKVYKRRYIGDIIKIKVRYFPEEIILTPEHPVYAIKTEKRCDGSHGICKFNCLTQYTNPSCKKRYRKYKREWIIAKDLKVGDVIVYPIPNRVRDIKYLSLDKYLSNIKREFCRSRIPEKIEVSEEFCRLVGYFLSEGYCFRDGIGFALGENEKKIIDDIEYLMKKIFNLKPKIRDDGRSEGIELKYYSRVLRDFFGDMFYCGDEKRAWNKALPNEFLYLPKNKQLQIFIGWWRGDKGVTTSEILMNQLRLISLRLGFIITFSKHVPKNPKIGDREVIKYHARWQGRVSILDEKIVDELKNEDIKLPKKDVRYGWIKGNYLYAPIIRIGREYYDGFVYNLEVEDDSSYVTVSGTLHN

SEQ ID NO: 208 - protein, 546 aa, Methanococcus jannaschii (Methanocaldococcus jannaschii DSM 2661)
  Mja IF2 intein
CLMPHEKVLTEYGEIKIEDLFKIGKEIVEKDELKEIRKLNIKVHTLNENGEIKIINAPYVWKLKHKGKMIKVKLKNWHSITTTPEHPFLTNNGWIKAENIKKGMYVAIPRKIYGNEDFEKFIEFINSKILTNELIVKVNEKDLKNVELPSTKIYKKQKNVFRSEDIIEHNLNIEKISFSPRIHRCGKPQHYIKLPKSLNEWKAIFYFAGVMFGDGCVDRIANNDEEVFNKLKSLNNLGIEVERIKRKSSYEIIFKNGKNALINLLKILFDYPSEKKSHNIKIPQILYIAPKELVAEFIKGYFDADGYVNLRQNRIEVISASKEFIEGLSILLLRFEITSKIYEIKKSYKETKKKYYQLNIVGKRNLKNFKNIGFSIKYKEENLNKIIEKSRKSEKYPINKDMKRLRILFGMTRNEVNVSYYAKYENGKEIPSYEIVKKFLNSLKPKNLDKKIKVLEGKERDVNYLKAFESDGLIENGRLTKLGREALNIWKNHEFGKENIDYMKSLIENIAFVEVEDVEIIDYDGYVYDLTTETHNFIANGIVVHN

SEQ ID NO: 209 - protein, 168 aa, Methanococcus jannaschii (Methanocaldococcus jannaschii DSM 2661)
  Mja Klba intein
ALAYDEPIYLSDGNIINIGEFVDKFFKKYKNSIKKEDNGFGWIDIGNENIYIKSFNKLSLIIEDKRILRVWRKKYSGKLIKITTKNRREITLTHDHPVYISKTGEVLEINAEMVKVGDYIYIPKNNTINLDEVIKVETVDYNGHIYDLTVEDNHTYIAGKNEGFAVSN

SEQ ID NO: 210 - protein, 412 aa, Methanococcus jannaschii (Methanocaldococcus jannaschii DSM 2661)
  Mja PEP intein
CIEGDAKILTDRGFLKMKEVYKLVKNGEKLKVLGLNAETLKTEWKEIIDAQKREARRYEIGVYRKNKNTKDTIKITPDHKFPVFVNGELSKVQLCDIIDNNLSVLSIDYIPMIEEKYESLAEVMYLGGAVLSDGHIVRRNGKPIRVRFTQKDTEEKKDFIEKVKGDVKLIGGNFIEISNRNNVIEYQTSRKIPSEILGFIEVNINTIPLYATKDEIADLIAGFVDGDGCLSGKRRVEIYQNSSHIKKIEGLIVGLYRLGIIPRLRYKRSSTATIYFNNNLETILQRTRRIKLDKLKEFKKPVEDKKLIDISQILPELKEFDYKGYLYKTYKEKLFIGINKLEEYLSKIDKDGIERIKQKIKLLKESDIYSIRIKKVGEDYGEVYNITVKAENEFNHNYVVWTKHYTPIVVFN

SEQ ID NO: 211 - protein, 369 aa, Methanococcus jannaschii (Methanocaldococcus jannaschii DSM 2661)
  Mja Pol-1 intein
CHPKGTKVVVKGKGIVNIEDVKEGNYVLGIDGWQKVKKVWKYEYEGELINVNGLKCTPNHKIPLRYKIKHKKINKNDYLVRDIYAKSLLTKFKGEGKLILCKDFETIGNYEKYINDMDEDFILKSELIGILLAEGHLLRRDIEYFDSSRGKKRISHQYRVEITVNEDEKDFIEKIKYIFKKLFNYELYVRRKKGTKAITLGCAKKDIYLKIEEILKNKEKYLPNAILRGFFEGDGYVNTVRRAVVVNQGTNNYDKIKFIASLLDRLGIKYSFYTYSYEERGKKLKRYVIEIFSKGDLIKFSILISFISRRKNNLLNEIIRQKTLYKIGDYGFYDLDDVCVSLESYKGEVYDLTLEGRPYYFANGILTHN

SEQ ID NO: 212 - protein, 476 aa, Methanococcus jannaschii (Methanocaldococcus jannaschii DSM 2661)
  Mja Pol-2 intein
SILPDEYLTIIEEDGIKVVKIGEYIDDLMRKHKDKIKFSGISEILETKNLKTFSFDKITKKCEIKKVKALIRHPYFGKAYKIKLRSGRTIKVTRGHSLFKYENGKIVEVKGDDVRFGDLIVVPKKLTCVDKEVVINIPKRLINADEEEIKDLVITKHKDKAFFVKLKKTLEDIENNKLKVIFDDCILYLKELGLIDYNIIKKINKVDIKILDEEKFKAYKKYFDTVIEHGNFKKGRCNIQYIKIKDYIANIPDKEFEDCEIGAYSGKINALLKLDEKLAKFLGFFVTRGRLKKQKLKGETVYEISVYKSLPEYQKEIAETFKEVFGAGSMVKDKVTMDNKIVYLVLKYIFKCGDKDKKHIPEELFLASESVIKSFLDGFLKAKKNSHKGTSTFMAKDEKYLNQLMILFNLVGIPTRFTPVKNKGYKLTLNPKYGTVKDLMLDEVKEIEAFEYSGYVYDLSVEDNENFLVNNIYAHN

SEQ ID NO: 213 - protein, 494 aa, Methanococcus jannaschii (Methanocaldococcus jannaschii DSM 2661)
  Mja r-Gyr intein
CLTPDTYVVLGDGRIETIEDIVNAKERNVLSLDLDNLSIKIDTAIKFWKLRYNGNLSKITLSNNYELKATPDHCLLVLRDNQLKWIPAKDIKENDYIAMPFNYKVERKPISLLNLLKYLDITDVLIEFDENSTIFEKIAEYIRNNIKTSTKYKYLRNRRVPLKYLIEWNFDLDEIEKEAKYIYKSVAGTKKIPLFKLDERFWYFAGLVLGDGSIQDSKIRIAQTPLKDVKSILDETFPFLHNWISGNQVIISNPIIAEILEKLGMRNGKLNGIIFSLPESYINALIAGYFDTDGCFSLLYDKKAKKHNLRMVLTSKRRDVLEKIGIYLNSIGILNTLHKSREVYSLIISNKSLETFKEKIAKYLKIRKEAFINGYKTYKKEHEERFECDLLPVKEVFKKLTFEKGRKEILKDSKIHIENWYKEKTNNIPREKLKTVLRYANNSEHKEFLEKIVNGDISFVRVKKVENIPYDGYVYDLSIKHNQNFISNGVISHN

SEQ ID NO: 214 - protein, 548 aa, Methanococcus jannaschii (Methanocaldococcus jannaschii DSM 2661)
  Mja RFC-1 intein
CLTGDTKVIVNGEIREIGEVIEEISNGKFGVTLTNNLKVLGIDEDGKIREFDVQYVYKDKTNTLIKIKTKMGRELKVTTYHPLLINHKNGEIKWEKAENLKVGDKLATPRYILFNESDYNEELAEWLGYFIGDGHADKESNKITFTNGDEKLRKRFAELTEKLFKDAKIKERIHKDRTPDIYVNSKEAVEFIDKLGLRGKKADKVRIPKEIMRSDALRAFLRAYFDCDGGIEKHSIVLSTASKEMAEDLVYALLRFGIIAKLREKVNKNNNKVYYHIVISNSSNLRTFLDNIGFSQERKLKKLLEIIKDENPNLDVITIDKEKIRYIRDRLKVKLTRDIEKDNWSYNKCRKITQELLKEIYYRLEELKEIEKALEENILIDWDEVAERRKEIAEKTGIRSDRILEYIRGKRKPSLKNYIKIANTLGKNIEKIIDAMRIFAKKYSSYAEIGKMLNMWNSSIKIYLESNTQEIEKLEEIRKTELKLVKEILNDEKLIDSIGYVLFLASNEIYWDEIVEIEQLNGEFTIYDLHVPRYHNFIGGNLPTILHN

SEQ ID NO: 215 - protein, 436 aa, Methanococcus jannaschii (Methanocaldococcus jannaschii DSM 2661)
  Mja RFC-2 intein
SVSKDTPILVKIDGKVKRTTFEELDKIYFETNDENEMYKKVDNLEVLTVDENFRVRWRKVSTIIRHKVDKILRIKFEGGYIELTGNHSIMMLDENGLVAKKASDIKVGDCFLSFVANIEGEKDRLDLKEFEPKDITSRVKIINDFDIDEDTAWMLGLYVAEGAVGFKGKTSGQVIYTLGSHEHDLINKLNDIVDKKGFSKYENFTGSGFDRKRLSAKQIRILNTQLARFVEENFYDGNGRRARNKRIPDIIFELKENLRVEFLKGLADGDSSGNWREVVRISSKSDNLLIDTVWLARISGIESSIFENEARLIWKGGMKWKKSNLLPAEPIIKMIKKLENKINGNWRYILRHQLYEGKKRVSKDKIKQILEMVNVEKLSDKEKEVYDLLKKLSKTELYALVVKEIEIIDYNDFVYDVSVPNNEMFFAGNVPILLHN

SEQ ID NO: 216 - protein, 543 aa, Methanococcus jannaschii (Methanocaldococcus jannaschii DSM 2661)
  Mja RFC-3 intein
CLTGDAKITLPDEREIKIEDFIKMFEERKLKHVLNRNGEDLVLAGVKFNSKIVNHKVYRLVLESGREIEATGDHKFLTRDGWKEVYELKEDDEVLVYPALEGVGFEVDERRIIGLNEFYEFLTNYEIKLGYKPLGKAKSYKELITRDKEKILSRVLELSDKYSKSEIRRKIEEEFGIKISLTTIKNLINGKIDGFALKYVRKIKELGWDEITYDDEKAGIFARLLGFIIGDGHLSKSKEGRILITATINELEGIKKDLEKLGIKASNIIEKDIEHKLDGREIKGKTSFIYINNKAFYLLLNFWGVEIGNKTINGYNIPKWIKYGNKFVKREFLRGLFGADGTKPYIKKYNINGIKLGIRVENISKDKTLEFFEEVKKMLEEFEVESYIKVSKIDNKNLTELIVKANNKNYLKYLSRISYAYEKDNFARLVGEYLRIKEAYKDIILKEIAENALKEADGEKSLRELARKYNVPVDFIINQLKGKDIGLPRNFMTFEEFLKEKVVDGKYVSERIIKKECIGYRDVYDITCHKDPSFIANGFVSHN

SEQ ID NO: 217 - protein, 453 aa, Methanococcus jannaschii (Methanocaldococcus jannaschii DSM 2661)
  Mja RNR-1 intein
SLGRDELIFIKEGDKLKVCKIGEAIDEFMEKYKDKIIVDGDTEILYLDGIAEVYTISVNVKTGKAEFKRVYAISRHKPRGKVYKVIGKDGTSIIVTEDHSLFNYDENGNLVCVKPRQMKHIIRNFNNPYDVEYRIGDYIETNYQRTDSKYNSRQNDIPEKLKITKELCQFLGLFVAEGSYITNGISITTKDDDIAKFIERFVKEQINENIAVKRYEDSVRFVNKGFYRFLKEHINGKAINKNSPEFILKGDKEMKLAFLGGLISGDGYVSKDGRVQIYTTSEQLLGQLHLLLSDLGMIYSITKIKEEGEKIEIKRNEIVRNYKLYVIEIAKNCTEDLKPYVIPKYKKERIKPANYDQLPYDYRIIKEHLRKITDKKPYNDYAWKSNNRKLKLNTLEKIEQLNPHLREEINKFKLNIPFEIKEIKEIDYNGYVYDLSVEDNENFITATGILCHN

SEQ ID NO: 218 - protein, 533 aa, Methanococcus jannaschii (Methanocaldococcus jannaschii DSM 2661)
  Mja RNR-2 intein
SLPYDEKILIFENNEYKLVKIGEFVEKYLNRYKDRAITYGDNNIEVYIKDENIYAPSFDKDGKIVLKPITHAIRHRGKEIYEIELESGKKVRVTGDHSVFTINDNLDVVEVKASDLKVGDFIITPKIIPSISKDKIYLSEIVKNKDKYYVKIKDHIKFIEEHEEILKESYKEYKTKWKDLKPVLKKKNAFRLDLIEDLVDKEKIEKISYGHANYINNKIKLDEKFGYLIGAFLSEGHWNDKCVEISSTNKEFIENLVEIIEEILGKDAYYITVKGDKRRYKDLYVIGLNKTVAMIFESLGLNKLSSNKEIPSILLSNETFLKGLIKGYIDGDGSIYVDESKRDYSIRLYTTSETLRDTLCLALKILGINYRLSIDKKSKVNENWRDCYVIKITGKENIEKLLDVEIKNNGGKDVIPKIAEKFKEIINQYSQREWKERFGIDVNNLHIWEDLKKGYMSRYRAKKVLNIMKNVKEIEEKYGRLLDKIGQLIDNDLLFERIKSIRVLDEIPEYVYDISVEGTENFIGGEGFICLHN

SEQ ID NO: 219 - protein, 452 aa, Methanococcus jannaschii (Methanocaldococcus jannaschii DSM 2661)
  Mja rPol A' intein
CVDGDTTVLLDGKLIKIKDLEDKWKDVKVLTSDDLNPKLTSLSKYWKLNADEYGKKIYKIKTELGREIIATEDHPFYTTNGRKRCGELKVGDEVIIYPNDFPMFEDDNRVIVDEEKIKKVINNIGGTYKNKIINELKDRKLIPLTYNDQKASILARIVGHVMGDGSLIINNKNSRVVFRGDIEDLKTIKEDLKELGYDGEEIKLHEGETEITDYNGKKRIIKGKGYSFEVRKKSLCILLKALGCVGGDKTKKMYGIPNWIKTAPKYIKKEFLSAYFGSELTTPKIRNHGTSFKELSFKIAKIEEIFDEDRFIKDIKEMLKEFGIELKVRVEEGNLRKDGYKTKVYVASIYNHKEFFGRIGYTYANKKETLARYAYEYLLTKEKYLKDRNIKKLENNTKFITFDKFIKEKCLKNGFVKEKIVSIEETKVDYVYDITTISETHNFIANGFLTGN

SEQ ID NO: 220 - protein, 488 aa, Methanococcus jannaschii (Methanocaldococcus jannaschii DSM 2661)
  Mja RtcB (Mja Hyp-2) intein
CLTSNSKILTDDGYYIKLEKLKEKLDLHIKIYNTEEGEKSSNILFVSERYADEKIIRIKTESGRVLEGSKDHPVLTLNGYVPMGMLKEGDDVIVYPYEGVEYEEPSDEIILDEDDFAEYDKQIIKYLKDRGLLPLRMDNKNIGIIARLLGFAFGDGSIVKENGDRERLYVAFYGKRETLIKIREDLEKLGIKASRIYSRKREVEIRNAYGDEYTSLCEDNSIKITSKAFALFMHKLGMPIGKKTEQIYKIPEWIKKAPKWVKRNFLAGLFGADGSRAVFKNYTPLPINLTMSKSEELKENILEFLNEIKLLLAEFDIESMIYEIKSLDGRVSYRLAIVGEESIKNFLGRINYEYSGEKKVIGLLAYEYLRRKDIAKEIRKKCIKRAKELYKKGVTVSEMLKMDEFRNEFISKRLIERAVYENLDEDDVRISTKFPKFEEFIEKYGVIGGFVIDKIKEIEEISYDSKLYDVGIVSKEHNFIANSIVVHN

SEQ ID NO: 221 - protein, 335 aa, Methanococcus jannaschii (Methanocaldococcus jannaschii DSM 2661)
  Mja TFIIB intein
SVDYNEPIIIKENGEIKVVKIGELIDKIIENSENIRREGILEIAKCKGIEVIAFNSNYKFKFMPVSEVSRHPVSEMFEIVVEGNKKVRVTRSHSVFTIRDNEVVPIRVDELKVGDILVLAKELPNIEEDIEIDKKFSKILGYIIAEGYYDDKKIVLSYDYNEKEFINETIDYFKSLNSDITIYSKDLNIQIEVKNKKIINLLKKLRVKNKRIPSIIFKSPYEIKKSFIDGIFNGKDAKVFVSKELAEDVIFLLLQIKENATINKKSINDIEVYEVRRITNIYTNRKLEKLINSDFIFLKIKEINKVEPTSGYAYDLTVPNAENFVAGFGGFVLHN

SEQ ID NO: 222 - protein, 454 aa, Methanococcus jannaschii (Methanocaldococcus jannaschii DSM 2661)
  Mja UDP GD intein
CFHPDEVLFIDRGRGLECITFKELFELEDKDNVKILSFDGEKLSLKKLKLASKRYYNDDLITLRFNLGREIKITKDHPVVILEDGELKIKLTSDVKEGDKVILPYGNFGEEREIEIDILEELSKTDLIEKVWIHNKDLATNEFNIIKPYLSNKYPHDVKRNGTIRAKDILPIKEILDKYGSKNRLFTAKSKSTTIPYKIKIDKDFARLIGYYLSEGWISKDYGRNGVVRKRIGLCFGIHEEEYINDVKNILNKLGIKYIEKIKDGSHSILISSKILAYVFENILNCGINCYNKNIPPQMFNAKEEIKWEFLKGLFRGDGGIVRLNNNKNLNIEFATVSKKMAHSLLILLQLLGIVASVKKCYNNKSTTMAYIIRINGLEQVKKIGELFGKKWENYKDIAESYKRNIEPLGYKKSDNFAILEVKEIIKEHYSGYVYSVETENSLLITSYGILIHN

SEQ ID NO: 223 - protein, 394 aa, Methanopyrus kandleri AV19
  Mka CDC48 intein
SIPGDEVVWAKVDGEAKLIPIEDLYELWKEGRDVEVAALTEEGVVWSSVDRVARHRRRTGLVKIITRTGREVIVTEDHSVFTVRDGKIVDVPTSELSEGDWIVLPARLPAGDSDEIDGIKIDEDLAFLLGLYVAEGSLTNQKDAVRIHNKDPEVIEEIDRIVREKGWEGRYYESDHSYWIKSRKLRQLCEKLGTKAREKRLGPLLSLKPELLAAALRGYYTGDGSFSVKPHGRSAIIEATTVSKRLADELLVALQILDIVARRYECDDTKGSTRYRVMITKSEYIRTFVEKVGFAQSEKNERIRKFLAERKWTRGRSDIPTELIGSPYTYVEVEYISDRVAADGGLMKAELEHLYFDKIKEIVPLDRDDEYVYDVVEVKLGHNFVGGQGVLLHN

SEQ ID NO: 224 - protein, 305 aa, Methanopyrus kandleri AV19
  Mka RFC intein
SVSADTPILVRRGGEVLRVTFEDLDSWYFGDRGGEYVDVSDLEVLTVDRNFRVTWARVSKLIRHRARKILRVHLEDGTIELTGNHAVMVLDEGGLRAVKASEIEEGSFLLSFVAELDEQPTDGGTVVTSVGSGSRVSDTTYELPVEVRVELLRELADDGVIEASEDVSVDLAWLARISGVESRVTDDGVELVWETRTGDLLPADPVLKLVERLESDLVDDLESWVFDGRVSKEAVRKVLSSVDAKNLRGDARRAYRMLRTLVRSDVHAVKVEDLDVMDYDGYVYDVSVPGNEMFFAGEVPVLLHN

SEQ ID NO: 225 - protein, 482 aa, Methanopyrus kandleri AV19
  Mka RtcB intein
CLAPGTKILTEHGCWVKVEDLPKMLTDQKLKVYDVDEGREDDSEIKFVMERGIEEDERAVVLVTESGLTIEGSEDHPVLTPEGYVELGEIEEGDLVVVYPFEGVEYEEKEGTILDESDFEDVDPQVLRYLEERDLIPLRWSDPKVGTLARILGFAMGDGHLGEQAGRLTLSFYGDERTLRELKRDLESLGVKANLHVRKRRYEIETASGRYEGEATSVELRVASRSFALLMEKLGMPRGRKVETPYKVPDWIKEAPLWVKRNFLAGLFAADGSVVKFKRYTPLPINLTQAKVEELEENLREFMNDVAKLLREFGIETTLYEVKSKKNVVYKLAIVGEENIKRFLGKVGYEYDPEKKVEGLAAYAYLKLKERVKKDRKEAAETAAEVYEETGSITKAHEAVADVVNRRFVERVVYDGGISSVRVPEDFPTFERFKEERVLAGGFVIEEVVEVKGVEPEYDRFYDIGVCHGAHNFIADGVVVHN

SEQ ID NO: 226 - protein, 517 aa, Methanopyrus kandleri AV19
  Mka VatB intein
CFAPGTRVITASGDVVEIDEIVERAAETAVDGGLREGSTEVTVGVTNVRTLAAWDGDLTSNDVVAVEKIEAPSRAVRVRTRSGAELVVSEDHKFLVDTEDGPRMVEASELKSGDELYSVRELRVSEKVPTYLELLLEAEDKFYVHPTEEFEEAVAERYGSLAEACREKELPYRAREAKERRYYELSEFARLATAVIESVDEATEYIDYVTAGGRKRVKFSSPRPGKEVMYVAGLIASDGSVDTERGFVMFSNTERELLSAFEEIVTEEFGVDASKTENQNGVTMLRVNSRVLARVFERLADPKTVLKMPRELVAAYLAGYVDGDGHLKDGKIVITTADRERAGDLQLLLKRLGVPSVLRERDGAYDVVVTGHDAAELAEELPLRHPKKAEAAASMSSGRRSSRFDRVSRRFGRLLREVRRKYGVRASDLGSSSTISQIESGERRATRRLALEIVERLEEVVGDVEEVRELRELAEGNYVLDEVVEVETVEYEHEYLYDVTVVPDHTLVVENGIITSN

SEQ ID NO: 227 - protein, 420 aa, Mycobacterium kansasii
  Mkas GyrA intein
CVTGDALVRLPFGQSMRIADVVPGARPNSDNAVELKVLDRHGNPVAADRLFHSGDHQTYMVRTAEGYEVTGTANHPLLCLVDVGGVPTLLWKLIEEIHPDDYVALQRTPPMELGPADWHDTMEALLLGAFISEGCVSETRAGFANLDRDYFTMVARAYDAVVGDKRDVYQQTIASGSLQHTLYTQNVTALKQSRLWQILGMRSADTYVPEWMWHSPAAVKRVFLQALFEGDGSCSRRPHNTIQISYNTVSKQLAMDVQQMLLEFGVISRRYLHAAGEYKVVITDRAQAELFPKQIGFGGAKQTELSKILAAMPPCAGRDSDHVPGLARFIRRHCDSRWVDKEWLHKHNIDHLSRWRRDGAEILSHIADPDVRTIATDLTDGRFYYARVASVTDTGVQPVYSLRVDTDDHAFLTNGFVSHN

SEQ ID NO: 228 - protein, 145 aa, Mycobacterium leprae, strain TN
  Mle DnaB intein
ALALDTPLPTPTGWTAMGDVAVGDELLAVDEAPTRVVAATEVMLGRPCYEIEFSDGTVIVADAQHQWPTSYGIRTSAQLRCGLDIIAAAGSTPRHAGRLTTAAFMAPVLCIDSVRRVRSVPVRCVEVDNAAHLYLAGRGMVPTHN

SEQ ID NO: 229 - protein, 365 aa, Mycobacterium leprae, strain TN
  Mle RecA intein
CMNYSTRVTLADGSTEKIGKIVNNKMDVRVLSYDPVTDRIVPRKVVNWFNNGPAEQFLQFTVEKSGSNGKSQFAATPNHLIRTPGGWTEAGNLIAGDRVLAVEPHMLSDQQFQVVLGSLMGDGNLSPNLCDRNGVRFRLLGYGCKQVEYLQWKKALMGNIRHTVRENSMGASFIDFTPLPELVELQRAVYLGDGKKFLSEEYLKALTPLVLAIWYMDDGSFTVGSKRVQERTAGGSGRIEICVDAMTEGTRVRLRDYLCDTHGLDVRLREVGSAGKAVLVFSTAATAKFQSLIAPYVAPSMEYKLLPQFRGRGSVTPQFVEPTQQLVPARVLDVHVKLSTRSMNRFDIEVEGNHNYFVDGVMVHN

SEQ ID NO: 230 - protein, 325 aa, Bacteriophage Aaphi23
  MP-Aaphi23 MupF intein
CFPGQSELKGLPRPEKLYRRWYSGKLTELVTDNGTVLLATPNHPILTSNGIKSIDSVNVGDYLACEIKQTFDTVKLNGKNLIPTIEQVFNSLLLNGVRTSISSSKSGKFHGDFSDSEIEIISIDSFLIDVLNALFIKKLPELGFTNADMVICKALFSTDSHFDLLKCASGSTGSSFMSRFNLLCSLLVAHLTPLELFCLGLGANIGIIGKQIPANNISRDVEMFSNHIFACAALIHGKDFINWQRDRIMSLVAPNFGHRYTDSFETLSKRLLVTTNNSANFGNAQSLGIEFRRVVNKVVTQASCHIYNLQTVSGYYNINSVFVSN

SEQ ID NO: 231 - protein, 341 aa, Mycobacteriophage Bethlehem
  MP-Be DnaB intein
PLALNTEVPTPSGWTTVGDLSVGDYVLGSDGQPHRVQRETPVLEGLATYVVRFDDGTEITASASHGWTTQRLTGHGDSYETVTVTTEELAQTVTNSKGRKRHRIPVVGMELPNQELPLDPWFLGLWLGDGATSDSTVSFDYRLRDEYATLLKPLVQEFQTVVWDNPVPGTNVGTFRIKNNDRTQDDKSIRSLLRKAGVLGNKHIPAAYMQAGTDQRFELLRGLIDSDGGIDSVGRAYFVNANRNLVYQFQELVVGLGFRCTVREHGGDGALRAEFNPGNAVRVSNLAYKFERQRPYSSRNRSQHRWVESVTPVESVPVKCIGIDTEDHLFQVSRSRILTHN

SEQ ID NO: 232 - protein, 317 aa, Mycobacteriophage Bethlehem
  MP-Be gp51 intein
CSWTNARAVTRRGFVHVDDLTTDDEVMSVDDQGRTIWQQIDEVVRFPFSGTLYSLGGREINATITANHRVVGLNREKTKWVEHTPTSLPGNKMWVYTAGEGSNEDYPLTDTEIRLAVWGLTDSHRSPDGRWTFYQSGEKAEQVRKLLADAGIEYRERARNRGITEIDGKVLKAPPKTQYEFSLGKVQELDDLLDRGRSELPTWTLSLSQRQARLFLEEYRFTDGTDTTSAGDSYVLYVCKDRMREQLQMLAAANGLRASTTEYRPGHWRLNISNRALSGLYKNTVEEVAYEGEVWCLRVPNGRFFIEDGGKIHLTGN

SEQ ID NO: 233 - protein, 331 aa, Mycobacteriophage Catera
  MP-Catera gp206 intein
SLACSTPILTTNGWSTMGALQDGDEVYAPDGQPTKVIKAHPINLNRPCFKVRFRDGQEVVTDAEHLWQVNDRNNGGRDRVMTTQEIADAPWGGRYRFRVPVTEPLQTPEADLPVDPWLLGAWLGDGDASMVSICSGSQDLDYLISRVEGLGLSHRVNRYGSRAASVYVHGMRAVFSELGLLKNKHIPDRYLTASVAQRRQLLAGLMDSDGTVSDRQVTISMKNERLMRQVLQLVRSLGYRAGFGSRMARLNGRDCGLVYVVRFHTGWGESPFDMPRKRDGWEQATKTSVQNLRLNAIVAVEPVETVPVRCITVAHESSLYVAGEGFVPTHN

SEQ ID NO: 234 - protein, 331 aa, Mycobacteriophage CJW1
  MP-Mcjw1 DnaB intein
ALDVETPILTGNGWKKMGDIQVGDYVHAADGTLARVSYVSERHWRDCFSVQFADGAELVASDHHLWAVNDRLKGERVIDTAELYRTQTYGARGDRRYTVTVPEALDRDEAPLPLDPYILGAWLGDGTATRAEFTSEDPEIFAAIEAAGYPLSYDYASGNARTRGAKGLVAVLRKMGVLGAKHVPQDYLIGSRAQRLALLQGLMDTDGSVITGPNTPRVEFCNTNRDLAEAALFLARSLGWKATLKESRARLNGKDCGPRFRVSWTAYSDMSPFRLQRKSEKLAAAPARATRARTNTITSVTPVPTVETVCIQIDHPSHVFLAGKSLTPTHN

SEQ ID NO: 235 - protein, 340 aa, Mycobacteriophage Omega
  MP-Omega DnaB intein
ALAIDTPILSERGWTTMGDLVDGDRVYGPDGQLTNVIAHPIRYERPCYRLTFDDGQTIVADEDHLWTVYDAVKREHRTLTVRELVDGGVFTTRRNAGRADSNIYRYRVPVTEPLAGVEADLPVDPYLLGYWLGDGDTNAGRFTVGEEDLEAFKLTLESLGYEYSDSVDPRTGAHTICAYGFIQGLREAGVVGNKHIPETYLTASMEQRRALLAGIMDSDGGVTGHQISVTMKNEALMRQVLMLARSLGYKSFFTSHLSMLNGEHKARVYRVKFANRQELNPFRLPRKAAKVLPPLGRVTRAQYNAIVSIEPVESVPTRCITVDNDSRLYVVGHGFVPTHN

SEQ ID NO: 236 - protein, 317 aa, Mycobacteriophage U2
  MP-U2 gp50 intein
CSWTNARAVTRRGFVHVDDLTTDDEVMSVDDQGRTIWQQIDEVVRFPFSGTLYSLGGREINATITANHRVVGLNREKTKWVEHTPTSLPGNKMWVYTAGEGSNEDCPLTDTEIRLAVWGLTDSHRSPDGRWTFYQSGEKAEQVRKLLADAGIEYRERARNRGITEIDGKVLKAPPKTQYEFSLGKVQELDDLLDRGRSELPTWTLSLSQRQARLFLEEYRFTDGTDTTSAGDSYVLYVCKDRMREQLQMLAAANGLRASTTEYRPGHWRLNISNRALSGLYKNTVEEVAYEGEVWCLRVPNGRFFIEDGGKIHLTGN

SEQ ID NO: 237 - protein, 364 aa, Mycobacterium shimodei
  Msh RecA intein
CMNYSTRVTLADGSTEKIGKIVNNKMDVKVLSYDPDSDRIVPRKIVNWFNNGPAEQFLQFTVEKSGGNGKSQFAATPNHLIRTPAGWTEAGDLNTGDRVLAAEPHLLSDQQFQVVLGSLMGDGNLSPNRRDRNGVRFRLGHGAKQAEYLQWKTALMGNIGHTVRENAKGASFVDFTPLPELAELQRAVYMGDGKKFFSEEYLKALTPLALAIWYMDDGSFTLRSRGLQERTAGGSGRIAICVEAMTEGTRVRLRDYLRDTHGLDVRLRSAGSAGKTVLVFSMAATAKFQELVAPYMAPSMEYKLLPRFRGRSTVRPQFVEPTQRLVPARILDVHVKPHTRSMNRFDIEVEGNHNYFVDGVMVHN

SEQ ID NO: 238 - protein, 322 aa, Mycobacterium species KMS
  Msp-KMS DnaB intein
ALALDTPLPTPDGWTTMGEVEVGDELIGADGRPTRVVAATDVMVGRPCYEVEFSDGTVIVADAQHQWLTDTRASGRSARVAAAVRTTEQIAATLRCPTADRRLNHSVANAAPLQAPTRELLVPPYTLGAWLGDGTSAAAQITTADPELVMRIEAEGVEFGTLQGRLRTIGVLGDKHIPIEYLRASESQRRALLAGLLDTDGTVAVGGGVQFSVTNKRLAADVAELVVSLGYRCRSTTKHVKGRSADSSVAYTLNFSTDDDVFGLARKAILHKERRGASTTVRSDSRFIVDVRPVRSVPVRCVEVSNDSHMYLAGRSMVPTHN

SEQ ID NO: 239 - protein, 421 aa, Mycobacterium species KMS
  Msp-KMS GyrA intein
CVTGDALVRLPLGQSVRIDGVVPGAKPNSDNPIDLKVVDRHGDPVAADRLFHSGEHQTYKVTTTEGYTVTGTENHPLLCLVDVGGVPTLLWKLVEEIRPGDTVVLQRSQPMEFGPADWQETLEALLAGAFISEGFISEKRAGFNNLDRDFFNMVVAAYDAVVGGRRYVSSRTIASGSLLHELDIHNLESLRRSRLGVAVGQRSADKFVPEWIWQSPAAVKRVFLQALFEGDGSCSRLPRNTIQVSYSTRSERLAADVQQMLLEFGIVSRRYRHAVGEYKVALTNRAQAELFARQIGFGGAKQVKLLEILSALPEEAAGLDRDFVPGLARFIRQHSGGRWADKEWLRKHNVDRISRWQRNGAEILGRIADPEVRAVATDLTDGRFYYATVASVADAGVQPVYSLRVDTEDHAFITNGFVSHN

SEQ ID NO: 240 - protein, 322 aa, Mycobacterium species MCS; identical to SEQ ID NO: 238
  Msp-MCS DnaB intein

SEQ ID NO: 241 - protein, 421 aa, Mycobacterium species MCS; identical to SEQ ID NO: 239
  Msp-MCS GyrA intein

SEQ ID NO: 242 - protein, 134 aa, Methanothermobacter thermautotrophicus (Methanobacterium thermoautotrophicum); identical to SEQ ID NO: 2
  Mth RIR1 intein

SEQ ID NO: 243 - protein, 365 aa, Mycobacterium thermoresistibile
  Mthe RecA intein
CFDYSTRAQLADGTTEKIGKIVDNKMDVEVLSYDPDTDRIVPRKVVNWFNNGPAEQLLQFTVEKSGGNGRARFAATPNHLIRTPGGWTEAGDLIAGDRVLAAEPHRLSDQQFQIVLGSLMGDGTLSPDPRGRNGVRFRMGHGADRVDYLEWKTALLGNIKHSTGENAEGARFVDFTPLPELAELRRAVYLGDDGRKFISEEYLKALTPLALAIWYMDDGSLTVRSEGLQQGTAGGSGRIEICVEAMTEGSRIRLRDHLRDTHGLDVRLRQAGAGGKAVLVFSTAATAEFQELVAPYMAPSMEYKLLPRFRGQSRVVPQFVEPTQRLVPARILDVHVEPHTRSMNRYDIEVEGNHNYFVDGVMVHN

SEQ ID NO: 244 - protein, 359 aa, Mycobacterium tuberculosis strains H37Rv & CDC1551; identical to SEQ ID NO: 191
  Mtu SufB (Mtu Pps1) intein

SEQ ID NO: 245 - protein, 416 aa, Mycobacterium tuberculosis, CDC1551; identical to SEQ ID NO: 190
  Mtu-CDC1551 DnaB intein

SEQ ID NO: 246 - protein, 416 aa, Mycobacterium tuberculosis H37Rv
  Mtu-H37Rv DnaB intein
CLTASTRILRADTGAEVAFGELMRSGERPMVWSLDERLRMVARPMINVFPSGRKEVFRLRLASGREVEATGSHPFMKFEGWTPLAQLKVGDRIAAPRRVPEPIDTQRMPESELISLARMIGDGSCLKNQPIRYEPVDEANLAAVTVSAAHSDRAAIRDDYLAARVPSLRPARQRLPRGRCTPIAAWLAGLGLFTKRSHEKCVPEAVFRAPNDQVALFLRHLWSAGGSVRWDPTNGQGRVYYGSTSRRLIDDVAQLLLRVGIFSWITHAPKLGGHDSWRLHIHGAKDQVRFLRHVGVHGAEAVAAQEMLRQLKGPVRNPNLDSAPKKVWAQVRNRLSAKQMMDIQLHEPTMWKHSPSRSRPHRAEARIEDRAIHELARGDAYWDTVVEITSIGDQHVFDGTVSGTHNFVANGISLHN

SEQ ID NO: 247 - protein, 440 aa, Mycobacterium tuberculosis H37Rv,Also CDC1551; identical to SEQ ID NO: 192
  Mtu-H37Rv RecA intein

SEQ ID NO: 248 - protein, 440 aa, Mycobacterium tuberculosis So93/sub_species="Canetti"
  Mtu-So93 RecA intein
CLAEGTRIFDPVTGTTHRIEDVVDGRKPIHVVAAAKDGTLHARPVVSWFDQGTQDVIGLRIAGGAIVWATPDHKVLTEYGWRAAGELRKGDRVAQPRRFDGFGDSAPIPADHARLLGYLIGDGRDGWVGGKTPINFINVQRALIDDVTRIAATLGCAAHPQGRISLAIAHRPGERNGVLDLCRRAGVHGKLAWEKTIPNWFFEPDIAADIVGNLLFGLFESDGWVSREQTGALRVGYTTTSEQLAHQIHWLLLRFGVGSTVRDYDPTQKRPSIVNGRRIQSKRQVFEVRISGMDNVTAFAESVPMWGPRGAALIQAIPEATQGRRRGSQATYLAAEMTDAVLNYLDERGVTAQEAAAMIGVASGDPRGGMKQVLGASRLRRDRVQALADALDDKFLHDMLAEELRYSVIREVLPTRRARTFDLEVEELHTLVAEGVVVHN

SEQ ID NO: 249 - protein, 416 aa, Mycobacterium vanbaalenii PYR-1
  Mvan DnaB intein
ALALDTPLPTPTGWTTMADVAVGDLLIGADGKPTRVVAATEVMVGRPCYEVEFSDGTVIVADAEHQWLTETRASRKSAQAAAVGYNRYKNQRTFAAVRTTREIGETLRCPTADRRLNHSVVNAAPIEAPVADLLLPPYTLGAWLGDGTSRAAQITTADPEILMRIEAEGLVTVPLPGARMRYGLQLPTEAPAGTRECVVCGASFTPSTSQVRTCGRSCGGRARFVSEPVAAPTCSHCGGPSCGLRLCQSCRNAVGTVQGRLRTIGVLGNKHIPTEYLRASEAQRRALLAGLLDTDGTVTNGGAVQFSVTSRRLAADVAELVVSLGYRCQVATKAVKGRTEASSTAYILNFSTTDSVFGLHRKDLSHKERRSKSSVRSNTRFIVDVREIETVPVRCVEVDNDDHMYLASRSMIPTHN

SEQ ID NO: 250 - protein, 425 aa, Nocardia farcinica IFM 10152
  Nfa DnaB intein
CLPASTRILRADTGAESTLGELLASGEQPLVWSLDERMRMVARPMVKVFPSGRKEVFRLRLASGREVEATGNHPFLTVDGWIPLDRLTVGDRLATPRSVPEPVHTERMADAEVVLLAHMIGDGSCVRRQPVRYASIDEQNLAAVSEAAEHFGVTAVRDDYAAARVTTLRLPAPYRLSRGKRNPIAAWLDELGLFGLRSHEKFIPRRVFALPNDQVALFLRHLWATDGSVRWDSTYRQARVYYTSTSRRLIDDVAQLLLRLGVHGRIRRVTKPGYRDAWHLTIDGADNQTVFLRDVGVHGARGDAAQVALAELEPLVRNTNVDTVPNEVWNQVRHLLATKNITHREFSAAMGSRFCGSTMWKRSPSRSRLARVAAVLDDADIEMYATNDVFWDKIVEITSLGEQDVYDGTVPGTHNFVAQSISVHN

SEQ ID NO: 251 - protein, 409 aa, Nocardia farcinica IFM 10152
  Nfa RIR1 intein
CFPAGTPVDTIDGPKPIESLRAGDRVLSHDGSYATVEKLIENTNDQPLVSISHFGHKEPIRCTPEHPILVWTDRDVETLIDGDGADPFNGFVWLAAQDVHPSDFIVATAPLETRERRVFDLMNHVGEGTYEEVDGLIRKVNTDARHRNKQRHRQGFVAVTRYVEESYDLGLILGWYLAEGHVSKRSGVEDVRPTGVHFTLGANEIERHVELGMAFKQVFGVDLVLHTNHSDHSTRMVCNSKIVASLLLSLAGTGYSTKRLAHEVMTADEDFQRGLLVGLFRGDGCTTTGGMVLDLVNQELIDQVQLLLRRLGIVSVVRTYTNQAGNPTGQVFVPGLPGTNEEFIFDVDKNLQNYTGRKGTKRTTYQVVHGRHVYGIRAVERTGETPRQVYNLHVEGTHTYTIRGAVVHN

SEQ ID NO: 252 - protein, 517 aa, Neosartorya fischeri
  Nfi PRP8 intein
CLAKGTRLLRYDGSEIEVQDVKEGDLLLGPDGGPRRAFNIVNGEDRLYRIKIDGSKEDLVVTPNHILVLHREKRATTFESMPSTNAEEPGNGDDDELPEVSAAERYDTVEMTAAEFAALSTEERSRYRVFRCPGFELPEQSVPVNPYFLGLWLGDGNSRSTTIYNSHGETVREFLVNHAAELDMYLTWHGQLGYATVPDTIEHRPVVRQARQTIRKLRLAAKSIAQPEVSEGLMPSQGSTEEPSQASTIKPVHQASMVEQKADLDLLETDSEDEEADSADEDELGDPDASEFRPEPESQLSQSHFSNRRRNHRLRTGRRAYGDLNGDEEDELLHQIVEQSEGSRVDSLPRALDALGVIAQKETGPETDRKHIPSIYMKNSRSVRLAVLAGLIDSDGWYVYPENMLGFAQSERCHSKLFWDVVALARSLGLSVWTKRHMMWNPARTERYPQLFAQISGNVAEVPCLLARKKGVERLIPQTHSFMIKDISLEPETTEWAGFRVDKDQLYLRHDYLVLHN

SEQ ID NO: 253 - protein, 155 aa, Neosartorya glabra FRR2163
  Ngl-FR2163 PRP8 intein
CLAKGTRLLRYDGSEVEVQDVKEGDLLLGPDGGPRRAFNIVSGEDRLYRIKIDGSVEDLVVTPNHILVLHRESAAESYDTVEMTAAEFAALSTEERGRYRAFRSPSFELSEKAVRVNHRFMIKDIRLELETTEWAGFRVDKDQLYLRHDYLVLHN

SEQ ID NO: 254 - protein, 169 aa, Neosartorya glabra FRR1833
  Ngl-FRR1833 PRP8 intein
CLAKGTRLLRYDGSEIEVQDVKEGDLLLGPDGGPRRAFNIVNGEDRLYRIKIDEGIEDLVVTPNHILVLHREKKAGNNEDDGLPEVSAAERYDTVEMTAAEFAALSTEERSRYRAFRCPGFELSEKAVPANHSFTIQDIRLELESTEWAGFRVDKDQLYLRHDYLVLHN

SEQ ID NO: 255 - protein, 339 aa, Natronomonas pharaonis DSM 2160
  Nph CDC21 intein
CVDGDTSVTLASGDEKPIRDIVESTLEDPTEISDGFYQESDIDVLTTDGGAVAPGRATKVWKRQAPEKMYRIRTESGRELEVTPSHPLFVQSEGGLSPLVADDLSENDFVAVPRALPADDGDDFGQHVDDLGSVTARKTADAEAVRSEDAATTPDVIPNVGDQLRRIRTSLRLSQHDCGLPRSTYQQYERGDRNPSRSRLQTVLTAFERRIEQLSSLSDRVDDGDSDAIAAARDELNPSQASLASGMDATRTAIGDDERTEARPDGGAVADAERAVADALCRALAVADDVERLRSLADGDIGWDRIDSIEPVEPEDEWVYDLEVESTHSYLSNDVVSHN

SEQ ID NO: 256 - protein, 401 aa, Natronomonas pharaonis DSM 2160
  Nph PolB-1 intein
CFSGDTDVATPDGIKNIQEVAVGDPVYTLNPETFECEIKPVVDTQSYRNKYGELHHVAGRTHDFKVTENHRFLLSETVDLDSPGPDDYALSEYRELPEYERLAFPNHEPMAGATREEFDLAGAVDDGHAVVCAHDGRSAFRTAMPAGVEAALDRADGTSQLAATEEKTGTYRIPIDTYRERRDVIDEHADEVLLKYEREDNQIPTGFGMDDWLELVGWFVTAGRFAHEAKRIVLRRQDEEGRSAIRSLLERMELPYDADGTRVTVSNRVLYDWFVKNCGDGATETRLPEWVFELDAAHLRTLLETLVDGDGSRTDSGLGEFWTQSDRLKDDVVRLAVRCGEKPTVSENQDGTWYVSVGTRGSMKKSNATVEDHDGDVHCITAEDNHVVLAGRNGHLQWVGQ

SEQ ID NO: 257 - protein, 409 aa, Natronomonas pharaonis DSM 2160
  Nph PolB-2 intein
CFTPDTEVLTPDGVRNIRALDIGDEVYSLDPETMEMEVKPVVDTHAYPDYRGELVDIQTGEIDFRVTPNHRMLVRKNGTNGITDDEYRFVEAGALDLATTYELPHDWAGPDGEDVTQIDLTELIDEEYEVWVRPEVHGRTFTAELGWKPRRVPKADIDTVGYVFTADEFKQHREYIESVCEQSYIRRESGLKWIPRVYDGDDFLELLAWYVTEGNAHTSERKEFDGQRHGSSTVQIAQEPVVADGGDTHATIGTLLDRMGFDYDNDNGSYQVTSKLLGDLFCTLGGGGSEDKRIPQLVFEASRRQKERFMQTLISGDGDRQPNSWQYNTASERLRDDVLRLCAHLGVPASYSEESGVYRIYVTEDGTNTLRMDRSAERTTADDGVYCVTVEDNHTLLAGRAGKFQFVGQ

SEQ ID NO: 258 - protein, 492 aa, Natronomonas pharaonis DSM 2160
  Nph rPol A'' intein
SIPADEQVVVRRNGETELTEIGPLVDSLMDSRETRSFDDHEVTLAPDGIEVPSLSSEETVEWKPIEEVSRHETPDELLRFELESGRSIRATKAHSFVTRQENEVVPVAGEELEAGDWLPVVASLDATDTQETVDLRKYLPAGDYWYTSVLADGGAEAVPGGPDQLRNKRAALEAGELAEHTAYPVQGTVGLPEQFPLDEETGFFVGAWLAEGSLADHYVSISNVDAAFQSRIRSFAERFDLTVNEYENDSGFAAGYDIRLNGTILSDFLRAACTDDGEKSIPGFAIGANEAFLKGLLQGYFSGDGNVGTNAIRSSSTSDRLTAGVGLLLARFDVYATLGQQEDSRTLRVPKKHVSRFDNRIGMVGERGAELEALAESADSDGPDATDQIPNFGDALEAVAEAADIPQRQVNSATKRQRIDRSRLARLVAAAEAELDGEQSELDALRQAVTGDVVWDRIESIETVESDHEYVYDVSVEGLETFTTADGVVTHN

SEQ ID NO: 259 - protein, 322 aa, Nostoc punctiforme
  Npu GyrB intein
CFIGDTLIPLADGKSYRIKDLMDWGTEFIVYACTPTGKIVAAQATAKLTRRNAPLVKVILDNGEEIICTPDHQFMLRDGTYKEAQLLQAETSLMPFYSKTDKDGYTLITQPYSSRWQKAHWIIARSGLLGKVPRFEGQKTFIHHQNFDESDNRPENLEFMGNRDHSAYHRSLVERNQHWHSAEFEEKRVASLAQKAKTSEGYQYYAERGTRNIFQYMEQQPEHFKNAVAGNGNRGKQYLVEYNKTEKGRGKSQEIANRYYTCEICGVDVKTPIGLHNHRRKEHQCNHKVVAVNLLNYTEDVYCLTVPEYHNFALKAGVFVHN

SEQ ID NO: 260 - protein, 169 aa, Neosartorya quadricincta, strain NRRL 4175
  Nqu PRP8 intein
CLAKGTRLLRYDGTEVEVQDVKEGDLLLGPDGGPRRAFNIVNGEDRLYRIKIDEGIEDLVVTPNHILVLHREKKARNNEDDELPEVSAAEPYDTIEMTAAEFAALSAEERGRYRAFRCPGFESPEKAVPVNHSFMIKDIRLELETTEWAGFRVDKDQLYLRHDHLVLHN

SEQ ID NO: 261 - protein, 352 aa, Nocardioides species JS614
  Nsp-JS614 DnaB intein
ALALDTALPTPSGWTTMGDVQVGDQLYDAHGRPTTVVAATEVLTGRPCYEVEFSDGSRIVADAQHQWLTESRAARKSRWAADKQYNRARNQNIVASVVTTEAIAGTLRVGADQRANHAVLTADPLSGSDVDLPIPPYVLGAWLGDGHSASARITCETPEIPMYLEACGLRVDHQGAMLYSLKFPDGDPRGSVQGVLRTIGVLNDKHIPADYLRASEGQRRDLLAGLMDTDGTVVRGVGSCQFAVTNKRLADDVYELVVSLGYKCGRTTRRVQGRSPETSTCHILNFSTVDDVFRLERKHLLHKEERPVTRARIARRYITAVRPIESVPVRCVEVDNTEHLYLAGESMIPTHN

SEQ ID NO: 262 - protein, 312 aa, Nocardioides species JS614
  Nsp-JS614 TOPRIM intein
CLAGETKVLTWDGPRPISELAGGTHRILNVHGDWAEAPLKSYGVQRLWRIVVTRNRERKELFATDGHRWFVPSGRTGSKHREVLTKELKAGDRLVSKFPRSRIQRTTPSPFGIAHGFTYGDGTRSGTGSMALLRPPKDLAMLKWFSNSHTSASGDNLLVHHLPRFFKELPDPDESVSYLYGWLAGYFAADGCVAADGTVILNSARRENLEFVRMVTTRLGIATYGITTQSRVGLGKEHSDLHRVHFVNDDLTESFFLLDEHRRRFAEATKKYARRGWVVQAVEETDRVEEVYCAEVEDGHAFTLEDNILTGN

SEQ ID NO: 263 - protein, 407 aa, Nostoc species PCC7120, (Anabaena sp. PCC7120)
  Nsp-PCC7120 RIR1 intein
CLPEDALVHTAKGLVPIRDVQVGDLVQTPLGFRRVVDKFDQGFQDVYEIETNATYPRATLNHRQAVLEDAKGGIVWKHIASLEAGDRLLHNKQVLPGTVTHLPADFTESRPSHSRTAKSFVVPELTAEVAWLIGFTHGDGYVALGRNKYDKPYGRVEWSMNSLDAEVTSRIQAKIDAALALFGLSAVHSITKGENTAKSICSSIRLAEYFHRHIKQPNIPLTVPSFILQGSVDIRAAYLAGLMDSDGAVNNRPPHLITSVYRSFIRQVSVVLSSLGIAGRLTTTYPQNSNWQVKYNLTIPALKERYNALISPHSAKGELRQGLKMYGFTVPGAVMRETYTYSEMREMGFQGSRTVDANYERYVAEADISLDIPVTVKGLGSYDHVQTYDIEVDEAHCFYCDGYLTHN

SEQ ID NO: 264 - protein, 164 aa, Pyrococcus abyssi
  Pab CDC21-1 intein
CVDYETEVVLGNGERKKIGEIVERAIEEAEKNGKLGRVDDGFYAPIDIEVYSLDLETLKVRKARANIAWKRTAPKKMMLVKTRGGKRIRVTPTHPFFVLEEGKVAMRKARDLEEGNKIATIEGLSVSWDEVAEILEYEPKDPWVYDLQVPGYHNFLANGIFVHN

SEQ ID NO: 265 - protein, 268 aa, Pyrococcus abyssi
  Pab CDC21-2 intein
CVAPETLIITENGTKEIGEVVERWMKELGEIEYDDGISYSPAFEKVASLNGGKVKMLPVRRVWKLRSPGKMIKIRSESGKQITVTPETKLLTIIDGSLEWVEARKLKKGNYVAVVNKERSIVPIGDFLAKLLKFYGVELNLNEAVERDQARKLLETLKSKGLSDVTIEIPEKLRRFIKCDRVRYVDLVEMLSSMEGELKEEVMLLLSDVGDIHEVIQERLKEIGKILESDASWERIAEVEEVVRDGHVYDLTVEGSHSFIANGFVVHN

SEQ ID NO: 266 - protein, 394 aa, Pyrococcus abyssi
  Pab IF2 intein
CLLPDEKVVVPSVGFVTLKELFETASKVVERDDEKEIRELDERITSVNGDGKTGLVKASYVWKVRHKGKVIRVKLKNWHGVTVTPEHPFLTTKGWKRADQLRPGDYVAVPRFIHGNEDEKIFLSYVKVKKSGEEWKEYFYLAGRKGNIDVNLLFVAPKRYVVEFLRGYFEERSEVKGESVIVEARELVEPLSLALLRFGIFSKIQGSKLIVTGKRNLEAFKDYIGFKDEREKALEEAIEKVKGSEVYPIFEEIRRLRLLFGFTREELGSYAKYENSEAPTYEELMEILDFIERGSPSLSKKIAILEGKLKAELRVLEEEGLIKDGKLTPLGRELLEVWRNREFDSKDVDYIRNIAETLVFIPVENVEEEEYDGYVYDLTTETHNFIANGILVHN

SEQ ID NO: 267 - protein, 196 aa, Pyrococcus abyssi
  Pab KlbA intein
ALYYFSEIQLPNGKEFIGKLVDELFEKYHDKIGKYKDMEYVELNEEDTFEVISIGPDLSARRHKVTHVWRRKVKDGEKLVKIRTASGKELVLTQDHPVFVLLGRDVARRDAGNVKVGDEIAVLNTRPDFSVLSPPAMPELLSEPFNYELSSIGDVAWDEVVEVDEIDAKGLGVEYLYDLTVDINHNYVANGIVVSN

SEQ ID NO: 268 - protein, 333 aa, Pyrococcus abyssi
  Pab Lon intein
CFSGEETVVIRENGEVKVLRLKDFVEKALEKPSGEGLDGDVKVVYHDFRNENVEVLTKDGFTKLLYANKRIGKQKLRRVVNLEKDYWFALTPDHKVYTTDGLKEAGEITEKDELISVPITVFDCEDEDLKKIGLLPLTSDDERLRKIATLMGILFNGGSIDEGLGVLTLKSERSVIEKFVITLKELFGKFEYEIIKEENTILKTRDPRIIKFLVGLGAPIEGKDLKMPWWVKLKPSLFLAFLEGFRAHIVEQLVDDPNKNLPFFQELSWYLGLFGIKADIKVEEVGDKHKIIFDAGRLDVDKQFIETWEDVEVTYNLTTEKGNLLANGLFVKN

SEQ ID NO: 269 - protein, 455 aa, Pyrococcus abyssi
  Pab Moaa intein
CFPPTEEAVFKFGDKVKIATFEEVAKNFKFEHKVEIDGFKGEYSIPNDLYVLTFNDGKAEWTRVTKFLRRKHEGKIRVIKTKTGRTIRTTPEHKFFVYKDGELVKKRADELEPGDELVLLWRFESEETLTEINLLEAFKDLPQEEKEKVYVRGIKDLDLTPLKEKYGDKVYYWARQDSMPLSVFYELNVDLDKEFRLGRDATTYELPSKLKITPSLAKLIGYFVSDGNYSDKDLRITVGHEDVEKEIVNILEELGLPYSFLEWEGKTKQIVIGSRLLRLVFKHVFKIPEGAPNKRLPEGFLSFPFEAKVALLSGLFNGDGYVVRGEHHLSIGYASTSKGLIRDILYLLASLGIFARVYRVPKEKMKGANHDLYKLYIAGTDLVRLVELLELREGHREKLGEIGNRKPARVKKIADFYIDVVDEVSEEEYSGYVYDLEVENEGHSFVAADGILVSN

SEQ ID NO: 270 - protein, 185 aa, Pyrococcus abyssi
  Pab Pol-II intein
CFPGDTRILVQIDGVPQKITLRELYELFEDERYENMVYVRKKPKREIKVYSIDLETGKVVLTDIEDVIKAPATDHLIRFELEDGRSFETTVDHPVLVYENGRFIEKRAFEVKEGDKVLVSELELVEQSSSSQDNPKNENLGSPEHDQLLEIKNIKYVRANDDFVFSLNAKKYHNVIINENIVTHQ

SEQ ID NO: 271 - protein, 499 aa, Pyrococcus abyssi
  Pab RFC-1 intein
CLTGDAKVIANGELTTIGELVERISNGKLGPTPVRGLTVLGIDEDGKLVELPVEYVYKDKTSELVKIRTRLGRELKVTPYHPLLVNRRNGKIEWVKAEELKPGDRLAIPSFLPAMLNDNPLAEWLGYFFGNGYTDSEERVVFESKSKELRKRFMELTRKLFQDAEIKEDSGKVYVSSSEVKRLVKSLNKDSIPEQAWKGLRSFLRAYFDCNAEIKDKIIVSTAGKEIAEQISYALAGLGIVAEVDDKGSVIISDPENVSRFLDEIGFSVEEKKEEAKALIKKSTLNLGIYVDKELISYVREKLKLSFYENETMWSPEKAREIAWKLMKEIYYRLDELERFKKALSKSVIIDWSEVEKKKEEISEKTGISVNEILEYAKGKRKPSLEEYVKIAKALGVELKETLEAIFTFGKKYLGYVISDEIETLEEVRKEELKRLKELLNDEKLKKGVAYLIFLAQNELLWDEIIEVEKLKGDFVIYDLHVPKYHNFIGGNLPTVLHN

SEQ ID NO: 272 - protein, 608 aa, Pyrococcus abyssi
  Pab RFC-2 intein
CVTGDTKVYTPDEREVKIRDFMNYFENGLIKEVSNRIGRDTVIAAVSFNSRIVGHPVYRLTLESGRIIEATGDHMFLTPEGWKQTYDIKEGSEVLVKPTLEGTPYEPDPRVIIDIKEFYNFLEKIEREHNLKPLKEAKTFRELITKDKEKILRRALELRAEIENGLTKREAEILELISADTWIPRAELEKKARISRTRLNQILQRLEKKGYIERRIEGRKQFVRKIRNGKILRNAMDIKRILEEEFGIKISYTTVKKLLSGNVDGMAYRILKEVKEKWLVRYDDEKAGILARVVGFILGDGHLARNGRIWFNSSKEELEMLANDLRKLGLKPSEIIERDSSSEIQGRKVKGRIYMLYVDNAAFHALLRFWKVEVGNKTKKGYTVPEWIKKGNLFVKREFLRGLFGADGTKPCGKRYNFNGIKLEIRAKKESLERTVEFLNDVADLLREFDVDSKITVSPTKEGFIIRLIVTPNDANYLNFLTRVGYAYAKDTYARLVGEYIRIKLAYKNIILPGIAEKAIELATVTNSTYAAKVLGVSRDFVVNRLKGTQIGITRDFMTFEEFMKERVLNGYVIEKVIKKEKLGYLDVYDVTCARDHSFISNGLVSHN

SEQ ID NO: 273 - protein, 399 aa, Pyrococcus abyssi
  Pab RIR1-1 intein
CIDGNAKIIFENEGEEHLTTMAEMYERYRHLGEFYDENYNRWGIDVSSVPIYVKSFDPETRRVVKGRVRAIWKYELGEEIPKYEIRTHKGTKILTSPWHPFFVLTPDFEVIEKRADELKVGDILIGGMPDGEDHELIFDYWLAGFIAGNGNLDDSEREYKARELLDGIENGIPPKILRKGKNAVLSFITGLFDAEGHVNDKSGIELGMVNKKLIEAVTHYLNSLGIKARMREKRRKNGIDYIMHVEEYSSLLRFYELIGKHLQNNEKKEKLEILLHKHNGGAFDLSLNFNAFKEWASRYGVEFKTNGNQILAIIGNEKVSLGQWHARGHVSKAVLVKMLRKLYEVTKNDEVKEMLHLIESLEVVKEITITNEPKTFYDLTVDKYQNYLAGENGMIFVHN

SEQ ID NO: 274 - protein, 438 aa, Pyrococcus abyssi
  Pab RIR1-2 intein
CFTGDTRILTEKGLIPIEEIVHETGKKPKVVTHAGLKDIIETYDNGEMEVFRVTTEDGYELKVTGDHKFLVFDENGNPTLKPLKELKVGDYVYILAPEWKGGEYVELDTNIELKGKGYNVNLPSKLDEKLAYLLGIIYADGHIRHYFENGKRKNSKIEIYLHQDETEIKEKVKRYFKEIFGIEPKEFLKEEQHKVILVIPSTKIVKFLEINGLLKDKSENIRVPEAIFRSRPSVIAAFLAGFFDGDGSIDQNYRIAFKSISREFIKEAQLLFLALGIVTSIQEYNPPNPNNKTVYTLRVQTRDMKIKAFNVLKESVKLSKIMKEAISKLEENGKNKKFSFPFNAIYHIKDPKIRAKIQRDYKILSYNSKVTHRAFINNILKLKEELGLDDEEVKYFEMLSKLYPTKITKIEPLGKAHVYDLQVEDVHLLTGNGIYTSN

SEQ ID NO: 275 - protein, 382 aa, Pyrococcus abyssi
  Pab RIR1-3 intein
CVVGETRILTPEGYIKAEELFKLAKERGKMEAIAVEGIAEGGEPYAYSLEILLPGDKQVKYETVHGNAVEVADPVSVPAYVWKVGMKEVARVRTKEGYEITATLDHKLMTPEGWKEIKDLKPGDKILLPRFEVEEDFGSESIGEDLAFVLGWFIGDGYLNVKDKRAWFYFNAEKEEEIAWKIREILAKRFEIKAEPHRYGNQIKLGVRGKAYEWLESIVKTNEKRIPEIVYRLKPNEIASFLRGLFSADGYVDNDMAIRLTSKSRELLREVQDLLLLFGILSKIYERPYKREFKYTTKDGEERTYTTEGYYELVIANYSRKIFAERIGLEGYKMEKLSLEKIKVDEPIVTVESVEILGKKLVYDFTVPEHHMYISNGFMSHN

SEQ ID NO: 276 - protein, 436 aa, Pyrococcus abyssi
  Pab RtcB (Pab Hyp-2) intein
CLAPGSKVLTEHGYWLKVEELPEKFKLQGVKVYNLDEGHNDTSNVAFVAEREVETGEMAVRVTTESGRIIEGSEDHPVLTPEGYVYLGNLKEGNLVIVYPFEGVEYEERKGVILDEDAFKDEDPQVLSFLREKGLVPLRWDDPRIGTIARILGFAFGDGYLGEMGGRLTLTFYGKEETLRELKKDLERLGISANLYVRESIETTSGHSEGKSLSIELRVTSRSFALFLEKLGMPRGKKTEKAYRVPGWILEAPLWVKRNFLAGLFAADGSIVEFKGNTPLPINLTQSKSDELAENLVEFLGDVAKLLAEFGIETTLYEVKSKKGVTYRLSIVGEDSIRTFVERINYEYDPEKKVKGLIAAAYLKLKERIVKEAHEAVKDDFPTFEEFAKERGYEGGFVAEKVVKVERVKPEYTKFYDIGVYHEAHNFIANGIVVHN

SEQ ID NO: 277 - protein, 429 aa, Pyrococcus abyssi
  Pab VMA intein
CVDGDTLVLTKEFGLIKIKDLYKILDGKGKKTVNGNEEWTELERPITLYGYKDGKIVEIKATHVYKGFSAGMIEIRTRTGRKIKVTPIHKLFTGRVTKNGLEIREVMAKDLKKGDRIIVAKKIDGGERVKLNIRVEQKRGKKIRIPDVLDEKLAEFLGYLIADGTLKPRTVAIYNNDESLLRRANELANELFNIEGKIVKGRTVKALLIHSKALVEFFSKLGVPRNKKARTWKVPKELLISEPEVVKAFIKAYIMCDGYYDENKGEIEIVTASEEAAYGFSYLLAKLGIYAIIREKIIGDKVYYRVVISGESNLEKLGIERVGRGYTSYDIVPVEVEELYNALGRPYAELKRAGIEIHNYLSGENMSYEMFRKFAKFVGMEEIAENHLTHVLFDEIVEIRYISEGQEVYDVTTETHNFIGGNMPTLLHN

SEQ ID NO: 278 - protein, 522 aa, Pyrococcus furiosus
  Pfu KlbA intein
ALYDFSVIQLSNGRFVLIGDLVEELFKKYAEKIKTYKDLEYIELNEEDRFEVVSVSPDLKANKHVVSRVWRRKVREGEKLIRIKTRTGNEIILTRNHPLFAFSNGDVVRKEAEKLKVGDRVAVMMRPPSPPQTKAVVDPAIYVKISDYYLVPNGKGMIKVPNDGIPPEKAQYLLSVNSYPVKLVREVDEKLSYLAGVILGDGYISSNGYYISATFDDEAYMDAFVSVVSDFIPNYVPSIRKNGDYTIVTVGSKIFAEMLSRIFGIPRGRKSMWDIPDVVLSNDDLMRYFIAGLFDADGYVDENGPSIVLVTKSETVARKIWYVLQRLGIISTVSRVKSRGFKEGELFRVIISGVEDLAKFAKFIPLRHSRKRAKLMEILRTKKPYRGRRTYRVPISSDMIAPLRQMLGLTVAELSKLASYYAGEKVSESLIRHIEKGRVKEIRRSTLKGIALALQQIAKDVGNEEAWVRAKRLQLIAEGDVYWDEVVSVEEVDPKELGIEYVYDLTVEDDHNYVANGILVSN

SEQ ID NO: 279 - protein, 454 aa, Pyrococcus furiosus
  Pfu RIR1-1 intein
CIDGKAKIIFENEGEEHLTTMEEMYERYKHLGEFYDEEYNRWGIDVSNVPIYVKSFDPESKRVVKGKVNVIWKYELGKDVTKYEIITNKGTKILTSPWHPFFVLTPDFKIVEKRADELKEGDILIGGMPDGEDYKFIFDYWLAGFIAGDGCFDKYHSHVKGHEYIYDRLRIYDYRIETFEIINDYLEKTFGRKYSIQKDRNIYYIDIKARNITSHYLKLLEGIDNGIPPQILKEGKNAVLSFIAGLFDAEGHVSNKPGIELGMVNKRLIEDVTHYLNALGIKARIREKLRKDGIDYVLHVEEYSSLLRFYELIGKNLQNEEKREKLEKVLSNHKGGNFGLPLNFNAFKEWASEYGVEFKTNGSQTIAIINDERISLGQWHTRNRVSKAVLVKMLRKLYEATKDEEVKRMLHLIEGLEVVRHITTTNEPRTFYDLTVENYQNYLAGENGMIFVHN

SEQ ID NO: 280 - protein, 382 aa, Pyrococcus furiosus
  Pfu RIR1-2 intein
CVVGDTRILTPEGYLKAEEIFSLAKERGKKEAVAVEGIAEEGEPYAYSVEILLPGEEKVEYETVHGKVLAVADPVAVPAYVWKVGRKKVARVKTKEGYEITATLDHKLMTPEGWKEVGKLKEGDKILLPRFEVEEEFGSESIGEDLAFVLGWFIGDGYLNVNDKRAWFYFNAEKEEEIAVRIRDILVKHFGIKAELHRYGNQIKLGVRGEAYRWLENIVKNNEKRIPEIVYRLKPREIAAFLRGLFSADGYVDKDMAIRLTSKSRELLREVQDLLLLFGILSKIYEKPYESEFHYTTKNGEERIYRSKGYYELVITNYSRKLFAEKIGLEGYKMEKLSLKKTKVDQPIVTVESVEVLGEEIVYDFTVPNYHMYISNGFMSHN

SEQ ID NO: 281 - protein, 425 aa, Pyrococcus furiosus
  Pfu VMA intein
CVDGDTLILTKEFGLIKIKDLYEKLDGKGRKTVEGNEEWTELEEPITVYGYKNGKIVEIKATHVYKGASSGMIEIKTRTGRKIKVTPIHKLFTGRVTKDGLVLEEVMAMHIKPGDRIAVVKKIDGGEYVKLDTSSVTKIKVPEVLNEELAEFLGYVIGDGTLKPRTVAIYNNDESLLKRANFLAMKLFGVSGKIVQERTVKALLIHSKYLVDFLKKLGIPGNKKARTWKVPKELLLSPPSVVKAFINAYIACDGYYNKEKGEIEIVTASEEGAYGLTYLLAKLGIYATIRRKTINGREYYRVVISGKANLEKLGVKREARGYTSIDVVPVDVESIYEALGRPYSELKKEGIEIHNYLSGENMSYETFRKFAKVVGLEEIAENHLQHILFDEVVEVNYISEPQEVYDITTETHNFVGGNMPTLLHN

SEQ ID NO: 282 - protein, 168 aa, Pyrococcus horikoshii OT3
  Pho CDC21-1 intein
CVDYDTEVLLGDGRKRKIGEIVEEAIKKAEKEGKLGRVDDGFYAPINLELYALDVRTLKVRKVKADIAWKRTTPEKMLRIRTKRGREIRVTPTHPFFTLEEGRIKTKKAYELKVGEKIATPREEAPEAEIFWDEVVEIEEYKPNNSWVYDLQVPEHHNFIANGIFVHN

SEQ ID NO: 283 - protein, 260 aa, Pyrococcus horikoshii OT3
  Pho CDC21-2 intein
CVAPDTLINTDNGRVEIGKFVEEWMKEVGEISEEGISYAPCFRKVETFKDGKIVESPIRRVWKLRAPKKLVRIKTENGRSIALTRETKLLTINDGELSWVEAGEVKVGTYVGTVKSEKDVIPGAGKTIRDVSKLYNMEMEVKDYLTREEVRKAIEKLEEIMNPMNIKIPGVQESYEELLRKLETTNDERVRNETLILLSDVSDAHELAKEKIEKIKEIVNSEVHWEKVTEVGEVDGVEYVYDLTVEGSHNFVANGFIVHN

SEQ ID NO: 284 - protein, 444 aa, Pyrococcus horikoshii OT3
  Pho IF2 intein
CLLPEERVILPDYGPITLEELFNMTKETVFKDEEKEVRKLGIRMPVAGVDGRVRLLEGPYVWKVRYKGKMLRVKLKDWHSVAVTPEHPFLTTRGWVRADQLKPGDYVAVPKILPGKDDKEKFLQYVHEKLKGKVHIKLPSSDEEWETFFYFAGTIFGRENSVNPEGLTHEVKALLELFKVLFEYPREVLRVLFMAPVRYVANFLRGFFDINGYVNGEELRVEVRGAPHEVLEELSLILLRLGIVSKIYPTSLAISGRRNLELFRRYIGFSEKQKAKELEGIIRRSENSESYPIFEELRRIRLLFGFTRAELSSTIPLYSKYESKEAPSYEILMKILNTIEKGSKDLNKKITILEGRVRDHEYIEEFKREGLIKDGKLTELGKELLEVWRNREFDSRDVNYLRNIIENFVFLPVEKIEEFEYDGYVYDVTTETHNFIANGILVHN

SEQ ID NO: 285 - protein, 520 aa, Pyrococcus horikoshii OT3
  Pho KlbA intein
ALYDFSIIQLSNGRFVLIGDLVEELFKKYSDKIERYKDLEYIELNDEDRFEVVSVGPDLKANKHIVSRVWRRRVREGEKLIRIKTRTGNEVILTRSHPLFAFSNGDVVRKEAGNLKVGDRVAVMMNPPKPPQTKAVVDLSIYAKISDYYLVPNGKGMIKVPNKGLPPEKAQYLVSVNSHPVKLVREVDEKLSYLAGVILGDGYISSNGYYISATFDDEDYMEAFVSVISDFIPNYIPNVKENGKYMVVTVGSKIFAEMLSRIFGIPKGRKLEWDVPDIVLSNDDLMRYFIAGLFDADGYVDENSIILVTKSENVARKIWYALQRLGIISTVSRVKNKGFKEGEIFRVIISGVDDLAKFARSIPLHHSRKRAKLMEVLKTKKTHRGRRAYRVPISAEMIAPLRQMLGLTVSELSKLASHYAGEKVSESLIRHVEKGRVKEIRRSTLRGIALALQQVAKDVGDEEAWVKARRLQLIAEGDVYWDEVVSVEEVDPKELGIEYVYDLTVEDDHNYVANGILVSN

SEQ ID NO: 286 - protein, 475 aa, Pyrococcus horikoshii OT3
  Pho LHR intein
CVSGDSKVLTEKGPVEIRHLNSGMIVGINGFKSRFVKFQELHQVKYQEYGVKIRTQLGFEVKCTREHRFLTIDKNGELRWVEAWRLKEGDYVGIIRKLPSPNSKVLILDFLPESTYLWLNKEFLKKLKVSIKEKFGSIKNYAKERGFNSSYLVKQLNGLSPFRWGRLRVILNDVSIEISRDDIERITSRRGKYSLPPELTPGIARLLGFWMASGSLNRNTLIFYSQDKKILERYEDLCKREFRVKGRIKAQDKGTYILEIPSSLLSFVFKNLARPKLEVPPIIYILPEKHKEEFLAGYFDGNGFIKIENGRIHSLGFFAFNRKFAEGIRDILLQLGILSSINEQTFEVSIIEGEKFLKIVNSWRSNYYKEWEDVIPNLEKRLKEIEEKLGYPGTYNRREIRRSELKAIIKLYEKVARERGLNDVLKELSYLKELSEGDIFFDRITSIEPVYLDVAYGIINSETGNYVVNGFVSKN

SEQ ID NO: 287 - protein, 474 aa, Pyrococcus horikoshii OT3
  Pho Lon intein
CFSGEEVIIVEKGKDRKVVKLREFVEDALKEPSGEGMDGDIKVTYKDLRGEDVRILTKDGFVKLLYVNKREGKQKLRKIVNLDKDYWLAVTPDHKVFTSEGLKEAGEITEKDEIIRVPLVILDGPKIASTYGEDGKFDDYIRWKKYYEKTGNGYKRAAKELNIKESTLRWWTQGAKPNSLKMIEELEKLNLLPLTSEDSRLEKVAIILGALFSDGNIDRNFNTLSFISSERKAIERFVETLKELFGEFNYEIRDNHESLGKSILFRTWDRRIIRFFVALGAPVGNKTKVKLELPWWIKLKPSLFLAFMDGLYSGDGSVPRFARYEEGIKFNGTFEIAQLTDDVEKKLPFFEEIAWYLSFFGIKAKVRVDKTGDKYKVRLIFSQSIDNVLNFLEFIPISLSPAKREKFLREVESYLAAVPESSLAGRIEELREHFNRIKKGERRSFIETWEVVNVTYNVTTETGNLLANGLFVKN

SEQ ID NO: 288 - protein, 460 aa, Pyrococcus horikoshii OT3
  Pho Pol I intein
SILPDEWLPIVENEKVRFVKIGDFIDREIEENAERVKRDGETEILEVKDLKALSFNRETKKSELKKVKALIRHRYSGKVYSIKLKSGRRIKITSGHSLFSVKNGKLVKVRGDELKPGDLVVVPGRLKLPESKQVLNLVELLLKLPEEETSNIVMMIPVKGRKNFFKGMLKTLYWIFGEGERPRTAGRYLKHLERLGYVKLKRRGCEVLDWESLKRYRKLYETLIKNLKYNGNSRAYMVEFNSLRDVVSLMPIEELKEWIIGEPRGPKIGTFIDVDDSFAKLLGYYISSGDVEKDRVKFHSKDQNVLEDIAKLAEKLFGKVRRGRGYIEVSGKISHAIFRVLAEGKRIPEFIFTSPMDIKVAFLKGLNGNAEELTFSTKSELLVNQLILLLNSIGVSDIKIEHEKGVYRVYINKKESSNGDIVLDSVESIEVEKYEGYVYDLSVEDNENFLVGFGLLYAHN

SEQ ID NO: 289 - protein, 166 aa, Pyrococcus horikoshii OT3
  Pho Pol-II intein
CFPGDTRILVQINGTPQRVTLKELYELFDEEHYESMVYVRKKPKVDIKVYSFNPEEGKVVLTDIEEVIKAPATDHLIRFELELGSSFETTVDHPVLVYENGKFVEKRAFEVREGNIIIIIDESTLEPLKVAVKKIEFIEPPEDFVFSLNAKKYHTVIINENIVTHQ

SEQ ID NO: 290 - protein, 410 aa, Pyrococcus horikoshii OT3
  Pho r-Gyr intein
CVTPDTLVSLSDGRIIEIREAVENSEESLLGINGLKPKEAKALKFWEIDWDGPIKVIKLKNGHEIKATPDHGLLVMRDGKIGWVSAKNIREGDYVAFIYNLGHRGGKKYTLPQLLKELGISEYENSSSQELNNREQEMDSKQISIELDERFWYIFGVILGKGTLKGDKVVIFQKDVKPVIEEALPFVRIFESADHIGFSHLILAEVFRRLGVGEGKLHSLVFGLREEYINAMIAGYFDASGTFLRRAVLTSKRGDILRMLSVYLYQIGIVNNLRRDEHAGVWELIISDLEKFREKIYPYLRIKKSQFDKVYSISKNEGDFLPVASIFRKLKFRDGFKNRILDEEIPRDEVAKVLEYAEDSPEKEFLNSLVEARVTWVRVEKIEERHYTGKLYDFTTTTENFISNGIVSHN

SEQ ID NO: 291 - protein, 172 aa, Pyrococcus horikoshii OT3
  Pho RadA intein
CFARDTEVYYENDTVPHMESIEEMYSKYASMNGELPFDNGYAVPLDNVFVYTLDIASGEIKKTRASYIYREKVEKLIEIKLSSGYSLKVTPSHPVLLFRDGLQWVPAAEVKPGDVVVGVREEVLRRRIISKGELEFHEVSSVRIIDYNNWVYDLVIPETHNFIAPNGLVLHN

SEQ ID NO: 292 - protein, 525 aa, Pyrococcus horikoshii OT3
  Pho RFC intein
CLTGDTKVIANGQLFELRELVEKISGGKFGPTPVKGLKVIGIDEDGKLREFEVQYVYKDKTERLIRIRTRLGRELKVTPYHPLLVNRRNGEIKWVKAEELKPGDKLAVPRFLPIVTGEDPLAEWLGYFLGGGYADSKENLIMFTNEDPLLRQRFMELTEKLFSDARIREITHENGTSKVYVNSKKALKLVNSLGNAHIPKECWRGIRSFLRAYFDCNGGVKGNAIVLATASKEMSQEIAYALAGFGIISRIQEYRVIISGSDNVKKFLNEIGFINRNKLEKALKLVKKDDPGHDGLEINYELISYVKDRLRLSFFNDKRSWSYREAKEISWELMKEIYYRLDELEKLKESLSRGILIDWNEVAKRIEEVAEETGIRADELLEYIEGKRKLSFKDYIKIAKVLGIDVEHTIEAMRVFARKYSSYAEIGRRLGTWNSSVKTILESNAVNVEILERIRKIELELIEEILSDEKLKEGIAYLIFLSQNELYWDEITKVEELRGEFIIYDLHVPGYHNFIAGNMPTVVHN

SEQ ID NO: 293 - protein, 385 aa, Pyrococcus horikoshii OT3
  Pho RIR1 intein
CVVGDTRILTPEGYLKIEDLFRMAKERNNGEKVVAVEGIAEGGEEFAYPVAILLPNEEEKEVIYETVHGKQLAIADPIEVKAYVWKVGKKKVARIKTKEGYEIIATLDHKIMTKDGWKAVEDLKEGDLIVLPRFEVEDNFGSESIGEDLAFVLGWLIGDGYINTDDKRVWFYFNAEKEEEIAQKISEILKKRFNSKAEPHRYGSEIKLGVRGEAYKFFEKIVKTNDKRVPEIVYHLKPNEIRAFLRGLFTADGYVDNDGAIRLTSKSRELLRDVQDLLLLFGIISKIYERPYKGTFEYTTKEGEKKVYTAQGYYELVIANYSRKLFAEKIGFEGEKQKKIKLNKTKIDEPYARVESVEIIGEEIVYDLTVPGIHSYISNGFISHN

SEQ ID NO: 294 - protein, 376 aa, Pyrococcus horikoshii OT3
  Pho VMA intein
CVDGDTLVLTKEFGLIKIKELYEKLDGKGRKIVEGNEEWTELEKPITVYGYKDGKIVEIKATHVYKGVSSGMVEIRTRTGRKIKVTPIHRLFTGRVTKDGLILKEVMAMHVKPGDRIAVVKKIDGGEYIKLDSSNVGEIKVPEILNEELAEFLGYLMANGTLKSGIIEIYCDDESLLERVNSLSLKLFGVGGRIVQKVDGKALVIQSKPLVDVLRRLGVPEDKKVENWKVPRELLLSPSNVVRAFVNAYIKGKEEVEITLASEEGAYELSYLFAKLGIYVTISKSGEYYKVRVSRRGNLDTIPVEVNGMPKVLPYEDFRKFAKSIGLEEVAENHLQHIIFDEVIDVRYIPEPQEVYDVTTETHNFVGGNMPTLLHN

SEQ ID NO: 295 - protein, 370 aa, Pelodictyon luteolum DSM 273
  Plut RIR1 intein
CVTAETLVATDRGLERIGELVGQSRGIRGIEGKLHWVEKIFPTGTKEVYELRTKAGYRLKLTGDHPVYTENRGDVKACELSKDDVVRLVGAEFGKESTGSVDVAQLIGLLVGDGCITRNAELTASGEQRRVAFLAMDKAEAEITGWANTLINDLRPELGEHNKQGSLTQTLTSSRVAVGSPRILNLLENYAVLDGGSEKKMFSDAVFRLQQAEQAALLRGLFTADGTVANYGVKSRYVALDSTSLDLLLQVQLLLLNFGIKAKIYENRRAGDLVSMLPDGKGGMREYPVQEMHSLRISRSSRVLFQESIGFMEESRKAEALARLNMTVDTYRDPLVDRVASLRSIGRQPVFDLTEPENHHFIANGIGVHN

SEQ ID NO: 296 - protein, 374 aa, Polaromonas naphthalenivorans CJ2
  Pna RIR1 intein
CVTADTRLATQHGLVPIGWLQANGGALDCTVDRRALGEDRRGTVTRAAVPAFLSAGQAEVFKVTTAEGYQIKATAWHEFYTARGKLKLSELKAGDELWVQSGKGQFGAQGSGALGLLIGLITGDGHFTNRGKDEQAAVISLWGEERQLADDIAGSVNALIAGTSLAPRDYLVKPVAVAERNMVFIRSTMLVRVLDGYGFNGETKLEVPEVVWRGSEACMRGYLQGLFQTDGTVNVSSNSQSCSVRLSSSHRPLLQDVQVLLANFGVFSRIHERREAGPRSLPDGQGGQRDYLCQTQHELIVDGESREAFMREIGFLLPAKREKYDAWVADKALVKTQRFAATITAIEPAGVEPVYDTTQPDGNTVIFNGLVTGQ

SEQ ID NO: 297 - protein, 380 aa, Polaromonas species JS666
  Posp-JS666 RIR1 intein
CVTADTWVMTTAGPAQVSELTGRSFSAVVDGKAYAVTSDGFFRTGHKPVLALRTREGPALRLTADHRVRRVARRTRYTLEAEWTEAGQLQPGDEILLHDHRALGGWEGAGTHAEGYLLGLLIGDGTLKSDKAVISVWAPELKVAGGGAVAYAQTGAGGIVQAAEAAAATLSHRVDFRGFQRSISGRGEARMASGAVRHLAHEMGMRPGHKTITTAMEKASSVFTEGLLRGLFDADGSVQGSQEKGVSLRLSQSDLSLLQTAQRMLLRLGIASTIYPNRRLAQARPLPDGRGGLRVYETASQHELVISADNLRIYAERIGFADTDKADRLDQALGSYNRSLNRERFTVTVESLTEEGSEDVFDVTVADIHAFDANGLYVHN

SEQ ID NO: 298 - protein, 262 aa, Pseudomonas aeruginosa phage phiEL
  PP-PhiEL Helicase intein
AMPLSTRVKVPNGWKALGDLKVKDIVVTPGGDTACVESIYPQGITEVYRFYFEDGRTADSHPYHLWKTTVNGVDEILTTLEVLHKARKEDVYFPLVGEINGCNPHCDTSSEVAARELVNTDVVIGDNVLELPYRDRFNIVTSVIEHVGCLISESVLSAYHENRIGMENFRRLMWSIGGTATEPVLVNGLYKVDFKHRDVGKMMTGLIGDNPRIQGMYNFSQYEDLQLKLAYWEKVENQETCCIALDNDEKLYVVDDYIVTHN

SEQ ID NO: 299 - protein, 313 aa, Pseudomonas aeruginosa phage phiEL
  PP-PhiEL ORF11 intein
QQRNSAKVRIVPKDTLKTITPQDTWKRIEHLRVGDQVLDRSGKPCQVIGIHPQGKRRLYRVITSDGRATDVGTEHLWTLKDYSNCLNGRALWNDYSTVDVINLLKKKVKLQLPLPAPVPGSEQDLPIDPYVLGLIYCGQDQDGKVIIPTRTDAVKQYVVDHLPRGVTVIQGVANSCLERTDNQPYLFNREHGLPDQYLEAPLNARRDLLQAFLDVRGKVGRGKVFIALNRVLGGQLAYLARSLGGTGKVTKNGVEITLPEEVPPFKFREENVVFDNRLLIERVTFVGDDDCTCIEVDNSEQLYLTDDFIVTHN

SEQ ID NO: 300 - protein, 366 aa, Pseudomonas aeruginosa phage phiEL
  PP-PhiEL ORF39 intein
AGVLSSKIKIPGGWKTMGNIRVGDEVVTPDGGTAKVLAVHPQGVTKVVRVHFKDGRYTDVSPDHLWKVRRHHWCNDKAMAKLTREEVEERVWRVITTNELKDYIGLSTKVYVQLIEPERNADKPFKIHPYVLGVLLGDGCISQKAVDITKPYQQLFDKVQSLLPEHLECVWRPNRKGDGEPKTFGIRFKDRRSEQHINWHIRDGLKELGLYGMRSWGKVIPEEYLHGSAKQRLELLQGLLDTDGTVDKHKSVSFSSSSKLLSLGVQYLVRSLGGMARLQERTPHYTHNGEKREGRTDYRVYIRYPRPEELFTLDHKRERAVSHQHTETLRLQVTHIEERPDEETQCITIDHPDHLYITDDFIVTHN

SEQ ID NO: 301 - protein, 248 aa, Pseudomonas aeruginosa phage phiEL
  PP-PhiEL ORF40 intein
MQPLYAKIKVPGGWKTMREMTVGTEVIAADGTVTQVTGVYPHGKQPIYRLHFEDGRYTDAGLDHLWKVFTEETQAWTVVNTRSVQTLLAKEPDGVFIPLCEPEDGPEKPFVTDQLEGSRQQRLEHLRRLMDEKGYVRDDGSLSFSSEDEVESTTVQYLVRSLGGIARKVPSTGLYRRRQYRVYIKHPRPEELFTLTNKGGYLTSKSGNQSLKLRVNRIEFIGEHEAQCISVAHPDRLYITDDFIVTHN

SEQ ID NO: 302 - protein, 150 aa, Porphyra purpurea (chloroplast)
  Ppu DnaB intein
CISKFSHIMWSHVSKPLFNFSIKKSHMHNFNKNIYQLLDQGEAFISRQDKKTTYKIRTNSEKYLELTSNHKILTLRGWQRCDQLLCNDMITTQIGFELSRKKKYLLNCIPFSLCNFETLANINISNFQNVFDFAANPIPNFIANNIIVHN

SEQ ID NO: 303 - protein, 537 aa, Pyrococcus species GB-D; identical to SEQ ID NO: 3
  Psp-GBD Pol intein

SEQ ID NO: 304 - protein, 449 aa, Pichia stipitis CBS 6054, taxon:322104
  Pst VMA intein
CFAKGTKVLMANGDDKNIEDIAVGEEVLGKDGLPREVVALPRGRETMYEVSEKTQHRAETVFGTASYTCNATHKLVLQTNQRVNITNHVLRGESQTSVTYFQMKTAVADGREIELPKLCTKSFQHSSHGRENAWKKAEVFASTISRDPIDWTAEARDISRLGYHVRRATRQLWSPVLVEKEVLAPMIAKRGFDESIAPYMAYLVGLWVGDGYSDRATFSIDIQDVEIHERIKDFASHAGLTPRIACYKKSRDATISLHNSETRGKNVRQNLNTGNLLWSLLAEICGKKENEMLFKLVPSFLRSESIAVREYFISGLVDSDGHVKRDEADKCYSATVKTIYPAVRDGLVSVARSLGIQTSVSVEEAKEVNSVKHQESYAIYMANSSALDSVLSKCAAPRKRAEEPVCVNREPHPYTFHMVEKEEDDFYGITLSEDSDHQFLLSNLALVHN

SEQ ID NO: 305 - protein, 148 aa, Pseudomonas syringae pv. tomato str. DC3000
  Psy Fha intein
CFAAGTMVSTPDGERAIDTLKVGDIVWSKPEGGGKPFAAAILATHIRTDQPIYRLKLKGKQENGQAEDESLLVTPGHPFYVPAQHGFVPVIDLKPGDRLQSLADGASENTSSEVESLELYLPVGKTYNLTVDVGHTFYVGKLKTWVHN

SEQ ID NO: 306 - protein, 333 aa, Picrophilus torridus, DSM 9790
  Pto VMA intein
CVTGDTPVLLADGTVMSIEDIYNKSSGTVEYKNENETLIRLDEPLRLYSFYNGHVNESTSNYIYKGKSDSIIKIRTASGREVKVTPVHKLFRFVDDKIIETEARYLNTGDFIASIKRFNNKDENYLSGDESELLGLYASYGSIEDGILIDASIKDRFINLAMNIFKLKTIKIEYRNDRVLIKNDGLKDFIARMISSGIPSEVMRSRACAASFINGYLYGKLYHDDVIKLHDNEQNILKISYMLTGLGIIHSIRNNLIEIKAENMKILNSMENELIDNNETLLISNNANDDFDLYPDEIESIEILPGPFDVYDVTTPDFGSNFVGGYGAILLHN

SEQ ID NO: 307 - protein, 148 aa, Porphyra yezoensis chloroplast, cultivar U-51
  Pye DnaB intein
CISKFNYLQTSLYNQLQILFNCYYKKIEVINFSAQKQQLFLAIKCSISKTGKKTVYKIITEAGKYIQLTSNHKLLTTQGWKRCDKINQNDMIAIQIKNFEEQKNVFNSFSSLTFESIQKINVTSLQIVFDLECKPLCNFISNNFIVHN

SEQ ID NO: 308 - protein, 372 aa, Roseovarius species 217
  Rsp Rir1 intein
CVTAETWVMTDEGARQVSALLDRPFRAVVNGIAYDSGEHGFFCTGLKPVKRLSTACGRHLRLTADHLVRKVVGKTRWRQEVEWVPAGDLRPGDEVKLHDHRTAMIQTRPEDERGYLLGLLIGDGVIRDDKTLISVWPQEECIGAQPLGHPVMHKVEALLRDLPHRADFAGWQKVEGRGEYRIGTAALTALAAEYGLTRGRKTITPEIEGAETAGFGAAVLRGLFDADGSVQGAQEKGVSVRLAQSDLALLQAAQRMLARLGMNAVIYENRREAGRAFLPDGKGGQAHFETKAQHELVISGENLATYQERIGFTDVAKARRLAVALSGYKRALNRERFSAVVADVVDDGMAEVFDVQVPGVNAFDANGFYVHN

SEQ ID NO: 309 - protein, 299 aa, Salmonella phage SETP12
  SaP-SETP12 dpol intein
CLHRHTQVLTDGGFKDIMAVTSTDKVWSGEKWVNTKGAHLMGWKPVINVDGVLMTEDHKILTHSWKQAKQLVSNKYMMDRALEIGMDAWLSCASYQNDKAKDNYSSNVIVERCLGGSIMTMSGRVKPLNATAAPLKQQKNIVNSISATKTQCRMMRTERDYSTGCPRRSREQQAPGIRVIKTMGQEASRYSTSGGLIKGLFLDMFKLWKAGMTRTSKWIESTQTVTTNLETFGLSAVLKTAGTDGKYLSFNESMMQPLPALLNLNGKLTYCEPVYDLIDVEDGNRFLIASDSGFLVAHN

SEQ ID NO: 310 - protein, 299 aa, Salmonella phage SETP3; identical to SEQ ID NO: 309
  SaP-SETP3 dpol intein

SEQ ID NO: 311 - protein, 348 aa, Salmonella phage SETP3
  SaP-SETP3 Helicase intein
CLKRGTEVIMFDGTTKKVEDVIVGDVLMGPDSTPRNVLSLGRGREMMYEVKPRKGESYTVNESHILSLRTTTGIAKGSWPDNTVFDISVRDWLKLPKYVTGPNGYLKGWRVPVDFPRKEQDEALLPPYLMGLWLGDGTSSSGAITSGENEKEIRAYLESYAARNGMQIRKEGLTWSISHGNTGHKKHGFTHALKSAGVLNNKHIPHNYKCGDRRQRLELLAGLLDSDGYCDLSKAGFDWISVSERLADDFCYLCRSLGFAAYKKKTCKRCANTDVWGDYFRVSVSGDFSEVPFVRGRHQNLPKRNINKNVLNVGIESITPVGVDDYFGFTIDGDSRFLLGDFTVTHNT

SEQ ID NO: 312 - protein, 299 aa, Salmonella phage SETP5; identical to SEQ ID NO: 309
  SaP-SETP5 dpol intein

SEQ ID NO: 313 - protein, 338 aa, Streptomyces avermitilis MA-4680
  Sav Helicase intein
AQPLDSLVLAPTGFRRMGDLREGDEVVVPNGEIALIDGVFPQGVRDVWRIVLSDGSSVECDDEHLWIVGTSCGWHRGQTPKVMTTREIRLDTFKANGSSKWYVPAATPVDLGPDVGLPLDPYLFGLLLGDGSFRHNLRLSTVDDEIRDAAADAVAPDCRLVPVTGSRCDYTIQLKQRSGGVRNPVIQALRRLDLWGKTSHGKFIPEDFKNTSIKNRLSLLQGLLDTDGTVHADGMSVSLRSASLRLAEDVAWLVRSLGGRARVLPEKAAFHVSVALPDEYAPFRLSRKADRVRPRPKYNTFRRGIRAVEYVGRKPAQCISVGHPSHAYVTDNFTVTHN

SEQ ID NO: 314 - protein, 517 aa, Saccharomyces castellii, strain CBS4309
  Sca-CBS4309 VMA intein
CFAKGTEVLMADGSDKAIEAIEVGEQVMGKDGAPRTVIALPRGTETMYEVCHTTQHRNGNEKFGLMNYVCSGNHKLVLRTPQLIRTTIHELRGKHYTSVTFFVTEKSANGTIVKQRTKTFQHEFHGGEEAATKLAADFASTIDPKHIDWDIEAKDYKQLDHYVKKSSYQMINPVFKESGNLANILGDAGIEKTLAAKMAWLLGFWVGNGHMETAQFPVDSWDTQLVDRISEYGKHFNLTTTTENHYRSNHVESNKDIEIFEMNEAQIEEAEQTGVVAFDSNRKGDPSETELIEAEIFNESRPSTAGLFTPAAISPASLVTDLSVTLRGTGIGGAGVSKERNLNNIFWDIVTSFGVRTNGQGSTYEKSVPLHLSYDDIEVREQFIAGLIDSDGYVKSADNRFSATVTTIYKGVSEGLIRLARSLGIRVSVSTEKEHVDKNNVKHKSCYRVFLSGEALIGVLRFCALDRKRTAFKEFTREAVPFYFTLQEKDQDEYYGITLPDETDKQYLLSSLALVHN

SEQ ID NO: 315 - protein, 454 aa, Saccharomyces cariocanus, strain="UFRJ 50791
  Scar VMA intein
CFAKGTTVLMADGSIECIENIKIGDKVMGKDGKPREVIKLPRGNETMYSVVQKSQHRAHKTDSSREVPDLLKFTCNSTHELVVRTPRSVRRVSRTMKGVEYFEVISFEMVQKKVPDGRIIELVKEVSKSYPASEGPERADELVESYRKASTKPYFEWTVEARDLSLLGSHVRKATYQTYAPILYENDYFFNYMENSKFHPTIEAPKVLAYFLGLWIGDGLTDRTTFSIDSRDTSLMERVTEYAEKLDLCAEYKDRKEPKVAKTVNLYSKSVRANGIRNNLNTENPLWDAIVGLGFLKDGVKNIPSFLSTDNIGTRETFLAGLIDSDGYVTDEHGITATVKTIHTSVRDGLVSVARSLGLVISVNAEPAKIDMSGTSHKMCYAIYMSGGDILLNVLSKCASFKKFRPAPVAPPVRECRGFYFELQELEEDDYYGITLSDDSDHQFLLANQVVVHN

SEQ ID NO: 316 - protein, 454 aa, Saccharomyces cerevisiae (nucleus)
  Sce VMA intein
CFAKGTNVLMADGSIECIENIEVGNKVMGKDGRPREVIKLPRGRETMYSVVQKSQHRAHKSDSSREVPELLKFTCNATHELVVRTPRSVRRLSRTIKGVEYFEVITFEMGQKKAPDGRIVELVKEVSKSYPISEGPERANELVESYRKASNKAYFEWTIEARDLSLLGSHVRKATYQTYAPILYENDHFFDYMQKSKFHLTIEGPKVLAYLLGLWIGDGLSDRATFSVDSRDTSLMERVTEYAEKLNLCAEYKDRKEPQVAKTVNLYSKVVRGNGIRNNLNTENPLWDAIVGLGFLKDGVKNIPSFLSTDNIGTRETFLAGLIDSDGYVTDEHGIKATIKTIHTSVRDGLVSLARSLGLVVSVNAEPAKVDMNGTKHKISYAIYMSGGDVLLNVLSKCAGSKKFRPAPAAAFARECRGFYFELQELKEDDYYGITLSDDSDHQFLLANQVVVHN

SEQ ID NO: 317 - protein, 454 aa, Saccharomyces cerevisiae strain DH1-1A
  Sce-DH1-1A VMA intein
CFAKGTNVLMADGSIECIENIEVGNKVMGKDGRPREVIKLPRGSETMYSVVQKSQHRAHKSDSSREMPELLKFTCNATHELVVRTPRSVRRLSRTIKGVEYFEVITFEMGQKKAPDGRIVELVKEVSKSYPVSEGPERANELVESYRKASNKAYFEWTIEARDLSLLGSHVRKATYQTYAPILYENDHFFDYMQKSKFHLTIEGPKVLAYLLGLWIGDGLSDRATFSVDSRDTSLMERVTEYAEKLNLCAEYKDRKEPQVAKTVNLYSKVVRGNGVRNNLNTENPLWDAIIGLGFLKDGVKNIPSFLSTDNIGTRETFLAGLIDSDGYVTDEHGIKATIKTIHTSVRDGLVSLARSLGLVASVNAEPAKVDMNGTKHKISYAIYMSGGDVLLNVLSKCAGSKKFRPAPVATFVRECQGFYFELQELKENDYYGITLSDDSDHQFLLANQVVVHN

SEQ ID NO: 318 - protein, 454 aa, Saccharomyces cerevisiae OUT7091
  Sce-OUT7091 VMA intein
CFAKGTNVLMADGSIECIENIEVGNKVMGKDGRPREVIKLPRGRETMYSVVQKSQHRAHKSDSSREVPELLKFTCNATHELVVRTPRSVRRLSRTIKGVEYFEVITFEMGQKKAPDGRIVELVKEVSKSYPISEGPERANELVESYRKASNKAYFEWTIEARDLSLLGSHVRKATYQTYAPILYENDHFFDYMQKSKFHLTIEGPKVLAYLLGLWIGDGLSDRATFSVDSRDTSLMERVTEYAEKLNLCAEYKDRKEPQVAKTVNLYSKVVRGNGIRNNLNTENPLWDAIVGLGFLKDGVKNIPSFLSTDNIGTRETFLAGLIDSDGYVTDEHGIKATIKTIHTSVRDGLVSLARSLGLVVSVNAEPAKVDMNGTKHKISYAIYMSGGDVLLNVLSKCAGSKKFRPAPAAAFARECPGFYFELQELKEDDYYGITLSDDSDHQFLLANQVVVHN

SEQ ID NO: 319 - protein, 454 aa, Saccharomyces cerevisiae OUT7112; identical to SEQ ID NO: 317
  Sce-OUT7112 VMA intein

SEQ ID NO: 320 - protein, 501 aa, Saccharomyces dairenensis, strain CBS 421
  Sda VMA intein
CFAKGTQVMMADGSDKSIEEIQIGEQVMGKDGNPRTVIALPRGKETMYEVCHITPHRTTSGENFGVMDYVCSGNHKLVLRTPQNVTLTTHELDGQTYTNVSYFALEESAYGQIVAKKTKSYQHQRHGGKQETEKKVNEFLATINPDSIEWDVEAKDYKKLGYNVKKSSHQMINPVFKESGNLIAKLNELGFSKEIAPQMGWLLGFWVGNGSITTSSFSIDSLDTQLLDRITEYGKLFALTTTSATNHCRNYSGSGNQDIELSKINNGKVETDGTITFDDDTEREPSEQELIDMESSGCKASSEMTVALGAPLVRGNAIRQLLTENNVFLKLIESFGVRKENGSEYVKAIPMHLSYDDIEVREQFIAGLVDSIGHVKRTSNGTIECAAISTAYKSVSEGLIRLARSLGIKVSVTTKRECLDKHNVKHQICYSICLSGATLSGALRFCALDKNNANSKKPFVRGPVPFYFTLKEKDEDNYYGITLPDSTDKQYLLSSLALVHN

SEQ ID NO: 321 - protein, 384 aa, Staphylococcus epidermidis RP62A
  Sep RIR1 intein
CVTGDTELLTEKGYVKAKDLYESQEDLKVVIDNRTKNYDINNKGTDIVNAIPMQLTAKQAEIYEITTKQGFKIKSTEWHKYYRKINDSIEKVQLNQLEVGDKLLVQSGNGSYGDFHDPKLAFLMGLIAGDGTFGRDGSVKIYLYHEKQYLKETIEELVAYIIDKYRNKNEFLHHSANLHPKFVENKELQKLTISSVELYKILSRFGFNRETKLRFPNLLKNATKNTITAYLSGLYQMDACVNTNEKYKAMSIELTTISEELARDIQMQLLNLGVYSSIYQSEREISLLPDGNGGMKEYKVQNTYKISIQDRSSRDLFMKEVALKPKDIHKAMIFNLTLRPNSRKPKHDFTAEITEIKYIGKEDVYDTTQEDYHSLIFNGIVTGN

SEQ ID NO: 322 - protein, 499 aa, Saccharomyces exiguus, strain="IFO1128"
  Sex-IFO1128 VMA intein
CFAKGTQVMMADGSDKSIEDIQLGENVMGKDGTPRTVISLPRGKETMYEVCHSSTKGTTKDTLMNYVCSGNHKIVMQTPQQIGITEHGIDGKTYTSVSYFALRDSQHGYPIVKKLTKSFEHQQHGGKEQTLITVNNFVSSLKSEPINWDVEAKHYESLGHYVKKCSYQLINPVFHQSGKLAQEIASLNYSKDKAPLLAWLIGFWVGNGAMRHSQFVVESQDIELVNRIQDIAGLLNLSATTACYYSGSKDDEAKLAKLNSSSAEGFEDDLEGNPSVKELADMDRLSESKTATLPTAFGVENIDELIISLGEGRGNGNVFAQVIGSFGIDLADKDTLVTKIAHELAGDAFEVREQFVAGLVDAAGYVRKDVYDHASEATISTESKSTVLGLVKIARSLGIKITVTSDDSDDSDEHDHAHCGHDHGSSSSYTAVMTGDALTNSMRFCAIGRNRVAAKEFMRQAVPFYFSLEKKSEDDYYGITVPDNTDKQYLLSSMALVHN

SEQ ID NO: 323 - protein, 390 aa, Stigeoclonium helveticum, strain UTEX 441
  She RPB2 (RpoB) intein
CLTVDHEVLTTKGWIPLNKVKTSHFVATLKKNGQLVYQNPTNIYHYPEFKGELYHIKNVNLDLLVTLNHRMYVKNGIIEATSSVDYQLIPAKDIVGQHKKYCKTAFWDKENYQFILPSVISNSIVIPEKTMNMEAWLQFFGIWIAEGWALTNTISNNNVTNFNQSSSSPYVVQISIKKKKVLEILNNVIPILGYSFNYYDNNITICDKQLWAYLRPLSLGNPYRKLPIWVWDLSQDQARVLLLAMITVFKNGTNSKWEKAASLSSRLSLASVFPEFLKKRIDKGLSYYTSSVELADDISRLALHAGWSGNNYLLKKKGSISSFDGKQIICQFDIWRISIIQSKNQPAVNHGYHSKGKEEVLPYQGAVYCLSVPNEIFYVRRNGLSVWTGN

SEQ ID NO: 324 - protein, 342 aa, Shigella flexneri 5 str. 8401
  ShP-Sfv-5 Primase intein
ACPLNEPILLADGTWTTHGNVKIGDQVASVDGNPSTVTGIFPQGVRDVYRVTFEDGRYVDCAGDHLWEVTSRGFTKGEKRRVIDTFGLKRLSETKRHKNGVRIPEITGDFGDHSEPLAWVIGSLLGDGSLSNGSVKFSNVEPYMIERMKAELPDYNFSGDGKDWLISTARGQVNPLMETLRGYGLMGCTAKNKFIPRVFFSANKSTRIGMLCGLLETDGYVEKDGTLVFSSASEELRNGVVQLVNSLGGSCRTRVKTGVTYTYKDDKQHGMDSYEARIRLTREIREAIRSPRLNGRLTAHRFEGCGVFVRNVEKIGNAECLCIMVDHPRHLYVTRGYVATHN

SEQ ID NO: 325 - protein, 480 aa, Staphylothermus marinus F1
  Smar 1471 intein
SVSYDTPVLIRDPINKIHLVKIGEFIDKFYEEGEERTAKHVNGYYVLSHDGFQVVWKPIKYVLRHRTNEIYEIIYEGGGKLEATGSHSVFVLDPDTLDIVEKPVMLLNKGEYLVSFNGVKENKDHQTIDLIDLVSDYNDVYVDNIPSELKKHTGGRNPIPLKQYMILRKRVITKKNNSLIKLRRSKYTLPIRLVLDEKLAFLFGAYIANGCVKERRDKLICFTFGKSAKNIADKVMNIMYEKFNIKPFIDDRGTYIIYEYPHTLLAIIFEKLLGRKLEEKKMPEILWSSPKSVIRAFFEGLRAYSQRTLRRRYTSYTTANKNLAYQLLWLARFAGFYSVLKEEKEAGKNNGKTYYHVIVYLDQSYRKPNASERVPVKPILKLIKYTKPRTMPPELAYIKRREFISRKTALKALEWIRRDGSFTDFSREYLRKIESLINGDIIVLKIKDVRKKQYKGYVYDISVPITEAFFGGNIPILLHN

SEQ ID NO: 326 - protein, 350 aa, Staphylothermus marinus F1
  Smar MCM2 intein
SYHKDFKIMLADGRKVRIGDLVDELIGKNREKVIKGKDTEILFVDDLFLLSYNMRSGEQVLVKADRVSRHKAPDQFIKLRFSNGAEIIVTPEHPVLIINNGKIKTVRADTVRKGTLTIGVLGHKIIKEVNEDDIINNIRRKIVLDKELPYIHAKNISEAVEMRDQLMSIDIPTFIVKHKNEIRLYPSGPCSLRRLLLMHGVEEVVFSDELLYEIMNCHLYPATWYELLYSMGLTKIAKELNVYDFEILAGIIKKVEKEVIMLSQVLGLRNETQTELLHLKSRRELLIRLKDKLDMLRKRLKDLEEALGKDAVIRMITDVEVIKNTDSDWVYDITIEPYHLFVSDGLILHN

SEQ ID NO: 327 - protein, 454 aa, Saccharomyces pastorianus IFO11023; identical to SEQ ID NO: 317
  Spa VMA intein

SEQ ID NO: 328 - protein, 136 aa, Spirulina platensis, strain C1
  Spl DnaX intein
CLTGDALILSDRGWLRIDDPTLQECRVLSYNESTQQWEWQQVLRWLDQGVRETWKIKTFQTEIKCTGNHLIRTDKGWIKAANITPKMKILSPEIDAAVKTALQDVESIEKLGVNHVYDIEVEHNHNFVANGLLVHN

SEQ ID NO: 329 - protein, 344 aa, Salinibacter ruber DSM 13855
  Sru DnaB intein
CLGKGTPVMMYDGRTKPVEKVEVGDRLMGDDGSPRTVQSLARGREQMYWVRQKRGMDYRVNESHILSLKKSRREGARDRGSIADISVRDYLDQSDKWKDDNKGFKVAAEFPDQPVPLDPYFLGLWLGDGKSDNARIYTTDEEVITGLQEIAEKRGDTISVSDEHRRCPAYLVKSGDRGGAMATRESVQGALRALGVLGDKHIPHLYLGNSRGKRLRLLAGLIDSDGHLNDGHGGTYEITQSSEQLARDIKFLCDTLGYRTSLTQKTARISSTGYESEVHRVRFNGNVDEIPVRVERKKASPWTDVRDWRMTGIDVEPDGVGDYFGFTLDGNGRFLLGDGTVTHN

SEQ ID NO: 330 - protein, 358 aa, Salinibacter ruber DSM 13855
  Sru PolBc intein
CFDPETEVVTVDGIRHVEEIEVGDRVYSLNPDTGAVEIKPVTATQSQHYAGPMVEIKNQHTDFLVTPNHRFLTQRFTSGEYTDLEWETAGDMLGDRIRRRLPSLRSLPATQERPGPISLSAVCDRLAIEHKTGPRGIKELRRQARWQPEEYELTDWLRILGWFATEGTLYKSKARQYENGNVRGVSYQTTLCQKNDIGRSEIATLLNRTGITYSSDQNDHSFCSKVLYEILEAECGSDSFSKHLPPWIFQLGPKDLKIVFDTLMQGDSAANGDRFTTSSNQLAEDFIRLAMHIGRRAFHMPNDGSHRIQVNTVRGQRPTIKPKHRQQVDYDGMIHCLTVADNHTVLAGRNRKFNWTGQ

SEQ ID NO: 331 - protein, 430 aa, Synechocystis species, strain PCC6803
  Ssp DnaX intein
CLTGDSQVLTRNGLMSIDNPQIKGREVLSYNETLQQWEYKKVLRWLDRGEKQTLSIKTKNSTVRCTANHLIRTEQGWTRAENITPGMKILSPASVDVDNLSQSTALTASLGGLSGAINYEAINTDKKNTTLSLSLKKQKPQDPFVNADVAKNLIFQHFCSAKEEKLKVSNPIGEDIPTKKATDFGISEQKKLHQGQNRWEQKFSVLSTEPCLGMEVLTIPTHIADSPACDGPTAPSSQNGWNIKRQDWDVCHPKYDSQPIKAMGKVPSAVKPVVPQTLLMFSAQSNLEVKENKFLRNGSRISLKKEWLGGTWTTVPSLFPNLGVHQFSYTQRAFSRKKINLLLNGLPIEDIPPVQNPIAEALTAKPITTQKWEQWPPASGYRTWKSIPSPQWHTNFEEVESVTKGQVEKVYDLEVEDNHNFVANGLLVHN

SEQ ID NO: 332 - protein, 435 aa, Synechocystis species, strain PCC6803
  Ssp GyrB intein
CFSGDTLVALTDGRSVSFEQLVEEEKQGKQNFCYTIRHDGSIGVEKIINARKTKTNAKVIKVTLDNGESIICTPDHKFMLRDGSYKCAMDLTLDDSLMPLHRKISTTEDSGITIDGYEMVWSPRSDSWLFTHLVADWYNRWQGIYIAEEKQHCHHKDFNKRNNNPDNLIRLSPEKHLALHRKHISKTLHRPDVVEKCRRIHQSPEFRRKMSARMQSPETRAILSKQAQAQWQNETYKLTMMESWRSFYDSNEDYRQQNAEQLNRAQQEYWAQAENRTAQAERVRQHFAQNPGLRQQYSENAVKQWNNPELLKWRQKKTKEQWTPEFREKRREALAQTYYRKTLAALKQVEIENGYLDISAYDSYRISTKDKSLLRFDRFCERYFENDENLAREAVLNYNHRIVNIEAVSETIDVYDIEVPHTHNFALASGVFVHN

SEQ ID NO: 333 - protein, 141 aa, Synechococcus species JA-2-3B'a(2-13)
  Ssp-JA2 DnaB intein
CLAGDTQVMDADRGKIWRLDQLAALPAAAELPRLLSLNGRGRLVPQQPVKVFCSGRQPTCVLKTRLNFSIRATGNHPFLTPDGWKTLDELQLEEEVAVVVQEGLIWDPVVLISEPGEPQPVYDIEMPRHHNFVANGLLVHN

SEQ ID NO: 334 - protein, 369 aa, Synechococcus species JA-2-3B'a(2-13)
  Ssp-JA2 RIR1 intein
CVTADTWVHTGDGPRQVRDLIGKQHSTYVNGELFSTTPEGFFYSGTKPVLKLLTKEGFSLRLTGNHRVLKVTAQTQKAQYTEWVPAESLQPGDRILLHNHRDLTSWDGAGTWEEGWLLGNLLGDGGLTATPWNDTALLRYWQDTQAEMSQYAIQLLQTAVGYEPRQPEAYHYAQLGLRVIGSRGLAKLAAQFGMRPGQKQMTEALEATSFQFHRGFLCGLFDADGSVQGNQEKGVSVRLSQSHLGTLKAVQRMLARLGIIAVLYENRRPAGYRLLPNSARQPAPYACKAQHELVIANDNLHLFQEWVGFREPHKAQKLEALLNGYKRQLNRERFAVTVAALEADGVEPVYDCTVPGPACFDANGFVVHN

SEQ ID NO: 335 - protein, 141 aa, Synechococcus species JA-3-3Ab
  Ssp-JA3 DnaB intein
CLAGDTRVRDVDRGKIWRLEQLAALPPSAELPRLLSLNGRGRLVPQQPVRVFCSGRQPTCLLKTRLNFSIRATGNHPFLTRDGWKTLDELQLEEEVAVVVQEGLIWDPVVFISEPGEPQPVYDIEMPRHHNFVANGLLVHN

SEQ ID NO: 336 - protein, 369 aa, Synechococcus species JA-3-3Ab
  Ssp-JA3 RIR1 intein
CVTADTWIHTGDGPRQVKDLIGKQHSTYVNGELFSTTPEGFFYSGTKPVLKLVTQEGFSLRLTGNHRVLKVIAQTPKAQYTEWVPAEELRPGDRILLHNHRDLTPWDGEGTWEEGWLLGNLLGDGSLATTQGNDTAVLRYGQDTQQERSLHAAQVLQAAVGYEPRRPETCYHPKLKCWVIHSTGLARLAAKFGMAPGQKQMTAALEATSFDFHRGFLCGLFDADGSVQGGQEKGVSVRLSQSNLDTLKAVQRMLARLGIVSAIYENRRPAGYRLLPDSKRQPAPYACKVQHELVISGDNLHQFQAVVGFREPRKAQKLGELLGSYQRRLNREWFTVTVAALEPDGVEPVYDCTVPGPSCFDANGLVVHN

SEQ ID NO: 337 - protein, 420 aa, Staphylococcus phage Twort
  StP-Twort ORF6 intein
CISMDSMILTTEGYKSLQEIFETQGVKVDNKEKVIELKYPLINRYGDVEYTSHFTKNGEKPTKRIKTNKGIELVNTYNHPLLVREGFNLIWKKSEDIEVGDILVSRVGDHQFGNNNTVENEEEAYALGCMVADSYLGSYSRLSFSNDKKEILDKVSKFWNTFSNKEVYYDTYKESKGITIHLHDTNKTKEFHDKYKIEYGVAKDKKIPKCIMESPENIQLAFVSGYLECESSISEKNLEVTSASKDLLKDLQLILSNIGIVSTNKEKVVKKYKHNKYYRLIVNRKELIKLLPLLRFETQQRKNQKENFLSNNTKIKSSYGNTIEGSRYLLKKYRDSLNIDKKEFSKYLSRDTITIDRLREVISLYPDGDKEIRELFENVVNNNIYYQKVEQVLEGEIIPTFDVCMPKTHSFIANTIVNHN

SEQ ID NO: 338 - protein, 414 aa, Saccharomyces unisporus, strain CBS 398
  Sun VMA intein
CFEKGTEVLMADGTDKVIEDITIGEQVMGKDGQPREVVGLPRGKMTMYQVCHKATEQNEIALMDYVCSGNHKFVLVTPQNVKITEHMLRGKMYTSVNYFVANDFENGQVVKLRTKTFQHDIHGGADGAKVEAQKFASTIDLSPISWEIEASKYVELDVNVRNATTQLINPVFYESGKLASRLQTKNIDQTSADKLAYVMGSWVGAGSMDQPTFAGNQLDEEFVSRLTEYGSGLDLTKNNSVWDIINESGLRTLNANGEATKTIPKELVSDSISVREHFIAGLVDTQGNVKRASTGAVETASISTVYERISNDLVKLARSLGIKASVSQQEEHVDAKGVDQQQTYNIKLTGSALNGVVRLSALSKNRDEPVSFERLPVPFHFTLLEKAEDNYYGVTLPDATDKQYLLSSLALVHN

SEQ ID NO: 339 - protein, 173 aa, Thermoplasma acidophilum, ATCC 25905; identical to SEQ ID NO: 89
  Tac-ATCC25905 VMA intein

SEQ ID NO: 340 - protein, 174 aa, Thermoplasma acidophilum, DSM1728
  Tac-DSM1728 VMA intein
CVSGDTPVLLDAGERRIGDLFMEAIQDQKNAVEIGQNEEIVRLHDPLRIYSMVGSEIVESVSHAIYHGKSNAIVTVRTENGREVRVTPVHKLFVKIGNSVIERPASEVNEGDEIACASVSENGDSQTVTTTLVLTFDRVVSKEMHSGVFDVYDLMVPDYGYNFIGGNGLIVLHN

SEQ ID NO: 341 - protein, 360 aa, Thermococcus aggregans
  Tag Pol-1 (Tsp-TY Pol-1) intein
CHPADTKVIVKGKGIVNISDVKEGDYILGIDGWQRVKKVWKYHYEGKLININGLKCTPNHKVPVVTENDRQTRIRDSLAKSFLSGKVKGKIITTKLFEKIAEFEKNKPSEEEILKGELSGIILAEGTLLRKDIEYFDSSRGKKRISHQYRVEITIGENEKELLERILYIFDKLFGIRPSVKKKGDTNALKITTAKKAVYLQIEELLKNIESLYAPAVLRGFFERDATVNKIRSTIVVTQGTNNKWKIDIVAKLLDSLGIPYSRYEYKYIENGKELTKHILEITGRDGLILFQTLVGFISSEKNEALEKAIEVREMNRLKNNSFYNLSTFEVSSEYYKGEVYDLTLEGNPYYFANGILTHN

SEQ ID NO: 342 - protein, 538 aa, Thermococcus aggregans
  Tag Pol-2 (Tsp-TY Pol-2) intein
SILPNEWLPIIENGEVKFVKIGEFIDRYMEEQKDKVRTVDNTEVLEVDNIFAFSLNKESKKSEIKKVKALIRHKYKGEAYEVELNSGRKIHITRGHSLFTIRNGKIKEIWGEEVKVGDLIIVPKKVKLNEKEAVINIPELISKLPDEDTADVVMTTPVKGRKNFFKGMLRTLKWIFGEESKRIRTFNRYLFHLEELGFVKLLPRGYEVTDWEGLKRYRQLYEKLVKNLRYNGNKREYLVRFNDIKDSVSCFPRKELEEWKIGTAKGFRAKCILKVDEDFGKFLGYYVSEGYAGAQKNKTGGMSYSVKLYNENPNVLKDMKNIAEKFFGKVRVGKNCVDIPKKMAYLLAKSLCGVTAENKRIPSIIFDSSEPVRWAFLRAYFVGDGDIHPSKRLRLSTKSELLANQLVFLLNSLGVSSIKIGFDSGVYRVYINEDLPFLQTSRQKNTYYPNLIPKEVLEEIFGRKFQKNITFEKFKELADSGKLDKRKVKLLDFLLNGDIVLDRVKNVEKREYEGYVYDLSVEDNENFLVGFGLLYAHN

SEQ ID NO: 343 - protein, 1986 aa, Trichodesmium erythraeum IMS101
  Ter DnaB-1 intein
CAAYDTLVLQKDGSLVTLAEVYKRQEIELLTLGKNSKFYLTKPSAFIDDGIKPIFRVTTKLGRFVETTITHPFLTVNGWKPLSKLQVGEKIAVPRRLNIFGNETISESKFSSLINFDNLYLFPLVFQLERSQLALFIRYLFSLDGWVKIYQNKIVCFGYSTVSEKLIRQIQHILLRFGIVSGIEKFEEKRTEKIKVVKEVKSQRSHREEFTFATYRNCYCDGKWHLTITDALSQKNLMEDIGGFDSKNFYLFDLLQPHNSGNQELENHLIFWDELVNVLAKFAASKNQSLKNRTAKGKSPKNSENLTTTETICRKNILANMENLPSDNQNFDSEKLDLSQPHNSGNQELENHLIFWDELVNVLAKFATSKNQSLKNRTTKRNSPKNSENLTTTETICRKNILANMENLPSDNQNFDSEKLDLPQPHNSGNQELENHLIFWDELVNVLAKFAASKNQSLKNRTTKRNSPKNSENLTTTETICRKNILANMENLPSDNQNFDSEKLDLPQPHNSGNQELENHLIFWDELVNVLAKFATSKNQSLKNRTTKRNSPKNSENLTTTETICRKNILANMENLPSDNQNFDSEKLDLSQPHNSGTQELENHLIFWDELVNVLAKFAASKNQSLKNRTAKGKSPKNSENLTTTETICRKNILANMENLPSDNQNFDSEKLDLSQPHNSGNQELENHLIFWDELVNVLAKFATSKNQSLKNRTTKRNSPKNSENLTTTETICRKNILANMENLPSDNQNFDSEKLDLPQPHNSGNQELENHLIFWDELVNVLAKFATSKNQSLKNRTTKRNSPKNSENLTTTETICRKNILANMENLPSDNQNFDSEKLDLPQPHNSGNQELENHLIFWDELVNVLAKFATSKNQSLKNRTTKRNSPKNSENLTTTETICRKNILANMENLPSDNQNFDSEKLDLPQPHNSGNQELENHLIFWDELVNVLAKFATSKNQSLKNRTTKRNSPKNSENLTTTETICRKNILANMENLPSDNQNFDSEKLDLPQPHNSGNQELENHLIFWDELVNVLAKFATSKNQSLKNRTTKRNSPKNSENLTTTETICRKNILANMENLPSDNQNFDSEKLDLSQPHNSGTQELENHLIFWDELVNVLAKFAASKNQSLKNRTTKRNSPKNSENLTTTETICRKNILANMENLPSDNQNFDSEKLDLPQPHNSGTQELENHLIFWDELVNVLAKFAASKNQSLKNRTTKRNSPKNSENLTTTETICRKNILANMENLPSDNQNFDSEKLDLPQPHNSGNQELENHLIFWDELVNVLAKFAASKNQSLKNRTTKRNSPKNSENLTTTETICRKNILANMENLPSDNQNFDSEKLDLPQPHNSGNQELENHLIFWDELVNVLAKFATSKNQSLKNRTTKRNSPKNSENLTTTETICRKNILANMENLPSDNQNFDSEKLDLPQPHNSGNQELENHLIFWDELVNVLAKFATSKNQSLKNRTAKGKSPKNSENLTTTETICRKNILANMENLPSDNQNFDSEKLDLPQPHNSGNQELENHLIFWDELVNVLAKFATSKNQSLKNRTTKRNSPKNSENLTTTETICRKNILANMENLPSDNQNFDSEKLDLPQPHNSGNQELENHLIFWDELVNVLAKFATSKNQSLKNRTTKRNSPKNSENLTTTETICRKNILANMENLPSDNQNFDSEKLDLPQPHNSGNQELENHLIFWDELVNVLAKFATSKNQSLKNRTAKGKSPKNSENLTTTETICRKNILANMENLPSDNQNFDSEKLDLPQPHNSGNQELENHLIFWDELVNVLAKFATSKNQSLKNRTTKRNSPKNSENLTTTETICRKNILANMENLPSDNQNFDSEKLDLPQPHNSGNQELENHLIFWDELVNVLAKFATSKNQSLKNRTTKRNSPKNSENLTTTETICRKNILANMENLPSDNQNFDSEKLDLPQPHNSGTQELENSDIFWDKIVSIEPVGEKQVYDLTVPETHNFVANDICLHN

SEQ ID NO: 344 - protein, 1365 aa, Trichodesmium erythraeum IMS101
  Ter DnaE-1 intein
CLPKGTLIDQPDGSREAIENIKSGEVILTSDGRKVWEAKVAKQWRSGVREILKITLSSGTVIYSGKNHRFLTPEGDKFAWELQPQVGRVKNALIYGSAVYEKWQVSSNQKQLRKNDAYLLGLLVGKSNLISSTPNVSFSTQGAITWGKNLIDETWGGEAKHYFDTSRRQVYLNFNTQSKPTALTEFLDGIYGAQNWQVESVAKHLPEDILDYSEKDRIDLLRGLWDSGGFDGKKLLYYPGSSPQLLSQVCQLLGSLKIDYYLADNSVRISDRSRFIDILENYQMSSQQKEEISESYLPASSWFLKGGSENNIQKTDSSSRKTGEASQQKATLFTQNLFSAQTPAENWEKVGENHLLSSWFLTDASENNIQKTDSSSRKTGEASQQKATLFTQNLFSAQTPAENWEKVRENHLLSSWFLTNASEIYLQRIDSSSRKTGEASQQKATLFTQNLFSVQTPAENWEKVRENHLLSSWFLTDASENNIQKTDSSSRKTGEASQQKATLFTQNLFSAQTPAENWEKVRENHLLSSWFLTNASENNIQKTDSSSRKTGEASQQKATLFTQNLFSAQTPAENWKKSRKNHLPSSWFLKGGSENNIQKTDSSSRKTGEASQQKATLFTQNLFSAQTPAENWEKVRENHLLSSWFLKDASENNIQKTDSSSRKTGEASQQKATLFTQNLFSAQTPAENWEKVRENHLLSSWFLTDASENNIQKTDSSSRKTGEASQQKATLFTQNLFSAQTPAENWEKVRENHLLSSWFLTDASENNIQKTDSSSRKTGEASQQKATLFTQNLFSAQTPAENWEKVRENHLLSSWFLTNASENNIQKTDSSSRKTGEASQQKATLFTQNLFSAQTPAENWKKARENHLLSSWFLTNASEIYLQRTDSSSRKTGEASQQKATLFTQNLFSVQTPAENWKKARENHLLSSWFLTNASEIYLQRTDSSSRKTGGASQQKATLFNQNLFSVQTPAENWEKVRENYLLSSWFLTNASEIYLQRTDSSSRKTGEASQQKATLFTQNLFSVQTPAENWKKARENHLLSSWFLTNASEIYLQRTDSSSRKTGGASQQKATLFNQNLFSVQTPAENWKKARENHLLSSWFLTNASEIYLQRTDSSSRKTVEASQQKATLFTQNLFSAQTPAENWEKVRENYLLSSWFLTNASEIYLQRIDSSSRKTGEACQQKATLFNQNLFSAQTPAENWKKVRENHLLSSWFLTDASENNIQKTDSSSRKTVEASQQKATLFTQNLFSAQTPAENWKKSRKNHLPSSWFLTDASENNIQKTDSSSRKTGEASQQKATLFTQNLFSVQTPELENWECEKTYLQDVRVVHVVSVEEVGEAECFDLEMEDQSSPYFLAEGVVVHN

SEQ ID NO: 345 - protein, 244 aa, Trichodesmium erythraeum IMS101
  Ter GyrB intein
CFAGNQKVILADGRRLSFAEIVAEQAEGKEHFCYTINQSGNVAIERIINARITKKNASVIKIILDNNETIICTPDHLFMLRDGSYKPAALLTGNDSLMPLSQKSSQKTENSQELDGYEMVWSPQKESWIYTHLLPDFYNLKAGVYQSANGDSCYHVGFKKLNSTKTEGLLTEKHLEFHKTNLELAYRCSERDEFLARDIIPNYNDHYNYRVVSIEPLEERLDVYDIEVPNTHNFALASGVFVHN

SEQ ID NO: 346 - protein, 336 aa, Trichodesmium erythraeum IMS101
  Ter Ndse-1 intein
CFDSKTEILTEAGWVAFPNLQSEVKVATLNSEGKVEYHIPEEYIVQSYIGEMYRFANTNFDFCVTPNHWMYVRNKTGNLEFIRADEAKLWQSLEVLTGGDFEGEKEEWLELRKSPINSHRKVEKIFMDDWLEFLGYYISEGRVDVKKSLRVVGGNDAYVADYNILIGQENSELALKIASCLRRLGFNFSEILFDSDKHQFRVCSKQLAEMLLPLGKSGEKYIPRELLKLSKRQLLILFKALIMGDNSEQKNHYTYYSKSKRLADDIQELALRCGYAATVVSHAVGRDLYQVNIRPAEDANLVVPERFHYVGKVYCVNVTNHVVFVRRNGRAAWCGQ

SEQ ID NO: 347 - protein, 430 aa, Trichodesmium erythraeum IMS101
  Ter Ndse-2 intein
SLTGDQKVLYYIAKKLYYETFAECYDRINGDISSVSVPCFDENYQTVIKPISAIWKHHVKKKGFKIKITWGKQIKITEDHSLFTRNENNKPQAVFGNEIKVGDEIGIPSYISFLEQPLEPFHITDKILIQEEIYVESEDTISYIEKYGDKMREYLLAKSLSPSQFYSILKTYEAKNQIPWHLWKYLELPLSEKDKVCYLSKKAIKNWIDNVEELLWFLGFYVARGSLIKNEVVLKGEPSQLEKVIELIERIFEYKSEINDSGYISIKSKILVDLIGYGLNFGNQEKDIPNWILQLPEQQLIRFLKGFVAGNNLENQLNFYLEFKTDSQLVAEKLVLILSKFGLVADVSEIEVNEEDIAKIYRIIIEGLEDKNIHNLSKVEQKISALTTGDIAWGKIESIEEFEIDDYVYDFSVPNYENFIGGSYNVFAHN

SEQ ID NO: 348 - protein, 469 aa, Trichodesmium erythraeum IMS101
  Ter Snf2 intein
CVLHDTEIYVNGMVMEAEQIWQAYAGEAEFDGEGFWTEPNKELLVNSLDETTGKIVFARIRRLYRQWVREKLRKVRLKDGSSITITCRHKLFIRDSWKNDFQVGDDVCVPAKLMWDGKPEDPDVVKFVAWQVAEGWERVNSGMFGVSQKGKDVLEGLLEVFSRLGKRYDIKINCPKVVAHGSKKNCYEFSAHSLEYRKFLEEKRYGWGKRSHEKTIPLFIMQADLDSVRVFLSNYFDAEGWVNKTVRCVEISTASSQLIQELSILLRRFGVWMKISPQQKCATNGTGVFCTYYIGTFGGNSARCFLQEIGFNDSGKQENLKSICEKIADSNVEGIPASDIVAELVEKTQLPVGSLGIQDPIYMDGCQDFSPTSLEKVINSIEDIISGAGEEEYGQLKSSKLRNKTLEAYSLLNILELEIYKTRLQKLLNQEVYYCQIESIEEMEYEGWVYDFEVSKYHNFVANNIICHN

SEQ ID NO: 349 - protein, 298 aa, Trichodesmium erythraeum IMS101
  Ter ThyX intein
CLSGNTKVRFRYSSSSQEAKYYEETIEKLANLWHYGSKNQYTSKDAKCMQENISSRNIFTLDTQTNQIVSSKITNIYINGEKETYTIKTVSGKEIRATLEHQFWTNQGWKRLKDFNNSTQLCEVQLAGNKVTPQEVKFLEKEMFNEKWIPVRNYDGYKIYSLDILNSYLIQKENKEHSRSKSKNCLLPNLNYGIRYDRLSEVNINRLVMENLKLLGEYKELEVRHLNENSFNNKPKKFAWNSSKSDQIDNINNNSFSDNSGVFVEIESIEKFGKEITYDLEVEHPEHNFIANGLVVHN

SEQ ID NO: 350 - protein, 360 aa, Thermococcus fumicolans
  Tfu Pol-1 intein
CHPADTKVIVKGKGVVNISEVREGDYVLGIDGWQKVQRVWEYDYEGELVNINGLKCTPNHKLPVVRRTERQTAIRDSLAKSFLTKKVKGKLITTPLFEKIGKIEREDVPEEEILKGELAGIILAEGTLLRKDVEYFDSSRGKKRVSHQYRVEITVGAQEEDFQRRIVYIFERLFGVTPSVYRKKNTNAITFKVAKKEVYLRVREIMDGIENLHAPSVLRGFFEGDGSVNKVRKTVVVNQGTNNEWKIEVVSKLLNKLGIPHRRYTYDYTEREKTMTTHILEIAGRDGLILFQTIVGFISTEKNMALEEAIRNREVNRLENNAFYTLADFTAKTEYYKGKVYDLTLEGTPYYFANGILTHN

SEQ ID NO: 351 - protein, 389 aa, Thermococcus fumicolans
  Tfu Pol-2 intein
SVTGDTEVTIRRNGRIEFVPIEKLFERVDHRVGEKEYCVLGGVEALTLDNRGRLVWKKVPYVMRHKTDKRIYRVWFTNSWYLDVTEDHSLIGYLNTSKVKPGKPLKERLVEVKPEELGGKVKSLITPNRPIARTIKANPIAVKLWELIGLLVGDGNWGGQSNWAKYYVGLSCGLDKAEIERKVLNPLREASVISNYYDKSKKGDVSILSKWLAGFMVKYFKDENGNKAIPSFMFNLPREYIEAFLRGLFSADGTVSLRRGIPEIRLTSVNRELSDAVRKLLWLVGVSNSLFTETKPNRYLEKESGTHSIHVRIKNKHRFADRIGFLIDRKSTKLSENLGGHTNKKRAYKYDFDLVYPRKIEEITYDGYVYDIEVEGTHRFFANGILVHN

SEQ ID NO: 352 - protein, 341 aa, Thermobifida fusca YX
  Tfus Hyp-2914 intein
CVDEETEILTTDGWKTFRETAPGDLALTLNHSTGLAEWQPILDVYVFPAQPRTMIRMEGRTHSSLTTPQHRWPVERATRTTAASEETRRERTWATTETLTDGDRIPQAAPCRDLPTEPKWSDALVELVAWLWLGDHATRSRHSATLALSQRDGLGAARIRAALHSLFGPPAPQPSRGGRRPWWRERLTRSCVEFHLSPGASRMLLEHIPDGAVSFGFLRSLTRAQLNLFIDTSVRACRAHGTTTASRTALVHRDRRRAEAFQFAAILAGYPASLRHRTLPGPAPADVWLVHLDTAQDFAPKAATPGLTIAEEPYTGRVWCVRTPNATWLARRAGTVYFTGN

SEQ ID NO: 353 - protein, 422 aa, Thermobifida fusca YX
  Tfus RecA-1 intein
CLTADTYVWTDRGLETVAEVFGRAGLPLSSTSRVTDVRDRDIRVVNEKGELEQVAALTHNGRQPVVRITVASGRQVTVTRNHPLRVMNDDGFIVWREAGQLREGDVLVSAAFGAVQAASGGGLSEDEAVLLGYLTAAGSLDPAGHVCFTTTDIETGAEFAALAEWLLDTTVTAVPGDGQVAYVLSDPAARHTLAERYGVDYAAAARIPQCVRTAGDKMQRAFLAALYTAAGWTDTSAAVGLRTASAPLAREVQYLLYGLGIPADLDRSHGNGQHPWAVTISPAAAPRFHTEVGFRTAQQSPQTGLHEPTPQVEAIPNLTGLIHALRDSIGDRAESTDDPFPAASGGAYDRDQVRRVIDWAKRRTDEAPATANAILGYLTQLTDARYTYEPITAVEDAGQQPTFDLMVPRTHSFLANGILSHN

SEQ ID NO: 354 - protein, 357 aa, Thermobifida fusca YX
  Tfus RecA-2 intein
CMHYDTLVTLADGTQEKIGTIVDRKLDVEVLSYDPETDRIVPRRVVNWFDNGAADHFLQFTVGRSGKPGGAQFTATPNHLIRTPGGWREAGELIAGDRVLVHEPHYLNEQQRQVVYGSLMGRGTLVPDRHGGPGVHFCMAHTAEQAAYLDWKVSLLGNIAHSRTAEASATVGVEFTPMPELSELHRVVDFGDGHTHLTWEFLKQLTPLALAVWYLDAGTLTIPQSGTDDDARVQIDVETLSPGSRQRLVEYLRDTHELDAAVVQQGADARSLLEFTPAATVRFLELVAPYVPESMSSMLLAQFRGRCSVTPEYSDPVQRLVAAPVLDIQVKPGSTRKFDIEVEGNHNYFVDGVMVHN

SEQ ID NO: 355 - protein, 456 aa, Torulaspora globosa, strain CBS 764
  Tgl VMA intein
CFAKGTPVMMHDGSVKAIETINVGEEVMGADGLGRKIVGLPRGREVMYKVSQKTEHRAYETDETRSAPVGLFEYTCNATHKLVVRTPRSCRTLNRTMKGVEYYEVVFFDLAKEKLKDGREIEVVKEISRSYPVTEGPERAAEIMKEYQEAGAGKQFFEWTIEARDVGALGAHVRKATHQVYAPVLYESDFFFHYVKDSKFCLKSEAPFALAYLLGLWVGDGLSDRAVFSVDSEDTTLFDRIIDFADILDLSAEYKDREIPKRAKTVGLFPKTIRGNDIGRNLNTDNPLWNAIVDLGYLKGGVKHVPSYLLTDSIPHREVFLAGLIDSDGYVRGEEAPAATIKTIHKTVMEGTVAVARSLGLTVSVNIEEAKVDKDGVNHRPAYAIYISGGDALLSVLANCASAKKHRAAPTKEVVRGLNEVYFEMKELQEDDYYGITLSENSDHQFMLANQLVVHN

SEQ ID NO: 356 - protein, 537 aa, Thermococcus hydrothermalis
  Thy Pol-1 intein
SLLPEEWIPLVENGKVRLHRIGEFVDKLMETDSELVKRNGDTEVLEVRGIRALSFDRKSKKARVMPVKAVIRHRYSGDVYEIVLGSGRRITVTEGHSLFAYGDGELREVTGGEIKAGDLLAVPRRVNLPEKKERLNLVELLRRLPEEETGDIILTIPVKGRKNFFKGMLRTLRWISGEEKRPRTARRYLEHLEGLGYVRLKKIGYEVTDREGLERYRKLYERLVEAVRYNGNKREYLVEFNAVRDVIALMPEEELRDWLVGTRNGFRMRPFVEIEEDFAKLLGYYVSEGNARKWRNQKNGWSYTVKLYNENQRVLDDMESLAERFFGRVKRGKNYIEIPRKMAYIIFENLCGTLAENKRVPEAIFTSPESVRWAFIEGYFIGDGDVHPSKRVRLSTKSELLVNGLVLLLNSLGVSAIKIRHDSGVYRVYVNEELPFTDYRKKKNAYYSHVIPKEILEETFGKVFQRSVSYEKFRELVKSEKLDGEKAKRIEWLLNGDVVLDKVLEVKKRPYEGYVYDLSVEEDENFLAGFGLLYAHN

SEQ ID NO: 357 - protein, 389 aa, Thermococcus hydrothermalis
  Thy Pol-2 intein
SVTGETEIIIKRNGKVEFVAIEELFQRVDYRIGEKEYCVLEGVEALTLDNRGRLVWKSVPYVMRHRTNKRIYRVWFTNSWYLDVTEDHSLIGYMNTSKVKPGKPLKERLVEVKPGELGESVKSLITPNRAIAHGIRVNPIAVKLWELIGLLVGDGNWGGQSNWAKYNVGLSLGLDKEEIEEKILKPLKNTGIISNYYDKSKKGDVSILSKWLARFMVRYFKDESGSKRIPEFMFNLPREYIEAFLRGLFSADGTVSLRKGVPEVRLTSVNPELSSSVRKLLWLVGVSNSMFVETNPNRYLGKESGTHSVHVRIKDKHRFAERIGFLLDRKATKLSENLGGHTSKKRAYKYDFDLVYPKKVEEIAYDGYVYDIEVEGTHRFFANGILVHN

SEQ ID NO: 358 - protein, 140 aa, Thermococcus kodakaraensis KOD1
  Tko CDC21-1 intein
CVAPDSIIKTNLGQFKIGELVEKAIPEKVQDYKSVNAEKLGLYIKTLDGDMRVLRLWKLRAPEKLIRIEGDGLSITVTPETKLLTPNGWVEARNVDGEVVTENGPVKVSKQEIESPHDYVYDLTVEGSHSFIANGFVVHN

SEQ ID NO: 359 - protein, 335 aa, Thermococcus kodakaraensis KOD1
  Tko CDC21-2 intein
SYHHDFELLLADGRKVKIGELVDKLIEKNRDRVILGKDTEILPVEDIELLAYDLEKREIVKVKADRVSRHKAPERFIKLRFSNGREITVTPEHPVMVWENGEITEKPAEKITPGDIALGVLRYPIQVDGKFKERYRDMREAEDYQDYLYSRGVVSKIKRTGIYFTVEKARRALPRELVKPLINAGKILRVTQTPKERASFNQKLVRENIIEGYLQRIIERMDELERLSREDPAKALELLPKTQLYYKYGITYGKLKKLAEARNSWAEGIIQSAVAERISLAKRELEEFFKWWNANVNFLKVKCVEEIKNDRWEWVYDVTVEPHHLFVSHGLVLHN

SEQ ID NO: 360 - protein, 546 aa, Thermococcus kodakaraensis KOD1
  Tko IF2 intein
CLLPDEKVILPEHGPITLKGLFDLAKETVVADNEKEIRKLGAKLTIVGEDGRLRVLESPYVWKVRHRGKMLRVKLKNWHSVSVTPEHPFLTTRGWVRADQLKPGDYVAVPRVIHGNESDERFVSFVYEKLKNDELIAKLRGEVLSKISSEFKGDRAYKVERNVFRWEDIERLNLWDEVERVAFTPRMHRSGKPLHYVKLPRSPEEWEAFFYFAGVMFGDGSQDKIANNDVEVYEELKKLSVLGVAVKRVERTTSYEIELTNGKNALLRLLRVLFEYPERQKAKSIRVPRILFIAPRKYVSRFLRGYFDADGHVSLKDARIEVTSASQEFLEDLSLLLLRFGIVSKIYRSDYTTLVISGRRNLDLFRRYIGFSVKNKAEALEKAIKKSRRSESYPIFEELKRLRLLFGFTRTELNSNVPFYGKYESEEAPSYETLMRILDAIEKGSINLDKKIAVLEGRIRDHNYIKAFEKDGLIKDGKLTELGRELLEVWRNREFDSSDVDYIRNLAENLVFIPVEDIEEFEYEGYVYDVTTETHNFVANGILVHN

SEQ ID NO: 361 - protein, 523 aa, Thermococcus kodakaraensis KOD1
  Tko KlbA intein
ALYDFSVIQLSNGKFVLIGDVVEELFNKYSDRIKTYKDLEYIELDPEDQFEVVSVGPNLKAGKHTVTAVWRRKVRNGEKLIRIRTRTGNEVILTKTHPFFVFSDGDVVRKEAEKVRPGDRVAVMMRPPKAPQSPAVVPVEVYAGISDYYLVPNGNGMKKVPNRGVPPEDAEYLLSRNSKPVKLVREVGTSLAYVAGVILGDGYLSSDGYNLSVTFDDPDYMNSFTSAMSEFLPESAPRIKDNGTSTVVTYGSRIFNEMLSRIFGIPRGKKSSIWDVPDVVLTNDDLMRYFIAGLFDADGSVDETGPAVILTTKSESAARKIWYALQRLGIISTVSRVRNRGFKEGHIFRVIISSVEDLKKFDALIPLSHSRKREKLKAILKEKRPYRGRYTYRVPISPEMIKPLRTRLNLTVAELSKLASKYAGETITESLIRHVEKGRTSEIRRSALKGIALALQRIAQDIGDEDAWVMAKRLELIADGDVYWDRVVEVEEVDPEEIGIEYLYDLTVDEDHNYVANGILLSN

SEQ ID NO: 362 - protein, 525 aa, Thermococcus kodakaraensis KOD1
  Tko LHR intein
CVSGDSKILTGKGPVEIGRLNSNMIAGIWRFQTELVRFEEPHRVEYRREGVKIRTRLGFEIKATKEHKFLTVDENGELRWVEAWKLKEGNWVGVVRRLPSPNVKVSILDLLPPNAYLKLKGEFLRELKLSIQAKFGSIRTYAKKKRWSESYLVKQLNGVYPFRWERLSAVLKDLDLRMTENDVERITSDKGKYSLPIEFTPSMARLLGFWMADGSWKGGTLTLFSSDRKMLEKYKELCKEEFGVVGRIRMLNESTYSLEISFNLLPAIFKNLTGNTERKSKLGTFPSIIYSLPEEHKREFLAGYFDGDGFLEVKGGRVYSAGFSTFNKRFAEGIRDILLQLGIVSSIRAREYDEVQKFKGRVIPKKGASYTVSVLGGEYLKRFFDAVRPWRSDYEGWEGMYNEGYSNSDVVPNLGKRLRSIRERLGISAYRMSKMGFYNPVRVELGEREISRRNLRLLVEFYERVAKEKRVEDVLEELSYLRELAEGDVFFDRITSVEPAYIDVAYGIINSETENYIVEGFISKN

SEQ ID NO: 363 - protein, 360 aa, Pyrococcus/ Thermococcus kodakaraensis KOD1
  Tko Pol-1 (Pko Pol-1) intein
CHPADTKVVVKGKGIINISEVQEGDYVLGIDGWQRVRKVWEYDYKGELVNINGLKCTPNHKLPVVTKNERQTRIRDSLAKSFLTKKVKGKIITTPLFYEIGRATSENIPEEEVLKGELAGILLAEGTLLRKDVEYFDSSRKKRRISHQYRVEITIGKDEEEFRDRITYIFERLFGITPSISEKKGTNAVTLKVAKKNVYLKVKEIMDNIESLHAPSVLRGFFEGDGSVNRVRRSIVATQGTKNEWKIKLVSKLLSQLGIPHQTYTYQYQENGKDRSRYILEITGKDGLILFQTLIGFISERKNALLNKAISQREMNNLENNGFYRLSEFNVSTEYYEGKVYDLTLEGTPYYFANGILTHN

SEQ ID NO: 364 - protein, 536 aa, Pyrococcus/Thermococcus kodakaraensis KOD1
  Tko Pol-2 (Pko Pol-2) intein
SILPEEWLPVLEEGEVHFVRIGELIDRMMEENAGKVKREGETEVLEVSGLEVPSFNRRTNKAELKRVKALIRHDYSGKVYTIRLKSGRRIKITSGHSLFSVRNGELVEVTGDELKPGDLVAVPRRLELPERNHVLNLVELLLGTPEEETLDIVMTIPVKGKKNFFKGMLRTLRWIFGEEKRPRTARRYLRHLEDLGYVRLKKIGYEVLDWDSLKNYRRLYEALVENVRYNGNKREYLVEFNSIRDAVGIMPLKELKEWKIGTLNGFRMRKLIEVDESLAKLLGYYVSEGYARKQRNPKNGWSYSVKLYNEDPEVLDDMERLASRFFGKVRRGRNYVEIPKKIGYLLFENMCGVLAENKRIPEFVFTSPKGVRLAFLEGYSSAMATSTEQETQALNEKRALANQLVLLLNSVGVSAVKLGHDSGVYRVYINEELPFVKLDKKKNAYYSHVIPKEVLSEVFGKVFQKNVSPQTFRKMVEDGRLDPEKAQRLSWLIEGDVVLDRVESVDVEDYDGYVYDLSVEDNENFLVGFGLVYAHN

SEQ ID NO: 365 - protein, 474 aa, Thermococcus kodakaraensis KOD1
  Tko Pol-II intein
CFPGDTRILVQINGLPQRITLRELYDLFEDERYENMAYVRKKPKADVKVYSFDPESGKVVLTDIEDVIKAPSTDHLIRFELELGRSFETTVDHPVLVYENGKFVEKRAFEVREGDRILVPNLKLPEKNIDYLDLLKEFSREEFAHLHDRIMVRGIAEWLRSVEADVKEDYLRRDSIPLSVLLRVLTEKEISIEEVPSCWLGFKRDKVRIKRFVPLKPLLRVVGYYLAEGYARESKSVYQLSFSMAEKEVREDLKRALREAFGDGFGIYERGGKVTVGSRILYLLFTEVLKAGKNAYSKRVPSLVFTLPREAVAEMLKAYFEGDGSALKSVPRVVAYSVNKALLEDIETLLLAKFGIRGYYTFDNNANRGNARGRLYHVERGTEAPVSKVYALNIAGEHYHRFFNSIGFVSERKNSIYELHAEKSPAQDRYSSQNGWLVKVRRIEYITPKDDFVFSLNAKKYHNVIINESIVTHQ

SEQ ID NO: 366 - protein, 489 aa, Thermococcus kodakaraensis KOD1
  Tko r-Gyr intein
CVTPDTLVSLADGRIMEIKDAVEKSEGNLLSVNGLKPKEAKALKFWEIDWNGPLKVIKLKNGHEIKATPDHGLLVMREGKLGWVSAKNVREGDYVAFAYNTGHRGRDEYTLLKLMIKLGITDVMVELDEEYFNEKVAPIVRERISTSTKYKYLRRRVLPLYLLQEWGLDDYEAHVKSLYRQRAGSKPIPNFKLDGRFWYVFGLVLGDGTLRDSKVLISQTPLKDVKSVLEDVFPFLRVFETTNQVGFSNSIIAEVFRRLGARKGKLHPLVFGLREEYINAMIAGYFDTDGTFSILNDRKGPNFRGILTSKRGDVLRMLSVYLYQIGIMNYLRRDERTGVWDLIISNRSLEKFREKIYPYLRIRRAQFDEAYSVYRASRRAFEGDLLPVAPVFGKLKFKNGTKNRILKETGIDVWNWLKRPEGEIPRDKLSKVLEYAEESPEKEFLKSLVEAGVTWVKVKGVEEELYTGKLYDFTTTTENFLSNGAVSHN

SEQ ID NO: 367 - protein, 482 aa, Thermococcus kodakaraensis KOD1
  Tko RadA intein
CFAKDTKVYYENDTLVHFESIEDMYHKYASLGREVPFDNGYAVPLETVSVYTFDPKTGEVKRTKASYIYREKVEKLAEIRLSNGYLLRITLLHPVLVFRNGLQWVPAGMIKPGDLIVGIRSVPANAATIEESEAYFLGLFVAEGTSNPLSITTGSEELKDFIVSFIEDHDGYTPTVEVRRGLYRILFRKKTAEWLGELATSNASTKVVPERVLNAGESAIAAFLAGYLDGDGYLTESIVELVTKSRELADGLVFLLKRLGITPRISQKTIEGSVYYRIYITGEDRKTFEKVLEKSRIKPGEMNEGGVGRYPPALGKFLGKLYSEFRLPKRDNETAYHILTRSRNVWFTEKTLSRIEEYFREALEKLSEARKALEMGDKPELPFPWTAITKYGFTDRQVANYRTRGLPKRPELKEKVVSALLKEIERLEGVAKLALETIELARRLEFHEVSSVEVVDYNDWVYDLVIPETHNFIAPNGLVLHN

SEQ ID NO: 368 - protein, 454 aa, Thermococcus kodakaraensis KOD1
  Tko RIR1-1 intein
CIDGNAKIIFENDGEEHIMTMAEMYERYKDLGEFYDPEYNRWGINVEEVPVYVKSFDPSTKEITKGKVKVIWKYELGEDVPKYEIKTNKGTRVLTSPWHPFFVITQDLKIVEKRADELREGDMLVGGMPSDDDYEFLLDYWLAGFIAGDGSIDKYRSHVKGHEYVYDRLRIYDYTTETLGIINDHLEKTFGKRYSLQRDRNIHYIDIKAKGITSHYIELLRGITNGIPQPILKEGRNAVLSFITGLFDAEGHVNSKPGVELGMVNRKLIEDITYYLNSLGIKARMRKKPRKDGVDYVMHVEEYSSLLRFYELIGKNLQNSEKRIKLEELLSKHNGGSFGLTLSFEDFKAWSSKYGVEFKTNGSQTLAIIKNEKVSLGQWHRRGRVSKAVLVKMLRKLYDTTKSEDVKRMLHLIEGLEVVKEINVTNEPKTFYDLTVERYQNYLAGENGMVFVHN

SEQ ID NO: 369 - protein, 382 aa, Thermococcus kodakaraensis KOD1
  Tko RIR1-2 intein
CVVGDTRVLTPEGYIKAEELFSLAKERGKKEAVAVEGIAEEGEPYAYSVEVLLPGEEEVKYETVHGKALAIADPVAVPAYVWKVGKKKVARVRTKQGYEITATLDHRLMTSEGWKEVGELKPGDEILLPRFEIEEDFGSESIGEDLAFVLGWFIGDGYLNVNDKRAWFYFNAEKEEDIAWKIREILAKHFGIKAEPHRYGNQIKLGVRGEAYRWLESIMGSNEKRVPEIIYRLKPREIAAFLRGLFSADGYVDNDNAVRLTSKDRGLLRDVQDLLLLFGILSKIYERPYSSEFKYTTKDGEERTYRAEGYYELVIANYSRKLFAEKIGFEGYKMEKLSLQKTKIDEPVVTVESVEVLGEEIVYDFTVPEHHSYISNGFMSHN

SEQ ID NO: 370 - protein, 511 aa, Thermococcus kodakaraensis KOD1
  Tko TopA intein
CLHPDSLIPTPQGVKRIKELPEKGEVFALDFDLKLSRARYRLLERDADEPMYKVTLSDRTELYLTADHPVLVYRDDQLIFVPAEELRENDQVVLFINRSEYSPRTESPTLLGFLLENATSMKDYILYDPEFGGVLRNRIKDAGLKTEILWRFRIREPTYYKYLRGKMPVPIVRFLLEEGVVSIEELREVFRGFSYSTSLTPISFEFSEEFWYLFGLVAGDGHLAKKGAITIPAKDRTEDTVKAVKEIANSLQVPFAFDEKYKMIILRSKSLTRLFELLGCPYGNKTEIFRIPGEIMAKPEWMAAFLAGYYDADGHIGTKPTGGKKSHSPQIVLTSKNRMAIYTVKQMWQLLGVGTYLWEKKDRNGNFMAYELKVYSRDAWRFYEVMKNHLRIKRKDLEHVKEVAIRKRKAYSHHYSVLNVKSWEGKIKSSNVLWKKFDMSNQTAHGRGISLDKLQRIVDYLTDTDLRRIAMGDVYVLGIRSIEKFHYRGKVYDLVVDQYHNFIANGVVVHN

SEQ ID NO: 371 - protein, 538 aa, Thermococcus litoralis
  Tli Pol-1 intein
SILPNEWLPIIENGEIKFVKIGEFINSYMEKQKENVKTVENTEVLEVNNLFAFSFNKKIKESEVKKVKALIRHKYKGKAYEIQLSSGRKINITAGHSLFTVRNGEIKEVSGDGIKEGDLIVAPKKIKLNEKGVSINIPELISDLSEEETADIVMTISAKGRKNFFKGMLRTLRWMFGEENRRIRTFNRYLFHLEKLGLIKLLPRGYEVTDWERLKKYKQLYEKLAGSVKYNGNKREYLVMFNEIKDFISYFPQKELEEWKIGTLNGFRTNCILKVDEDFGKLLGYYVSEGYAGAQKNKTGGISYSVKLYNEDPNVLESMKNVAEKFFGKVRVDRNCVSISKKMAYLVMKCLCGALAENKRIPSVILTSPEPVRWSFLEAYFTGDGDIHPSKRFRLSTKSELLANQLVFLLNSLGISSVKIGFDSGVYRVYINEDLQFPQTSREKNTYYSNLIPKEILRDVFGKEFQKNMTFKKFKELVDSGKLNREKAKLLEFFINGDIVLDRVKSVKEKDYEGYVYDLSVEDNENFLVGFGLLYAHN

SEQ ID NO: 372 - protein, 390 aa, Thermococcus litoralis
  Tli Pol-2 intein
SVSGESEIIIRQNGKIRFVKIKDLFSKVDYSIGEKEYCILEGVEALTLDDDGKLVWKPVPYVMRHRANKRMFRIWLTNSWYIDVTEDHSLIGYLNTSKTKTAKKIGERLKEVKPFELGKAVKSLICPNAPLKDENTKTSEIAVKFWELVGLIVGDGNWGGDSRWAEYYLGLSTGKDAEEIKQKLLEPLKTYGVISNYYPKNEKGDFNILAKSLVKFMKRHFKDEKGRRKIPEFMYELPVTYIEAFLRGLFSADGTVTIRKGVPEIRLTNIDADFLREVRKLLWIVGISNSIFAETTPNRYNGVSTGTYSKHLRIKNKWRFAERIGFLIERKQKRLLEHLKSARVKRNTIDFGFDLVHVKKVEEIPYEGYVYDIEVEETHRFFANNILVHN

SEQ ID NO: 373 - protein, 455 aa, Torulaspora pretoriensis, strain CBS 5080
  Tpr VMA intein
CFAKGTKVLLHDGSLRAIESIEVGEDVMGVDGERRKVVGLPRGREVMYKVSQKTTNRAHETAETRSEPLGLFEYTCNATHKLVVRTPRSCRLLTRNENGADYYDVAFFDLVKTKLKDGREIEIVKEMSNSYLATEGPEKAAQMVKEYQEASEGKEFFEWTIEARDVAVLGADVREATYQVYSPVLYESDFFSQYVKDSKFGLTSEAPLALAYLLGLWAGDVSSEETVFSVNSEDGSLYERITQFADILGLSAEFKDREAPKQGKTVYLHPKAIGGNDIQENSNNDNPLRNAIVDLGYLTDGVKNVPTYLLSDAIPHREIFLAGLIDSDGFVRSEDGCSATIKTTLKTVMAGTVAVARSLGLNVSVNTEEAKVDNGVDQRLSYAISISVSDALLSVLAKCAGAEMFRELPASEVVRKMNKVYFEMEELEEDDYYGLTLANGTDHQFMLANQLVVHN

SEQ ID NO: 374 - protein, 535 aa, Thermococcus species GE8
  Tsp-GE8 Pol-1 intein
SILPDEWLPLLVNGRLKLVRIGDFVDNTMKKGQPLENDGTEVLEVSGIEAISFNRKTKIAEIKPVKALIRHRYRGKVYDIKLSSGRNIKVTEGHSLFAFRDGELVEVTGGEIKPGDFIAVPRRVNLPERHERINLIEILLGLPPEETSDIVLTIPVKGRKNFFKGMLRTLRWIFEEEQRPRTARRYLEHLQKLGYVKLMKRAYEIVNKEALRNYRKLYEVLAERVKYNGNKREYLVHFNDLRNEIKFMPDEELEEWKVGTLNGFRMEPFIEVGEDFAKLLGYYVSEGYARKQRNQKNGWSYSVKIYNNDQRVLDDMEKLASKFFGRVRRGKNYVEISRKMAYVLFESLCGTLAENKRVPEVIFTSPESVRWAFFEGYFIGDGDLHPSKRVRLSTKSEELVNGLVVLLNSLGISAIKIRFDSGVYRVLVNEELPFLGNRKRKNAYYSHVIPKEILEETFGKQFQKNMSPAKLNEKVEKGELDAGKARRIAWLLEGDIVLDRVEKVTVEDYEGYVYDLSVEENENFLAGFGMLYAHN

SEQ ID NO: 375 - protein, 389 aa, Thermococcus species GE8
  Tsp-GE8 Pol-2 intein
SVAGNTEVIIRRNGKVEFVPIEKLFQRVDYRIGEKEYCALEGVEALTLDNRGRLVWRKVPYIMRHKTNKKIYRVWFTNSWYLDVTEDHSLIGYLNTSKVKSEKPLKERLVEVKPRELGEKVKSLITLNRAIARSIKANPIAVRLWELIGLLVGDGNWGGHSKWAKYYVGLSCGLDKAEIEEKVLRPLKEAGIISNYYGKSKKGDVSILSKWLAGFMVKYFKDENGNKRIPSFMFNLPREYIEAFLRGLFSADGTVSLRRGIPEIRLTSVNRELSNEVRKLLWLVGVSNSMFTETTPNKYLGNESGTRSIHVRIKNKHRFAKRIGFLLDRKATKLSDNLREHTNKKMAYRYDFDLVYPKKIEEINYDRYVYDIEVEGTHRFFANGILVHN

SEQ ID NO: 376 - protein, 537 aa, Thermococcus species GT
  Tsp-GT Pol-1 intein
SLLPEEWIPLVENGKVRLHRIGEFVDKLMETDSELVKRNGDTEVLEVRGIRALSFDRKSKKARVMPVKAVIRHRYSGDVYEIVLGSGRRITVTEGHSLFAYGDGELREVTGGEIKAGDLLAVPRRVNLPEKKERLNLVELLRRLPEEETGDIILTIPVKGRKNFFKGMLRTLRWISGEEKRPRTARRYLEHLEGLGYVRLKKIGYEVTDREGLERYRKLYERLVEAVRYNGNKREYLVEFNAVRDVIALMPEEELRDWLVGTRNGFRMRPFVEIEEDFAKLLGYYVSEGNARKWRNQKNGWSYTVKLYNENQRVLDDMESLAERFFGRVKRGKNYIEIPRKMAYIIFENLCGTLAENKRVPEAIFTSPESVRWAFIEGYFIGDGDVHPSKRVRLSTKSELLVNGLVLLLNSLGVSAIKIRHDSGVYRVYVNEELPFTDYRKKKNAYYSHVIPKEILEETFGKVFQRNVSYEKFRELVKSEKLDGEKAKRIEWLLNGDVVLDKVLEVKKRPYEGYVYDLSVEEDENFLAGFGLLYAHN

SEQ ID NO: 377 - protein, 389 aa, Thermococcus species GT
  Tsp-GT Pol-2 intein
SVTGETEIIIKRNGKVEFVAIEELFQRVDYRIGEKEYCVLEGVEALTLDNRGRLVWKSVPYVMRHRTNKRIYRVWFTNSWYLDVTEDHSLIGYMNTSKVKPGKPLKERLVEVKPGELGESVKSLITPNRAIAHGIRVNPIAVKLWELIGLLVGDGNWGGQSNWAKYYVGLSLGLDKEEIEEKILKPLKNTGIISNYYDRSKKGDVSILSKWLARFMVRYFKDESGSKRIPEFMFNLPREYIEAFLRGLFSADGTVSLRKGVPEVRLTSVNPELSSSVRKLLWLVGVSNSMFVETNPNRYLGKESGTHSVHVRIKDKHRFAERIGFLLDRKATKLSENLGGHTSKKRAYKYDFDLVYPKKVEEIAYDGYVYDIEVEGTHRFFANGILVHN

SEQ ID NO: 378 - protein, 423 aa, Thermus thermophilus HB27; identical to SEQ ID NO: 91
  Tth-HB27 DnaE-1 intein

SEQ ID NO: 379 - protein, 423 aa, Thermus thermophilus HB27
  Tth-HB27 DnaE-2 intein
CLPARARVVDWCTGRVVRVGEIVRGEAKGVWVVSLDEARLRLVPRPVVAAFPSGKAQVYALRTATGRVLEATANHPVYTPEGWRPLGTLAPGDYVALPRHLSYRPSLHLEGHELDLLGFALAEGHLRHPSGVYLYTSSEEELAAMEEALRAFPNTRIRVVWRRGVAHVYVGRVDRRQEAGAVAFLRRMGLLGLDAKTKRLPEAVFGLPPEEVARFLGRLWTGDGGVDPKGRLIHYATASKELAWGVQHLLLRLGLQSRLVEKRFSGGYKGYAVYLLGGLEAARRFAETVGPYLVGKRRQDLEALLASWEKAGRSTGDVLPLAFLEEVRAAVAEVAQGQVADLLREAGLAEGLLCLGRGRRGLSRATVGRLAALTGSLALLRLAEAEVYWDRVEAVEPLGEEEVFDLTVEGTHTFVAEDVIVHN

SEQ ID NO: 380 - protein, 438 aa, Thermus thermophilus HB27
  Tth-HB27 RIR1-1 intein
CLHPDTLVHTDRGTLRLRELVDPFRRGWQPHTLSVATDEGWRPSPEGYNNGVAPTLRVVLENGLEVQGTLNHKLKVLREDGTREWVELQDLRPGDWVIWVLDEHTGTPVQLAPLDEPLHPNTTPIRTPEVLTEDLAFLLGFFFGEGFVSGDRIGFSVHEEEPMREEAKRLFRELFGLELREERKPGDRSVTLVVRSRPLVTWLRKNGLLKGKARELEVPRAIRQSPRPVLAAFLRGLFEADGTITAGYPMLTTASKRLAQDVMVLLGGLGIPSKLLRYNPLPGRFSKAEHYGVRVVTAKGLERYLERIGVPKGSRLEALHGIKPDVRRESSWPLPHAEGLLKPLLTVTEKGRKGYASPYTPLRKDLLRYLRGERQLTATGYAMVLEKAQDLGLEAEPFPFNEYYVRVASVEPGGEILTLDLSVEGNHTYLANGLVSHN

SEQ ID NO: 381 - protein, 407 aa, Thermus thermophilus HB27
  Tth-HB27 RIR1-2 intein
CFVGSTRIPTERGLVPIEELAREGGSFYLVTDNRAPFGGRGAPLPGHGTAVRKAVRAFFTGVKPVVRLRTREGLEVTLTPDHLLLTPEGYREAGKLRPGEKILVQSGEGLFPKEESLPAQALAVVHERVATAGGRGGRGRADVRAQYRNLPTRWSRELGVALGWLLGDGYLREDGVGFYFSRKDFADLAWLPDLLRDWFGPGTLQETRSNTFHLHFNRIPAEFFQALGVKAARATEKRVPESLFRAPREAVVGFLQGLFSADGSVQINENKQDATVRLASSSLALLQDVQLLLLNLGILGKIHKRREAARKALPDGKGGLREYPVAPQYELILGGENRDRFAEVVGFLQEEKQSKLLAFLRHRPRGSYRKPFLATVASVEPAGEAPVYDLTEPVTHSLIANGLVAHN

SEQ ID NO: 382 - protein, 423 aa, Thermus thermophilus HB8
  Tth-HB8 DnaE-1 intein
CLAEGSLVLDAATGQRVPIEKVRPGMEVFSLGPDYRLYRVPVLEVLESGVREVVRLRTRSGRTLVLTPDHPLLTPEGWKPLCDLPLGTPIAVPAELPVAGHLAPPEERVTLLALLLGDGNTKLSGRRGTRPNAFFYSKDPELLAAYRRCAEALGAKVKAYVHPTTGVVTLATLAPRPGAQDPVKRLVVEAGMVAKAEEKRVPEEVFRYRREALALFLGRLFSTDGSVEKKRISYSSASLGLAQDVAHLLLRLGITSQLRSRGPRAHEVLISGREDILRFAELIGPYLLGAKRERLAALEAEARRRLPGQGWHLRLVPPAVAYRISEAKRRSGLSWSEAGRRVAVAGSCLSSGLNLKRPRRYLFRHRLFLLGEAFADPGLEALAEGQVLWDPIVAVEPAGKARTFDLRVPPFANFVSEDLVVHN

SEQ ID NO: 383 - protein, 423 aa, Thermus thermophilus HB8
  Tth-HB8 DnaE-2 intein
CLPARARVVDWCTGRVVRVGEIVRGEAKGVWVVSLDEARLRLVPRPVVAAFPSGKAQVYALRTATGRVLEATANHPVYTPEGWRPLGTLAPGDYVALPRHLSYRPSLHLEGHELDLLGFALAEGHLRHPSGVYLYTSSEEELAAMEEALRAFPNTRIRVVWRRGVAHVYVGRVDRRQEAGAVAFLRRMGLLGLDAKTKRLPEAVFGLPPEEVARFLGRLWTGDGGVDPKGRLIHYATASKELAWGVQHLLLRLGLQSRLVEKRFSGGYKGYAVYLLGGLEAARRFAETVGPYLVGKRRQDLEALLASWEKAGRSTRDVLPLAFLEEVRAAVAEVAQGQVADLLREAGLAEGLLCLGRGRRGLSRATVGRLAALTGSLALLRLAEAEVYWDRVEAVEPLGEEEVFDLTVEGTHTFVAEDVIVHN

SEQ ID NO: 384 - protein, 407 aa, Thermus thermophilus HB8
  Tth-HB8 RIR1-2 intein
CFVGSTRIPTERGLVPIEELAREGGSFYLVTDNRAPFGGRGAPLPGHGTAVRKAVRAFFTGVKPVVRLRTREGLEVTLTPDHLLLTPEGYREAGKLRPGEKILVQSGEGLFPKEESLPAQALAVVHERVATAGGRGGRGRADVRAQYRNLPTRWSRELGVALGWLLGDGYLREDGVGFYFSRKDFADLAWLPDLLRDWFGQGTLQETRSDTFHLHFNRIPAEFFQALGLKAARATEKRVPESLFRAPREAVVGFLQGLFSADGSVQINEKKQDATIRLASSSLALLQDVQLLLLNLGILGKIHKRREAARKALPDGKGALREYPVAPQYELILGGENRDRFAEVVGFLQEEKQSKLLAFLRHRPRGSYRKPFLATVASVEPAGEAPVYDLTEPVTHSLIANGLVAHN

SEQ ID NO: 385 - protein, 532 aa, Thermococcus zilligii
  Tzi Pol intein
SILPDEWIPLLINGRLKLVRIGDFVDSAMKELKPMKRDETEVLEVSGIGAISFNRKTKRSETMPVRALLRHRYSGKVYGIKLSSGRKIKVTAGHSLFTFRDGELVEIKGEEIKPGDFIAVPGRINLPERQERINLVEVLLGLPEEETADIVLTIPVKGRRNFFKGMLRTLRWIFGEEKRPGTARRYLEHLQTLGYVRLGKIGYEIVNEEALRDYRGLYETLTGKVKYNGNKREYLVHFNDLRDIIRLMPEKELKEWKVGTLNGFRMETSIEVKEDFAKLLSYYVSEGYAGKQRSQKNGWNYSVKLYNNDQNVLDDMETLASKFFGKVRRGKNYVEIPRKMAYVLFESLCGTLAENKRVPEIIFTSPESVRWAFLEGCFIGDGDLHPGKGVRLSTKSEELVNGLVILLNSLGVSALRIWLDSGVYRVLVNEELPFLDKGKKKTPYVTSKEIPEEAFGKRFQRNISLEKLREKVEKGEPDAEKVKRVVWLLEGDIVLDRVEEVAVDDYEGYVYDLSVEENENFLAGFGMLYAHN

SEQ ID NO: 386 - protein, 434 aa, uncultured archaeon GZfos13E1
  Unc-ERS PFL intein
CFTGNTEISTDRGLFKIKDIVEKHIECRVYDYAGNFSPIKKYYKRETSSLLEIRPFLHSDAISCTLNHEFFVYNSKANEFIKKEAQYINVKEDYLVITIPQKEIFNYKLDVNNAIEDLYQELTFKQRFSNEEVIREVKELRKRGFSWRKIFKRFNLTDHLRRVIERKEALDSKILPIVKERDGKVAVKGSNFFIDKFIEVTPKFTRLLGYYLSEGCSSKDIGRKNSYYVSFTFNSKEKEYIRDTKEIFSETFKTELKEVESKKCKTLSLVSYKGIIGLFFKYYFGEDVYNKKLPTEFIYLDKDLQKQLIIGLFRGDGLTSPDFIKKYKKQRIQITSKLLRYQISLILLRLGIKYSIFRKEIIISDKRIFDLLGQSHLITKKVINTSNRYGFLDDKHLYLKINSVKKLNKKTKVYNLEIDNPTHSYNVNLISVSN

SEQ ID NO: 387 - protein, 307 aa, uncultured archaeon GZfos9C4
  Unc-ERS RIR1 intein
CVTADTWVTTAEGPRQVEELIGKKFTAIVNGEEWESSEEGFFETDVKPVYTLKTAEGFELRLTADHPVMKVERMTRYKVETQWSNAGDLKPGDKIIINNHRDFGNWSVKGKYTEGEGYLIGLLLGDGTIKKLNPWMKAISKKMEKASADFCEGILRGLFDADGSVQGNQSKGVSIRLAQSDVEILKAVQRILLRFGIFSKVYMNRRGERKVKMPDGKGGVKEYITKPQHELVISNDNILYFAERVGFSDAEKMEKLEKAIWNYKRKMNRERFVASVEEVVPDGVEKVYDVKIPGINAFNANGFVVHN

SEQ ID NO: 388 - protein, 167 aa, uncultured archaeon (Rice Cluster I)
  Unc-MetRFS MCM2 intein
SYHPLTEILLADGRKIRIGDLFDQTYAKADEIIEGIDCEIVPCEGVSVLSTDMNHITEQRVDRVSRHKAPDHFIKIRYSNDREIIVTPEHPVFIVKDGISCIPASAVTIGDPVPAPVEEQTGSKICSLYVTAVEVIPNEGQYRTDYVYDVTVEPYHCFVSQGVILHN

SEQ ID NO: 389 - protein, 433 aa, Vanderwaltozyma polyspora, formerly Kluyveromyces polysporus, strain CBS 2163
  Vpo VMA intein
CFAKGTEVMMADSSIKNIEDIEIGDLVMGQDGQPREVTQLPRGSDKMYKVNEINENSTSELFSFVCNATHQLIVRTPRNIKVQTRIIDGIECNEIVYTDLFKEITEDARIIELIKEVSKIYPVSEGMDDVQEFVSQYNKSLEDYFQWTVEPRDINRLTESIREATYQVYAPVLYECENLLQYLKNTKYNLNEKSPTALAYLLGLWTGSGMTRRAGLSVSTTDESLMNNIVAAADLLNLKSEFKQERTTTRVGNVNFYGNSTSTNQNVDNLLWDAIQELGFIQDGNKTVPSFLSSDLIEIRETFLAGLIDSNGSVDNNKQDISCTIELEDNKVMSGIVSLIRSLGLKADVTQSSGKLNDVCYNVTVKGGELLKSVLSRCSAINYTKCESRDLLREPVEFYFELQELEEAEYYGITLPEYSDHQFMLSNQVVVHN

SEQ ID NO: 390 - protein, 138 aa, Wiseana iridescent virus
  WIV RIR1 intein
CVVGETLILTENGEYPIKSLVDREVSVWNGDEWSDVTVVQTGTDQELLRIDFSNGIFIVCTEYHRFLVLDRSRPIKDLKRKYAKDLPLNFQVMYTHSDLSTTLIKVTKVSKLQRRANTYCFTEQLNNAGVFNGILTSN

SEQ ID NO: 391 - protein, 456 aa, Zygosaccharomyces bailii, strain CBS 685
  Zba VMA intein
CFAKGTEVMMHDGSVKAIETIEAGEAVMGTDGQPRKVVGLPRGREVMYKVSQKTAHRVHKTDETRAAPVALFEYNCNATHKLVVRTPRSCRSITRKMQGVDYNEVIFFDLKKKKLEDGREIEIVKEVSRSYPAAEGAEKAAQMVKDYYDAARGKEFFEWTIEARDVAELGAHVRKATHQVYAPVLYESDFFFHYVKNSKFALRSEASTALAYLLGLWVGDGLSDRAVLSVDSEDSSLLERITGYADILDLSAEYKDREIPKRAKTVCLYPKTIRGNDIRRNLNTDNPVWNAIVDLGYLKDGVKNVPSYLFSDSICHREVFLAGLIDSDGHVRGDDGLSVTIKTIHKTVMEGTVAVARSLGLIVSVNTEEAKIDKNDVNHRFVYAIYISGGDALLSVLAHCAAAKKFRAPPSNEVVRGLKKVFFEMEELKEDDYYGITLAKESDHQFLLANQLVVHN

SEQ ID NO: 392 - protein, 450 aa, Zygosaccharomyces rouxii, strain CBS 688
  Zro VMA intein
CFAKGTEVMMSDGSIKEVEGIEVGQEVMGKDGKPREVVGTPSGREKMYKVSHKTAHRAHKSDSTSERFGLFEYTCNATHKLVVRTSRSCRPLVRNIQGTDYVEVCLFNMTKKTLEDGRVIDIVEETSDFYPAVEGPEKALRILKEYAEADGGKEYFEWTIEARDVALLSAQVRKATYQLSAPVLLENNHFSHYLKDSNSAVGNDTVRALSYFLGLWIGDGMLNNAATFSVDSQNASLLNRINEFAEVLGLSAEYKDSQEPKRAKTVNLYAKAIRDEGVRKNLDTHNLLWDAIVDLGYLKDDSKNVPGYICSDSFQHREVFLAGIIDSTGYVSDETATVKTIDQSVMTGTVAVARSLGINVSVDVEVDEDGVDRSFVYAIYMDRSDALLAVLANCASNNKQIEAPPHGVIREFNKAYFEMEELEEDEYYGLTLSNESDHQFLLANQLVVHN

SEQ ID NO: 393 - protein, 696 aa, Aquifex aeolicus strain VF5
  Aae RIR2 precursor
MEKTEKNELVRKLIFNPQGDREASKRKIIKGNPTNIFELNEIKYSWAFDLYKLMGFTNFWIPEEIQMLEDRKQYETVLSDYEKRAYELVLSFLIALDSFQVDMLKEFGRMITAPEVEMAITAQEFQESVHAYSYQFILESVVDPVKADEIYNYWREDERLLERNKVIAELYNEFIRKPNEENFIKATIGNYILESLYFYSGFAFFYTLGRQGKMRNTVQQIKYINRDELCFIEGTEVLTKRGFVDFRELREDDLVAQYDIETGEISWTKPYAYVERDYEGSMYRLKHPKSNWEVVATEGHEFIVRNLKTGKERKEPIEKVKLHPYSAIPVAGRYTGEVEEYDLWELVSGKGITLKTRSAVKNKLTPIEKLLIVLQADGTIDSKRNGKFTGFQQLKFFFSKYRKINEFEKILNECAPYGIKWKKYERQDGIAYTVYYPNDLPIKPTKFFDEWVRLDEITEEWIREFVEELVKWDGHIPKDRNKKKVYYYSTKEKRNKDFVQALCALGGMRTVVSRERNPKAKNPVYRIWIYLEDDYINTQTMVKEEFYYKGKVYCVSVPKGNIVVRYKDSVCIAGNCHVTLFRNIINTLRKENPELFTPEIEKWIVEYFKYAVNEEIKWGQYVTQNQILGINDVLIERYIKYLGNLRITQIGFDPIYPEVTENPLKWIDEFRKINNTKTDFFQAKPQTYSKANELKW

SEQ ID NO: 394 - protein, 2857 aa, Acidovorax avenae subsp. citrulli AAC00-1
  Aave Hyp-1721 precursor
MEDQNLKPFDGVLDAPSSGTLQPFSGALDGEEPKRGLKGWGQDIAATAVKGAIAIPEAAVGLADILTGGRVGKFLENEGGAVGFRPKQTREIVNDWHSDATKEAQRKFQEADGIVDKAVTAVQNPSLVVASVGESIPTMIGGGAIGRGLLAATRLGQMGAKGAALAGAAGEGLTMAGSQAEQIRQETPDGLLTPSQAGLAAATGAVGGAVGAVGGRIAQRLGIGDAETMLAQGRSGMARQFADEAAGAAVNPLQQQAVKSIPRHVIEGAIAEGLLEELPQSVAEQIFQNVALDKPWYDQVDSAIVLGALSGGAMGAGAAGYHAAARPRAAAVGEGDPAAARPAGDEPAAEAPARNPGLERVSEAFAEQLRMLQEQEQGEVLGPQSAPPDGAAALAEQRAAAAAQRQADMEASRAVESPDDEIYQSTGAQVPRSVRMGINPADGPLSTGAAMAVDTGVSDQMQQAAALAQAAEAGEKSGKAQKQEQPARSPLGADPETGEIPGSDDVANWSDAQLSEVFRGAQGRDVRIKLAQELSRRKAARAAEQSTPVKGTTDGPQAQPASTQPPAAAQAPAVAAAGAPAQGTLINGGTTTADAGAQAKTAAGAQAAPESKDQRAQRIDAAGQTWTRLPTVQRQVVAEQLKGLKPVLQKNLAGAKWENLNSDLKRKIADLIAPVQEAAAAPAPAPAAPVAMARGTTFPPLDAQPVPAAAEARVPPKAAGTSARAARAAAAPVSAPTVAQAAAQEAATSLSNDLPEPTEAQKLAGNYRKGHARINGHDISIENPAGTRRRPEWPPLQNHYGYIKGTKGADKDHVDVFMTDRAEDSALPVFVVDQVNKDGSFDEHKVVMGAADEAEARSTYLGNYEKGWTGLGGITQMTQDEFKDWVRDPAKTVKPAAAPAAGDALPTAAAEEAGPAPDKDAETAPAPAPALPASESASAAPPAPPAAAETVPQRMKRAKAEKAAAPATPAAAGEASPAAKPKTVPEKMKDAKAKRESKAVREAREAEERRAAYFAPGNVVRGYGGGFDRVVSYQPADADGRWSVTVREVQKDGSGAWADKAGAVERTHGTEPSKVNYATGPAGRMEVDPAPAPAAASHEPSAPARNRDNARKRGPAESEPLFRRYAQDDLGAGMAAELLRIMGKGDGFSPEARLQAVESIRATVSPIVAAWQNAPEVVVAYDLNDPIIPQRVRDADTRQRSGGAHGAPEGFYFGGKAYLMASRLTTPEDAARVLYHEVAGHHGLRGLFGPELDKILNQVATMRRADVDAKMAEYGMRGVDRISRARAAEEVLAEMAEKNPQLSFVQRAVAAIRNFLREHVPGFGSLRLRDADIIQAYILPARNWVERAAAARERGMGSAAMQYSLAQDEARSGFAAEVRAAITAGLNNDERALRAQVPLGIETPAALEALGVVRKPVVTNRNLLAKMHFEHGVPRADLERLGELLSNPVMVFKSDTQPGRMVVVTSLVVRGNPVVVAVDPNGASNRAEVVYVPSAYPKDNADRTFTRWIRDGLLQFANKKESRQLATTARLQLPGVVQRVSGFRANYKTEADLPQTGAGPDVMFSRERIAALKDSALDQITQTMSHPGKVSLWDKTIGTMRHLAERAPAFKPVFESAQRFIDDVSMLGNDAADMAPRLLPRVDSWRDLTKKPITAADNKAVARPLFEGTLMWARDIDGTPVLLDDLTAKYQNLPADQKAQLLLRGGRLDPKILTAWQGLPVGMYEANVNTSFNSRVLKAGVVWSQKELETMFGLDANQVSLYQEGRAAIDRSIDMTARADMLRSLGDEYAGMRDAVLAQETLDDAVELLTRTLMDDARDRPEWSERLMKLNNAVVKAQERAQQLMDEGYAPLSRFGRYTVDVVDAAGDRQYFGMFETKADSNRMKAEMEKQFPGATVTQGTMSQDAFKLFAGVTPESLEMFGSMLGLDGKGDDPKDKAFQAYLQLAKNNHSALKRLIHRKGVAGYSEDVGRVLASFVYSNARLGAGGLNAGTMESAINAIPKEQGELKDLAMGLRDYIANPQEEGQAVRGMLFAQYLGGSVASAAVNMMQPFQITMPWLSQFGGMRKAGAQMARALKDMSRKGFQYEPDLAAAMQSAEEDGVVSPQEIHQLMSQARGTGSLRTGDGTKVGDARAAVANNWERVKVAWGQPFALAEQFNRRSTFIAAYRMAKEQGMAEPSNFARKAVLETQFVYSKANKPRFARGAVGGALFCVDDTTEALTQRGWVGPDHLVPGDMLASFDMTTERLIWAPMASVHIFDHDGEMVHAKSKTLDMLMTPDHRVVHYKRKRTKGAQRGTTHWELGVAEAQDIPASHRVQIPTAAPFDHLPTGEPITDAQARVLGWVVTEGWFTKKNRGREEWGGALKLYQNEGRTADLIRADLDAAGLEYTETTWNYVGGNAAHIRFNIKKSSAAVLRKMLPGKQLTPALLMRMTKAQIELLVDRMIEGDGSESAAGQRCLIQNPGQTLETFQMALTILGKSFRVSKHGPSCRKVLIRESQRTENGRYSVKESERVRYTGRVWCPIVPGTSTWVARRNGMPFITHNTFKTYSVSYLELMHRMWTQGGPEGKRAVGWAIAMLLLMSGAGGLPFMEDAEDLIDGAAQMMGYNLSSKQWRKQLLADVMGKEIADFVEQGVSGLPGAPVDVSGRMGLGNLLPGTGLLLSKQNRERDLLEVAGPAGDLIARGFTAGRKLLTGDAGGAALEVAPTAVRNAVKGVDMAATGIYKDKKGYKVIDTTLAEAGAKFLGFQPKSVAEVQEANSFMQRTKTFYTQTSSEIKAQWADALFRKDDAALAEARERLADWNRNNPEQPIVVKMPDVWKRVREMGKDRTQRIADTAPKALRQQMREAAREAGQAPA

SEQ ID NO: 395 - protein, 1226 aa, Acidovorax avenae subsp. citrulli AAC00-1
  Aave RIR precursor
MQRDPIDSLAPDAAPRLPEQPISLDVLREKYLKPGEADAETLYRRVARALASVEAPEVREAIEARFLANLRAGAIGAGRIMSAAGTAIQATLINCFVQPVGDCIQGMDEGGYPGIYEALREAAETMRRGGGVGYDFSRIRPRGAEVKGTASMASGPCSYINVFDQSCATVESAGARRGAQMGVLRIDHPDVLDFITAKRTPGRWNNFNVSVGVPDAFVQAVLDDAPWELVHPARPGAALREEGARQRADGQWVYRTLPARELWDTIMRSAYDFAEPGILFLDRVNTDNNLAYCESIAATNPCVTADTWVMTDAGPAQVADLVGRPFTAIVDGRAFPTLSAGFFATGHKPVLRLRTRQGHALRLTEDHLVRRVAKQTRYVRELEWVAAGALQPGDDIVLNDHRALPGWRGEGTGAEGYLLGLLIGDGTLKADKAVISVWLAQEQEEDALLVANGAPAPSSGAHGILRAAEAAAATLSHRADFRGFQRTVARSGGACAERRMASGAVRALALHMGMRPGAKTITAAMERASSAFSVGLLRGLFDTDGSVQGRQDKGVSVRLAQSNPALLQTVQRMLLRLGIASTLYPDRRTAGLRLLPDGRGGQEPYAIRAQHELVVSGDNLRVFAERIGFEDADKAERLATALSGYRRALNREPFTATVQDVLPDGHEDVYDVTVADCHAFDANGLCVHNCGEQPLPSYGCCDLGPIILPRFVRHPFGFAGEPAFDFDAFAASVATQVRALDNVLDVTFWPLPQQRAESAAKRRIGVGFTGLGNTLAMLRLRYDTDAGRAMAMRIAECMRDAAYAASVELAKEKGVFPKFDAAGYLAPGTFASRLPAALQEAIRTHGIRNSHLLSIAPTGTVSLAFADNASNGIEPPFSWTYTRRKREADGSTSEYAVEDHAWRLYGALGGDVNALPDYFVSALQMPAAGHIAMMEAVQPFIDTAISKTVNMPADYPYEDFKNLYLHAWRARLKGLATYRPNAILGAVLEAPAAAPEAGTATTSAAHDASESADRPAVQSSAMPPATPADPMRAVIESRPKGALSAVAEKVEYWTQEGRKTLYLIVSFLPVPDGHGGTVDRAIEFFMPVGQSGESQQWITSSMRLLSLAARGGFLERALSDMRKVAWDRGPVRLGTHTRADGARVPLWHDSEVAAIAYAIQNILAQRAAAPAGPMRQQELPLDAPAAPTGLPPAMAGRKCPECGAHAVIRKDGCDYCTQCGNLGSCG

SEQ ID NO: 396 - protein, 227 aa, Aspergillus brevipes FRR2439
  Abr PRP8 precursor
FWWTSQRHDGKLWNLNAYRTDVIQALGGVETILEHTLFKATAFPSWEGLFWERACLAKGTRLLRYDGTEIEVQDVKEGDLLLGPDGGPRRAFNIVNGEDRLYRIKIDEGIEDLVVTPNHILVLHREKKARNNEDEASAAERYDTVEMTAAEFAALSTEERSQYRAFRCPGFESPEKAVPENHSFMIQDIRLELETTEWAGFRVDKDQLYLRHDYLVLHNSGFEESMK

SEQ ID NO: 397 - protein, 1098 aa, Acidothermus cellulolyticus 11B
  Ace RIR1 precursor
MTEPTSGARAQMDGSGRRGLTMQRIYTTPGVHPYDEVNWVRRDVVMTNWRDGSVNFEQRGVEFPDFWSQNAVNIVTTKYFRGALGTPQREWSLKQLVDRVVKAYAKAGLENGYFATPDDATIFEHELAHALVHQVFSFNSPVWFNVGTPAKQQVSACQPYSAPVSTPDGPIPIGKLVDANAVGEKVFDASGVTRIVATTCNGRKPVLRIRTSGGHVLDVTPDHLVWQVVDQTAGRFVPAGQLRVGDRLEWHDRANSDAMVAAFTADSAAAAQPGQIVDILAIDELGVMPVYDIQTESGEYLSDGIRVHNCFILSVDDTMESILDWYKEEGLIFKGGSGAGVNLSRIRSSKELLSSGGTASGPVSFMRGADASAGTIKSGGATRRAAKMVILDVDHPDIEEFIETKVREEEKIRVLRDAGFDMDLGGRDLYSVQYQNANNSVRVSDEFMRAVERGESFGLRARTTGEVIETVDARKLFRKMAEAAWACADPGIQYDDTINDWHTCPESGRITASNPCSEYMHLDNSSCNLASLNLMKFLTDDGRFDIDTFIKVVELVITAMDISICFADFPTEKIADTTRRFRQLGIGYANLGALLMATGHAYDSDGGRALAAAITSLMTATAYKRSAELAAIVGPYDGYARNAEAHKRVMRKHAAASDALRTIGEMDRAIAERACQMWRECLTLGEQHGWRNSQASVLAPTGTIGLAMDCDTTGIEPDLALVKFKKLVGGGSMQIVNRTVPRALRTLGYPEEQVEAIVEYISEHGSVVGAPGLRPEHYEVFDCAMGDRAISPMGHVRMMAAVQPFISGAISKTVNMPESATVEDVEEIYFQGWKLGLKALAIYRNNCKVGQPLSDAKEKKVSAAVEGSHEHRPVRRRLPKRRPSQTISFSVGGAEGYLTAGSYPDNGLGEVFLKLGKQGSTLAGVMDAFAIAISIALQYGVPLEAFVSKFVNMRFEPSGMTDDPDIRFASSIMDYIFRRLALDYLPYEKREELGIFSAEERARKQSGELSAASAEPLADETADSVTADDAEARADTAVAGSAPRATTPGLGGHGAAELVDRVFGQAADAPLCMNCGTTMRPAGSCYVCEGCGSTSGCS

SEQ ID NO: 398 - protein, 1381 aa, Alkalilimnicola ehrlichei MLHE-1
  Aeh DnaB-1 precursor
MAQTESSSAATDALKVPPHSIEAEQAVLGGLMLDNNAWDQVADRVTEEDFYRRDHRLIWRAIATLADEGQPVDAVTISEWLKNHELLEAAGGMGYLGALASDTPSAANIKAYADIVRERSVMRQLIRVGTDVVDSAFQPEGRDSKTLLDEAERRIFQIAEQTGRHKQGFRGLKELLPGVVERIDQLYRQDGEVTGLATGFDDFDRMTSGLQNGDLVIVAGRPSMGKCIMAGSRLVDPRTGGRVTIDELVARQEAEVLTLGDDFRLGMARPAAFVDDGIKPVYRVRTASGREIATTLTHPFLTGDGWRPLSEIGVGEHVAVPRRIPVFGRERLPEHQVKLLAYFLGDGGTTQTSPLFTNADERVRGDFTDAVTAMGGVRCVPVGSPGRTPSLRVSRCRTALQSGRDVFAKALKGAMQQLQLTGEALADALGVSKAAVSGWINARTVPAPATYQRLCATLASSGQALPGTDYADIGKNSPNPVAAFLDRHRLWGRLATEKAVPEVVFRLKRGQLALFLSRLFACDGSAFVQGNGQARISYATSSRALARDVQHLLLRFGILSKLREKRNRYPGLQHAPWELEVMDQASLRAFCEEIGIFSKEEQVRGVREALAGKRRHNNVGGLPWSVSRYVLAAKGERSWGDIYQAAGRVLPEGFNAHLTGRSARRLSRHRASELADLLQDDYLARLATSDLHWDEIVEIEYIGAHQVYDLTVDGTHNFVAEDVCVHNTTWAMNIVEHAAMKQEAPTAVFSMEMPGDSLAMRMLSSLGRVELQRIRSGRLEDDDWPRLTSTLSLLSQAKLFIDDTPGLSPSEMRARARRLKREHGLGLIVIDYLQLMQLPGAKENRAQELSEISRSLKGLAKELDVPVIALSQLNRSLEQRPNKRPVMSDLRECVTGDTRVLLADGQRVPIRDLVGQTPEVISVNAEGRLEPAKTDLVWSVGVRPLLQVRLASGRTIRCTPEHRLRGLWDWKEARDIRVGDRLGIARELPAPKVTKRWAEHELVLLAHLVGDGSYIKGQPLRYTTASEANSEAVSRAAEAMGSTVTRHPGRGQWHQLVISGNGNRWHPQGVGKWLKQLGVFGQRSREKHLPQEVFQLDNDQLALFLRHLWATDGSITQGSAGRPRIYFSTASRHLIQDVAALLLRFGIVGRTKHITHGDGEGWFTLDISGAVQQQRYLEKIGAFGHQAHNARRALQHLRGLVENTNVDTLPEEVFNYIRERMREEGITHRQMAALRGTAYGGSAHFTFSPSRETLLSYADILNDQRLRMLANQHVFWDRVVSVEPAGEEEVFDLTVPGNACWLADGIVSHNSGAIEQDADVIVFIYRDEVYNPDTPEKGVAEIIIGKQRNGPIGTVKLTFLGRFTRFENHIEEYYPGGGLPE

SEQ ID NO: 399 - protein, 1381 aa, Alkalilimnicola ehrlichei MLHE-1; identical to SEQ ID NO: 398
  Aeh DnaB-2 precursor

SEQ ID NO: 400 - protein, 1095 aa, Alkalilimnicola ehrlichei MLHE-1
  Aeh Rir1 precursor
MTTAAKVRALPNATADIPLQSASADIWDKKYRLKSKDGQVIDETVDHTWQRVARALAEVEKTKKLREHWYERFLWALRRGAIPAGRITSNAGAWAHKPATSTINCTVSGTIQDSMDDILQKVHEAGLTLKAGCGIGYEFSTLRPRGAYVSGAGAYTSGSLSFMDIYDRMCFTVSSAGGRRGAQMATFDVGHPDVLDFIRAKREDGRLRQFNLSLLITEEFMQAVEDDAQWPLAFPLTKHEAETDNIDLTDSEQVIWREWPTTEPYISDEQGLVACRIYRTVKARRLWDMIMTSTYDFAEPGFILIDRVNEMNNNWFCEDIRATNPCVTADTWVQTADGPRRVAALVGRRFSARVDGTDHPSGDEGFFRTATKEVVELRTAEGYRLKLTADHRVRRVSAFTRYRTETEWCEAGQLQAGDRVLLNDHRTNAEWAGRHGRNEGYLMGLLLGDGTLKSDKAVLSVWRTAAAANGVPAGLPGGVEEVMAEGLEAARSLPHRADFTGWCEVPGRGEYRLATSAIRDLALELGIRPGSKRITDGVEQGSSDFYKGFLRGLYDADGSVQGSQRKGVSVRLAQSDSDNLEAAQRMLLRLGIASTLYRDRRPAGNTVLPDGNGGSAEYATRAQHELVISGENLARFRDLIGFANSDKQARLEALLDRYQRTLNRERFVARVVAVEAAGTEEVYDVQVPGINTFDANGLHAHNCGEQPLPPYGACLLGSVNLTKFVRDPFTEKARFDWQEYAEVVSVFTRMLDNVVEINGLPLDEQRREIERKRRHGMGFLGLGSTLTMLRMKYGEAESLAFTEKVSREMALAGWRTGVELAEEKGPAPIMDETYTVDEAMLAKRPEMAVDGYKVGDKVKGRVLLARYSHYMQRVAEVDAELVEAIAEKGARFSHHTSIAPTGTISLSLANNASNGIEPSFAHHYFRNVIREGRKSKEKVDVFSFELLAYRHFIDPEAVPSTDPETRNLPDYFITADSVTPKQHVDIQAAAQKWVDSSISKTANVPTDYPYEDFKDIYRYAYQQGLKGCTTFRFNPEAFQGVLVTEKDLTNTFYKFKLADGTEVELRGDEEVEYDGETHTAANLYDALKEGYYGKF

SEQ ID NO: 401 - protein, 993 aa, Acyrthosiphon pisum secondary endosymbiot phage 1
  AP-APSE1 dpol precursor
MQNLLFCDLETYSDIPINCGTHRYAENAEILLFAYAYNHAPVKVWDVTQDKTMPADLKAYLDDSEILTVWHNGGMFDTVILKRVLNIDLPLSRVHDTLVQALAHGLPGALGLLCDIFNVNSDKAKDKEGKALISLLCKPRPKNSKIQRATALTHAEEWQRFKDYAGSDILAMREIYQHLPNWNMNVHETELWQLDQKINRRGMCMDVELAKSALTAVENEQKRLSTVTQQLTDNAVQNATQRDALLQHIASAFGITLPDMQASTLQRRINDPDIPPALRELLSVRLQSCTTSTSKYKALLKSVSADGRLRGTKQFCGASRTGRWAGRVFQPDNLPRPTLDPNTIDNGIEALKAGCAELICDDIMQLTSSALRGCIIAPPGKKLVISDLSNIEGRMLAWLAGENWKVNAFSEFDNGKGDDLYKLAYARAFNLLPEDVTKEQRQIGKVMELGLGYGGGVAAFLTFALAYGLDLDELAEAALPNIPPGVKREAMRWYQKSVETDKTYGLSEKIFVTCDSLKRMWRNAHPQTVSFWYDIEDAVKQAIQSPGIAFKCRKLSVRRDKSWLRICLPSGRSLCYPSARIENGQITYMGTNPYSRKWERLKTYGGKSCLAKGTLVLTITGWMPIEIVSQDAYVWDGIEWVRTDGSVFNGNQEVIQAYGVGMTADHQVLTEKGWKSASQSKRYNRSSCRLPDGYKLPRFRRKEINLESTLHLWTRNNHSSNRITKTKKTRYNCLLRMPKGTNNIMQKPKARNVKTPRFCCMEQHVSQMYSPFPQSMVKLWWSGNNGLQTLAKKFQQFLGRHGQDIPTRLIFRSHQQQCRLPPQKLPLGYVASTSSKYSTSTIRANSPRHNEYTGISSPNRDCSKHALLSPGKKGKSSTTSGAPKHIAEVYDLINCGPRNRFVIATPDGPLIVHNCENICQAAARDVLAYNMPPIEKAGYEIVLTVHDEIISEAPDTPQFSAEGLSKLLSFNSDWAWDLPLSANGFETYRYRKE

SEQ ID NO: 402 - protein, 726 aa, Aeropyrum pernix K1
  Ape APE0745 precursor
MVRVERLRTGVEGFDPLVAGGIPRGFFVAVVGEPGTGKTVFSIHFAYQGVREGDKVIYVTTEESRESVLKQAAMFGMDLGRAVDEGRAIVIDALLKSRSDEWSLEDVSVESLVNKVLEAKRALGYGRARLVVDSMSAFWLDKPAMARKYSYMVKRVLYRWDFTTLLVSQYAITTQSLPPWEPIVVRRGDEVRVTSIGEFVDSFLEGEGGLDIGGLGYYTLSLDTRTLKPVWRRIRGVIKHRIRGRLLRVKASKGRSIDLTGSHSIYRISRGGGLEVVGSSDLRPGDSLVTPASVELPESAPSSINAARELWSRGVEGIFVVGLPGEAAGYRGVERSRGYDGGHAIPLETLVERYGDSVWSLVSGAKLAVSRGAAGDHPVPATIPLDTGFYLLLGFIVSAGSVDVEGGHVTVTLGPGREGYVGDVVEAVNSTAPGAGVRISSGARGMEVTIRSRVLSELLARVFGAGPGPNRDIPSIVFRAPKPMKRVFLKGLYAGGGVFDRSSGSLIYATDSRSLLNGLALLLLNVGAGGYRIDSGDSGRALALIVENAGRLDAIGEVLEHLGFHGGREAVQGVGALERATAGLAGQATVAVQRPATRGGPGVDVAGVTGLEHLEASTEFVYDLSVEGDENFFAGLGWILVHNSAFGWGLEHVADGIIRFRRRIVGGALRRYVVVEKMRQTPHDLRVHRVEIEDGRGMRIAGPLEARPEDLRMPEDLRRRLKGGGP

SEQ ID NO: 403 - protein, 1740 aa, Acanthomoeba polyphaga Mimivirus
  APMV Pol precursor
MPSETIDSTKQFEFQISDWNSYHELDQEEEEKYVIQLFGRTEDDHDVCLKVTGYTPFFYVEIPKQWKQRQVDKFVEILKNKVQYHCKKNLDEDFDLSKSLIKYAMVKKHKFYNFRNKQLYNFLLLVFKSHTAMKEFSSILARPLEAKGLTNKPMLYQRYESNIEPHIRFMHINNLSSCGWASIDKDKLKKIPEYSNCDYSFSVNWKDVKPSNNDDRMAPFKIMGYDIECVSCDQNFPQAERPSDKIIQIGITMYRYGSMKCYEQHILTLKKCAPIEGVNVECYKKEKGLLRGFAKKIAELRPDFKTGYNNFGFDDKYIYDRILRIDKREGKKQGVNINALKNKFMDEILRTIGKVNNNYLIENEGLDRIPIYTTVKDKKISSKASRFIQIRGGTYVENGNNLKYVQSPGITYFEVKNLSSSALGDNELKFIQIPGVLSIDMMKVIQRDHRLIGYKLDNVSANFITEKADKIIEMPHNQEDSDSEKEDEDTDDKTYDVNIYTKSTKALEKDSYIQIMVNDGYSSSPLSEGAKYKVYDIQTITEKKLNEKTNKEEIFVYQAIKTKICQKDIQQLRETIKNPLLGISWTFAKDDMHHTKINEYFEEGDPKKIRQIAKYCLKDCKLVNLLLAKLEIIVNSVGMAKVCHVPLSYLFLRGQGVKIFSLVSKKCREKNFLIPVLRRKSKDNEGDEDETYEGATVITPKPNVYLSPIGVLDYSSLYPNSMRERNLSQECYVDDSKYDNLPGYIYHDVEIILKDKKGKILRNIDGTPQKEYHRFAQEIITDEQINRELKDIFDKINTVFENNVAIIQNQKYFTEKNISELIDKHKNISDSKIEDIEFDESLSDKRKNKLVDAEKDSLDKNIGFYQKIKSQIDKIKLDSKIEIDNLSKNLNEEEKSKQINKMELNTKNLISKVFSKYLITEQQREELIVLEKERAKRSVNAEKAKVYNTVDGITVRYGILPEILTELLNKRKETNGKLANEKDPFVKAILNALQLAFKVTANSLYGQTGAPTSPLYFIAIAACTTAIGRERLHYAKKTVEDNFPGSEVIYGDSVTGDTPIITRHQNGDINITTIEELGSKWKPYEIFKAHEKNSNRKFKQQSQYPTDSEVWTAKGWAKIKRVIRHKTVKKIYRVLTHTGCIDVTEDHSLLDPNQNIIKPINCQIGTELLHGFPESNNVYDNISEQEAYVWGFFMGDGSCGSYQTKNGIKYSWALNNQDLDVLNKCKKYLEETENIQFKILDTMKSSSVYKLVPIRKIKYMVNKYRKIFYDNKKYKLVPKEILNSTKDIKNSFLEGYYAADGSRKETENMGCRRCDIKGKISAQCLFYLLKSLGYNVSINIRSDKNQIYRLTFSNKKQRKNPIAIKKIQLMNETSNDHDGDYVYDLETESGSFHAGVGEMIVKNTDSIFINFHIKDENGEEKTDKEALMKTIAKCQRAAKLINQNVPKPQSIVYEKTLHPFILVAKKKYVGLLFEKSPDKYFLKSMGIVLKRRDNAPIVKIVVGGIIDNILKNRDIDKAIEYTKIVLDKLMNGEYPMDKFIISKTLKSRYKKPSTIAHKVLADRMAVRDPGNKPQINDRIPFVYIVKDMGKKKKKDILQGDLIEHPEYVIANNLKIDYLYYLEHQIINPASQILELMMDTKDVQKFFNKYIIDEQNKRKGAQSLTKWMDFSKLPKESGSKTAKKPYQSQKLQKTKSSNKSQIDPKYINLIKNKSRKHECQNMNKWISSTDKCTDDWEPIVE

SEQ ID NO: 404 - protein, 807 aa, Burkholderia cenocepacia
  Bce DnaB precursor
MNAPQDPQIESLKVPPHSVEAEQSVLGGLLLDNAAWDRIADFLSQGDFYRYDHRIIYEHIGRLIASTRPADVVTVYEALTTSGKADDVGGLAYLNALAQNTPSAANIRRYAEIVRDRAVLRRLVSVADEISADAFNPQGKEVRQLLDEAESKVFSIAEEGARGNQGFLEIGPLLTQVVERIDTLYHTANPSDVTGTPTGFVDLDRMTSGMHGGELIIVAGRPSMGKAQPLDARVRTLTGWKPMGELTVGDALASVDGAPSIVTGIYPQGERQVYRVRFSDGRSAECCDEHLWCVHFREWEKPRVLSTAEIRTLLTRERYRNRLWIDMPSGEFGHREVLPVDPWVLGALLGDGALGGTAVRFSVKAEETLNRMRERVDASLELEYAGQYDWRIKRRPSTATAARPSANPLKAALEQLGVWGRTSYDKFIPRLYLDADKDTRLDVLRGLLDADGWVESWGTVRYSTASAQLASDVRELARSLGAWCQVAEKATSFTVDGERKAGATAYICTISHPDPQNLFLFEGKRERLTAGRTRRKLPVITGIEPSRRTATQCISVSHPSRLYVTDDYVVTHNTAFSMNIGEYVAVEYGLPVAVFSMEMPGTQLVMRMLGSIGRLDQHRMRTGRLTDEDWPKLTHAVQKMSEAQLFIDETGGLNPMELRSRARRLARQCGKLGLIIVDYLQLMSGSSQGENRATEISEISRSLKSLAKELDVPVIALSQLNRGLEQRPNKRPVMSDLRESGAIEQDADVILFIYRDEVYNPDSPDKGTAEIIIGKQRNGPIGPVRLTFLGQYTKFDNFAGAQTFYGE

SEQ ID NO: 405 - protein, 1202 aa, Batrachochytrium dendrobatidis JEL197
  Bde-JEL197 RPB2 precursor
KKRLDLAGPLLGGLFRMLFRKLTKDVSRYLQITMESGREFNLSLAVKSSTITNGPKYSLATGNWGDQKKFMQARAGVSQVLNRYTFASTLSHLRRLNTPIGRDGKLAKPRQLHNTHWGMVCLSGDTEVVLGNGMDVVLLTDLVDGACVSTIEPRTGVVSPSLIDHYFAKDATRVLKITLDDGRVIKADPEHPLFAAKVDETTRGLTGQWLRVEELTVGHHALLVSPQQAYCTSEQWTLTLSEKEVCTASTAQLAKQLSEIGLVGVPIPLSKVKSAARLFGLVLSAGDFSGKLYVEKDEDVTAVNSDLTALGFSPAHWVRYQDDQQKWFKCDDSNGKAICITLVPTANALLQTLGAHDAEKQHRYCLLPKWLLDAPTSIKREFLGALFGGNGAHITISCNEGKWEPTMSALTQHTDADHLESTVVYLKQVATLLGMLNICSSVSSEKHITAEKTGYAVHLHVDNTAENLVRFYEQVGYRYCFNKTSQSSAPVQWIKGSLFFIEQHRSKCQHAFELLHTGLGTKAAVSAEINMPHHNPSHMLNVKEIPTAPADEYITWIEFKDRYVHKESPRFVWVTIHSIEEAPAERLYDFNTVSQNHSFFANSIVSHNCPAETPEGQACGLVKNLSLMGYITVGSPAPPILEFLEEWTMESLEEISPSTIPTATKIFLNGQWVGIHRDPDQLVSTLRRLRRSVDVSPEVSVVRDVRDRELRLCTDAGRIARSLFVVTPEQSLVLTKEMVQQLHEDQIQWKDLLSYGVVEYIDTEEEETVMICMTPDDLAEARMAAAGQVVERHQVGTGRLKSATVYTRNYTHCEIHPSMILGICASIIPFPDHNQSPRSVYQSAMGKQAMGLFLTNFQLRMDTMSNILFYPQKPLATTRAMEFMHFRDLPAGINAVVAIACYSGYNQEDSLIMNQSSIDRGLFRSLYYRVYMDQEKKVGMISTETLEKPSRDTTLRLKHGTYEKLEDDGLIAPGVRVSGEDIIIGKTVPIAADSTELGQRTTMHTKRDASTPLKSTENGIVDQVLITTNQDGFKFVKVRVRSIRIPHMGDKFASRHGQKGTVGITYRTEDMPFTADGITPDLIINPHAIPSRMTIGHLVECLLSKVSTFTGDEGDATPFTDVTVEAISQALQGYGYQRRGFEVLYNGHTGRKLNAQVYTGPTYYQRLKHMVDDKIHSRARGPLQILTRQPVEGRSRDGGLRF

SEQ ID NO: 406 - protein, 474 aa, B.subtilis M1918 (prophage)
  BsuP-M1918 RIR1 precursor
ESGYPYIMFADNVNKVHPNEHISKVKFSNLCVTGETLLLTENGYEKAADLYKKQNNLKVVIDNRTKDFAVDSKGTTIVDAIPMQLTKKDAEIFKVKTKQGYEIRATEWHKFYVKRDGEIQKLQLNQLKTGDKLLVQSAEGAYGKIHEPDLAYIMGIIAGDGTITEKTAKIYLYDNKKVLEQKVTDAVHRIIHKHKVDRAYKHNTSLLPTFNMANPEKQDLLYMNSTVLFDILKKFGMNKERKTRVPEFIFQANKETQAAYLSGLFQTDGCVNANHKAKALTIELTSIHYESLQDVQKLLLNMGVYTTIYSNNKRSQELLPDGKGGSKLYNVKPTHKISIQDRNSRELFMSIVELKDYDVYKFNLLTETLQPKSRKPKHDFTAEIISIEEDGVEDVYDTTQEDYHSLIFNGIVTGNCSEVLQSSQVSVYTDYDKEDEIGLDISCNLGSMNIVNVMSNQSIASTVRIAIDSLTTVT

SEQ ID NO: 407 - protein, 1084 aa, B.subtilis strain 168 Sp beta c2 prophage
  BsuP-SPBc2 RIR1 precursor
MTNTIPNWIKLNNEIMIQKDGKYQFEKDKEAVHSYFVDYINQNTVFFHDLKEKLDYLIKNDYYEEEFLSKYTFEQIKSIYKIAYSYKFRFPSFMSAFKFYNDYALKTNDKTKILERYEDRVSIVALYCADGDYEKAVEEVHTMMKQEYQPATPTFLNAGRKRRGEMVSCFLLEVGDSLNDISRAIDISMQLSKLGGGVALNLNKLRAKGEAIKDVENATKGVVGVMKLLDNAFRYADQMGQRQGSGAVYLSVFHPDITDFLDTKKISADEDVRVKTLSIGVVVPDKFIELAREDKDYYMFYPHSVYKEYGQYLDELDINEMYDELVENPRVRKAKGNARKLLEQLAILRSESGYPYIMFADNVNKVHPNEHISKVKFSNLCVTGETLLLTENGYEKAADLYKKQNDLKVVIDNRTKDFAVGSKGTTIVDAIPMQLTKKDAEIFKVKTKQGYEIRATEWHKFYVKRDGEIQKLQLNQLKTGDKLLVQSAEGAYGKIHEPDLAYIMGIIAGDGTITEKTAKIYLYDNKKVLEQKVTDAVHRIIQKHKVDRAYKHNTSLLPTFNMANPEKQDLLYMNSTVLFDILKKFGMNKETKTRVPEFIFQANKETQAAYLSGLFQTDGCVNANHKAKALTIELTSIHYESLQDVQKLLLNMGVYTTIYSNNKRSQELLPDGKGGSKLYNVKPTHKISIQDRNSRELFMSIVEMKEYDVYKFNLLTETLQPKSRKPKHDFTAEIISIEEDGVEDVYDTTQEDYHSLIFNGIVTGNCSEVLQSSQVSVYTDYDKEDEIGLDISCNLGSMNIVNVMSNQSIASTVRIAIDSLTTVTRKTNIVNAPAVARANTLMRSIGLGQMNLHGFLAQNNIAYESEEAKDFANTYFMMVNFYSLQRSMEIARETGETYYKFDGSTYKSGEYFEKYVTNDYSPQYEKVKKLFGDQHIPNIQDWMKLKEDVMKYGLYHSYRQAIAPTGSISYVQSSTAGVMPIMERIEERTYGNSKTYYPMPGLSAQNWFFYKEAYDMDMFKVVDLIATIQQHVDQGISFTLFLKDTMTTRDLNRIDLYAHHRGIKTLYYARTKDTTQEGCLSCVV

SEQ ID NO: 408 - protein, 978 aa, Clostridium botulinum phage C-St
  CbP-C-St RNR precursor
MNIEITLNKGFETKLEELRAKYGEDMFEIEGLGKKQLNTTLFFDKFMNSNNVANASIDDNSNVSDKNITIMLSESKKPLNKLLSRNKLYIEMKENFGKQVADEWLELQINGALYEHDAHDSSLKPYCYAYSLKPVVDKGLYFINDMKAKPAEHLDTYDSHVLEFIAYATNLQSGAVGIPDYLIYAFYFWKKDIENGVVTKEQANKYREQHWQKMLFSLNQPYLKGGEQSAYTNFSILDREHILGFFGMEKFPDNTLIIDYIDEIIQYQKDFLDYEKKLRYEKFFTFPVISASLLYKNDKFVDEDMARFINKHNMTWQDVNIYKATSIDALASCCFDGQQKTLTKSSHGVNYLSFKDLYDTKYKDKERRNFKVFHNGNWVEGKPIRLLRNDKKMYKITTVNNKEILVTEDHINVTDKGDKYTTQLTENDYIAFNTRPTNAIPEKDEKLTYEQGVLIGAYLGDGSKQRNEHKIQLSINEEKYNILRPLIEKALKQWNIQAQYRLYTPHNNFYPTAITSEDLLNIIEHWVKGDYSYNKRLNLEILHQSIEFRKGVLDGIYFTDGGNSNRIYTTSDSLKEDLEILIHSLGMVSIINTTDRTDEKVIIRGEEFNRNQKGLYKVINNTMFFKIKTIQQYISNDEYVYCFEMKNIEEPYFTLPNGIITHNCRLTSSSKEISENKEVAELNGHFNSIGGSSLSIGSCKVNTINMVRIALECNGDFNKFKDILKHRVDISHKYLKVQRDVIAKNIKKNLLPVYSHGLMDMNNQFSTIGINGMFEAIKILGGIETTSTGVHYTDRGLSMAKDILETIGEMNKVTRKQYGYNANIEQIPAESASVKLCKKDKILFGDRVNTYIYGNQWIPLNVQADLTERVRVASVLDKACGGGVMLHINLGERFKDEEQSWRMMNYLAKQGVVYFSFIMKINVCENDHSFYGDMCPICHKPVSDSYVKIVGYLVKQSSYKSERAKEMDERKFYSNYNI

SEQ ID NO: 409 - protein, 978 aa, Clostridium botulinum phage D
  CbP-D RNR precursor
MNIEITLNKGFETKLEELRAKYGEDMFEIEGLGKKQLNTTLFFDKFMNSNNVANASIDDNSNVSDKNMTIMINESRKPLNKLLSRNKLYIEMKENFGKQVADEWLELQINGALYEHDAHDSSLKPYCYAYSLKNVVDKGLYFIKDMKAKPAEHLDTYDSHVLEFIAYTTNLQSGAVGIPDYLIYAFYFWKKDIENGVVTKEQANKYREQHWQKMLFSLNQPYLKGGEQSAYTNFSILDREHILGFFGMEKFPDNTLIIDYIDEIIQYQKDFLDYERKLRYEKFFTYPVMSASLLYKNDKFVDEDMARFINKHNMTWQDVNIYKATSIDALASCCFDGQQKTLTKSSHGVNYLSFKDLYDTKYKDKERRNFKVFHNGNWVEGKPIRLLRNDKKMYKITTVNNKELLVTEDHINVTDKGDKYTTQLTENDYIAFNTRPTNAIPEKDEKLTYEQGVLIGAYLGDGSKQRNEHKIQLSINEEKYNILRPLIEKALKQWNIQAQYKLYTPHNNAYPTAIISEDLLNTIEHWVKGDYSYNKRLNLEILHQSIEFRKGVLDGIYFTDGGNSNRIYTTSDSLKEDLEILINSLGMVSIINTTDGTDEKMIIRSEEFNRNQKGLYKVINNTMFFKIKTIQQYISNDEYVYCFEMKNIEEPYFTLPNGVITHNCRLTSSSKEISENKEVAELNGHFNSIGGSSLSIGSCKVNTINMVRIALECNGDFNKFKDILKHRVDISHKYLKVQRDVIAKNIKKNLLPLYSHGLMDMNNQFSTIGINGMFEAIKILGGIETTSTGVHYTDRGLSMAKDILETIGEMNKVTRKQYGYNANIEQIPAESASVKLCKKDKILFGDRVNTYIYGNQWIPLNVQADLTERVRVASVLDKACGGGVMLHINLGERFKDEEQSWRMMNYLAKQGVVYFSFIMKINVCENDHSFYGDMCPICHKPVSDSYVKIVGYLVKQSSYKSERAKEMDERKFYSNYNI

SEQ ID NO: 410 - protein, 610 aa, Coxiella burnetii
  Cbu DnaB precursor
MPPRQKVKTSVPKVPPHSQEAEQSVLGALMLDNRAWDRIADRISIQDFYRSDHQLIFETMSRLVDQHKPLDVLTIAEALKAREQLSAAGGEPYLYELAKNTPSAANIVAYADIVRERAILRQLIEAGTDITHDGFNPDGRDIKELLDTAEQRVFHIAESRVRGSGPIAIGPLLTKATDRIDKLFHSKQAITGLSSGFTDLDKLTSGLQDGDLIVVAGRPSMGKTVFAINIAEVAAIKGNIPVLVFSMEMPAESLVMRMLSSLGSIDQHKVRTGQLKDDDWPRITHAIEMLSETKLFIDDTPALTPSEIRSRARRLAREHGGLGLIVIDYLQLMHVPGTKENRSTEISEISRSLKALAKELNVPVVALSQLNRSLEARVDKRPVMSDLRECVTGDTLICLADGRRVPIQDLVGHSPEVIAVDDKGRLVCAKSEVIWKVGERSVFEIKLASGRSIKATAEHRLLAFKGWRHVKDFKVGDRLAIAHQVPEPDRLLQHCQSDLFWDRIVSIEEKGSEEVYDLTVPKYASWLADGVVSHNSGAIEQDADLIAFIYRDEVYHEDSPDKGKAEIIIAKHRNGPIGKVILTFRGQYTRFDNFSHESVPQRMPFGGVPV

SEQ ID NO: 411 - protein, 1513 aa, Chlorobium chlorochromatii CaD3
  Cch RIR1 precursor
MKIERLFTQAGNNVFDAFEYSLRSSVLRNTDGSVVFEMNDIEVPVQWSQVATDILAQKYFRKTGVQQRDAEGNVLLDSEGNPLLGSERSLKQVVHRLAGCWREWGEKHGYFDTPDDAQAFYDEVAFMILAQMGAPNSPQWFNTGLNFAYGTTGPAQGHFYVDPATGEVTESGDAYSRPQAHACFIQSVNDDLVNDGGIFDLAIREARVFKFGSGSGTNYSSLRSSGEKLSGGGSSSGLMSFLKIFDSAAGAIKSGGTTRRAAKMVIVDIDHPDVEKFIEWKAKEEDKVASLVAGSRICSRFLQAIVEEALANGADRKTNPRLQQLIQNALSRGVPMSYVIRVLALVEQGYTSLDFNEYDTHYESEAYQTVGGQNSNNTVRVTNAFMLAVANDEVWELRQRTTGKVSRVVKARELWEKILLSAWKCADPGLQFDTTINEWHTCPQSGRINASNPCVTADTLIATDRGLERIGNIVGESRGIKSIDGKLHWVENIFPTGTKPVYQLRTKSGYQLKLTGDHVVFTENRGDVKACELRKDDMVRLVGAPFGKETTGSTDIAQLIGLLTGDGCITTANEIAASGEQRRTAFLTVSKAEQEIAEWANQFINTLRPELGEHNKSGSVTETATTARVAVGSPRILKQFEAFAVLDKGSVHKLFTDKVFQLAQSEQAALLRGLFTADGTVANYSDKSQYIALDATSLELLQQVQLLLFNFGIKSKIYENRRVGELVSLLPDGKGGIKEYPVQQMHSLRISRSSRILFEQQIGFMAESKKYEALAELNRTVSTYRDSAYDAVASLTYSGEEAVFDLTEPETDHFIANGIGVHNCSEYMFLDDTACNLASLNLIHFVDEASGTIKINELRHAASLWTVVLEISVLMAHFPSQTIARLSYDFRTLGLGFANLGTVLMVLGIPYDSAEALAMAGAIASLMTGQAYVTSAEMARDLGTFKRYSDNANDMLRVMRNHRRAAQNAATTDYEGLSVIPHGINAAHCQTALAEAAGAVWNEVLQKGEAHGFRNAQVSVIAPTGTIGLVMDCDTTGIEPEFAIVKFKKLAGGGYFKIVNQSVHKALLRLGYSAEQIEDIERYCKGHGTLEGCPAINGEWLKCKGFTEEKIAAVESQLATVFDIRFAFNKWILGEEFCASLGFSEEQLDNPDFDMLLELGATTAEAAAANDYICGTMMIEGAPHLQPEHLAVFDCASKCGKKGKRYIRHQAHINMMAAVQPFISGAISKTVNMPATATTAEIGNVYRDAWQQMVKAVTIYRDGSKLSQPLNSSSYNDLDEVIMLGTEETLDETKGPQEVQERIIERVYYRSERRMLPKRRKGYIREAYVGGHKVFLRTGEYDDGTLGEIFIDMYKEGASFKGLLNCFAVLASKALQYGMPLEELVDSFTFTRFDPAGTVQGHNVIKNSTSILDYVFRSIGYDYLGRKDFVHVKAVDEVPEGTLVPAEQKKASHHSAANHSTDGAGVVSNKSQIYQAKVQGYTGEQCENCGSMHVKQNGTCKVCEDCGMTTGCS

SEQ ID NO: 412 - protein, 1010 aa, Chlamydomonas eugametos (chloroplast)
  Ceu ClpP precursor
MPIGVPRIIYCWGEELPAQWTDIYNFIFRRRMVFLMQYLDDELCNQICGLLINIHMEDRSKELEKKEIERSGLFKGGPKTQKGGTGAGETGASSIQNKKSNSSSFEDLLAADEDLGIDENNTLEQYTLQKITMEWLNWNAQFFDYSDEPYLFYLAEMLSKDFNKGDARMLFSNNNKFSMPFSQMLNTGSMSDPRRPQSTNGANWNSSEQNNSLDIYSPFRMLANFEAQDYDFKQINPSLASKEEVFKLFNNTILKNGGQRNNNMSKLLTELAQRNWENKTNSQENLYKSTEKALSQRNLRKEYIKDRTLNNYSSDPFNTKGYVNAQGASTGPSPRTRGMHADGSLNYLDFYSYNDSYNDFKTAPRGKQAERAFQEEESKKVFVIINSFGGSVGNGITVHDALQFIKAGSLTLALGVAASAASLALAGGTIGERYVTEGCHVMIHQPECLTSDHTVLTTRGWIPIADVTLDDKVAVLDNNTGEMSYQNPQKVHKYDYEGPMYEVKTAGVDLFVTPNHRMYVNTTNNTTNQNYNLVEASSIFGKKVRYKNDAIWNKTDYQFILPETATLTGHTNKISSTPAIQPEMNAWLTFFGLWIANGHTTKIAEKTAENNQQKQRYKVILTQVKEDVCDIIEQTLNKLGFNFIRSGKDYTIENKQLWSYLNPFDNGALNKYLPDWVWELSSQQCKILLNSLCLGNCLFTKNDDTLHYFSTSERFANDVSRLALHAGTTSTIQLEAAPSNLYDTIIGLPVEVNTTLWRVIINQSSFYSYSTDKSSALNLSNNVACYVNAQSALTLEQNSQKINKNTLVLTKNNVKSQTMHSQRAERVDTALLTQKELDNSLNHEILINKNPGTSQLECVVNPEVNNTSTNDRFVYYKGPVYCLTGPNNVFYVQRNGKAVWTGNSSIQGQASDIWIDSQEIMKIRLDVAEIYSLATYRPRHKILRDLDRDFYLTATETIHYGLADEIASNEVMQEIIEMTSKVWDYHDTKQQRLLESRDSTTSGADTQSQN

SEQ ID NO: 413 - protein, 992 aa, Candida glabrata
  Cgl VMA precursor
RKELKRLSLDDEAGESQYGAIYSVSGPVIVAENMIGCAMYELVKVGHDNLVGEVIRIDGDKATIQVYEETAGVTVGDPVLRTGKPLSVELGPGLMETIYDGIQRPLKAIKESSQSIYIPRGIDTPALSRDIKWQFTPGTFKTGDHISGGDIFGTVFENSLVESHKILLPPRARGTITWIAPAGEYTVDEKILEVEFDGDKYDYTMFHTWPVRVPRPVAEKLSADYPLLTGQRVLDSLFPCVQGGTTCIPGAFGCGKTVISQSLSKYSNSDTIIYVGCFAKGTQVLMADGSNQSIENIKIGDKVMGQDGKPRNVTALPRGYDDMYNVELDGETDLSYTCNSNHTLVLKTEQNVLLAGNTVSYFALGALIDETNGRAVEIVQEVQETFESNISASDFAANINREPISWTLEIRDIDYLSERVRMFTKQSVNPVLLETPTLAKQLESNESTATNLAYLLGTWIASKATTAGTISVPTTKADLLSKVKSALSSLSIDYSSESINSVSTYRRTQSIPLMENGKHVGNANITAEQEIEETMEVLSLNVTNHSSKLFHDLALSMINQDGSRSIPSAFTHEQLCVRESFVAGILDMQGCNIENGVEIDSSINGLAKLSRSLGLRCNKSSNLLKLSGNMSNISAQSTNNWTSTEDNSSAYKAQLMDFSVQKLPKDNYYGVTLDDDSDHQFLLSNLVLVHNCGERGNEMAEVLMEFPELYTEMSGRKEPIMKRTTLVANTSNMPVAAREASIYTGITLAEYFRDQGKNVSMIADSSSRWAEALREISGRLGEMPADQGFPAYLGAKLASFYERAGKSVTLGSPNRVGSVSIVAAVSPAGGDFSDPVTTATLGITQVFWGLDKKLGQRKHFPSINTSVSYSKYTNVLNKFYDSNYPEFPTLRDRMKEILSNAEELEQVVQLVGKSALSDSDKITLDVAALIKEEFLQQNGYSTYDAFCPIWKNFDMMRSFIAYHDKAQKAVSNGANWNKLSEAVSDVKHSVSS

SEQ ID NO: 414 - protein, 959 aa, Chilo iridescent virus
  CIV RIR1 precursor
MSDIIIDLSRDSKFDELGLKRLRESYMMREETSPQERFAYVCKQVGTDRDHSQRLYEYTSKHWLSLSTPILSFGKANHGLPISCYLSWIEDTKEGLIDTLSEVNQLSMLGGGVGVGVGIRTSDNKSTGVMSHLNTYDACSLAYKQDGVRRGSYAMYLNNNHPDVLQFIEMRKPTGDHNIRCLNLHHGLNISDEFMELIEKCDGGGNIDDTWNLIDPHTKKITTVGARDLWQRILETRMKTGEPYICFIDTCNKHMYDFQKKKGLTIKQSNLCVAPETMILTEDGQFPIKDLEGKIIKVWNGNEFSSVTVVKTGTEKELLEVELSNGCTLSCTPEHKFIIVKSYTEAKKQKTDDNAIANAERVDAQDLKPRMKLIKFDLPTLFGNSEHDIKYPYTHGFFCGDGTYTKYGKPQLSLYGDKKELLTYLDVRTMTGLEDASGRLNTWLPLDLAPKFDVPINSSLECRMEWLAGYLDADGCVFRNGTNESIQVSCIHLDFLKRIQLLLIGMGVTSKITKLHDEKITTMPDGKGGQKPYSCKPIWRLFISSSGLYHLSEQGFETRRLKWEPRQPQRNAERFVEVLKVNKTGRVDDTYCFTEPINHAGVFNGILTGQCSEIILPTDSTRTAVCCLSSLNLEYYDEWKDNDLFIKDVMEMLDNALTIFIEKAPPTISRAVNSAKKERSIGIGVLGFHSFLQQKNISFESDEAAKLNIDIFTKLRSKIDTFNLVLGSLRGSPEDAEGTGRRFCCTMAVAPTATSSIIMGNTSPSVEPFRANAYRQDTLSGSFLNKNRYLSRILSQRLNVKEINEVWSNIVSNGGSVQQLPNNLLSEQEKQVFKTAFEINQKWVIKHAADRQKYIDQSQSINLFLKPDIHKRELHSLHLNAWKSGLKTLYYLRSEKIADADKISSNHMINSINFTNIKESIKDSIKVSILEVRNKEKNYEEKICKLTNGRRLSGCFACE

SEQ ID NO: 415 - protein, 596 aa, Cryptococcus laurentii strain CBS139
  Cla PRP8 precursor
MKSNPFWWTNQRHDGKLWALNNYRVDVIAALGGVEGILEHSLFKGTAFPTWEGLFWEKSCHAEGTELIKFDRSVVKVEDVVEGDRLLGPDGSPRLVSNLVSGCDRLYRFEFSRSGGEVESLVVTDNHIMMLKRANVVLSGSGDAGQLEVLDQISVREQFEIVQKTAAEVAAMSEAEREQYRVYRSEGFEHYEQPVDVHPYFLGLWLGDDSRSANAATNGEPEVRKFLTDYAGELDMHLAHHGDEKRDRRTVKAARLAAGWTLLPRTEGKAGAWIPPATAGYVAPTHSPAPNLRDADGHRSVSAPSQVDEKPEVSHDDEDMEISDTEEEQSDAIEEIEADDDDAAIVMEGPHGQLTPGGRRDEMQPAKARRRVRRLNRNQRYGDLADAEVEALLEDVVSGGQSDGQVVRSAQLLDKLQSLGVATSNEKEKPAQGSKHIPQVYLENTRDVRLRVLAGLLDSHGCLVSPENCYMFSQPETDGRLFWDAVHLARSLGFGVSTDRKTQMNPGSDVATPHLLALITGDLTQVPCLLRRQQAVQRYLPQQHTFRIKSVTLESKSTPWYGFAVDSDRQYLRHDWMVLHNSGFEESMKFKKLTNA

SEQ ID NO: 416 - protein, 215 aa, Filobasidiella neoformans (Cryptococcus neoformans) Serotype A, PHLS_8104
  Cne-A PRP8 (Fne-A PRP8) precursor
DVISALGGVEGILEHSLFKGTAFPTWEGLFWEKACLQNGTRLLRADGSEVLVEDVQEGDQLLGPDGTSRTASKIVRGEERLYRIKTHEGLEDLVCTHNHILSMYKERFGREGAHSPSAGTSLTESHERVDVTVDDFVRLPQQEQQKYKLFRSTDFVRREQPSASKLATLLHINSIELEEEPTKWSGFVVDKDSLYLRYDYLVLHNSGFEESMKNK

SEQ ID NO: 417 - protein, 236 aa, Cryptococcus neoformans (Filobasidiella neoformans), Serotype AD, CBS132).
  Cne-AD PRP8 (Fne-AD PRP8) precursor
HDGKLWQLNNYRVDVISALGGVEGILEHSLFKGTAFPTWEGLFWEKACLQNGTRLLRADGSEVLVEDVQEGDQLLGPDGTSRTASKIVRGEERLYRIKTHEGLEDLVCTHNHILSMYKERSGSERAHSPSADLSLTDSHERVDVTVDDFVRLPQQEQQKYQLFRSTASVRHERPSTSKLDTTLLRINSIELEDEPTKWSGFVVDKDSLYLRHDYLVLHNSGFEESMKNKRLTNAQR

SEQ ID NO: 418 - protein, 2532 aa, Cryptococcus neoformans var. neoformans JEC21
  Cne-JEC21 PRP8 precursor
MSTVPPGFGAPPPGFTPQPNGNGDGMEGDFFGQLSQEEIDKKARKWRQSQKRRFNSKRRQGGGGGVDFGKADLPPEHIRKIIKDHGDMSNRKFRNDKRVHLGALKYVPHAVMKLLENIPMPWEQVREVPVLYHISGAITFVNEVPRVIEPVYHAQWASMWLAMRREKRDRRHFKRMRFPPFDDEEPPMDYGDNVLDVEPLEAIQLELDEEDDEAILEWFYDPKPLVDTPQVNGSSYKYFQLALPQMANLYRIGRQLLSDYSDNNAFYLFDKKSFFTAKALNIALPGGPKFEPLYRDMDAFDEDWNEFNDINKIIIRNVIRSEYKVAFPHLYNSLPRSVYIGVYHEPKNVYIKTDDPDLPAFYFDPLINPISQRVVQEAHTPLVSHEDQVFGFGNDEDVEFELPEEVEPFLGERDLENENTSDAIALYWAPYPYNLRSGKMKRAQDVPLIKNLYLEHCPDGQPVKIRVSYQKLLKVYVLNALHNKPPKAMVKRNLFRSLKNTKFFQATTLDWVEAGLQVCRQGYNMLNLLIHRKNLNYLHLDYNLNLKPIKTLTTKERKKSRFGNAFHLCREILRLTKLIVDAHVQFRLGNVDAFQLADGLQYMFAHVGQLTGMYRYKYKLMKQIRMCKDLKHVIYSRFNTGPVGKGPGVGFWAPGWRVWLFFMRGIVPLLERWLGNLLARQFEGRNSKGIAKTVTKQRVESHFDLELRAAVMHDILDMMPEGVKQNKAKTILQHLSEAWRCWKANIPWKVPGMPAAIENIILRYVKSKADWWTSVAHYNRERIRRGATVDKAVVRKNLGRLTRLYLKAEQERQNGYLKDGPYITSEEGTAILISTAHWFESRKFAPIPFPPLSYKHDTKLLVLALEKLKEAYSVHGRLNQSQREELALVEQAYDNPHECLSRIKRLLLTQRAFKEAGIEFFDTYDKLIPCYDVEPLEKLSDAYLDQFLWYEADKRRLFPSWVKPSDSEPPPLLVYKWCQGINNLTDIWDTSEGESVVMMETVLARVYEKVDLTLLSRLLRLIMDHNLADYITSKNNTTLTFKDMSHINTYGMIRGLQFSSFVFQYYGLVLDLLILGLERASEIAGLPEAPNGFLQFKNREIETKHPIRFYSRYVDRIHMLFRFTAEESRDLIQRYLSVQPDPNNENVIGYNNKRCWPRDCRMRLIKHDVNLGRAVFWNVKNSLPRSLTTIEWEDTFVSVYSKDNPQLLFSMCGFEVRILPRVRTQHGEAYSLKDGVWNLTQESTKERTAQAFLRVSDQGIQDFNNRIRQILMSSGSATFAKIINKWNTCLIGLMTYYREAVVHTNELLDSLVKAENKVQTRVKIGLNSKMPSRFPPCVFYSPKELGGLGMLSMGFVLIPQSDLRWSKQTDSGGITHFRSGMTHEEDQLIPNLYRYLQPWEAEFLDSARVWSEYALKRKEATASNRRLTLEDLEDSWDRGIPRINTLFQKDRHTLAYDKGWRVRQYFSQFFRLRNQPFIWTNQRHDGKLWQLNNYRVDVISALGGVEGILEHSLFKGTAFPTWEGLFWEKACLQNGTRLLRADGSEVLVEDVQEGDQLLGPDGTSRTASKIVRGEERLYRIKTHEGLEDLVCTHNHILSMYKERSGSERAHSPSADLSLTDSHERVDVTVDDFVRLPQQEQQKYQLFRSTASVRHERPSTSKLDTTLLRINSIELEDEPTKWSGFVVDKDSLYLRHDYLVLHNSGFEESMKNKRLTNAQRSGLSQIPNRRFTMWWSPTINRANVYVGFQVQLDLTGVFMHGKIPTLKISLIQIFRAHLWQKIHESVVMDLCQVFDQEMEALQIETVQKETIHPRKSYKMNSSASDILLFSSYKWQISRPSLLTDNRDTMDGTTSNKFWLDIQLRWGDFDSHDIERYARAKYLDYSSDSQSIYPSPTGNLIAIDLAYNLYSAYGCYFPGLKPLLQQAMAKIMKANPALYVLRERIRKGLQLYSSEPTEPYLNSSNYSELFSNQIIWFVDDTNVYRVTVHKTFEGNLTTKPINGAIFIFNPRTGQLFLKIIHTSVWAGQKRLGQLAKWKTAEEVAALVRSLPVEEQPKQVIVTRKGMLDPLEVHLLDFPNIVIKGSELQLPFQATLKMEKFGDLILRATQPQMVLFNLYDDWLKSISSYTAFSRLILILRALHVNNEKSKIILRPDKNTITESYHIWPSLSDDEWMKVEVALKDLILADFGKRNSVNVASLTASEIRDIILGMEIAAPSVQRQQMAEIEKNTEAAAQVTALQTKTTNIHGDEIVVTTTTQYEQQTFASKSDWRVRAISATNLPLRVNHIFVGNDDVKDDAGSYTYVIPKNVLRSFIVNADLRTQVVAYLYGTSPPDNKQVKEIKAVAWIPQRGTNNGVDLPVTLPKHDFLLKDLEPLGWIKTQSQELNHLSPQDVTTQAKIMAAHPEWGPQSICVTCSFTPGSVSLNAWDLTVAGFEWGRKNEDVTGQNPGFNPSMANRVQLLLSDRILGMTLVPEGGIWNYGVGLTQSWSEKIPYTMTLDKPEAFWAPCHRPNAFLNFASMEGDDAADVENSLE

SEQ ID NO: 419 - protein, 849 aa, Clostridium thermocellum
  Cth TerA precursor
MYDEAKAQHAVNFINCLKHTKGQWRGVPFDLLPWQDKIIRDIFGTVKENGYRQYNTAYVEIPKKNGKQLALDTPIPTPDGWTTMGEIKAGDKVIDEKGRPCNVVAISEIDDTEQAYKINFRDGTSIVAGERHLWKVQVTNNGRREKLLTTGEMYQKQFKTKSKENRALFRIPIADAFILPENKLPIDPYLFGYWIGNGNAVKPEITVMRDDVDEVIKNIPYKLHNRYKQEGNSDILVYKELKSILVKNFREKRIPIEYLRASAQQRKRLLQGLIDSDGCVSTAKSQAIYVTILFELAKDVQDLLWSLGIKNTLKTAPSARYGIETGEICYLIKFTAFNDLEVSGLDRKLKRGRERNIKTRSHFHYIKSIEKTGKTKMRCIQVDSPSRLYLAGKSMIPTHNSELAAAVALYMTCGDGEWGAEVYGCAADRQQASIVFDVAVEMVEQCPALKKRIKPVLSVKRLIYKPTNSFYQVLSAEAYSKHGLNVHGVVMDELHAQPNRDLYDVMTKGSGDARLQPLFFLITTAGTDRNSICYEVHQKAVDILEGRKIDPTFYPVIYGIDDNDDWTLEKNWYKANPSLGHTIDIEKVRNAFNSAKENPAEENIFRQLRLNQWVKQSTRWMQMDKWDECAFKVDIDSLKGRECYGGLDLSSTTDITAFVLVFPPRTSDEKYIVLPHFWIPEDNLNLRVRRDHVPYDIWKKQGYLKTTEGNVVHYGYIETFIEELGKKYNIKEIAFDRWGAVQMVQNLEGMGFTVVPFGQGYKDMSPPTKELMKITLEKKIAHGGHPVLRWMMDNIYVKTDPAGNIKPDKEKSTEKIDGAVALIMALDRSIRHENKESVYEKRGMRSFLD

SEQ ID NO: 420 - protein, 1088 aa, Candida tropicalis (nucleus)
  Ctr VMA precursor
MAGALENARKEIKRLSLDDTNESQYGQIYSVSGPVVIAENMIGCAMYELVKVGHDNLVGEVIRINGDKATIQVYEETAGVTVGDPVLRTGKPLSVELGPGLMETIYDGIQRPLKAIKDESQSIYIPRGIDVPALSRTVQYDFTPGQLKVGDHITGGDIFGSIYENSLLDDHKILLPPRARGTITSIAEAGSYNVEEPVLEVEFDGKKHKYSMMHTWPVRVPRPVAEKLTADHPLLTGQRVLDSLFPCVQGGTTCIPGAFGCGKTVISQSLSKFSNSDVIIYVGCFTKGTQVMMADGADKSIESIEVGDKVMGKDGMPREVVGLPRGYDDMYKVRQLSSTRRNAKSEGLMDFTVSADHKLILKTKQDVKIATRKIGGNTYTGVTFYVLEKTKTGIELVKAKTKVFGHHIHGQNGAEEKAATFAAGIDSKEYIDWIIEARDYVQVDEIVKTSTTQMINPVHFESGKLGNWLHEHKQNKSLAPQLGYLLGTWAGIGNVKSSAFTMNSKDDVKLATRIMNYSSKLGMTCSSTESGELNVAENEEEFFNNLGAEKDEAGDFTFDEFTDAMDELTINVHGAAASKKNNLLWNALKSLGFRAKSTDIVKSIPQHIAVDDIVVRESLIAGLVDAAGNVETKSNGSIEAVVRTSFRHVARGLVKIAHSLGIESSINIKDTHIDAAGVRQEFACIVNLTGAPLAGVLSKCALARNQTPVVKFTRDPVLFNFDLIKSAKENYYGITLAEETDHQFLLSNMALVHNCGERGNEMAEVLMEFPELFTEISGRKEPIMKRTTLVANTSNMPVAAREASIYTGITLAEYFRDQGKNVSMIADSSSRWAEALREISGRLGEMPADQGFPAYLGAKLASFYERAGKATALGSPDRVGSVSIVAAVSPAGGDFSDPVTTSTLGITQVFWGLDKKLAQRKHFPSINTSVSYSKYTNVLNKYYDSNYPEFPQLRDKIREILSNAEELEQVVQLVGKSALSDSDKITLDVATLIKEDFLQQNGYSSYDAFCPIWKTFDMMRAFISYYDEAQKAIANGAQWSKLAESTSDVKHAVSSAKFFEPSRGQKEGEKEFGDLLTTISERFAEASE

SEQ ID NO: 421 - protein, 1103 aa, Chlorella virus NY2A infects Chlorella NC64A, which infects Paramecium bursaria
  CV-NY2A RIR1 precursor
MVGRPMNRLMVVLKRDGSKENISFDKILQRIQRLCWPINSKPVYKGSRAMTGLSVDVSKIVASVCASIVDGISTVQLDELTADKSASMTTEHPDYGILAARISVSNLQKQTHDKITDAYAEIAHLLSNDFKENIEKHADEYQSFIDYDRDYDFDYFGFKTMERLYLTKVNNKIVERPQHVYLRVAIGLWGSDIARVKETYDALSCRKFTHASPTLFNAGFKKAQLASCFLVTVEDSLGDIYKVLGDCAQLSKHGGGLGINISEIRGRGSRINGTNGESDGIVPMLKVFDTTSAYANQGGRRKGSFAIYLEPHHSDVMDFLLMKRNQGEESLRARNLFYAVWLNDLFMKRVETDAQWSLFDPSECPGLTDAFGDEYAELYERYEAEGKAKNVVKARDVWNTMVTTIIETGQPYVSNKDAVNKKNMQMNAGTIRGSNLCVAGDTKILTSSGYHPIKDMEGKQVRVWNGYEFSETIVHKTGVNQKLIMVSLDDGTELRCTPYHKFYIETGSRPADKSRVMEVRAGDLEKGDRIIRFELPTITVGETTMSDKEAYTKGFFSADGCVIKSKYGEDEYRISVKREDKIEALTKYVDVIKSHTNRFRTHFYVPDYVQNKFEVPINSMVNEKISWLAGFMDGDGCVIRYKDIENMQAVSINKSFLQDIRLMLQTIGIHSTINKFMPNRVMKMPDGRGGTDMYNGAESWRLQIDSEGVRKLFALGFTPRRLKMNGSRKRHHKTNKFTRVVSVTDHGDVEDTYCFNEPKRHMGVFNGVITGQCNEIVEYTSKEETAVCVIGSVVLKNYVKNDKFDFDDLRKNVKILAKNLDRSIDVMAYPIKEAETSNKLRRPIGVGVQGLQDVFFKLRFSYDSPEARDLNREIFEHIYYAAVEASVELAEIHGPYPTFEGSPASKGILQYHLWDVTPKSNLDWRGLEERVKKGIRNSLVTALMPTASTAQICGSVEAFEPITSNLYSRRTLAGEFPVINSYLVRELIERGTWNEQMKNQIIANGGSIQKVIGIHPSVKAVYKTAWDLSMKSVIDMASDRGAFVDQTQSMNLFLAQPTLKNVTSMLFYGWKSGLKTLQYYLRSKPASSAIAVTIDNDCLVCSA

SEQ ID NO: 422 - protein, 1222 aa, Crocosphaera watsonii WH 8501 (Synechocystis sp. WH 8501)
  Cwa PEP precursor
MITTTYEITPTVKRETAFILWFEEVGSKDVDLVGGKNSSLGEMIQQLQPKGVNVPTGFATTAHAYRYYIESAGLESRLRDLFTDLDVNDVTNLQERGQLSRSLILNTPFPKELEAAIIEAYKMLCDRYSHECSKLQEKYREECKIETQNLDVAVRSSATAEDLPEASFAGQQETYLNIHSVKGVLEACHKCFASLFTDRAISYRHHNGFDHFAVALSVGVQKMVRSDLASAGVMFSIDTETGFKNAALITAAYGLGENVVQGAVNPDEYYVFKPTLQDGYRPILEKRVGTKAIKMIYDTGGSKLTKNVDVLPEEQEQFCLNDEEILKLANWACIIEDHYSRVRETYTPMDIEWAKDGRTGELYIVQARPETVQSQKAANVLKTYKLQDHSTVVAVGRSVGASIGQGEARVILEASKIDQFKPGEVLVTNRTDPDWEPIMKKASAIVTNQGGRTCFDGKTKILTNQGFMTLRQVYEQGYEGLSTLSLNTKTHKIEWKPILDTMKRQSEMIDISVSQTGRITDNTLRLTPDHKMVNLRGGKYTKTEIQDLLKQQEMLTVAQTIPSLGNNKHQEADLAYFLGGIITDGSIYTSSTRGEVQFIQKDVPEKQAFISKMNDLANSLYGKSFTAHIKPVSSSYIRGQKVTGQATAYRLHSKAIAYDVKERENNITQLLLENEAELSYHFLGGVIDGDGCYHKNRLHIYISEENLLQAVIIACLKMNTVPQVTKNRNIYHLQIVEKLEVILRYTQRVKGEVTPRTIQTRFFATRQLFENQETGQIKLRQDNNCLISDKQLREMGEFEELIDGDTRMQRVIQVGEKSDGDVYNITVAEHHNYVVFTAKYTPVVVCNCHAAIIAREMGIPAIVGCGDATDKIKTRQEITVCCSEGEKGRVYDGLLPFEVEETPLDNLPVTRTQILMNVGNPEKAFSLANIPAQGVGLARLEFIIANHIKAHPLALMKFDELEDEAVKEQIAELTKRYDNKPQFFVDKLAHGVATIAASFYPKPVIVRMSDFKSNEYANLLGGQGFEPKEDNPMIGWRGASRYYDPMYREAFALECQAMKTVRDDMGLVNVIPMIPFCRTPEEGKKVIAEMAKNGLKQGVNGLQIYVMCELPSNVILADQFADVFDGFSIGSNDLTQLTLGLDRDSALVAQLFDERNEGVKRMVKLAIETAKKKGRKIGICGQAPSDYPEFAKFLVELGIDSMSLNPDSVLKTLLMVAEVEKG

SEQ ID NO: 423 - protein, 1115 aa, Crocosphaera watsonii WH 8501 (Synechocystis sp. WH 8501)
  Cwa RIR1 precursor
MQPTVLTSPKQTSHGDTQTSSLYHSQLGESKIRVRRRDGSWTALNIVKIRAVVDWACADREVNSIALEAGLTTRLRDGITTREIQDNLINCALEMCSPDEPDWRYIAGRLHIWSLWKDTLVSRGYQYGNYEIVAKTKIDAKQYDNRLLTYSTAELQEAGSWINPDWDTDYDYAGAVLLTSRYLLDDELPQEAFLTCALLLATVESPENRLPWAKRFYEAIAKGKVSLATPILANLRVPGGSLTSCFILSIDDNLESIFEEITNTARISKNGGGVGVNVSRIRATGSWVMGKNNASGGVIPWIKLLNDTAIAVNQGGRRAGAVTVGLDIWHLDVPEFLEIQTENGDQRRKAYDVFPQLILTDEFMRRVENKEEWTLVDPYQVKEKLGIELAELWGEKFEEAYGLIEAELDREITLYKRVNARELFKTIMRSQVETGMPYLAFKDTINKANPNKHVGYIPGVNLCVAPETKILTDRGQIAIADVAGEKVNIWNGSEWSEVLVKKTGENQPLLKVHFSNGESLDCTYYHKFHVQENYKGKVKIVEAKDLQEGDKLIKYRLPLVESENDIDFPYAYTSGFFSGDGSHDGMGKPEIDLYGEKKELLPFVTVRNKYYGGSYGDKSWRIERDEVAVYDDVNQDRIVCKLPLDIPAKFTVPVNGYTIQSRLEWLAGLLDADGTVARNGDNESLQVASTHQQFLLDIRLMLQTLGVDSKVVKMDEMGYRSLPDGKGGYQDYFCQAKYRLLISSNGLFQLGELGLKTNRLQWNLREPQREASQFIRVEKVELTCRYDDTYCFSEPKRHLGMFNGILTGQCTESFSNVTPGKFAHCCNLVSLNLANIEEEELDYLCNISVRILDNTIDITNPPFNDAKAHNDRYRTVGVGCMGLADWLAKKGLTYENITEISNLFEEVGYWCTHTSMELAKERSPYNAFEGSDWSKGLLIGSKPVDWFVENASKKERWVQLSEDIKTYGIRNSHITAIAPNTSSSLVQGCTASILPVYSRFFYDKWAKGTIPIAPPFIKESFWFYHENKTLEQQKVVKAVATIQQWIDTGISMELLFNLNQGVYFADEPERCLTAKDIFETLLLAWKEGCKAIYYVRTVQKDDFKESDNNCTACAN

SEQ ID NO: 424 - protein, 378 aa, Costelytra zealandica iridescent virus
  CZIV RIR1 precursor
PEIISFLNTRRVSGFGGDYNYKLMNIHNGVNIPDNFMRKIWFISTVAPILKQENGKRMKMLEEAIKTFQNSDKWVDENNLDLNKLTIENAQTYIKEMDKFDLTDPHNKEVKETISATELWERILVTRAECGEPYCHFIDTSNRKLPEFQKKLGLNIKQSNLCVVGETLVLTQNGQFPIKYLVNQYVKVWNGEEWSEVVVKKTGFNQELVRVDFNNGTSIICTPYHNFLSLEDDSTIKNLKRICAQDLPCNFKVLYFYQNLDFVTTVKVTKITHLSQRADTYCFSEPLNNAGVFNGILTGQCSEIILPTDENRTAVCCLASLNLDYYDNWCDNEQFYLDVATYLDNVLQYFIDNAPRSLKRAIYSAESERAIGIGVMGL

SEQ ID NO: 425 - protein, 1608 aa, Dictyostelium discoideum strain AX4 (nucleus)
  Ddi RPC2 precursor
MDPESVGYCNNPDFLHKGSMDELYNISKLTDDIKPVEEKWKLVPAFMKCRGLVKQHIDSFNFFINVEMKKIVKANERLTAENDPSYFVRFTDINVGSPTSTEDNLDSVQLTPQRCRLRDMTYSAPIFVNIEYTRNKQIISKRDVHIGNIPIMLRSSNCVLSKKTPEQMAALGECPMDPGGYFIVRGQEKVILNHEQLSKNRIIIEMDSKGLPSASVTSSTHERKSRTGVTLKNEKLYLKHNTFGEDIPVAIVLKGMGVETDQEMAQLVGSDDVFLNAITPSLEECQKCGVHTAAQALDYLGSRIKVFRRPYGVQNKKTKSEEARDILAGVVLNHVPVRRYNFRLKVIYLSLMIRRIIMASKDKSCLDDKDYYGNKRIELSGQLISLLFEDCFKKFQSELKKSVDQAIAKANRAENLDLPKLIRTDTITNGFTHAISSGQWNLKRFRMERSGVSQVLSRLSYISCMGMMTRIQSQFEKTRKVAGPRSLQPSQWGMLCPSDTPEGEACLHPDTIITMSNGQQKPIRQLKDGDSIITLDPITMEAHSTRIYSHFIKSSSQYGKQLLKITTITGKEIICTNDHRFLTSNGNWKQSKDLLLNDKLFLISSSNQLEFNNNNNENNNENNNDIIEILNENQLINQGVVPIKIIQELKSIELLPLLNNNEKLITISRIIGSIDKIGSNKQNEPIIQYQFNLISDFDQFLKDLQYLGFINPIYKLNEEQQQQQQQKIDHQQQQQQQVEQQQKSIIIDFIGSSFGYFIQSLLNEKNWIEKSNNQFVKKEFLSSFISNVNRIQFNIIEEINQQNNDSNFKILLNYKQQKQQQNEKEERAVVDHDNEIFNIKSLQILLNQFNVISSIDFEESNLIIINSSLKKFIDLINIKFNQKLNNQIIQIREYLNYINYNNNNNNNEEINIKKKDFGYFKKLKIKRNSFEIEIEKIEQLNYQDCPEISDFTTESDYHSMISNGFVSHNCGLVKNFALMSHVTTDDSEGPLLRLAYNLGVQDILLVTGEELNSRNAYLVLLNGQIIGIHNSPDYFVTTLRKMRRAGRIREFVSICKNKAQQTISVACDGGRLCRPVIIVDDQRPRLTQEHIEDLKDGLRTFDDFIREGIIEYLDVNEENDSFLAWREAAIQPWTTHLEIEPFTMLGCVAGLIPYPHHNQSPRNTYQCAMGKQAIGAIAYNQLTRIDTLLYLLVHTQRPLCQTRTIDLLNWYKLPAGHNATVAVMSYSGYDIEDALVMNKASLDRGFGRCIVLKKQVTSIKKHGNDTSDRIFPPTPNDLRQPKYGLLDSDGIAKPGELAQKGQILVNKYSPLNTIDATPNPELIPDSAYKSSYMGYKYDNPAFIDKVLLTSGDDEQLLIKMLMRSTRRPELGDKFSSRHGQKGVCGIIVKQEDMPFSDLGICPDIIMNPHGFPSRMTIGKMIELLAGKAGVLSGKFGFGTCFGGDRVENISKVLISKGFSYGGKDYVTSGVTGEPLACFIFFGPIFYQKLKHMVMDKMHARARGPTVTLTRQPTEGRARGGGLRLGEMERDCLIGYGASALIMERLMISSDRFTVYACKNCGFLGYEGYCQYCKSSVDISTIQIPYACKLLFQELQAMNIVPRLKLVDS

SEQ ID NO: 426 - protein, 849 aa, Deinococcus geothermalis DSM11300
  Dge DnaB precursor
MELTPRVPPHSNEAEISVLGSILLDNDTLIGLGDTLTPEMFYREGHRKIFAAMRALQERGEPVDLVTLSEHLRVQGQLDEVGGLTYLIGLSEQVPTAAYAEHYARIVQEKHTLRQLISASGKAMQLAYEGQLPLEDLLDRAEKMIFEVAEQKKKSEAFQAMGEVVHETFEYITLLHQNRGIPDGVSSGFRDLDEQISGFQKGSLNVLAARPSMGKCVTADTLIDVPGTGERITVEAFVRRQWPVVLSVSADGRVRESRVGAWIDSGVKPVRRVTTRTGRVVETTPHHPFLGVDGWTPLYDLKVGDRIAVPRAVPVFGQRDVLSAERVRLLAYLLAEGGLTQSGPRWTNADPELVQDFRACLAAEFPEVEMMADAWTGIDDRLSRRWQPGERQDRPNPLIGWLRELGVWGQPTDAKRFPAVVWTFTRPSLAAFLRVLLSCDGTLSTLAGKARIEFTVASEGLARDVHHALVRFGIVSKLWRKGERSWRVEITDPRSVADYQLQIGWLGEKALRTIPVSAETRSHVGHPPAGAWAHVRRAAGERTASGFNAHTGRSLPQSRAARYAAVLDDTQLTLLGSDALYWDDIVSIEDVGERQVYDLTVPGDANFIAADICLHNTAFALSIAQNVALRGEKTVAVFSLEMPAVQLALRMLCSEARVDMNRIRSGQLNERDFERLAHAAGRLADAPMIIDDEPDLTLNALRSKLRRIAAQHGQLGLVVIDYLQLMSGGKNSGGSDNRQQEISTISRGLKGLAREMEVPIIVLSQLSRAVEQRPNHRPMLSDLRESGAIEQDADIVMFIYRDEYYNKETDQQGIAEIIIGKQRNGPVGTVKLQFHSAHVRFNDLAPEGV

SEQ ID NO: 427 - protein, 1111 aa, Desulfitobacterium hafniense DCB-2
  Dha-DCB2 RIR1 precursor
MLYRVASIIAQVEETFGKTKKEVKELAKSFYEMMAKLEFMPNSPTLMNAGRDLGQLSACFVLPVEDSMEEIFDAIKSAAIIHKSGGGTGFSFSRLRPKNSTVRSTGGVASGPVSFMKVFNAATEAVKQGGTRRGANMGILRVDHPDIREFITCKEDNKEITNFNISVGITEEFMKAVQEKRHYNLIDPHTKEADGQLYAPEVFQLIVDHAWRNGEPGIIFLDRLNRDNPTPQLGEIEATNPCVTGDTWVLTEEGAAQVRDLLGSQVKLALNGEYHETSKEGFFATGVKQVLTLKTQQGYELKVTADHLVRVASDMTRYKVTQEWKPAGELKPGDTIVLSNNRSIQWQGKGTKEEGYLLGLLLGDGTLKEEGAVISVWGEGEEAKSMMEAAEKAAFSLTHRQDFQGFQKEISERHEHRMRFAALRDLAQQYGILPGSKAITQELEKTGQDFYQGLLRGLYDTDGTVTGTQEKGVSVRLWQTDLAGLKVVQRMLQRLGIISTLYEERKPAGQKLMPDGQGGSKEYPVQAGHELVISQDNIEIFAEKVGFSNSKKAQLLAEKLNVYQRSLNRERFVDNIVACVPGDAEEVFDAQVPGINAFDANGIYVHNCGEQPLLPNEACNLGSINLKLMVTEKNGKVVVDWERLGQITRLATRFLDNVIEANTYPLPSIEEMVKGNRKIGLGVMGFADMLILLQTSYASEDAVEYAEKVMNFIQTEARLESQRLAEERGTFPNYQGSIYDGVRPLRNATLTTIAPTGTISMICGASSGVEPLFAVAYTKTVMDGTPLIEVNPIFQSLAEDYGFNSPELMRKIAEKGTVLGFPEVPNWVQEVFVTAQEIEPEWHIRIQAAFQKYTDNAVSKTINFANEATHEDIAKAYELAHELNCKGLTVYRDGSREEQVLSTGITKKAEEKAEEAKTQVSIPKVPFIPEVNTVLPRPRPTTTTGVTEKIRIGCGNLYVSVMADEKGICEIFTNTGRAGGCSSQSEATARLISIALRSGISVDAIIEQVKGIRCPACIRREGVNVTSCPDAIARVIKEYVELGKGKVNSVKVTSQPAVEEKPVQSKSASITNPQKTRATVAEGNACPECGMSINHESGCVVCTHCGYSKCG

SEQ ID NO: 428 - protein, 1153 aa, Desulfitobacterium hafniense Y51
  Dha-Y51 RIR1 precursor
MSFQESAPKAWLKANLTPNARVILEKRYLKQENGEVAESPEDMLYRVASIIAQVEETFGKTKKEVKELAKSFYEMMAKLEFMPNSPTLMNAGRDLGQLSACFVLPVEDSMEEIFDAIKSAAIIHKSGGGTGFSFSRLRPKNSTVRSTGGVASGPVSFMKVFNAATEAVKQGGTRRGANMGILRVDHPDIREFITCKEDNKEITNFNISVGITEEFMKAVQEKRHYNLIDPHTKEADGQLYAPEVFQLIVDHAWRNGEPGIIFLDRLNRDNPTPQLGEIEATNPCVTGDTWVLTEEGAAQVRDLLGSQVKLALNGEYHETSKEGFFATGVKQVLTLKTQQGYELKVTADHLVRVASDMTRYKVTQEWKPAGELKPGDTIVLSNNRSIQWQGKGTKEEGYLLGLLLGDGTLKEEGAVISVWGEGEEAKSMMEAAEKAAFSLTHRQDFQGFQKEISERHEHRMRFAALRDLAQQYGILPGSKAITQELEKTGQDFYQGLLRGLYDTDGTVTGTQEKGVSVRLWQTDLAGLKVVQRMLQRLGIISTLYEERKPAGQKLMPDGQGGSKEYPVQAGHELVISQDNIEIFAEKVGFSNSKKAQLLAEKLNVYQRSLNRERFVDNIVACVPGDAEEVFDAQVPGINAFDANGIYVHNCGEQPLLPNEACNLGSINLKLMVTEKNGKVVVDWERLGQITRLATRFLDNVIEANTYPLPSIEEMVKGNRKIGLGVMGFADMLILLQTSYASEDAVEYAEKVMNFIQTEARLESQRLAEERGTFPNYQGSIYDGVRPLRNATLTTIAPTGTISMICGASSGVEPLFAVAYTKTVMDGTPLIEVNPIFQSLAEDYGFNSPELMRKIAEKGTVLGFPEVPNWVQEVFVTAQEIEPEWHIRIQAAFQKYTDNAVSKTINFANEATHEDIAKAYELAHELNCKGLTVYRDGSREEQVLSTGITKKAEEKAEEAKTQVSIPKVPFIPEVNTVLPRPRPTTTTGVTEKIRIGCGNLYVSVMADEKGICEIFTNTGRAGGCSSQSEATARLISIALRSGISVDAIIEQVKGIRCPACIRREGVNVTSCPDAIARVIKEYVELGKGKVNSVKVTSQPAVEEKPVQSKSASITNPQKTRATVAEGNACPECGMSINHESGCVVCTHCGYSKCG

SEQ ID NO: 429 - protein, 2738 aa, Debaryomyces hansenii CBS767
  Dhan GLT1 precursor
MASYLPQEEFETNVYKYDETPENKSWASTLPTAKGLYNPEYEKDACGVGFTCHIKGEASHKIVSDCRNLLCNMTHRGGELNPKDGDGAGLLSSLPHKFFLREFKYYCNIDLPKLGQYGTGNIFFKKDDIVFEKSRKTFESIANTLGLKVLGWRKVPHDSSILGPASLSREPLILQPAIVLSELFDGQHKEISEEEFEKNYQMDFEKKLFILRKQSTHTIGLHNWFYICSLSSKTIVYKGQLAPNQVYAYYHDLANAEYEAHFALVHSRFSTNTFPSWDRAQPLRWAAHNGEINTLRGNKNWMRAKEGVMESELFGDELDKLYPIIEEGGSDSAAFDNVLELLVINGVLSLPEAVMMLIPEAWQNDIHIDSKKKAFYEWAACLMEPWDGPALFTFADGRYCGANLDRNGLRPCRYYVTDDDRMICASEVGVIEIEPEKILQKGRLQPGRMLLVDTKEGRIVDDRELKNKVASRFDFKSWVLANMISMDDLFSKLESRNVNLIENPESQDITVQTDPRLVAFGYSHEQISMVLAPMAEAKEALGSMGNDNALACISEQPKLLYDYFRQLFAQVTNPPIDPIREEIVMSLECYVGPQGNLLEMKPDQCNRLLLKSPVLSSLELNAIKNIEKVYPKWSVTNIDITFDKAEGIQGYINKIDNICQASSKAIADDHQIIILSDKLTSFNRIPISALIATGAVHHHLVRQKQRSKVAIIIETAEAREVHHACCLVGYGADGINPYLALETLVRMNIENLLKASLTDDQIIKNYKIAVDSGILKVMSKMGISTLASYKGAQIFEALGVDNSVIDRCFAGTASRIKGITFEYIAQDAFSLHDVGYPSRETIKPVALPETGEYHWRDGGDSHINEPAAIASMQDAVKNKNEIAYEAYSKKEYEAIKKCTLRGLLDFDYENSQSIPIDQVEPWTEIVRRFFTGAMSYGSISMEAHSTLAVAMNRLGGKSNTGEGGEDSARSLVHSNGDTMRSSIKQIASGRFGVTSHHLSDADELQIKMAQGAKPGEGGELPGHKVSEQIGKTRHSTPGVGLISPPPHHDIYSIEDLKQLLYDLKCSNPRARTSVKLVSEVGVGIVAAGVAKAGSENILISGGDGGTGAAKLTSIKYAGLPWELGLAESHQTLVLNDIRGRVILQTDGQLRTGRDIAVAALLGAEEWGFATTPLIALGCIMMRRCLASDTLVRTSEGDKPVAEVAIGDYLLDAEDKPVLCMGANPSQTGRMKEIAYQDFDSKKRVSFKCTPDHHLELTLTDSTPSLSGKSVTWFSRCTGAHLSEEVSEVYLDNMVSIFYNDLVDSTDSAVDKDSIHEAVDLALEDHYHRGNSDQYSIHLNEYISRIADKELQNEPEFIRECIHDAANRFVITSSGNRNIKSESFDDKLLLSRSRSSTADSDSDYVITDASVHSHSNNSSVYLASPDSMIPDGAANRFENIASKLKEPVCNCGGIRKIFRSFGTTEDAELAYSLLLSEHYYRLDPRFVTDGYTFQASVEQYENMCSQEVQNMHLKLYRSPLKFVEREHNSAELPVDPYFLGLWLGDGDSSGTTIMTTDREIVVWLNSYVERLNQNKPEGCFPLKLTEQLIYGAGHTSKSGHTTKVDVRNYKISSGDAFVRSGTYWNPIFDGLKKLGLLNNKSAGIPQEYMNSDEQNRLSVIAGLMDSDGCYVKSHNTYRFTQLTEDHKKIVYDLKELALSCGINTTGVELSVKPLGFNKHKHSTEYVVYLGNGSQKFQELLLLPRKKMEISKKHVSLDARPFTVSDVEDGEFRAIEVSGGVFQLANRLVVANCHLNTCPVGIATQDPELRKKFTGTPEHVINFFYYLANELRGIMANLGFRTVNEMIGRTEKLKVREDLRNTKNANMDLSPILTPAHTIRPGVATHCVKKQDHRLHVRIDNKLIDESEITLAKGLPVTIDCDVVNTDRSLGTTLSYRVSKTFGEQGLPHDTIHVNVNGSAGQSFGAFLAPGITLELEGDANDYVGKGLSGGRIIVYPPKESKFNAEDQIIAGNTAFFGATSGAAFIRGIAAERFAVRNSGANIVVEGTGDHGCEYMSGGRVVVLGSTGRNFAAGMCGGIAYVLDMAQDFGDKVNSQNVELSQITEASEIAFVRGLIEDHRHYTSSAVAENILNNFDRILPRFVKVLPYDYEKVLENEKKKQEEAKKNELNTFIKSIKEDPESDATNGEAAKIRKGHIHRPSLATVSAKDCSHEPNVLDLEDTIFDTEVEKKSVAKLDKLKGFMKYKRRNEKYRDAKKRTNDWNEMTSRLTKDELKYETARCMDCGVPFCTSDTGCPISNVIPKWNELVFQDRWYDALQRLLMTNNFPEFTGRICPAPCNGACVLGINSDPVNIKSVECAIIDHGFEQGWIKPEPPQHRTGKSIAVIGSGPAGLATADQLNKAGHSVKVYERSDRPGGLLMYGIPNMKLDKRIVKRRTDLMTAEGVEFICSTTIGEDISIEEIRSSNDAVVFAVGSTIPRDLRIKGRELNNINFAMQLLHKNTKALLDNDLEEIKKTLEGKHVIVIGGGDTGNDCLGTSTRHGAKSVTNFELLPNPPTSRPKDNPWPQWPRVFRVDYGHTEVTEHYGKDPREYSILSKEFVDDGEGNVKGIKTIRVEWKRSDSGAWQMAEVPGSEEFFSADVVLLSMGFVGPDADNLEVTKTKRGTISTVEPNGYKVSNEDNLFTAGDCRRGQSLVVWGIQEGRQCAREVDNYLMGSSRLPGNGSIEQRNFKLLEELAEKV

SEQ ID NO: 430 - protein, 999 aa, Debaryomyces hansenii CBS767
  Dhan VMA precursor
MNRLSLDAGESEYGQIYSVSGPVIIAENMIGCAMYELVKVGHENLVGEVIRIAGDKATIQVYEETAGVTVGDPVLRTGKPLSVELGPGMMETIYDGIQRPLKAIKEKSQSIYIPRGIDAPSLSRTAQYDFTPGQLKVGDHITGGDIFGSVFENSLLDDHKILLPPRARGTITSIAEKGAYTVEDPVLELEFDGKKHSYSMMHTWPVRVPRPVAEKLAANHPLLTGQRVLDSLFPCVQGGTTCIPGAFGCGKTVISQAISKFSNSDLMVYIGCFAKGTEVLMADGSNKNIEEVQIGESVLGKDGEARNVVALPRGNETMYEINESTPEEEADLARIAFTCNAKHELVVNTKQDIAVEQNCVTYFALESVTDEANGREFSVVKSQTKTFEESSMAKEFASTISKNSIDWTIEARDVGHMSDDVRCATQQSWAPVLASKEVLAPVVQEAGFDATIAPYVSYLLGLWIGNGYSDRVQYLIDGKNTELINRVREYDEAIENNNQTSAKTVDFLWDVINSMSFKVEGKSGKAIPSFLRTESFEVREQFLAGLIDSDGIVTKNPLSASVRTNSSKVGEGVIAVSRSLGICTSVKAENESYIISMTRNSALESVLSKCALAEKTTSVPSHITRTGQNFDFSVKKIEAADYYGVTLPDNSDHQFMLANQAVVHNCGERGNEMAEVLMEFPELYTEINGRQEPIMKRTTLVANTSNMPVAAREASIYTGITLAEYFRDQGKHVSMIADSSSRWAEALRELSGRLGEMPADQGFPAYLGAKLASFYERAGKAVALGSPDRIGSVSIVAAVSPAGGDFSDPVTTATLGITQVFWGLDKKLAQRKHFPSVNTSISYSKYTNILDKYYESNYPEFPALRNKLKEILSTAEELEQVVQLVGKSALSDSDKITLDVANLIKEDFLQQNGYSTYDQFCPIWKTFDMMRAFTSYHDEAQKAVANGAQWGKLSEATSDVKHAVSSSKFVEPSEGEEKGKKAFNELLANISEKFAEASE

SEQ ID NO: 431 - protein, 684 aa, Desulfovibrio vulgaris subsp. vulgaris DP4
  Dvul ParB precursor
MLQTETWPIDRLIPYVRNPRKNDEQVDRMVSAIKEFGFRIPVVAKSDGTVVDGHLRLKAAQRLGMTEVPVALADELTEAQVKAFRLLANRSANWAAWDNDLLALEMEELQAMAYDTSLTGFDIAEVDALLAKPAKDGLTDPDEVPETPTEPASAIGDVWILGKHRLMCGDSTNAEHVARLLAGVQPHLMVTDPPYGVAYDPAWRNEALAGQKTRRTGTVLNDDRADWREAWALFPGDVAYIWHGALHAATVAESLAACGFSIRSQIIWSKERLVLSRGHYHWMHEPCQPAGTMVQKVIDPGAGSQSARIAEVPIETLRAGDFVVSYNPYESVIRRRGRQITRFGERQFDGLMHTISAAGRVTRATPEHRFTVRLNPSAADKQLVYLMRRGNWWRVGRVSLFSSRGFGLATRLADNKGEDAWIISVHDNAIEAQCAEQVLSCRYGIPTTHWEVDNWTKVPARQRSPGMIAGIYSCLNLGALSARATLLLRDHRLEREYPFITCGDQLMFSRRTTRLVRACNIHPGIMQIPMPSTGEDFDWITITGNDAAPFSGKVYSMDVDKDLHYVADGLVTHNCWYAVKGQAHWSGDRKQVTVWNIASKGQDAETIHGTQKPVECMKRPMENNSSPGQAVYEPFSGSGTTIMAAELTGRCCYAMELNPAYVDVAVTRWENFTGQKAMRELPHV

SEQ ID NO: 432 - protein, 2959 aa, Emericella nidulans (anamorph: Aspergillus nidulans) FGSC A4
  Eni-FGSCA4 PRP8 precursor
MASLPPPPPPGWGASAPPSMPLAPPPPGYQPPADPNVAKYAQKKTEWLRTQRNRFGEKRKGGFVETQKADMPPEHLRKIVKDIGDVSQKKFTNEKRSYLGALKFMPHAVLKLLENMPMPWESTREVKVLYHVNGCLTLVNETPRVIEPVFHAQWATMWVCMRREKSDRRHFKRMRFPPFDDEEPPLSWSENIEDVEPLEPIQMELDESEDSPVYEWFYDHRPLLDTPHVNGPSYRKWNLDLPQMATLYRLSHQLLSDVVDQNYFHMFDLNSFLTAKALNVAIPGGPRFEPLYKDIDPNDEDFSEFNAIDRIIFRAPIRTEYRVAFPFLYNTLPRSVKVSWYSHPQVVYVRTDNHPNLPAFYFDPVINPISSRSVAPKNITVSHEDEIFGPGGYEDDFELPAEVEPFFADEDLYTPETASAIALWWAPHPFNKRSGKMVRAQDVPLVKHWYLEHCPQGQPVKVRVSYQKLLKTYVLNELHRKKPKAQNKQDLLKTLKSTKFFQQTTIDWVEAGLQVCRQGFNMLNLLIHRKNLTYLHLDYNFNLKPVKTLTTKERKKSRFGNAFHLMREILRLTKLIVDAQVQYRLGNIDAFQLADGILYAFNHVGQLTGMYRYKYKLMHQIRSCKDLKHLIYYRFNSGPVGKGPGCGFWAPAWRVWLFFMRGIIPLLERWLGNLLSRQFEGRHSKGVAKTVTKQRVESHFDLELRASVMADLMDMMPEGIKQNKVNTVLQHLSEAWRCWKSNIPWKVPGLPAPIENIILRYVKSKADWWISVAHYNRERIRRGATVDKTVAKKNLGRLTRLWLKAEQERQHNYLKDGPYVSSEEAVAIYTTMVHWLESRKFSPIPFPSVSYKHDTKILILALERLRESYSVKGRLNQSQREELALIEQAYDSPGTTLARIKRFLLTQRAFKEVGIDMNDNYSNINPVYDVEPIEKITDAYLDQYLWYQAEQRHLFPAWIKPSDSEVPPLLTYKWAQGINNLSNVWETADGETNVMIETELSKVYEKIDLTLLNRLLRLIMDHNLADYITSKNNVQLSYKDMNHTNSYGLIRGLQFSGFVFQFYGLMIDLLLLGLQRASEMAGPPQSPNDFLQFRDRATETRHPIRLYTRYIDKIWVFFRFNADESRDLIQRFLTENPDPNFENVIGYKNKKCWPRDCRMRLMRHDVNLGRAVFWDLKNRLPRSITTIEWDDTFASVYSKDNPNLLFSMSGFEVRILPKCRNLNEEFSVKDSVWSLVDNSTKERTAHAFLQVTEEDIQKFNNRIRQILMSSGSTTFTKIANKWNTALIALFTYYREAAVSTVNLLDTIVKCETKIQTRVKIGLNSKMPSRFPPAVFYTPKELGGLGMISGSHILIPASDKRWSKQTDTGITHFRAGMSHDEETLIPNIFRYIIPWEAEFIDSQRVWMEYSQKRMEAQQQNRRLTLEDLEDSWDRGLPRINTLFQKDRSTLSFDKGFRLRAEFKQYQLMKSNPFWWTSQRHDGKLWNLNAYRTDVIQALGGVETILQHTLFKATAFPSWEGLFWEKACLANGTQLLRYDGTKVNVEDVKEGDLLLGPDGGPRRAFNVVSGKDRLYRIKIDGDKEDLVVTANHILVLHRAKAMNTSVCFDRSKEQQGGAGEQLDISEVSAAERYDTVEMTAAEFAALHPQERSWYRAIRCPGFELPEQDVPVNPYFLGLWLGDESRNQSAIYSNHEEALREFLVSHAAELDMHLVYHGQSAYSTVCNKDRPTNKRIGPANQTQTVRPTIRQTRRTIRQQRLAAEHAAAEYTTQRETASLTPLLESPTSDKHGLLSSVETPGRLSDSVTTELPMSRSASAMRSIRTASGLSEFNDVTNVSASMPDIQNSGIKNQGRIAKVTRQQDSKGEVDFRQQYSQAIKDDLELLETDIEDDVASSDEIEDVCVVGSENELIGSEKQDQSGRRRQIHRLRTGHRGYGDLSDDEQEQLLDSVVERYAGDSRLNTLQQELSKMGILNPETGPINDKKRIPQVFMQNSRSVRLSVLAGLLDSDGWYIYPENMFGFAQSELCHKELFWDVVTLARSLGFGVWTKKRMMPDPTGKRMSPMLVAQISGDLAEIPCVLARKKAMPRLIPQSHSFAIKDISLESEATEWAGFRVDKDQLYLRHDYVVLHNSGFEESMKFKKLTNAQRSGLNQIPNRRFTLWWSPTINRANVYVGFQVQLDLTGIFLHGKIPTLKISLIQIFRAHLWQKIHESVVMDLCQVFDQELEQLGIEAVQKETIHPRKSYKMNSSCADILLFATNKWNVTRPSILFDTKDVYEPTTTNKFWLDVQLRYGDYDSHDIERYVRAKYLDYTTDSMSIYPSATGLMIAIDLAYNLYSAYGQYFPGLKTLIQQAMAKIMKANPALYVLRERIRKGLQLYASESNQEFLNSQNYSELFSPQIQLFIDDTNVYRVTIHKTFEGNLTTKPINGAIFIFNPRTGQLFLKIIHTSVWAGQKRLGQLAKWKTAEEVAALIRSLPVEEQPKQLIVTRKGLLDPLEVHLLDFPNISIRASELQLPFQAAMKVEKLADMILRATEPQMVLFNLYDEWLKTISPYTAFSRLILILRALHVNIDKAKIILRPDKSVITLEHHIWPSLSDEDWMKVEVQLRDLILNDYGKKNNVNVQSLTSSEVRDIILGMEISAPSLQRQQAAEIEKQQEEAKQLTAVTTKTQNVRGEDIIVTTTSQYEQQSFASKTEWRTRAIATSNLRTRANNIYVSSDDIRDEGYTYIMPKNILKRFIMIADLRVQVAGFLYGSSPPDNDQVKEIRTIVMVPQVGNTREVQLPQQLPQHDYLNSLEPLGVIHTISGNEPPYMTAQDVTQHSRLMNAHSSWDKKTVTMTVSFTPGSVSLAAWGLTPQGYKWGAENRDTTSDQPQGFSTSMGEKCQLLLSDKIRGYFLVPEDNVWNYSFMGSSYGSVEKRPVYVKIDTPLRFYDDQHRPLHFQNFAELEDIWVDRSDNFA

SEQ ID NO: 433 - protein, 866 aa, Ferroplasma acidarmanus, taxon:97393 and taxon 261390
  Fac-Fer1 RIR1 precursor
MNKVLNTVIKRDGSSVPFDKKKIAMAIFKAMLSVKIGSMEEANKLADYVAQELETSSEVPTVELIQDTVEKVLMTRRINDVSYIAAAKAYILYREKRNTIRQEKEFIGVKDDLKLSLNAVKVLEARYLFKDSEGKIIETPKQMFHRVAVHLGIIQGLYDYISYRKTGKLNEKGTVYSGITKTQNEELERAFNELKKEKAIDGTYTEFIDFIKTKKNMINYWIEKFENMMIKLEYVPNSPTLMNAGGPLGQLSACFVLPVDDSIDSIFDTLKATAEIHKSGGGTGFSFSRLRASDDIVASTKGVASGPVSFMRIFDVTTDVIKQGGKRRGANMGILNYNHPNIMDFINSKDAENKILSNFNISVGVNDEFFEKLDNDENVDLINPRDGKVTGRVKATTLWNSIIDHAWLTADPGMIFLDEINKKNPVKNIGYIESTNPCVTGDTKIFTSEGVKKARQLYEEGNPLNVKIDGRFGGEFKPSSNVIYTGFKDIYKIQTKEGFEIKVTGDHKIYSEKNGWTEALNLKENEKIRILNEGGSFGSSGTLEEGRVLGWLVGDGHINNGNNNDRAVLNFYSQDRVFADTFRKYVNDIVRPATNNREYNVGMVNIESRNCITIASERLKEFASEYDLIEEKLNVPDKVFAGSMELQRGFLQALFEADGTVYSGQKSRHSVRLGSISLNLLKQVQMLLLNFGIYSRIYQNRKKAGMRMLPDSNREMRLYATQDFHELNISAENLIKYADSIGFISERKNSKLNGAVNSYKKAPVKPSWLARVDKIEYVGREDVYDLVEPSTHSFVANGIVVHNCGEQPLLPYESCNLGSINLAKFVEDGKFTMTGIGKHCVAQILKCVKHNPVDTHIAATGIAGYG

SEQ ID NO: 434 - protein, 838 aa, Ferroplasma acidarmanus
  Fac-Fer1 SufB (Fac Pps1) precursor
MIKMEDYNKDEEIEKLTESLKHNKKSDFEFHDTINPVYSTGTGLNRKTVEEISDIKHEPDWMRRSRLKALDIFLSKPMPTWGPDLSGINFDELTYYSKPGETKAKNWDDVPDKIKETFNKLGIPQMEQKYLAGSVAQYDSEGVYGSLRKEWEDKGVIFTDLDTAVQEHPDLVKDYYCRAIPPSDNKFAALNGAVWSGGSFLYVPKNVTIDMPLQTYFRMNGEQSGQFEHTIVVADEGAKVHYIEGCLPEDELISQGDKFVPINELLTDDSVVSNTGNQRKITRKYVHPYSGLMYKITPLSPGNAFRATSEHPVLSIKKEDVTSRIRDGHYEISTKKLMEAIPEYRRMDELSEGDFIVYVSPVETEDDASIDEDMLKILGLYTAEGSISFNKSLNLYQMSFSFGLSAKEEKIAYELYNIIKEKGERANIFKADKKYYTVSTYSKTLIDFCLNNAGKYADKKAFSEKIMKLPPEKQKLLIDYYLKGDGNVYIKKGKSKMIRAGTASKILALQLQEMLSRNNTFASIMIRKASDDVILGRNIKRKEQYIVEYTENIKFSRVRHKDNYYYVPIKKMEAEVYDDIVYNMEVETDDSYLVKGFAVHNCTAPKYNTSSLHTAIVEIYARKNSDVKYTSVQNWSDSVYNLPVKRAWVDENAHMDWVTGELGSKVTMIYPSSYLRGRGASTSNLQITLATKDTFKDAGGKALHLAPDTTSRIVSKSISLDNGLTAYRGLVRMNEGAKRAKSHVQCDALLINSDSKNYTYPYDEIYEPTAEFSHEATVGKIGTDELTYLRSRGLSEDEASSMIVLGFMDDIMKEIPMEFAVEMNRLVKLEMSKMGAVG

SEQ ID NO: 435 - protein, 890 aa, Frankia alni ACN14a
  Fal DnaB precursor
MAWPVDRSPDVYEHVFESGSAGERGGCVVSVTEISRGGAGGGAEFERTPPHDLPAEQSVLGGMLLSKDAIADVVEVLRMADFYRPAHGLVYEVIGDLYGRGEPADVISVAAELSRRDLLERVGGPGYMHTLISSVPTAANAGYYARIVAEKAVLRRLAEAGTRIVQLAFGAAPDVSDVVDRAQAAVYEVTERRANDDYLPLGELLNPALEEIESIQGRGEGALTGVPTGFVDLDELTNGLHGGQLWIVAARPAVGKALALGTALPTPTGWTTMGRVAVGDMLIGADGRPTRVVAATDVMHGRPCYEVEFSDGSVIVADGQHQWITQTRAEPRRDGPVRSGSRTATLTRPVTTEEIARTLRCRTADRRCTHAVRVAGPFQLPAVDLPVDPYVLGSWLGDETAACASLTSADPEISEEIRRRGHEVVGSTSARHRPGLRRSAATERACTVCGRPFTAAMPGVRTCGQSCGGKLRFLAEPLSVRSCVDCGGRTTGFGPRCRSCHARAGTLQARLRTLGVLGDRHIPAGYLRASEQQRRDLLAGLLDADGTVASNGSTAQFATTNPRLAREVRELVLSLGCRATVTTTRTRGRSEETSTCFTVNFAPQDQVFRLARKAARLRPTGHPAAAVRYITDVRPIASVPVRCVEVDSPDHLYLAGETCIPTHNSTLGLDFARAASIKNGLTSVIFSLEMSRMEITMRLLSAEARVSLQNIRTGRLTDDDWARLARRMGEVAEAPLFIDDSPHLTMMEIRAKARRLKQRNELRLVILDYLQLMSSPKKVESRQQEVSEISRSLKLLAKELDVPVVAISQLNRASEQRADKRPQVSDLRESGSLEQDADAVILLYREDTVEKESARAGEADLIIAKHRNGPTGTVTVAFQGHYSRFVDMAN

SEQ ID NO: 436 - protein, 599 aa, Guillardia theta (plastid)
  Gth DnaB precursor
MKVTKFYNLKAEKHLIIQILVEKDFFLQIYTKIDTQVFYFQSHQILYRSINILHTKKVLINLPNLLSLLHSELVSETVINYLITLFNDRDNFRILNINDSLKVLLDNFIRRELQNSCAKIVSLTFNFNLSVETLLQKSNLLISNINTYNKKVSLKSISQLLLETILEIDKKTNRSTHVLTGFFDLDHILVGLQKSDLIIIAGRPSMGKTAFMLSLVRNVADIQSFPIVIFSLEMSSKQLIYRLISNETNIATSRLREGNISISEWEILNRAMTILSNLNIYLDDENNLDVLDIQSKLASLQQIYGDIGLIVIDYLQLLQYKEKSSQRHIELSYITRYLKLIAKDFNLPLVVLSQLSRNVEFRLNKRPILSDLKESGCLSYATNQPYFLKSDNVNFSKLTSLKVSNHYILSATLELLIPFQYNRIYPIVSLIKRELQTGYKVVYELDFYISVIVSTVEHYVLTLNGWKRILELTVDDLVATLDIQYLIYNNTEVDLFSSNVIFSSVINLICMNRINVYDFWIPKTNNFFVNALLVHNSIEQDADVVLFLYRDSYYQHNLKQSNIDMCEVIVAKHRHGTIGMVNLIFNPNTVSFMNLIKES

SEQ ID NO: 437 - protein, 709 aa, Gloeobacter violaceus, PCC 7421
  Gvi DnaB precursor
MTSSELDLRIEERLPPQNIDAEETILGGLMMDPEALTRVVEHLRPEAFYVESHQIIYRAALALHAQGRPTDLLTLSAWLEDNKLTEKIGGRTYLRRLTDAAINTINIDGYGRLVSDKYALRMLIRAGQEIAALGFDSATEIPKLLDRAEQTLFAVTQERVQRSLVPASEVLMNIFEQLETRYQDGSNVFGIPTHFYDLDNYTQGLQPSDLIIVAGRPGMGKCCAADTPIADPVTGALVTIEEIYRRGEAGKLVEVLTLLGDGRLARVEPSHFVDDGIKPVYRVRTGLGREVKTTLTHPYLTPTGWKPLAEIAAGARIAVPCRIPVFGSESLPPKEISLLCSRATRDNRIPDPVFRLPRAQLVAFLKQLCITADSARVSDRTVEFTSPSKSFCHQLQHLLLRLGVLSALREVSGIFYLDIKPAAETPIKPASLWSQDLAHHCDLHWDEIASIEYVGNEQVYDLTVPVTHNFVAADICLHNTAFSLSIAQRIAQKAGLPAVVFSLEMSKEQLVQRLLCSEAGVESHRLRAARISENEWQRIGQAIGELASIPLYIDDSPNATVTEIRSKARRLQAEQGGRLGLVMIDYLQLMEGAGSDNRVQELSKITRGLKGLARELRVPVMALSQLSRSVEARTNKRPMLSDLRESGSIEQDADIVLMLYRDDYYNPDSPDRNIAEVNIVKHRNGPTGTVKLLFENQFTRFLNLTSGNH

SEQ ID NO: 438 - protein, 1566 aa, Gloeobacter violaceus, PCC 7421
  Gvi RIR1-2 precursor
MFVIAQLHLAPLDAELVIRLFAGASTMGMDGVGSLEQGMALSESQRAVLQKYLIGEERTWEDVCRRVARFVAGAEKTPALQREWQERFFSILAPMKMLPGGSILANSDHGTHGLLNCFVLSAEDNIQEIAKLVTDAVLTTKFRGGVGINIGAHGQKGYIRPKGTPFADGKALGPCAVLDMVSETSKKITTGNKCFAAGTLLHTEQGYVPVEQVVAGVGTRVCTHQGFRNISERFDNGEAEVFRVTTRKGYSVEVTANHKMARLDENGDLLLDELSHLQVGDNLLLLLGSNPVTEKVRLQCIPAGYRSSIEIAQPPELDEQLAYLLGYAYGDGCVGRGATYNYLSLAVSHTYPNVRDQLAAIIREKFGLTTKIYSGSGAVWNLLVHSANLLDWLKANGLLKQKAADLAMPEAILRSPSSVVGAFLSGYFDADGCVRGGKGGYGFDCTSKAFVGAVQLLLLAEGIVSNLHTTDRSRQGWRTIYRLNVCGTEFKRRFQTLCCRSAKVVHSPMVLGRDGTGGYPPALVRGASYQRVVAVGGKHLLYTALLKVIEKTRTAGKQALAESLCQHVNYFPDPIVAIESVGTQRVYDIEVEGMHLLSGNGIYTSNSRRGAFMFSMHWKHPDVWEFIQAKTQSVMDARVARDLIERTADLAVDKGLSDVEKNARLDQLKQELTDTWTETHLSPKGTRDRRWHNANISVLVDDEFFDKLDEGNPGVVDLWNQIAQYAHDTADPGLLLSDNARRRSPIKNFITTTNPCVTADTWVHTGDGPRQARDLIGVQHSTYVNGELFSTTSAGFFATGVKPVLRLRTKEGHQLRLTGNHQVLKLTAQTRHRQYTEWVPAEQLNPGDRVMLHDHRGLQPWDGPGDAETGWLLGTLVGDGCFVRDNNGTLCAKLSFWEASAPEMPGRAVTLATSRANVGRKLAGTINAQGVASVQSSGLARLAATFKIVPGCKRVTSRVEQGSFEFYRGFLRGLFDADGSVQGDQQKGVSVRLSQSDLPTLEAVQRMLLRLGIASDIYKRREAQVRMLPDSRRQSAPYPCKSQYELVIAKDNLQVFAQLVGFEHPAKAARLAKLVDTYSRTPNRERFSATVESLTPDGIEEVYDCTVPGPARFDANGLVVHNCGEIWLPPNSACNLGSIVISKFMHRTERGVELDWEDLARTVEISTRFLDNVLDVAEFATPAQKHNVRNVFRQLGLGIMGWADWLKARRIPYDSEAHLREIDKVGRFIAERAYRTSEALAAEKGACGIWEEIKDVRPGNPFERWRDSTGRVLSGDEAAERAEALTQTPRRNSTVLSIAPTGSIAQLASCSWAFEPDFGLTIWKQVYVDASSSQQNWVQIPSPYVEALGLGEADRQIVLQTGSLQGTAFAAAHPEEAAAFKISREISWQWHVLAQSRWQNWVDSSISKTINCSRETTVEEIKEMYRFAQRNGLKGITVYREGTLESEPVKIGAIDQNEPAAAAQPVAPTADGNGNGYVPARPFATGAARPAMLDEEVSQAASLIGIHYDEGPMYLSEEAPVDDWTSSQFKGGCGGGVLHYQVWIRENGRRLLVVRSDSYSMCFVKS

SEQ ID NO: 439 - protein, 1144 aa, Heterosigma akashiwo virus 01
  HaV01 Pol precursor
MEIIECQVFSFYPTDFLNNRNFTVFAFGRKEDGSSVGIEIVDFKPFMYLHVPERQQKFWTMNNTEDLRKTLVTEHEIKELRNINTVMKKRLFPYTNKDRELFLMLEFNTEWGIRKCSMSLRENYIYKNFDVYESNISPMLRLMHMREILPSGWVRIKNYDQNNTTKCDTNIRINFMDIIGFERDDIAPCKISSFDIECMSFDAYTQNQSIFPSYERENDTISQIGMATWSYGNNEEVLKRLYTLGNAAEPTDQTIDIIQCDNEGELIIRWFHYIAEIDPDIITGYNIFGFDWEYIKGRVDFLGIEDEILSVASRIDKLKSRFMTKELNSSAFGDNEFKFLEMPGRIEFDFFSYIKREHKLESYKLDNVAYHFTKQKKHDVKPMDIFIKLMGTPEDVREVAEYCVQDTFLIIELMKKLCVIPNLIEMSKVTRVPFEYLILRGQQIKVFSQIFYEAMKENIVIPTNILKLQGKKDRNEEHEKYTGATVLTANSGCYFDCVSGLDFASLYPSIMIAYNMCYTTLVLNERELPREAKIETIEWENNRHRFVQNKEGLLPKILKKLWITRKSTKRLMNETENKEMKTILNGKQLAIKVSMNSVYGFCGVMRGILPCVAIASSVTTKGRQMIEHTQNMVKQLYPDAKVIYGDSVTKETPLMLRTMETCGNHKHEVISIENVFTDNMRSIDMYSIIGEKEHVMLSRNEEIWTGENWSRIIRVIRHKTQKKIYGVLTENGYVEVTEDHSLISSDYELLKPKNCIVKETQLLQSFPDIVENSTIENNMIDIPKGQPCRLTVFGQVSAMIIYTYLKRKNYSITLNVCNVNSNKFYISFMERPRFKNTKKNIIKKIFFIRNTDNEEYVYDVETEDGIFHAGIGEIIVKNTDSVYVNFPSTNNDMQKVFDISIEAAEAISKTFPQPIELEFEKVMYPFILFTKKRYASLIWTRVDKPDKIDFKGIQVVRRDNCSYVRESLTTIYNCLLYERNVDKCLGITDKIIDDLLKGRVPIEKLTVSKSLKSNYKSKTMPHFLLAEKMKQRDPMNYPRPGERVPYVFIENTEARLQGEKAENPEYAKENGLIIDTLYYLDHQMKKPLAELFNIVLGEGKYNLYKNHMGFIKMKKNHQERERLREINRKKGQKELNLKWFSKKK

SEQ ID NO: 440 - protein, 1098 aa, Halorhodospira halophila SL1
  Hhal DnaB-1 precursor
MQGDGSASDSEALKVPPHDLEAEQAVLGGLMLDNAAWDQVADRLHEEDFYRREHRLVYRAMGELAEGNHPMDVVTLSGWLRQQGKLEEAGGLSYLGGIARETPSAANIRAYADIVRERSVLRQLIRAGSDVAEAAFRPQGRNSEDLLDYAEQTIFQIAEQTGRNRQGFVGMRQLMPQVIDRIDTLYHTQEAVTGLATGFDDLDHMTSGLQDGDLVIVAGRPSMGKCLAYDAEIVQADGGVKTIEQIVRERRAHLATVGADWRLTWTEPCDYVDDGHKPVFEVTTRLGRRIETTLTHPFLTVHGWQRLEDLAEGDAIGVPRQLPVFGQEPIRDCEVRLLGHLIGDGGLTGSPPRLTSGQEAMTADFLEAVDAFGGVEAKPIRASRRTQSWVVVGAAQARAAARSSFASLVDALIRRSPLTGRAIARNLGVAPATLTYWRQGVNVPDAAMVGLLAGELGVDVGELRPEPVARRNDRNPLQAWLDRLGLAGKSAHEKTVPDCVFRLPREQLARFLNRLFSSDGWVTHLASGQGQIGYTTVSEALARQIQHLLLRFGVLAKLRHRSVRYQDGRRPAWQLDITHAESILTFAEQIGILGKEQRLASVAASVRGRRRQSHTDHIPCEIWQFIDRARGEWTWAELARRAGVASSNIHAYRRGMSRQRLAAFADALGSRELRQLASSDLYWDRIASIRPLGHKQVYDLTIPETHNFIANDVCVHNTTVAMNMVEHVAMQLKKPVAVFSMEMPADALAMRMLASLGRVHLQRVRSGKLQDDDWPRLTSTMSLLAEAPLFIDDSPGLTPTEIRARARRLQREHDELGLIVIDYLQLMQIPGFRENRAGELSEISRGLKALAKELNTPVIALSQLNRSLEQRPNKRPIMSDLRECVTGDTLVLLADGQRRPISELVGSAPEVIAIDDRHRLVPAQAERVWRVGRRPVYRVQLASGRLLRATARHRLLTGSGWKRVDELRDEDRIAIARTVPEPGSVMESESDVFWDHLVAVEPDGEEDVYDLTVPGPASWVADSIISHNSGAIEQDADLIAFIYRDEVYNEDTPDKGVAELIIAKQRQGPIGTVKLTFLGEYTRFENYIEDVYGGGIPG

SEQ ID NO: 441 - protein, 1175 aa, Haloarcula marismortui ATCC 43049
  Hma CDC21 precursor
MATAENTELIDRFEEFYRNYYRNEIGELAQKYPNDQKSLYIDWDDLYRFDPDLADDYRTKPEQIQEYAEEALRLYDLPVDVSLGQAHVRVRNLPESEDIRDLRHEHHGNLVAVRGIIRKATDVRPKVIEAAFECQRCGTLTRIPQTAGDFQEPHDCQGCERQGPFRLNTDQSQFIDAQKLRVQESPEGLRGGETPQSIDINIEDDITGHVTAGDHVRVTGILKLDQRGNDNEKSPMFDIYMEGVSVEIEDEQFEDMEITDADKTEIVELSSEPDIYDKMVGAIAPSIYGYEKEKLAMMLQLFSGVTKELPDGSRIRGDLHMLLIGDPGTGKCVHGDTRVTLADGHERPIREVVESNLDDPKPVDDGVWDTVDFDVPSLQSDGTVATQNATKVWKRKAPETLYRIRTATGRELDVTPSHPLFVQSDGRFQARKAEELESGTHVAVPRKVSTNACNELDVTFRQSQAHNRIDLDLPPQWTPELARLIGYIVAEGYVEQRPDNTGYVSITNNDREVLDDAKSVLETLNLNVTERSSHEGKTARELLCSAGEFVSFLASLDETLLQSSAERRVPQDIMRASDNVVTGFIRGYIEGEGHVSTSQREITVASMSKPLLEDVRTLLVTQGITAQLQPRNNGSYRLRISGQSFHDYAEQIGFITARKTEACRQFEGTHGNTNLDIVPNLGPELRRIREALGLTQSECGLPRSTYQHYERGRRNPSRDSLESVLDAFETRLAEMNNDTPISDTARSDGGGTGSLRQDLNGLAALVEGDIAWDRIESIEPIEHDEKWVYDLEIEGTHNYLTNGVVSHNSQMLSYIENIAPRSVYTSGKGSSSAGLTAAAVRDDFGDGQQWTLEAGALVLADQGIAAIDELDKMSPEDRSAMHEALEQQRISVSKAGINATLKSRCSLLGAANPKYGRFDQYEPIGEQIDLEPALISRFDLIFTVTDKPDEEKDRNLAEHIIQTNYAGELHTHRTENPTSNFSEEEVGTVTEEVAPTIEPDLLRKYVAYAKRNCFPTMTEEAKSRIEDFYVDLRLKGQDEDAPVPVTARKLEALVRLAEASARIRLSDTVDEADADRAVDIAHYCLKEIGVDPETGEFDADVVETGQSKTQRDRIQNIKGIISDIEDEYDEGAPADVVIERAEEVGIDESKAEHEIDKLKQKGEVYEPRTDHLRTT

SEQ ID NO: 442 - protein, 1395 aa, Haloarcula marismortui ATCC 43049
  Hma Pol-II precursor
MREADEQYFETLETQLEAAFDVAERAKERGGDPKPEVEIPTARDMADRVENILGIDGVAERVRELEGQMSREEAALELVEDFVEGTVGDYDSREGKVEGAVRTAVALLTEGVVAAPIEGIDRVELLENDDGTEFINVYYAGPIRSAGGTAQALSVLVADYARALLGIDQYKAREEEIGRYAEEIDLYDKDTGLQYSPKEKETKFIAEHMPIMLDGEATGDEEVSGYRDLERVDSNSPRGGMCLVLAEGIALKAPKIQRYTRNLDEVDWPWLQDLIDGTIGKDEADEGDSAEDANGDDAGEGADDDGGDEADEQAGPPRVEPADKYLRDLIAGRPVFSHPSKSGGFRLRYGRSRNHGFATAGVHPATMHLVDDFLATGTQIKTERPGKAAGVVPVDTIEGPTVRLANGDVRRIDDAEEALAVRNGVEKILDLGEYLVNYGEFVENNHPLAPASYTVEWWEQDLAAAGADVQAMQDSPHIDLADPSAEEAIEWATEYDAPLHPKYTYLWHDVSIEQVCALADAVEDAQVAQADGAYADPEMDGTAGDAHSDDGALVLPRSDAVQQTLEHLLIGHTQDEETITVTDWVPLVRTLGFSRSLERDWTREDLSEHARTYGESESLDAIGVAEDAEREDGQNAIKAINEVAPFQVRERAPTRIGNRMGRPEKSERRDLSPAVHTLSPIGEAGGAQRDVAKATKHADDMSDTPGQVEVEVARRRCPDCGTETHQANCAECSGTTEPVYVCPDCEAEVERDESGRAECGRCETLASPTQYKVLDLQEAYRDALQNVGERETAFEQLKAVKGLTSEEKVPEPMEKGILRAKHDVSAFKDGTVRYDMTDLPVTAVRASELDVSAERLRGLGYTEDIHGDPLTHEDQLVELKVQDIVLSDGAAEHMLQTARFVDDLLEQYYGLERFYEFDDREDLVGELVFGMAPHTSAATVGRVVGFTSAAVGYAHPYFHAAKRRNCFHPDTRLWYEDENDDWEYGTIEELVESRLDDPQEDDFGTLVQELDGDLTVSSLGENGPCRQPVDAVSKHPAPDHLVEVAVGDRTLRVTPDHTMLRAGPDGIEEVPASDLAAGDDLPAYDGGETTTMTARGEASTAATDGAAPTDTVEAVEYVESDVDHVYCLTVADTHRVAVEGTYVGQCDGDEDCVMLLMDGLLNFSKSYLPNQRGGQMDAPLVMSSRIDPSEIDDEAHNMDIMDAYPREFYEATREMKDPTEVEDVMKIAEETLGTDREYTEFRHTHDTANIAAGPDLSAYKTLGSMEDKMDAQLEISRKLRAVVESDVAERIIEYHFLPDLIGNLRAFSRQEVRCLDCGESFRRAPLTGDCRECGGRVNLTVHEGSVNKYIDTAIRVADEFGARDYTKQRLKILERKIESVFENDHNKQSGIADFM

SEQ ID NO: 443 - protein, 1388 aa, Haloarcula marismortui ATCC 43049
  Hma PolB precursor
MRGATLAVKLGYVTRWHILSACGNTPSTAGVFMRHLETRPRMSDGTQGTLGDFGQDADAGTDDRPVADEAAAIAGNGGSDDGDTSVVDLDERQFPPVEETVEFVVTQVDYTIEGQGDDESPVVHVFGRTDDNESVHARVFDFQPYFYAPTDSVTEDGLRQYDSIAGWEEADADGDPYESIRGERLTKIFGQTPRDVGQIRDDFDHYEADILFPNRLLIDKDITSGVRVPARELDDGSLKVHHEEITPVEAHADPRVNTFDIEVDDRQGFPEDGEEPIICLTSHDSYRDEYVVWLYESPDGIDGPEALAGYDPIREDFEADVRVFDEEEAMLEAFVDYIVDTDPDVLTGWNFDDFDAPYFLDRLEELQSYNHDFDLQIDRLSRVDEVWRSGWGGPDIKGRVVFDLLYAYKRTQFTELESYRLDAVGEQELGVGKERYTGDIGDLWEQDPEQLLEYNLRDVELCVELDREQDIIDFWDEVRTFVGCKLEDATTPGDAVDMYVLHKLHGEFALPSKGQQESEDYEGGAVFDPITGVRENVTVLDLKSLYPMCMVTTNASPETKVDPETYDGDTYRAPNGTHFRKEPDGVIREMVDELLSEREEKKAERNSFDPDNPEYERFDRQQAAVKVIMNCFTPDTDVLTPEGVQNIRDLDIGDEVYSLDPETEEMEVKPVVETQSYPDYRGDLVDIETSKMDFRVTPNHRMLVRKNETNGITEDGYSFVEAGDLDDATNYELPHDWDGPDGDPLDTVDLTEYVDDYEVWVRPSVHGHTFAAEIGHYPDTVLKNDIGEEGYVFGPKEFEANREYIESVAERTYIHAESGRKWIPRTFDGDDFLELLAWYITEGNVYTSETKQFGEKTRGASTTVKIAQQAIADGGESDHAAIGDLLDRLGFDYYVDDRSYQFTSALLGDLLCNICGEDSFEKRIPEFVFDLSHRQKRRFLDTLIAGDGDRQKNSWRYTTSSDQLRDDVLRLCAHLGLTANYNRDSGSWRIYVTEDNKNTLRMHRSGSRSTADDGVYCVTVADNHTLMAGRNGKFQFVGQSLYGVLGWDRFRLYDKEMGAAVTATGREVIDYTDEVVANEGYEVVYGDTDSVMLQLGNVGPDDVEGDVEITDEMREKHPEMDDDELELIATTIQKGFELEETINASYDEFAMERLNAQFHRFEIEFEKLYRRFFQAGKKKRYAGNIVWKEGKHVDDIDITGFEYQRSDIAPITKRVQKEVIDRIVRGEDAESIKQYVSDVIEDYQDGNVNYDDVGIPGGIGKKLDNYDTDTAQVRGAKYANMLLGTNFQSGSKPKRLYLDRVHSDFFQRIEEEEGLDPQRDPLYGEFRRDPDVICFEYADQIPEEFEIDWDKMLDKTLKGPIARILEAMDISWEEVKSGQEQTGLGSFM

SEQ ID NO: 444 - protein, 1364 aa, Haloarcula marismortui ATCC 43049
  Hma TopA precursor
MRLIITEKDNAARRIAEILSEGGASANRRNGVNVYRWGNTRVVGLSGHVVGVDFPEEYNDWRDVEPVELIDADVTKEPTQENIVTTLKQLAREADEATIATDYDREGELIGKEAYELIREETDAPVDRVRFSSITEREVRDAFANPDDIDFDLAAAGEARQIIDLVWGAALTRFLSLSARQLGDDFISVGRVQSPTLKLIVDREREIQAFDPEDYWEIFADLQKNGSGFEAQYFYDDDGKEAERVWVEDDADDAYADLTNVDAATVTSVRRRTRTDSPPTPFNTTAFISAASSLGYSAQQAMSIAEELYTTGYITYPRTDNTVYPDDLEEDALLDEFVGAGHFGEDAEALLEQDDITATEGDEETTDHPPIHPTGEIPPKADLSDDEWEIYELVVRRFFATVAEAATWEHLRVVADAGGRSLKANGKRLVEPGYHEVYPYSSASENHVPDVEEGEELAISEVRMEAKQTQPPRRYGQSRLIQTMEDKGLGTKCLTADSDVLVRSENGDIERQTVDSLFSDGQVVLADGDTDIAVSKETPTVLSLDEATERVSEQESTLVSERPLRDDESVRTIETSRGAVTVTDDHPMYIRQDGEVTVRPASDIEAGTDLVAARRPPDTMVEPSDETVLSWETFAADCDKHSKLYGVDCGTELAAQRAARDESQTAFAERYGSYGSAVGKYERGEKDVPVWLLGELDIRPDRIHGLNYETSFENPFPLEWSPELAQVIGCLLGDGSIHRNDDENVVDVRYHNTDEALIERFARDIERLFDIEPTVTDRPGRESHHKRKYQVDVPSAVGRVLVCVLEAVTENGTPGLPDAVRPAFVGALFDDEGHISREGKAFISNTDHTLLTGVGEMLAEMGIETKLAPDQHKLHIRGRRNLEQFLDRIPIASDEKFYRGLDALDAYDVTTRKAELLEAIRQEPKTSAALAQTLGVTRGSVNKYLRELRESGHIEKQIEGSNRSLDENRTVQYVAADFEGSVYATLRGEPSSVTVEDVERREYDGPVYDLTVSENAPNFAVNGGAVVHNSTRHNSIEKLYDRGYIEGDPPRPTTLAMAVVEAAEEFADHVVSDEMTAQLEADMTAIANGEATLDDVADESREMLKRVFDELRDSREEIGEHLQESLKADKTLGPCPKCGEDMLVRRSRQGSYFVGCDGFPECRNTLPLPSTGEPQVLEDHCEEHDMHHVKMLAGRDTFVHGCPRCEAEKADESEDEVIGPCPECGSEHDGDLAIKHLRSGSRLVGCTRYPDCDYSLPLPRNGDISVTEAFCEEHDLPELVIDADSDDPWELGCPICNYEEYQARTAIEDLEDLNGIGSATAEKLGDAGVDSLAALREADPDIVATEVQGVSATQVRDWQDELEA

SEQ ID NO: 445 - protein, 831 aa, Halobacterium salinarum NRC-1
  Hsa-NRC1 CDC21 precursor
MDPDLADDYISHPDQLQEAAEEALRVYDLPVDVSLGQAHVRVHGLAEHTDIRAIRAEHLNTMVSIQGMVRKATDVMPKIQRAVFVCQRCGTDTEVPQGDAGFQEPYQCESCERQGPFKLDPDRSEFVDSQKLRIQESPEGLGGGETPQSIDVHVEDDATGNVTPGDHVTVTGVLRLDQSEEATDSPVFEHYMEGSSVVIEDAEFDELNISEADKEEIVALSDHEEIHEEMVDSMAPAIYGHREAKLAMMLQLFSGVTKHLPDKSRIRGDLHMLLIGDPGTGKCVRGDTTVALADGSEREIRDLVEANLDDPRPVDDGVWDGVDVAVPSLAADGRLVQRRATKVWKREAPETMYRVRTAAGHRLTVTPSHPLFVAGSHGPDAVRTEDLEVGQLVGVAPDGDGSGQVAPDGGVIRDAQPAPVGDAETVAWSAIESITEVEPDEEWVYDLEVEGTHSYLTDGVVSHNSQMISYVQNIAPRSVYTSGKGSSAAGLTAAAVRDDFGDGQQWSLEAGALVLADNGVAAVDELDKMADDDRSAMHEALEQQKISVSKAGINATLKARCSLLGAANPKYGRFDQYEPIGEQIDLEPALISRFDLIFTVTDQPDPEEDAALADHILQTNYAGELNTQNEELANANYSEAEIESQTEDVAPAIEPGLLRKYIAYARRTCFPTMTPDARQAIEEFYVDLRSKGADEDAPVPVTARQLEAIVRLAEASARLRLSDSVEKSDADRVIGIVQSCLQDIGVDPETGEFDADVVETGQSKTQRDRVKNIKALIGEIEEEFDDGAPVEEVLDRAEEIGMDAGKAEHEIEKLKERGELYQPNTDHLRSI

SEQ ID NO: 446 - protein, 1370 aa, Halobacterium salinarum NRC-1
  Hsa-NRC1 Pol-II precursor
MRPTDETYFETLETGLDDAFEVAEAARERGEDPTPNVEIPVAKDMADRVENILGIDGVAERVRDLDGEMSREEAALELVADFVDGRVGDYDTDAGKIEGAVRTAVALLTEGVVAAPIEGIDRVEVNDNDDGTQYVAVYYAGPIRSAGGTAQALSVLVADYARAMLGIDAFKPRDDEIERYAEEVDLYDSETGLQYSPKDAETTFITEHCPVMLDGEATGNEEVDGFRDLERIDTNSPRGGMCLVLAEGIALKAPKIQRYTRNLDEVAWPWLQDLIDGTIGADDADEDTPDAGSDSDATDEGDAPSASTDAEEPPRAAPSDKFLRDLIAGRPVFGHPSKNGGFRLRYGRARNHGNATAGVHPATMHLLDDFLATGTQIKTERPGKAAGIVPVDSIEGPTVKLANGDVRHINDPADALDVRNGVAEILDVGEYLVNYGEFVENNHELAPASYAPEWWIQDLDAAGADVQALRDSPYVDLTAPTADQAMAWATDYDAPLHPAYTYLWHDIDVEQFRALADAVADAHTDASDDDDRGVLVLDHTTTVRETLEALLVTHHQGDDTIRVDDWLPLARSLGVTESLDREWETLSEAAAEWPNAVRAVNEVAPFSVQERAPTRIGNRMGRPEKSESRDLSPAVHTLFPIGDAGGSQRDVADAARYAPDMSDTPGEIPVRVGDRVCPSCDEHTYESRCPDCGDWTDPHYECRDCGAVATPDESGRVECPNCGRDLDNVTTQVIDINDEYHGALRAVGERENAFDQLKGVKGLLSAEKTPEPMAKGVLRAKHDVTAFKDGTVRYDMTDLPVTAVTPAELDVTAGQFRELGYNQDIHGDPLEHDDQLVELRVQDVVLSDGAADHMLKTADFVDDLLTQYYGLDAFYDLDDRDDLVGELVFGMAPHTSAAVVGRVAGFTSASVGYAHPYFHAAKRRNCFHPETNVWFRDESGEWHHDPIETLVEARLDPDTADEDDFGALVQALDGDVFVPSVTEDGEETLQRVEAVSKHPAPDHLLAVETKRGRELTVTPDHSMRRWTGDGIERVDARELTAGDALPAPTQVPGDGETATSELRSESLDGTHPQRRFGDGGSVRTDEVVSVEPVRSSVDHTYSLTVAETNTLVANGLFTGQCDGDEDCVMLLMDGLINFSKSYLPDKRGGRMDAPLVMSSRIDPAEIDDEAHNIDIDREYPREFYEATRELADPEDVADLITLAESTVGTDEEYTGFGHTHATSNIHLGPSLSAYKTLGSMMDKMDAQLELARKLRSVAETDVAERVIEYHFLPDLIGNLRAFSRQETRCLDCGEKYRRMPLSGDCRECGGRVNLTVHEGSVNKYMDTAMRVATEYDCREYTKQRLEIMDRRLESVFEDDTNKQSGISDFM

SEQ ID NO: 447 - protein, 1365 aa, Haloferax volcanii DS70
  Hvo PolB precursor
MTYIDKCLSVVPGAVRGNAGVFSRAAEAIAMTQTGLTDFGGNDTDGAGDARPDEEAAIVAGDAGQHVSDVVDTDEVRFPDPDGTVELAVTQVDYTIEGAGRDEYPVIHIFGRTADDETEHVRVLGFRPYFYAPTDSLDDGDLDKDVITGTEDGYESIRGEELTKIFGRTPRDQGQIRDEFDHYEADILFPNRLLIDKDIKGGVSVPERRLDDGTIQIPHQEVAPAEVDANLRVNTFDIEVNDRNGFPEEGEEPIICLTSHDSYRDEYVVWHAVADEGLGKRPDTLPNYDFLGEDGDVEVRTFDEEAAMLDAFLTYIEETDPDILTGWNFEDFDAPYFLDRLEEVDERTDLNLDYNRISRLGEVWRGGWGGPDIKGRVVFDLLYAYKRTQFTELESYRLDAVGELELDAGKERYSGDIGDLWEEDPERLLEYNLRDVELCVEIDRKQDIIAFWDEVRTFVGCKLEDAPTPGDTVDIYVLHKVHGEFALPSKGKQESEDYEGGAVFDPITGVKENVTVLDLKSLYPMCMVTINASPETKVDPERYDGEMFRAPNGTHFQQEPDGMIREMVDELLTEREEKKSLRNSHDPGSSEYEQFDRQQAAVKVIMNSLYGVLGWDRFRLYDKEMGAAVTATGRKVIEFTEQAANQIGYDVAYGDSVTGDRPVVVRDPGGTVRILPIEDLFARGTTESEVLIAADGDVVASATPGKTRRALDGWDALSVNEDGEAEWQPIAQAIRHNTDKPVVNLQHKFGESTTTRDHSYVVPGEDGLTTVSPDDVAEPYRVSGVPDVEPVEQVDVYEVLRGYEREYEDGRSVGSDNSITKRKQIHADDEYVWFGHEHHRDVDSTVKVKRFVDIDSEDGAALIRLLGAYVPEGSASTGETATSKFGASLAESDREWLAQLQRDYSRLFENTTAGIITSDRRAERTVEYQTDTGGASVTYNDETLKLQMMNELAAVFFREFAGQTSRGKRIPSFVFHLPEEKQDLFLTLLVEGDGSREFPRYTEAYAQRNFDFETTSRELAAGLSMLLTQRGQKHSLKYRDSKDSYTIRTCSTYREGRDPVLTEADHDGYVYDLSVEENENFVDGVGGIVLHNTDSVMLELGPDVSKQEAIEQSFDIEEHINAAYDDFARDELGADEHRFQIEFEKLYRRFFQAGKKKRYAGHIVWKEGKDVDDIDITGFEYKRSDIAQITKEVQKNVIDMIVHGEETEVINDYLHDIITDFESGNLPLEQAGIPGGIGKRLSAYETPTAHVRGAQYANAFLGTNFGRGSKPKRVYLKKVHPSWFREMETGEFDPQVDDLYREFKRDPDVICFEYADQIPAAFEVDWDTMLTKTLEGPISRVIEALGMSWDEVKSGQEQTGLGSFM

SEQ ID NO: 448 - protein, 852 aa, Haloquadratum walsbyi DSM 16790
  Hwa GyrB precursor
MSHETEYGAGDIQVLEGLEAVRKRPAMYIGSTDSRGLHHLVYEVVDNAIDEALAGHCDQIDVTLHEDGSVSVADNGRGIPVDTHEQHDIPAVEVIMTVLHAGGKFDNKSYQVSGGLHGVGVSVVNALSRWLEVEIKRDGALWRDRFEYGEPQPGAFERVRDLDPDEETGTTIRFWPSDDIFETTEFEFSTLENRLRELAFLNSGVEICINGETDDINSKFCFNGGIREFVKYLDETKTVLHDSVVHYQNEQDGIEVEVALQATEELQGSIHAFANNINTREGGTHLTGFKTALTRVINDYGREHNLLDGFDSLQGEDVREGLTAVVSIKHPDPQFEGQTKTKLGNSDVRGIVESTTHERLGTYLEENPDVAKVIVRKAVEAAKARKAAKQAEELTRRKSALESTSLPGKLADCQSRDPAESELFIVEGDSAGGCFSGDTEIALASGDSITFESLVDAYERGETHYCYTIGDDGRIRIEEIMNPRVTQEDAALLAVTLDNGEVIRCTPDHEFMLRDGNYCEAQNLTDGQSLMPLYRTTTEMTETTETTETTGTAEMVKQPFAQNNWESVSQLANRYNRRHTTTDHIVETQQIQSQQQSQIETVQISERADVHNHTVISVESLTETADVYDLEVPVTHNFALASGVFVHNSAKQGRERRFQAILPLKGKILNVEKHRLDRILENDEVRALITAIGAGIGDEFNVEDARYNRLIILSDADVDGAHIRTLLLTLLYRHMRPLVEAGYVYAAKPPLYRIRYNGNTYDAMTKSERDQVISDVCNGNPTQVQRFKGLGEMNPEQLWETTMNPENRVLKQITIEDAAAADKMFSVLMGDAVEPRKEFIKDRATDAEWVDI

SEQ ID NO: 449 - protein, 2216 aa, Haloquadratum walsbyi DSM 16790
  Hwa MCM-2 precursor
MAQAPQDPQDLTDRFIQFYRKYYRDDIGTLAQQFPHEKRSLYIDYHDLYAFDVELAEDYRREPDQLREYAEEALRLYDLPADVKLGRAHVRMRSLPDTVDIRNIRVHDDHIGHLIAVQGIVRKATDVRPKITEAAFECQRCGTMTYIPQSDSGFQEPHECQGCERQGPFDVDFDQSEFIDAQKVRVQESPEGLRGGETPQSIDVDLEDDATGAVTAGDHVTTTGVLHIEQQTSGNEKTPIFDIYMDGRSVEIEDEEFDDMDITDEDVAEIVELSNDPDIYEKMVESVAPSIYGYDEEKLAMILQLFSGVTKHLPDGSRIRGDLHMLLIGDPGTGKCVSGETDIALVEGKTATIGELVESALTDPKPVDDGVWDTADFTVTSAIETGELIERDVTRVWKRQSPETMRQIQIAGGRSVTVTPSHPVFVEHNGSYTARRADSLSAGESVAIADDVADSHPISVDNTANTLNPRSMSTPGITTDGGLYRTGSDGGIVHAEVGKEDVTDCLTTDRITAVKTVTPTAEWVYDLEVEGTHAYLTNGVLSHNSAMLQYIRNIAPRSVYTSGKGSSSAGLCVTGETRIHTTDGFVPLKQLATQHHPKKVTTETAAAYERELYTVDPTTQSAEVTQSKSSHVWRMPEKHCRRIRTASGKQLEASVNTPVLTVDDAEIKWKPISAIESNDSVVIPQYNNVERSSVSITDIFEFTQEQLKLTEKSITILRTEIVSQYQNIAAAADALNIDVNSVEALITGQPVVSDVIDRVCDAISVSSEDITIHHVIGPTGTAIELPEVLNDDLLYLLGAAFACGNIMTGETCEERWIQFHAPEESIRSHIIDAAVATFGSESIQTDTEQANTVQVISATVTRLFETLGLEQITDAAPREIHPRLTAVSGADAFIRGLFDTGGRIDNKNTPQIAIGTASEPLAEQIQLLLETYGIGSCRDTGDQSHTGTSTTQGQYLTLTGSDAQAYRTTIGTRTDSGSSWDRQVSSSHADSEPSVRSTTTDTRKRTDMHEHEIISAGDVSTVSSVESDGGTPQMPRSNIEPQSIGYDYESSRVNEIQTETVVEAVNTGKKEVFDLTVPNTQNFIGGGIVTHNTAAAVRDDFGDGQQWTLEAGALVLADKGIAAVDELDKMRCVTGETLVSLADGRHVPIASLATDASKTGTIESKPDGVGRTIRGIDDLTVWTMTENKQLTGRPVTAIHQYDSPDTLWQITLSDGSEVTTTADHPFIIINRDGVHECPAKHLSENDEVYTPADGYTASTSDITPDSETSSDSLPDGGITQTRTNQYSSHRCDADLSDDELLDITTKTIKSIETVHPSDGTDVYDLTVSGTHNFVANGMIVHNSEDRSAMHEALEQQSYHPRSEVLLADGQRIDIGTFVDSRIEKNNANVIDGINCEILPVDDIDVYTVDTDTGSASTVSIDRVSRHPAPSEFIRVKFSNGRSVLVTPEHPMFIDDGSETKTVQANALSGGEFVPAPHHLPGVNTDASSVSDDINDVSTIRTHVRSRARAKAEVEVRATDGEFKLIDAAQTLGIITAVGKVSVDAPERGIIVDMDRTVDSSKDSINNVLGSVIPSNDNDSITRVQDTGSTGNQWRWSVNTFIERMIEIAPAVTADRPNRRVPDAVLGGSEAVVQQFLTGVIIAAGRILDETIRIYASSNELACDYADAFLRLGITASVEDGPAEIAAQTVIKCDSDYERACGMFDISSSRTTPSDTSSQNNQSSVTAQNEDTHQTTSHEILPSGIADELQSIRQLLNIPASEQLASITAGDDGIALSIARAEINLLRDHIETLRMDTENVSIGRDDCVTPTISSSSKYKYAKNSITSDENLQLFGQSQAQLSERTKTTESSSISASTDLVSIPANISENRLVAATQRLDEVETRCNRRYHRVIAVDTVSNAGPHACEWVYDITVEPTNTFISSGVVLHNSISVSKAGINATLKSRCSLLGAANPKYGRFDQYEPIGEQIDLEPALISRFDLIFTVTDEPDPDADAKLADHIINTNYAGELHTQKANIPNSEFTDGEVESATAEVTPTIDAELLRKYVAYARRNCYPTMTDDAQDVIRKFYVDFRAKGADDDAPVPVTARKLEALVRLSEASARLRLSDTVEQEDAKRVTSIVESCLRDIGMDPETGEFDADIVETGTSKNQRDRIKNLKHLIENIEADYDDGAPVDEVIEQAISELGLSESKAEGEIENLRAKGEVYEPRTGSLRTT

SEQ ID NO: 450 - protein, 2216 aa, Haloquadratum walsbyi DSM 16790; identical to SEQ ID NO: 449
  Hwa MCM-3 precursor

SEQ ID NO: 451 - protein, 2216 aa, Haloquadratum walsbyi DSM 16790; identical to SEQ ID NO: 449
  Hwa MCM-4 precursor

SEQ ID NO: 452 - protein, 2216 aa, Haloquadratum walsbyi DSM 16790; identical to SEQ ID NO: 449
  Hwa MCM-1 precursor

SEQ ID NO: 453 - protein, 2289 aa, Haloquadratum walsbyi DSM 16790
  Hwa Pol-II-1 precursor
MRDADKQYFETLESHLEQAFARARQAKGQGYDPKPEVEIPVARDMADRVENILAIPDVAERIRELDDERSREEVALELVTDFVEGTVGDYDTREGKIEGAVRTAVALLTEGVVAAPIEGIDRVEILSDDDGSEFVNVYYAGPIRSAGGTAQALSVLVADYARSLLDIDEYSARTDETERYAEEVSLYDRETGLQYSPKDKETKFITKHMPIMLDGEATGNEEVSGYRDLERVDTNAARGGMCLVLAEGIALKAPKIQRYTRQLAEVEWPWLQDLIDDTIGSDEHSNNSVKNGEADIVKTDKDTNESETEDGIDNDDYNDSGLEPANSPRADATNKYLRDLIAGRPVFGHPSAAGAFRLRYGRARNHGFATAGVHPATMHIVDDFIATGTQLKTERPGKAGGVVPVDSIKGPTVRLANGDVRCINDPEEAEKLQNGVEKILDLGEYLVNFGEFIENNHPLAPAAYVFEWWIQEFEASNADVQALRDDPTVDLESPTFENAMRWAKKHDIPLHPAYTYLWHDISVTEFDHLADAVAAGEITMNEVSDTNSASGNTSLRANTNTDDTLTIDTTPAIRETMERLLIEHHQDSDSIHIPAWRALALSLGIKIESDNDTGIGDRMWSLTDLSKHARKQDDGKSAIAAVNEVAPFQVRERAPTRIGSRMGRPEKSEDRDLSPAVHTLFPIGEAGGNQRNLSDAAQSFGDNTERGQISVQLGKRRCPYCETVGFELQCAECGRHTEPQFVCRECESVLSPDESGRVHCDRCERDVTSAEWQDIDLHQRYRDALDRVDERESSFEILKGVKGLTSSNKTPEPLEKGILRAKHGVSSFKDGTVRYDMTDLPVTAVRPKELDVTAAHFRELGYQTDINGNPLQFDDQLVELKVQDIVLPDGAAEHMMKTADFVDDLLEQFYELNQFYQIDERDDLIGELVFGMAPHTSAAVVGRIVGFTSAAVGYAHPYFHAAKRRNCFHPETKIWFRDTDNEWHHETIQTFVEDRLDDPEIDAVGTLVQEVDDNTDREISVPSIDDNGNERLQSVTAVSKHRAPNHLVQIETISGREITITPDHEMHIFEQGNLVSKQASKITSGEYAVIPKRLQTISPSSHTPQHDLLREFLTRDELTADRLIIHTSDPVRLCNRVFPEEVTSCKDAVEIMQNTACHLDKNKETLIGWLGEGRIPVALLRGFVETDEALLMSIPDDVQIGLRGEKVRIDRHIGFTEELTSLLGYYAAAGIVHTQTNPISYESAQQEQSRITFYNIDTQTQTDLLNALNSVFEIEPIQYNLDGEILGVPGELIRRVFDTVFDVGTQPSHKRIPQALFDASESHITSYLRCFFSTHDSLTTDTRDISATTVSREFKEDIIAALRRLGITAEVTTQQSRSVPEVLPDWYAIDDITHHDADNSLNLTRSYVISIASSDAVTLQRDRQAQEQIKYDAQGLIANNNAIHQSRQVTDGGRKDYITEPITDIEYVDADIDYTYCLTVSETHSLIVNDLSQKQCDGDEDCVMLLMDGLLNFSREYLPDKRGGSVAADSRLVAVSPDDKIVFTTIEDFWKKLNTPIERNGKFRKRTCVSEGWQTYAFDENHEASLRPIEKAIRYTADESEQLRRITTQLGRSLDITDEHSLFRYDDGIEEVAGDDLTAGDIIVAPRTLDVEVTQTTLDLSEYIHDNERCPSEQTGSGELNLASKSAISDSRNKETPGVTHNILPQRSKFTDEMTTLSPTAVGGLESEQNETLRVGESTGAIERYINVDDSFGWLLGQFIAQRSISTDALTMTVHTAAEKHAERIVATSDSVFGIKPTVNSIERGYEIVFPSVFDTIVSGLTAKEQSEPEQDVDHTHTDEIGIPECILHAPDDIVLSFLQGFILAENAQRKGNAASEASEMVSESETTVTLETPSVGVKDGLVFLCHRLGVITDISEKSGEEYSVHFEESRYTVSIATEGKTNPLDQILNGERPTMPEGVSVPVPDALLTIHESIANSPHIDQVIPDTVVQQETVSLETLQSLLTGLSTVDLPAQLEAKRDELTLLTEGDLSYLRVESVECVDYDGYLYDLQVGGEPVFTANWLYAHNSMDAPLVMSSRIDPSEIDDEAHNMDIVRQYPREFYEATRRMEDPDEWEEEVTIAEEYLDTDNEYTGFNHTHDTTDIAAGPDLSAYKTLDSMMDKMDAQLELARKLRAVDETDVAERVIEYHFLPDLIGNLRAFSRQQTRCLDCGESYRRMPLTGECRECGGRVNLTVHEGSVNKYMDTAIHIAEEFDCREYTKQRLEVLERSLESIFEDDTNKQSGIADFM

SEQ ID NO: 454 - protein, 2289 aa, Haloquadratum walsbyi DSM 16790; identical to SEQ ID NO: 453
  Hwa Pol-II-2 precursor

SEQ ID NO: 455 - protein, 2142 aa, Haloquadratum walsbyi DSM 16790
  Hwa PolB-1 precursor
MPKFLANSAKTVDMKQAGLSDNWSDAADSGAGTSNARPDAEALAVAGKDTQHVSAIVDADEVRFPDADGSVELLVTQVNYSVERAGHEEYPVVHIFGRTADDTAHHVRVLGFEPYFYAPTESLNDDLLDNDAITRTESGYESIRGEELTKICTRTPRDVGQIRDDFDHYEADILFPNRLLIDKDIKSGIRVPARRLADKPQTIQIPHTEIEPVDVEANLRVNTFDIEVDDRSGFPEDGEEPIVCLTSHDSERDEYITWLYNAPNAAEDTDPPDSLDRDDSIRSDTTADVRTFNREDAMLDAFVSYIEQTDPDILTGWNCLPSDARIQMADGTETEIHAVEIGDNVIGTTDQRSVTATVTNKWKSEREIYEFSLADGTSLRSSGDHRIMISDSNTVDWKSGSDIEQGEYVLKPRQLPVDDPTIPIINNLLSSESANIIDTLEVDALDSTGRSMNIHSSNPRESIAHTATLSMADGGDQKQRNETTNNTLDLNRTVTKQDLYAIGRVLHNRITPRQDGITPVSQATLIDNSVLSSPSPANTQHQSDSILTEVISSLRGLVSPGAHAIDFSAIYEMPKSHIAQFLAGTLDGSETGETTSSNLTVTTESASIARWYAQLYRRLGIYAQYQADAVHIANNACDLQRLSDAILPRLRCSDTIDYVKTQIDTVCDSSLKHSRASSTGLSGDEANIRQFSDDGPQNKSYAAQPDSSDYDDDWNAYVFVEIEAITLNGTETTYDIETTTHNFVADDCLVHNCDDFDVPYFLDRMEVINPQSEYTLTSERFSRIDEVWRSGWGGPNIKGRVVFDLLYAYKRTQFTELESYRLDAVGELELDVGKERYPGDIGDLWEQDPQQLLEYNLRDVELCVEIDRKQDIIAFWDEVRSFVGCKLEDATTPGDTVDIYILHEAHDRFALPSKGRTDAEDYEGGAVFDPATGVKEMVGVLDLKSLYPMAMTTINASPETKVDPKNYDGDTFRAPNGTHFRRSPDGIIREMIDDLLAEREEKKSLRNEYDPGESVYEQYDRQQTAVKVIMNCFTPDTNVLTPNGVRNIRDLTVGDSVYSLNPETMQMEIKPVTQTHEYPDYQGDLIDIQTNEIDFRVTPNHRMLVEATGTDTTSTNDYDFIEAGNLDISSRYELPHGWSVDHTDSLGAYIDLITLLREQSDTYNVLSDGGMTTAATADINHNNVTRRVDSDTFVSLIGWYVATGRVSRTQNGSDRVYLQLSQTNTKARTQLTMLLDELGVDWQADNEKIHFVSHVWTELFDTTCGRTEKNKHIPELIFDASASQKRAFFDAIINGSGVKNDDSYQYHTSSEDLRDDILRLCVHIGIVARYDYINDESWRIECTETANPDFTLTHSGRQSTAEDGVYCVTVADNQTLLAGRNGTFQWTGNSLYGVLGWDRFRLYDKEMGAAVTATGRDVIEHTADAASDLDKSVIYGDSVTGDRPVVVRDPSDYIQIVPIKLLFEQATAPEQNMRLTADGAPSVNSELPKERRHLDQWEALSLSDTGETEWQPINQIIRHQTDKEILTLQHEYGESTTTRDHSYITADDGEYVETSPENVDEPLPIPNIASVKTIETIDIYQTLTTDTQAQIGNDTEPDKWLPSADCIHANDEYVWIGTTDKQQDRDDSTPAIPRYIDLTSDTGHALIRFLAVYLSDWSKSTITTTERGQCLHITGPQESALKTCAADADQLFTHITPSIAVDAESNTNTVDSGFRCHIPTTLATTLISAFAGHPAHTKQIPSIVYHLPAAEQSLFIRHLIQAESTPESDGVSGRPQKSDKPILLENEFITTNRELAAGVSMLLTQCGQSYTISKQDTKGAYTIHINNSSSSGCTPTLTETTHSGYVYDLSVATNQNFVDGLGGLVLHNTDSVMLELGDDITEQEAIEQSFEVEEYINDSYDEFAREELDAVRHRFEIEFEKLYRRFFQAGKKKRYAGHIVWKEGKDVDDIDITGFEYKRSDIAPITKEVQRRVIEMIVHGEGTDSISEYLTDIINDFESGNVPLEDIGIPGGIGKRLESYDTATAQVRGAKYANEFLGTNFGRGSKPKRVYLRKVHPSWFREMETDSKFDPQRHGLYREFKRDPDVICFEYEDQIPDAFAVDWDLMLEKTLKGPIERIIEALGMSWNEIKSGQEQTGLGNFI

SEQ ID NO: 456 - protein, 2142 aa, Haloquadratum walsbyi DSM 16790; identical to SEQ ID NO: 455
  Hwa PolB-3 precursor

SEQ ID NO: 457 - protein, 1909 aa, Haloquadratum walsbyi DSM 16790
  Hwa RIR1-1 precursor
MDTHDVDADELELPIKRTTGETIEQRLTDNAYHNILPARYLRKDAKGDLAESQEEIFERVAQNVALAEAVFEADKQDTEITVTPDQLKPDHPRRDELAEEVFGAGADAADTVTTTLSVYNVNKFAYETIVPELPDEVQHHVKSVADEFEDLMSRLSFMPNSPTLMNAGDELQQLSACFVDSPSDDISDIHQTAKEAAEVFQCLTADSTVMLKEKGMVSVSEVETGDQIAQRSDTGFQYKPVEETHAYENAETLTVTLTNGCSIRGTPNHRLMVDDEWTRIDEIQPDQEVHYTLGWLRETNQSPPKLHSQSHTTVNQTADSISPDSSEPIELSESENADTGNRHNSAVAVKQSRTQTQLISDEVVSRPEHTRRPDQLSEELAELLGLWIDTGLWHQSGVQFNVERENIAEYIDQLSQQLFDTPAAISDTDGTYTVDITDHKLKEWWKANFGGKPDGTQSSYVPQMIKEAPTNVIEAFLRGCFTAEGGLRKDMRPRLCTSSEDSIDDIAVLMMGLGYPVEKSVIRNADGEPYYSVMPATDDGLSAFLHDVGFIDERREIGLSNIESSDSRALNNTHKIEVESIVESPPATVYDITVADNHEYVTDGIISHNSGGGMGYAFWKLRPYGDSVGSTGGIASGPITFMRTYDQMCETIAQGGARRGAQMGVMRISHPDVIQFIHAKNKDVSLAHSLRLNDPDDFTHTSFADALEEARELIDEEGRVPEHLRNAVEGHLSNFNISVGVTDEFMEALFADEEFTFTNPRTEDPHIATPETKELYELHDLGEHVEVGEELSVPAEELWDHIVSGAHENGEPGVIYLERVNKEHSFDVEKHSEHEILATNPCGEQPLEEYEACNLGHINLSTLADKDAPDWRVWYDNNGDAYNNLDDAAEAFIYEAIDMNAFNRRIESGTRFLENVVTMSDFPVDEIEATVRDMRKIGLGIMGLAQLYIQIGVRYGSQEANAIAEQLMTHINHESKWASHELAKERGTFNDWTESKYANPTEYREWFEHHTGLDASEWEDGFLIRNHNTTTIAPTGCVEENSLVSTDEGLRPIKDLDNTTAEFEQWDEIDVGVTTDGGTKTATAVYDNGFANVRQIQTESGFNIAATPNHRFRTLSSDGTYTWKEAGKFESGDRVILQRNTFDAGSRVSLEANERADDAQDTTEGPELPGRMTSELAEFLGYFMGSGYISDETHASVDLVVDSDATELNSYLSNLGEQLFRITPAVESQEMSQVLSFRDCHLSRYFEDNGWKKTDTGHNGDASAAFVPEQILEGDEQVVNGFLRGVFEAIGTVSEKIEILTTSTTLADQLQSLLLSLGHVFTRDSTKLVETNNYHDDQLRQRLCGATRREDERFMNEIGSLIEPDELNLSTRADKNDTYPSSVIDHVQTLDGYDSVSESLKSRINQSQVDGTVSRKLIKDIEAETAETVSIADHELTGFYAATVESVTEDTAYTKDISVPSNNTYIADGFVTHNTTSMIGNTTGGCEPIYNVAYYKNVSDDVQGDEMLVEFDDYFLRVLEQNDIDVEAVKQEAQEQMANNDFDGVDGLDTVPKAIGELFVVTSDLSGKDHAGVQCACQEGIDSAISKTCNFPSSATKEDMDEVYRYIYQNGGKGVTVYRDGTRSKQVLTTRAQNTEFADESEAAETLVEQIEDVFGDVDSFLDNDTVRATVDDEIDRVLAAADGNVELGKKRPRPDVLHGVTQRIDTGYGKLYVNINEDDAGRPFELFANIGNSGGFTASFTEALAKTVSTALRSGVDPREIASELQGIRSPKVAWDKGEQINSIPDAVGTAMRRYLDGEIEKGYPQQQNLTEVGTDTGSEPRVESGSGSDAKAPGHETDGGAAVTDDTVSTNRNNGSLPSANDENNDTDDVDSLVAAGESPECPECGSMSLYYSEGCKTCESCGWSEC

SEQ ID NO: 458 - protein, 1909 aa, Haloquadratum walsbyi DSM 16790; identical to SEQ ID NO: 457
  Hwa RIR1-2 precursor

SEQ ID NO: 459 - protein, 637 aa, Haloquadratum walsbyi DSM 16790
  Hwa rPol A'' precursor
MTETITDASEYEHITDDIAAIVDDYNLPESLQHRIYETIEERGEVPIEKVDDIAQAIASRYEDSRVDAHDPVGTVSAQSIGEPGTQMSIEADESIVIRRDGETELTEIGSFVDTILAADNQETRITDGHEIALAPNGLEVPSLDTDEQIRWKHIEAVSRHASPDEILLIELESGRSIRATKAHSFVTRRDGDVLPVAGETLVVGDVLPTVGSYDHASGSISVPLQSQSVAADGGTVEPNTNITANAERDSASITSAGIIGSATWERISSIETVAPEYEYVYDLSVSGLETFTTGEGVVTHNTMNTFHYAGVAEIDVTQGLPRLIELVDARKTPDTPTMTVYLEEEYANERPRAHEVVWQMEATKILALGDISTNVADMLVQVDLNAETLNERWPTIGDSDLIAEEVQDIIENNLGVSTRREKMLIEFGPSEPSYRRLLQLVEELRDIVFKGLEDISRVVIRKEDNERTNGEEFVLYTEGSALGDVLPIEGVDASRTTSNNIHEVHRNLGIEAARESIINETMETLREQGLDDVNVRHLMLVADIMTNRGEIESIGRHGISGSKDSVLARAAFEVTVNHLLDAAVHGEEDDLEGVIENVIVGKPVAIGTGDVDLRMGSIDADSGRSANSGGSPELSDD

SEQ ID NO: 460 - protein, 1304 aa, Haloquadratum walsbyi DSM 16790
  Hwa Top6B precursor
MTSFQSTLGEEGEIADELAESQRAISIAEFFEKNKHMLGFDSGARGLVTAVKEAVDNALDATEEAGIKPDISIEIRESGDYYTLIVEDNGPGITREQVPKVFGKLLYGSRFHAREQSLTPTQTLLIRRDGDVTFTSIGDFCDSYLPADGPASAPIPVDANIEVPSFDRATHEMTWQPVTNAIRHRTDERVYRISTACGRTLEITGNHSLFSLSSDNETIEVNAGELSPGDSILAPKQLPMASESVDTSTTVDEKTQSSTGAQTQRINILEHIKPDDLKESAATFRIHEADQASLSSGGNHKSPSASLASSQLASSEVIASAGGQQIQSSADQRQSKGHTPGGDHHNNECLLIKSVCENDKMSTVADYTLEIVTPDGESSRLPVSVSIDNVFITSLVRYIATASTSDISPVSDSSVDYTTEERHNTVDRSFSDTMRPLDSVIPLICEDDGEIELPSFVFESDPKRQQQLLTQLYRYPEASNGRNAGDDTVTYTTTSATLARQLTTLWNMNGVVATTNTQTETSQSDEIENESAQTTIYEVSVDRAEIETDIAGSDSDCQQGDGDLCLVSVSSVEEIDAPPYVYDISVPGASGHDENFVTANDGAICVKNSRGQQGIGISAAVLYSQLTSGKPARITTRTQSSDTAQYFELIIDTDTNEPEVSADQERDPGAASLSPTHGTRIELEMEANMRARGQLRDYVKDTAVVNPHARITLDEPGLEEPRQYERVDGAELPAQTEEIRPHPHGVELGTLLKMLEATESYSVSGFLREEFTRVGSKTATKILDQFRDRHFGRALPMSAPETIPDNADGTDDEQVTSSLESIIEAAVVNKGASATTTFASRVAETVNQRSGTTQGELVGIVDTVAEDIEDEFETTFGTTVRENAVEAAWDVLTTDIDEDIYPLVADATSTQKDHETVRGVTDRIATKFADGSEPLRATRDAVREYVDRSADMIVSEEVSFGETARENVVDAVWTAMQTVDDELPAVKAVADDRNIASDLLEAMRLTDILAPPTDCLSPITADLVEAGLRKEFDADFYAAATRDAEVHGGDPFIVEAGIAYGGELEGGKISLLRFANRVPLVYQRGACATTDVIKSIGWRNYGLDQPGGSGMPNGPAVVMIHVASTNVPFTSESKDALANIPAIEDEIELAVREASRELKSYLNKRRSMQKRREKQDVLGRILPEMANKLADVTENDRPDIDNALARIMNNVSVERNVDNGSVTLTVQNYSDRQESPTLTDIVDSKPDTIPDEIEIVELEDEYFLTWEPVVDAGESATVTYEVPTGASFELDVDDVETEKLTIDA

SEQ ID NO: 461 - protein, 959 aa, Invertebrate iridescent virus 6; identical to SEQ ID NO: 414
  IIV6 RIR1 precursor

SEQ ID NO: 462 - protein, 593 aa, Kazachstania exigua, formerly Saccharomyces exiguus, strain CBS379
  Kex-CBS379 VMA precursor
ISQSLSKYSNSDAIIYVGCFAKGTQVMMADGTDKSIEDIQLGENVMGKDGTPRTVISLPRGKETMYEVCHSSIKGTTNETLMNYVCSGNHKIVMQTPQQIGITEHAIDGKTYTSVSYFALRDSQDGYPIVKKLTKSFEHQQNGGKEQTLITVNNFVASLKSEPINWDVEAKHYESLGHYVKKCSYQLINPVFHQSGKLAQEIASLNYSKDKAPLLAWLIGFWVGNGAMRHSQFVIDSQDIELVNRIQEIATLLNLSATTACYYSGSVDDQDKLAKLNTATGEGFEDDLQSNPTAKELADMDILSESKTATLPTAFGVEKIDELIISLGEGRGNGNVFAQVIGSFGIDLADKDTLVSKIAHELAGDAFEVREQFVAGLVDATGYVRKDVYDHASEATVSIESKSTVLGLVKIARSLGIKIVVTSNDYQDPEDHDHGHDHGSCGHDEVATGYTAVMTGDALTNSMRFCAIGRNRVTAKQFMRQAIPFYFSLEKKSEDDYYGITVPDNTDKQYLLSSMALVHNCGERGNEMAEVLMEFPELFTEINGRKEPIMKRTTLVANTSNMPVAAREASIYTGITLAEYFRDQGKNVSMIAD

SEQ ID NO: 463 - protein, 978 aa, Kluyveromyces lactis IFO1267
  Kla-IFO1267 VMA precursor
ARKELKRVTLEDHEESEYGAIYSVSGPVVIAENMIGCAMYELVKVGHDNLVGEVIRIDGEKATIQVYEETTGVTVGDPVLRTGKPLSVELGPGLMETIYDGIQRPLKAIKDISQSIYIPRGIDAPALSRTIKWQFTPGKFKVGDHISGGDIFGSIFENSLLDDHKILLPPRARGTVTWIASAGEYTVDEKILELEFDGVKYDYSMYHTWPVRVPRPVTEKLSADYPLLTGQRVLDSLFPCVQGGTTCIPGAFGCGKTVISQSLSKYSNSDAIIYVGCFSKGTEVMMGDGKDELIENIQVGDEVMGRDGLPRQVVGLPRGHDDMYQVTEKSEDNETAKISFQCNSSHKLVLVTPQDIRLTESKEKVTVAFNRLADISVGNGTESRTVRLVERAEKSFANAESNQAIINAAEFVTTIDTTSIEWTLEARDMLLVDSSIREVTQQLINPVLLEKEHLAGVLKSNDFQSSLAPQFSYLLGAFVGSSGKDNSEYLQQLSAQFDKKIVAEKSIDVQSNGKTVGTASIVISQEPVQENKRRKVAQVSLVSKIVQESFSSGIPSFMMSENINVRESFLAGIVDSQNQKLDDTVALKTLSVKTHDGIARLARSLGIRVSGKKQNQEYTLTLSGDALKSVSNWTSTSNIEKVDVIHKAQPISFDLEKIESADYFGVTLAEESDHKFLLSNMTLVHNCGERGNEMAEVLMEFPELFTEISGRKEPIMKRTTLVANTSNMPVAAREASIYTGITLAEYFRDQGKNVSMIADSSSRWAEALREISGRLGEMPADQGFPAYLGAKLASFYERAGKAVALGSPDRIGSVSIVAAVSPAGGDFSDPVTTSTLGITQVFWGLDKKLAQRKHFPSINTSVSYSKYTNVLNKYYEKNYPEFPVLRDRMKEILSNAEELEQVVQLVGKSALSDGDKITLDIASLIKEDFLQQNGYSTYDAFCPIWKTYDMMKSFISYHDEAQKSVSNGANWAKLSEAT

SEQ ID NO: 464 - protein, 1027 aa, Kluyveromyces lactis NRRL Y-1140
  Kla-NRRLY1140 VMA precursor
MAGALENARKELKRVTLEDHEESEYGAIYSVSGPVVIAENMIGCAMYELVKVGHDNLVGEVIRIDGEKATIQVYEETTGVTVGDPVLRTGKPLSVELGPGLMETIYDGIQRPLKAIKDISQSIYIPRGIDAPALSRTIKWQFTPGKFKVGDHISGGDIFGSIFENSLLDDHKILLPPRARGTVTWIASAGEYTVDEKILELEFDGVKYDYSMYHTWPVRVPRPVTEKLSADYPLLTGQRVLDSLFPCVQGGTTCIPGAFGCGKTVISQSLSKYSNSDAIIYVGCFSKGTEVMMGDGKDELIENIQVGDEVMGRDGLPRQVVGLPRGHDDMYQVTEKSEDNETAKISFQCNSSHKLVLVTPQDIRLTESKEKVTVAFNRLADISVGNGTESRTVRLVERAEKSFANAESNQAIINAAEFVTTIDTTSIEWTLEARDMLLVDSSIREVTQQLINPVLLEKEHLAGVLKSNDFQSSLAPQFSYLLGAFVGSSGKDNSEYLQQLSAQFDKKIVAEKSIDVQSNGKTVGTASIVISQEPVQENKRRKVAQVSLVSKIVQESFSSGIPSFMMSENINVRESFLAGIVDSQNQKLDDTVALKTLSVKTHDGIARLARSLGIRVSGKKQNQEYTLTLSGDALKSVSNWTSTSNIEKVDVIHKAQPISFDLEKIESADYFGVTLAEESDHKFLLSNMTLVHNCGERGNEMAEVLMEFPELFTEISGRKEPIMKRTTLVANTSNMPVAAREASIYTGITLAEYFRDQGKNVSMIADSSSRWAEALREISGRLGEMPADQGFPAYLGAKLASFYERAGKAVALGSPDRIGSVSIVAAVSPAGGDFSDPVTTSTLGITQVFWGLDKKLAQRKHFPSINTSVSYSKYTNVLNKYYEKNYPEFPVLRDRMKEILSNAEELEQVVQLVGKSALSDGDKITLDIASLIKEDFLQQNGYSTYDAFCPIWKTYDMMKSFISYHDEAQKSVSNGANWAKLSEATRDVKHAVSSSKFFEPSRGEEEVHAEFEKLLTNIQDRFAESTD

SEQ ID NO: 465 - protein, 903 aa, Kineococcus radiotolerans SRS30216
  Kra DnaB precursor
MTAYDEPPADFDAPDDGPSRGRRGGRKDRGADGGGASFDRMPPQDIAAEQGVLGGMMLSKDAIADVVEVLKGNDFYRPAHELVYEAILDLYSRGEPADPVTVSAELTNKGELTRIGGTPYLHDLISTVPTAANAAFYARIVRERAVLRRLVEAGTRIVQMGYGADGMDVDAIVNSAQAEVYAVTETRTKEDYAVLGDVIEGTIDEIEASSHRGEGMVGVPTGFADLDSLTNGLHPGQMIVIAARPAVGKSTLGLDIARAASIKHGLASVIFSLEMGRNEIAMRLLSAEARVPLQKMRKGNMDDADWTRFARTMGAINEAPLYIDDSPNMSLMEIRSKCRRLKQRADLKLVIVDYLQLMTSGKRVESRQQEVSEFSRALKLLAKEIEVPVIALSQLNRGPEQRTDKRPMVSDLRESGCLTAGTRVLRADTGAETTMGELFALQARDVPVWSLDESLRYVRRHLTRVFPTGVKPVFRLRTASGKTVRATANHPFLTYDGWKPLGELSVADRLAVPRHVPAPERVASWTDDQVLLLGHLIGDGSFVKRQPLRYASVDEANLSAVTEAAANAFSIVAVRDEYAAARCTTLRLPAPYRLTHGRRNPLAAWLDELGLFGLRSYEKFVPQEVFHLPKRQIALFLRHLWATDGSVTLTRQSRGGRIYYASTSLQLIQDVSRLLLRFGISTRVRTTTPKGDHRPGYTLDVSGVDDQRRFLQEIGVHGARGATADRLLEVIRDVSANTNVDTVPRQVWDDVRRLLVEKEMTHREFAAAMGTSFGGSSLWKHAPSRERLGRVAQVLDSAELDVLAVNDVLWDEVVAIEPDGEEQVYDATVLGGHNFVADGIAVHNSIEQDADMVILLHREDMYEKESPRAGEADFIVAKHRNGPTDTITVAFQGHYSRFVDMAT

SEQ ID NO: 466 - protein, 953 aa, Listonella pelagia phage phiHSIC
  LP-phiHSIC helicase precursor
MAFELRPYQKEAVKKVIEHVKICLDPCVVDAATGCHAYGHDIMMSDGTKKQVQDIAVGDKVMGPDGNPRKVIRLVKGQDEMFRVTPTKGESFVVNGGHILSLYQTPRRAGQTPGYTEISVNEYIRSSSTFKHRSKLQRFGFDLPGKNLPIPPYILGLLLGDGCITGVGQMSFTSQDHAAITEIERYLMSIGASNRLHFDSREAVGVCFRDYHRLEDHLTELGLYGRNSGDKFIPSEYLTSSNEDALEMIAGLLDTDGSLCPHGVYDYISKSRELSEGLVYLCRRVGLAAYISECEKSCQNGFKGTYYRVCVSGDLSKVPCRVSHKKCIFDRKQKKRVDVTGFKVEPIGVGDYYGFTVDGDHLYLDGDFVRHHNCGKSVIIAEIAKFFNEVSGKKTLVIGPNKEICQQNAEKYKSYGFPASFWSASIGKKEMRHQVVFGSPVSIKNELDKFGPQFGAVIIDEAHLLSPTVKEICSHMKEQNNLLRIVGLTATPYRLGSGYIYEYDDNNNPVGDECTKNPFFKRLVYRITAKELIDQGFLTPPIADHEMASKYDTSGVQLNKRNQFDAKDIEQAFEGQGRLTAQIIADVVSHCQNKMCCMIFAATIQHAQEIMESLPKHNSYCVTGKTKRKDREKAIERAKTGEIKYLVSVGTLTTGVDITNVDVIAILRATESASLLQQIIGRGLRLHENKTTCLVLDYAENIERHGLEDDLFNPDIRVSGGGDGSAKVNALCKSCGTVNEFTLRKGCDLDHIDEYGYALDLAGERIEMEGQPMPAHYGRRCYGGDVINGHYVRCSERWSMKVCPECEVENDIAARYCTSCRTELVDPNEKLKADYKRMKRDPRAISTDKMLGWECKPWITQRGNNTLRVDYRSEYRSFTIWYSPDSSNVKAQGLWNNLSEVVFGKGHIAPTPEAFCDALKRGFGTMPETVTVQKQGDFFRAFAHGLPEDDKPE

SEQ ID NO: 467 - protein, 795 aa, Mycobacterium avium
  Mav DnaB precursor
MAVVDDLTSGMDSSSPSEDFGRQPPQDLAAEQAVLGGMLLSKDAIADVLERLRPGDFYRPAHQNVYDAILDLYGRGEPADAVTVAAELDRRNLLRRIGGAPYLHTLISTVPTAANAGYYATIVAEKALLRRLVEAGTRVVQYGYAGAEGADVAEVVDRAQAEIYEVAERRTTEDFVPLEDLLQPTMDEIDAIASNGGVARGVPTGFTELDEVTNGLHAGQMIIVAARPGVGKALALDTPLPTPTGWTTMGDVAVGDELLGDDGRPTRVVAATDVMLGRPCYEVEFSDGTVIVADAAHQWLTETRVSRKSAQAAAVGYNRYKNQRTFAAVRTTAEIAETLRCPAQDRRLNHSVVNARALELPDREFLVPPYTLGAWLGDGTSAAAQITAADPEIIMRIEAEDSGAGVGTLQARLRTIGVLGNKHIPTEYLRGSEAQRRALLAGLLDTDGTVTVGGAVQFSVTNQRLARDVNELIVSLGYRCQTSTKRVQGRSETSSIAYTLTFSTADKVFALERKAIAHKERRAVTGTSRGGSRFIVDVRPIEPVAVRCVEVDNDSHMYLASRAMVPTHNSTLGLDFLRSCSIKHRMASVIFSLEMSKSEIVMRLLSAEAKIKLSDMRSGRMSDEDWTRLARRMSEISEAPLYIDDSPNLTMMEIRAKARRLRQKADLRLVVVDYLQLMSSGKKVESRQLEVSEFSRQLKLLAKELEVPVVAISQLNRGPEQRTDKKPMLSDLRESGSLEQDADMVILLNRPDAFERDDPRGGEADFILAKHRNGPTKTVTVAHQLHLSRFANMAR

SEQ ID NO: 468 - protein, 795 aa, Mycobacterium avium 104; identical to SEQ ID NO: 467
  Mav-104 DnaB precursor

SEQ ID NO: 469 - protein, 875 aa, Mycobacterium avium subsp. paratuberculosis str. k10
  Mav-PT DnaB precursor
MAVVDDLTSGMDSSSPSEDFGRQPPQDLAAEQAVLGGMLLSKDAIADVLERLRPGDFYRPAHQNVYDAILDLYGRGEPADAVTVAAELDRRNLLRRIGGAPYLHTLISTVPTAANAGYYATIVAEKALLRRLVEAGTRVVQYGYAGAEGADVAEVVDRAQAEIYEVAERRTTEDFVPLEDLLQPTMDEIDAIASNGGVARGVPTGFTELDEVTNGLHAGQMIIVAARPGVGKALALDTPLPTPTGWTTMGDVAVGDELLGDDGRPTRVVAATDVMLGRPCYEVEFSDGTVIVADAAHQWLTETRASRKSAQAAAVGYNRHKNQRTFAAVRTTAEIAETLRCPTQDRRLNHSVVNARALELPDREFLVPPYTLGAWLGDGTSAAAQITAADPEIIMRIEADGVVAVPSGSAPYRYQLRLPPGAEQAPRRCVVCGKSFIPQTSQVRTCGRSCGGRARFMSDPVPSPTCVRCGGPSAGMRLCLKCHSTVGTLQARLRTIGVLGNKHIPTEYLRGSEAQRRALLAGLLDTDGTVTVGGAVQFSVTNQRLARDVNELIVSLGYRCQTSTKRVQGRSETSSIAYTLTFSTEDKVFALERKAIAHKERRAVTGTSRCGSRFIVDVRPIESVAVRCVEVDNDSHMYLASRAMVPTHNSTLGLDFLRSCSIKHRMASVIFSLEMSKSEIVMRLLSAEAKIKLSDMRSGRMSDEDWTRLARRMSEISEAPLYIDDSPNLTMMEIRAKARRLRQKADLRLVVVDYLQLMSSGKKVESRQLEVSEFSRQLKLLAKELEVPVVAISQLNRGPEQRTDKKPMLSDLRESGSLEQDADMVILLNRPDAFERDDPRGGEADFILAKHRNGPTKTVTVAHQLHLSRFANMAR

SEQ ID NO: 470 - protein, 874 aa, Mycobacterium bovis subsp. bovis AF2122/97
  Mbo-AF2122 DnaB precursor
MAVVDDLAPGMDSSPPSEDYGRQPPQDLAAEQSVLGGMLLSKDAIADVLERLRPGDFYRPAHQNVYDAILDLYGRGEPADAVTVAAELDRRGLLRRIGGAPYLHTLISTVPTAANAGYYASIVAEKALLRRLVEAGTRVVQYGYAGAEGADVAEVVDRAQAEIYDVADRRLSEDFVALEDLLQPTMDEIDAIASSGGLARGVATGFTELDEVTNGLHPGQMVIVAARPGVGKSTLGLDFMRSCSIRHRMASVIFSLEMSKSEIVMRLLSAEAKIKLSDMRSGRMSDDDWTRLARRMSEISEAPLFIDDSPNLTMMEIRAKARRLRQKANLKLIVVDYLQLMTSGKKYESRQVEVSEFSRHLKLLAKELEVPVVAISQLNRGPEQRTDKKPMLADLRESGCLTASTRILRADTGAEVAFGELMRSGERPMVWSLDERLRMVARPMINVFPSGRKEVFRLRLASGREVEATGSHPFMKFEGWTPLAQLKVGDRIAAPRRVPEPIDTQRMPESELISLARMIGDGSCLKNQPIRYEPVDEANLAAVTVSAAHSDGAAIRDDYLAARVPSLRPARQRLPRGRCTPIAAWLAGLGLFTKRSHEKCVPEAVFRAPNDQVALFLRHLWSAGGSVRWDPTNGQGRVYYGSTSRRLIDDVAQLLLRVGIFSWITHAPKLGGHDSWRLHIHGAKDQVRFLRHVGVHGAEAVAAQEMLRQLKGPVRNPNLDSAPKKVWAQVRNRLSAKQMMDIQLHEPTMWKHSPSRSRPHRAEARIEDRAIHELARGDAYWDTVVEITSIGDQHVFDGTVSGTHNFVANGISLHNSLEQDADVVILLHRPDAFDRDDPRGGEADFILAKHRNGPTKTVTVAHQLHLSRFANMAR

SEQ ID NO: 471 - protein, 846 aa, Mycobacterium bovis subsp. bovis AF2122/97
  Mbo Pps1 precursor
MTLTPEASKSVAQPPTQAPLTQEEAIASLGRYGYGWADSDVAGANAQRGLSEAVVRDISAKKNEPDWMLQSRLKALRIFDRKPIPKWGSNLDGIDFDNIKYFVRSTEKQAASWDDLPEDIRNTYDRLGIPEAEKQRLVAGVAAQYESEVVYHQIREDLEAQGVIFLDTDTGLREHPDIFKEYFGTVIPAGDNKFSALNTAVWSGGSFIYVPPGVHVDIPLQAYFRINTENMGQFERTLIIADEGSYVHYVEGCLPAGELITTADGDLRPIESIRVGDFVTGHDGRPHRVTAVQVRDLDGELFTFTPMSPANAFSVTAEHPLLAIPRDEVRVMRKERNGWKAEVNSTKLRSAEPRWIAAKDVAEGDFLIYPKPKPIPHRTVLPLEFARLAGYYLAEGHACLTNGCESLIFSFHSDEFEYVEDVRQACKSLYEKSGSVLIEEHKHSARVTVYTKAGYAAMRDNVGIGSSNKKLSDLLMRQDETFLRELVDAYVNGDGNVTRRNGAVWKRVHTTSRLWAFQLQSILARLGHYATVELRRPGGPGVIMGRNVVRKDIYQVQWTEGGRGPKQARDCGDYFAVPIKKRAVREAHEPVYNLDVENPDSYLAYGFAVHNCTAPIYKSDSLHSAVVEIIVKPHARVRYTTIQNWSNNVYNLVTKRARAEAGATMEWIDGNIGSKVTMKYPAVWMTGEHAKGEVLSVAFAGEDQHQDTGAKMLHLAPNTSSNIVSKSVARGGGRTSYRGLVQVNKGAHGSRSSVKCDALLVDTVSRSDTYPYVDIREDDVTMGHEATVSKVSENQLFYLMSRGLTEDEAMAMVVRGFVEPIAKELPMEYALELNRLIELQMEGAVG

SEQ ID NO: 472 - protein, 790 aa, Mycobacterium bovis subsp. bovis AF2122/97
  Mbo RecA precursor
MTQTPDREKALELAVAQIEKSYGKGSVMRLGDEARQPISVIPTGSIALDVALGIGGLPRGRVIEIYGPESSGKTTVALHAVANAQAAGGVAAFIDAEHALDPDYAKKLGVDTDSLLVSQPDTGEQALEIADMLIRSGALDIVVIDSVAALVPRAELEGEMGDSHVGLQARLMSQALRKMTGALNNSGTTAIFINQLRDKIGVMFGSPETTTGGKALKFYASVRMDVRRVETLKDGTNAVGNRTRVKVVKNKCLAEGTRIFDPVTGTTHRIEDVVDGRKPIHVVAAAKDGTLHARPVVSWFDQGTRDVIGLRIAGGAIVWATPDHKVLTEYGWRAAGELRKGDRVAQPRRFDGFGDSAPIPADHARLLGYLIGDGRDGWVGGKTPINFINVQRALIDDVTRIAATLGCAAHPQGRISLAIAHRPGERNGVADLCQQAGIYGKLAWEKTIPNWFFEPDIAADIVGNLLFGLFESDGWVSREQTGALRVGYTTTSEQLAHQIHWLLLRFGVGSTVRDYDPTQKRPSIVNGRRIQSKRQVFEVRISGMDNVTAFAESVPMWGPRGAALIQAIPEATQGRRRGSQATYLAAEMTDAVLNYLDERGVTAQEAAAMIGVASGDPRGGMKQVLGASRLRRDRVQALADALDDKFLHDMLAEELRYSVIREVLPTRRARTFDLEVEELHTLVAEGVVVHNCSPPFKQAEFDILYGKGISREGSLIDMGVDQGLIRKSGAWFTYEGEQLGQGKENARNFLVENADVADEIEKKIKEKLGIGAVVTDDPSNDGVLPAPVDF

SEQ ID NO: 473 - protein, 765 aa, Methylococcus capsulatus Bath, prophage MuMc02
  Mca MupF precursor
MTLPAADLKAIFNLEPKAAIAYLQHKGYKLTWNWQEMLDDAHARAFTIAKAARLDVVQDIRNALDVALRHGQTLKDFQKNLKPTLQAKGWWGKQIIVDGAGNAEVARLGSPWRLATIYRTNLQSAFMAANYQEMAEATDSHPYWQYVAVLDGRTRPSHRAMNGRVFRHDDPIWNTIWPPNGFNCFPAETPVRAAARLGLKTWYAGKVVELQTRLGHRLTLTANHPVLTVRGWIAACQLQKGDQLIGDASGVNPRLAGVVNDEQPPARAEDLFQTLAAQGFRIVPMAPHDFHGDAGLRKPEIHIAGPDVHLMDEVQAAPGQFVGQQQLRRADACAIMDADRPDGPPPARMILADAVAPQNPADVAEAGAELAADGAFGDQPVAVQGQHPAFEMGVAVAGALPGGGALASNGGGVLFDGSPFDALGFRAPPQGDVAGTEQPAQGVTAASGLVRQLLEANAGLIALDEIVQIRQFDWAGHVYDFETETGLIMAGGVIVHNCRCRVRPRSERSLARDGIAWQSSAGKLRTLETDAGVDKRTGEITHARRTGIDVVDADGKKHFFAPDAGFNFNPGQGWSKPFTPPPLDTLPKTFSPGQVLPDLPKPEKFAASMIVPDGLGEEDYAKAFLAEFGADLGKPVVFQDVTGDPMLIDEALFKSGAGEWKATKDGRGPYMRLLAHAIRSPDEIWMRWEESRERPGTWLLKRRYLKTFEIDGHGSESPQYGLSVFEYGSEGWSGSTAMISQASRGPGARRRYIERQRDGFLLFRR

SEQ ID NO: 474 - protein, 1317 aa, Methylococcus capsulatus Bath
  Mca RIR1 precursor
MEPQAISLEVLREKYARHGETCAEEIFARVADALAAAEESPDEWRPLFFSALESGFIPAGRIMSAAGTGMQATLINCFVQPVGDSVSEETDGKPGIYTALAEAAETMRRGGGVGYDFSAIRPRGARVHTTESRASGPVSYMRVFDRSCETVESAGSRRGAQMGILRCEHPDIFEFVRAKDRPGELTNFNLSVALNEDFMRAVETDGPWELTHRAEPSPEQQCEGAYLREDGLWVYRSVPARELWELIMRSTYDHAEPGVLFIDRMNRENNLSYCERIEATNPCVTADTWVMTASGARQVRDLIDRPFEAVVDGECHPTESRGFFFTGDKPVLRLSTAEGHTLRLTANHPVLRVSKMTRQLRETEWVKAGELRPHDKIVLHDHRALPSWDGAHTEAEGYLIGLLIGGGTLTRDKAILSIWDAAAPKVANGGGSVPAAGVAGVMRAAELAARTLPHRTDFNGWQTTMEGRGEYHMATGALHTLALELGLTPGDKRLTAPLETTSSAFHRGLLRGMFDADGSVQGSQRKGVSIRLPQTDLGNLQTVQRMLLRLGVASTIHQNRRPGGTKVLPDGEGGAKGHSCQAAHELIISGENVVRYAERIGFADSDKMDRLTALLQRYRHTRHAERFIATVQSLEDDGMEAVYDVTVADVHAFDANGLYVHNCAEQPLPAYGCCCLGSLDLTRFVSRPFTPEAAFEAERLAEVATIAVRMLDNVLDTTYWPLARQRQEAQAKRRIGLGFTGLGDALAMLGLRYDSAAARDMAAGIARRLRDAAYLASTALAREKGAFPLFEAEPYLASPFVAGLPEPLRARILESGIRNSHLLSIAPTGTISLAFADNTSNGIEPPYAWTYLRKKREPDGSTREFPVEDHAYRLYRATAGDRPLPPAFVTALDISALDHMRMLAAVQPFVDASISKTVNVPADYPYADFQHLYLEAWKAGLKGLATYRPNPVTGAVLEATPTHGISRPEFDESDPDRRLRLDEVPAPALASLRWRRRPRPAAGNPAWSYLIDHPLGSFAVFIGHIEDHGNHPFEVWVTGAEQPRGLGALAKSLSMDMRSNDRGWLKTKLESLMKAHGDDGFDLPFPPNGRPVRVPSLVAGFARLIYYRCAELGAFDTLADTPVVDALMSPKEPKTGPDGTLSWTVDILNVATGDDFVMGLKELVLPNGQRRPYSMWLSGEYPRVLDGLCKSLSFDMRVIDPAWIGAKLRQLLDFPEPRGDFLARMPGTGRQRNYPSTVAYMAQLAIHRYAMLGLLDEQGRPLQDMGLMDYESAGPETGEAKPPVLKGARCPECGNDAVIRRDGCDFCTACGALGGCG

SEQ ID NO: 475 - protein, 423 aa, Mycobacterium chitae
  Mch RecA precursor
REKIGVMFGCFNYSTRVQLADGTTEKIGKIVNNKMDVEVLSYDPVADQVVPRKVVNWFNNGPAEQFLQFTVEKSGGNGRSQFAATPNHLIRTPAGWSEAGDLIAGDRVMASEPHRLSDQQFQVVLGSLMGDGNLSPNRRDRNGVRFRMGHGAKQGDYLQWKTDLLANIAHSAHENAKGARFVDFTPLPELAELQRAVYLGDGKKFLSEEYLKALTPLALAIWYMDDGGFTVRSKGLQQRTEGGSGRIEICVEAMSVGSRDRLRDYLRDTHGLDVRLRHAGAAGKAMLVFTTAASAKFQEIVAPYMAPSMEYKLLPRFRGQGTVAPQFVEPTERLVPARILDIHVKPHTRSMNRFDIEVEGNHNYFVDGVMVHNSPETTTGGKALKFYASVRIDVRRIETLKDGTDAVGNRTRAKIVKNKVSPP

SEQ ID NO: 476 - protein, 1059 aa, Methanoculleus marisnigri JR1
  Memar MCM2 precursor
MTEEITVEVTDNVGEWTKFLKKQYKRELAELSREYPHNHSLLIDYRKILNNKLAFELLRSPGKVLGDIRDAIVQNKLLKLKDGQDPDLVNIRFTNLPQKTNVRDIRADQINTFVSLEGILRKTTEVRPRIVSAVFRCRTCNKNTDPVPQGYGRFDEPDFCPNCERKTRLDLVMNRCRFVDAQKLRIQESPEGLRGGEQPQTLDIDVTDDLTGMVSPGDRVVVNGILRSVQRVNYGQKSTLFDIYLECNSIEVAEKEFEEVSISEEDEANIMALARDPMVYKKIARSIAPTIYGTDDVKEAIALQLFGGIAKDMPDGSRLRGDVHVLLVGDPGIAKSQILRYVVKLSPRGIYTSGKSSTSAGLTATAVKDEFGDGRWTLEAGALVLADMGIAAVDEMDKMQKEDRSALHEAMEQQCYDDETEVLTESGWKLFRDVTADDRVATLSADGRLEYAPPSNFVASEYDGEMYYVKSRQVDLAVTPNHRMYVNLNRRADEWEGFRLIRMDELPIHKRMRFKKNAAWTGERHETHWIPPVVKFANQNAEGKLTDPITVGMDDWLEFLGYFLSEGSVQRHHQTGVPYRVIISQTNPESAETIRQCLERLPFRFSYDGKNFSINAKQLAEHLAPFGKCHEKYVPDYAKSLPPEQIGILLDALMLGDGYINKTTGVSIYTTSSRRLADDVTELLLKKGLSGNVYLRREAGTVAANPRGGTSTATHDIFQVTFIRDGQNEPNINTNGKQHIEKRPYKGTIYCLEVPNHTLYVRRSGIPVWCGNSISVAKAGITATLKSRCALLGAANPKLGRFDQFVPIGEQINMPPSLLSRFDLIFVMTDQPEVQRDGAIAQHIIKTHSVGELIKQHEYEPLPDVDDAYIERALAPVIPDIDPTLLRKYIAYAKRTCFPILSDGAKEALIAYYMRLRNLASGNKPVPVTARQLEALVRLAEASARMRLSNTVDTEDTDRILKIVDACLRQVAYDAESGSFDIDKLVTGVTKSQRDIIRSVKEAIRNVSGDSGGQARVDEVIEILLQQGFSRDKIEHTLEQLKRGGEVLEPRHGLVKLIG

SEQ ID NO: 477 - protein, 1285 aa, Methanoculleus marisnigri JR1
  Memar Pol-II precursor
MEVSPAIARYFEELEGELDAAIRLAAAARARGLDPRTEIEIPVASDLADRVEALLGYKGIAARIRELEAEMSREEAALRIGDDFAARKFGETTPEEILDHAIRAAMALLTEGVVAAPTEGIGKVSLGKNDDGTDYLKIYYAGPIRSAGGTAQALSVLVGDYVRQALGINRYIPRPEEVERYIEEIRQYNNIMSLQYLPSEKELRMIIENCPVCIDGEPTEQQEVSGYRNLERVETNTVRGGMALVVAEGLALKAPKVLKNVRKMKMEGWDWIEEMIGGGPKSDDDDASAAIKPKDKYIRDLIGGRPVFSYPMRKGGFRLRLGRARNTGFAAAGFNPATLHILGDFLAVGTQMKVERPGKAAGVVPVDSIQGPTVKLRSGEVRRVDDAAEARRLAGQVDEILDVGEMLVSFGEFMENNHPLMPPAYCEEWWMLEGGPRHPENELEAIEFALDGVPLHPDYTYMWDDVAPADIARLAEAVGTGGTVEDGVLMIRNTPETKAILEELLIPHHLSGDRLAIREHLAFLACLGLTLQLTKRPAWQDAPMENSLDLVMHLSGFTVRSRAGTRIGGRMGRPGKSKPREMRPPPHSLFPIGDEGGARRSFQAACSSKPRSNTDGGVIEAEVGERQCPACGAFTYKNLCECGAHTNPVFRCPRCGKDVGQDVCPRCNAETVCLQKVTINVKAEYLAAMESLGVRESSVALLKGVKGLISRERPVEPIEKGILRALQNLYVFKDGTVRYDMIDLPLTHFRPDEVGVPIERLRELGYTHDTYGRELVSDDQVLELRHQDILVSEGCGEWLVRVAKFVDDLLVRLYGLEPFYKAEKPLDLVGHLLMGLAPHTSAGVLVRLIGFSKAPVGYGHPFFHAAKRRNCFAGDTEITVSDGRRWMSLPIRQFVTENFDISKPGLDHVGTFYSDPRQPFYVRSIDSQGKTSLKRVTSVSVHRAPAHLVRFATRRGRVLTVTPDHAMLVWDTDYLRKIKALEVAVGDRVPVEEGGLVVADEVVSRETVQALDDRVYCLTVAENHTLVANGIFCGQCDGDEDCVMLLLDGLINFSRAYLPETRGGTMDAPLVLTTRIDPSEVDKESHNVDVCDHYPIEVYNGCLAYAHPKDLDAFVDRVERRLGTPAQCEGFLFTHQTSNISAGPLESTYTRLGSMLDKLEAELDLAKRIRAVDEDDVAERVLNTHFIRDLQGNLNAFSKQKVRCMKCNAKYRRMPLAGKCTRCGGHVIPTVHEGSVKKYLEMSRNICATYAISDYTKQRVEVLFMQIESTFGEPPEKQLGLADFM

SEQ ID NO: 478 - protein, 422 aa, Mycobacterium fallax
  Mfa RecA precursor
REKIGVMFGCFSYGTRVQLADGSTEKIGKIVNQKMDVEVMSYDPVTDQIVPRKVVNWFNNGPAEQFLQFTVEKSGGNGRSQFAATPNHLIRTPAGWTEAGDLIAGDRVLAAERHLLSDQQFQVILGSLMGGGNLSPNLHDRNGVRFRMGHGARQADYLEWKTALLGNIGHSVRENDQGARFVDFTPLPELGELRRAVYLGDGKKFLSEDYLKALTPLALAVWYMDDGSFTVRSKGVQQRTQGGSGRIEICVEAMAEGTRERLRDYLRDTHGLDVRLRSAGSGKSMLTFSTEATAKFQELVAPHMAPSMEHKLLPRFRGLGTVEPRFVEPAQRLVPARVLDVQVKPRTRSMNRFDIEVEGNHNYFVDGVMVHNSPETTTGGKALKFYASVRMDVRRIETLKDGSDAVGNRTRVKVVKNKVSPP

SEQ ID NO: 479 - protein, 554 aa, Mycobacterium flavescens Fla0
  Mfl GyrA precursor
RGIFRPDRSHAKSARSVAETMGNYHPHGDASIYDTLVRMAQPWSLRYPLVDGQGNFGSPGNDPPAAMRYCVTGDALVRLPFGQSVRLRDVVAGARSSSDNAIDLKVLNRHGDPVVADKLFHSGEHETYTVRTAEGYEVTGTANHPLLCLVDVGGVPTLLWKLTEEIRPGDHVVLQRTPPTEFGPADWQDAFEALHLGAFISEGFVSENRAGFNNLDREFFNAVLTAYDTIVGGPRYVSSRTIASDSLLHELDVHNLTALKKSRLGELVGQRSADKAVPEWLWKAPAVVKRVFLQALFEGDGSCSALPRNTIQVSYSTRSGRLAKDIQQMLLEFGVISRRYVHATGEHKVVLTSRAQAELFAAQIGFGGIKQAKLQGLLDALPQAAAGRDGDYVPGLAQFVRKHSGSRWVDKDWLNRHNIDRLSRWQRDGAEILGRIADPDVRAIAQELTDGRFYYARVASVTDSGVQPVYSLRVDTDDHSFITNGFVSHNTEARLTPLAMEMLREIDEETVDFIPNYDGRVQEPTVLPSRFPNLLANGSGGIAVGMATNIPPHN

SEQ ID NO: 480 - protein, 423 aa, Mycobacterium flavescens, ATCC14474
  Mfl-ATCC14474 RecA precursor
REKIGVMFGCFNYSTRVQLADRTTEKIGKIVTQKMDVEVLSYDPDTDRVVPRKVVNWFNNGPAEQFLQFTVEKSGGNGKSQFAATPNHLIRTPGGWTEAGDLIAGDRVMATEPHRLSDQQFQVVLGSLMGDGNLSPNRRDRNGVRFRMGHGAKQVDYLRWKTELLGNIKHSTRVNDKGATFVDFTPLPELAELQRAVYLGDGKKFLSEEYLKALTPLALAIWYMDDGAFTVRSKGLQERTAGGSGRIEICVEAMSEGTRVRLRDYLHDTHGLEVRLRQSGKAGKAVLVFSTASSAKFQELVAPYMAPSMEYKLLPRFRGQSTVSPQFVESTQRLVPARILDVHVKPHTRSMNRFDIEVEGNHNYFVDGVMVHNSPETTTGGKALKFYASVRMDVRRIETLKDGADAVGNRTRVKVVKNKVSPP

SEQ ID NO: 481 - protein, 550 aa, Mycobacterium gastri
  Mga GyrA precursor
DRSHAKSARSVAETMGNYHPHGDASIYDTLVRMAQPWSLRYPLVDGQGNFGSPGNDPPAAMRYCTTGDTLVRLPFGQSMRIADVVPGASPNSDNAVELKVLDRHGNPVVADHLFHSGDHQTYTVRTAEGYEVTGTANHPLLCLVDVGGVPTLLWKLIGEIHANDYVALQRTPPMELGPADWHGTMEALLLGAFISEGYVSETRTGFANLDRDYFTTAAGAYDGVVGGKRYVYQQTIGSGSPQHTLYTQKVTALKQSRLWQMVGVRSADKYVPEWMWHSPAAVKRTFLRALFEGGGSCSRLPRKTIQISYTTISKQLAMDVQQMLLEFGVISRRYLHAVGEYKVVITNRAQAELFATQIGFGGAKQTKLTKILASMPPCAGRDSDHVPGLALFIRRHCGSRWVDKEWLHKHNIDRLSRWRRDGAEILSHIADPDVRTIATELTDGRFYYARVASVTDAGVQPVYSLRVDTDDHAFLTNGFVSHNTEARLTPLAMEIVREIDEETVDFIPNYDGRVQEPTVLPSRFPNLLANGSGGIAVGMATNIPPHNKGE

SEQ ID NO: 482 - protein, 419 aa, Mycobacterium gastri
  Mga RecA precursor
RDKIGVMFGCGSWYTNVTLADGSTEKLGKIVNQKMDVEVLSYDFESGQIVPRRVTNWFNNGKAEEFLHFKVDRAGSGTGRGHASLAMTRNHLIRTPVGWREAEDINVGDRVMLAQPRLLSDQQWEIVLGSLMGDGCLSPPVRQDSESARLRIGHGAQQSAYFDWKVSLLANIPHSRTVNGKGAAFVDFSPLAELHELRSAVYLGDGKKFLSEEYLKGLTPLSLAIWYMDDGSFSLRSKGLQQRTQGGSGRIEICVEAMSEGSQVRLRDYLHDTHGLDVRLRKAGAAAKAVLVFSTAATAKFQQLVAPYMAPCMAYKLLPRFHGRSMVTPQFVEPIMELMPARVTEIESKTDYPIMSRFDIEVEGSHNYFADGVMVHNSPETTTGGKALKFYASVRMDVQRIETLKDGTNTVDNRTRVKI

SEQ ID NO: 483 - protein, 534 aa, Mycobacterium gastri
  Mga SufB (Mga Pps1) precursor
AEKQRLVAGVAAQYECLAGDTLVWTANRGQVPIKEIEFGDRVFSYDESAERFVVAPVKASAQTDTRLTYEVKTTRRSVRATDNHPMLVLRDERKEGRQRARYARRWVTVGQIKPGDFIAVPRAVPNFGVAEQLPSVAGLTTPATSSADLMWLLGLYVGDGNLHLSTKTYRVQFAIPATDRELRAELTRVIKDLFGLRCIEADEYRVVVNSKALTEWIAALGFGGLSLTKRVPDWVYGLPVDQRLAFLGGWVDADGYVSPDKSGSILLTCANQALIGQARELAELAGLRAGGPWSFTQPYRHAPDRMQIAWRLGISGDFERLGCRNPKRTDRFGRRRYMHSSSGAHGTTIRAHCNDWLGFERVKAVEPYAVEPVYDIEVDGPHNFVAEGLVVHNSEVVYHQIREDLEAQGVIFLDTDTGLREHPDVFKQYFGTVIPAGDNKFSALNTAVWSGGSFIYVPPGVHVDIPLQAYFRINAENMGQFERTLIIVGENAYVTYVEGCTAPIYKSDALHSAVVEIIVKPGGRCRYTTIQNWS

SEQ ID NO: 484 - protein, 1286 aa, Methanospirillum hungateii JF-1
  Mhu Pol-II precursor
MADISPRMQEYYDRLNAGLAQAMEVAKTARKTGLDPETVVEIPIANDLADRVEAQVGIPGVAQMIRELEAVMSREEASLHIGDYFAEKKFGETTKEEILDHAIRTAMALLTEGVVSAPIEGIAKVAVKKNDDGSEYLAIYYAGPIRSAGGTAQALSVLVGDYVRRILGMSRYMPREEEIERYIEEIRQYNSIMSLQYLPSEREIRLIISNCPVCIDGEPTEKEEVSGHRNLERVETNTVRGGMALVIAEGLALKAPKVLKNVRKMKMDGWDWLEEMIQATAGSSSSEEKEVGIHPKDKFLRDLIGGRPVFSYPMREGGFRLVYGRSRNTGLAAAGLNPATLHILGDFLAVGTQMKIERPGKAAGISPVDSIQGPTVRLINGDVVRIHDAKRARELSSQVSHIIDVGEILISYGEFMENNHVLVPSAYCESWWRLEGGTTRPADEDEAILQCESGLYLHPDYLYLWDDLKPAEIRSLAEFIHKHGTLADKTLILPLDPTIKEYLERVLCEHQVREGMIRITPCRIVLKCLGLDSSLALSDSWEKELPESALDLVQFLSGMKMRSKAGTRIGGRMGRPGKSKPREMKPAPHVLFPVGEAGGSRRSVQEASKFSYQANTEGGNLQLEMGVRRCPACGTESYKNRCSCGTHTEPVLSCSRCGIEVQGPVCPQCGMEPTSVRQYTVNVRQMLQQAFADLGMRDRDVELVKGVKGLVSRNKPVELIEKGVIRAANKLFVFKDGTVRFDIIDMPLTHFRPREIGVSVERLRELGYLQDIYGVPLQNPDQVLELPPQDILVPEGCGDYLFSCTRFIDTLLEKVYGLPPFYNLETRSDLVGHLVIGLAPHTSAGVLARIIGFSKANVGYGHPFFHAAKRRNCFHGDTLIEIYADGILEEIPIRRFVLEHLDLSQAGVDALGTFYADPVRPAHVRSVDTGGIPHLRKITSVSVHKAPANLIQFSTSRGKNLLVTPDHAMLVWDVSYLRKIRALEVKIGDAVPVWESGVVISDRIVSIDYVPCEDERVYCLTVDRDHNVVGNGIFTGQCDGDEDCVMLLLDGLINFSRSFLPVTRGGSMDAPLVLTSRIDPTEIDKESHNLDVCATYPIEVYETALRYGNAKDVESLVDRVERRLNTPAQIEGFFFTHDTSDISAGPLETMYTQLQSMLDKLDCELSLAKRIRAVDEHDVAERVLKTHFIRDLQGNLSAFSKQKFRCTKCNTSYRRMPLAGKCKCGGNIIPTVHEGSVKKYLQMSRQICEEYNITEYTRQRIEVIDMNIESTFGEEKVEQMGLADFM

SEQ ID NO: 485 - protein, 1102 aa, Methanococcus jannaschii (Methanocaldococcus jannaschii DSM 2661)
  Mja GF-6P precursor
MKFMCGIIGYIGNDKAPKILLNGLRRLEYRGYDSCGIGVVDNNKLIIKKNVGKVEEVAKKERFLDIDGNIGIGHCLHPDTYVILPDGRMKKISEIDEDEVLSVNFEDLKLYNKKIKKFKHKAPKILYKIKTAFSELITTGEHKLFVVENGKIVEKCVKDLNGSELIGVVRKLNYSFNDNVEFKDVYVERHYKLDETIRNKLRKVREKLGLTRKDVEKLCGVKEIYIVKIETGKLESIEEERLKKLCSLYGINFEEIIYRDNLHYTNPVKFPKTPTPELMQIIGYIIGDGHFPSNRMLRLKDERKEVLEEYNQLFKTVFNLEGNIKKGDGNYYILEINSKYLIDWFRENIPELFNKTGNERTPEFVFRLNNDLVASYLRGIFDAEGYIRAEAKQIGIGMTSKCFIKEIQFLLLRFGILASYSKIKRKEENWNNTHKLLISDKKSFELFKKYIGFTAKDKMEKLEAILNKMKGLNFRYISIPLTKKEIREFVGVPLKTIKNGDNYCTDYTIEKIIEELNSKGLYDKAEYLKRFLDADIVWTKFKIEEVESDVEYVYDLEVEDYHNFIGNLIINHNSRWATHGNVCKENAHPHTDCKEEIAVVHNGIISNYKELKDELMKKGHKFKSETDTEVVPHLIEEELKKFKEINEENYIKAVKNAIKKLKGTYALVIINKNFPNLLIGARNESPLILGINDDGYFLGSDITAFLDYTNKAIPLEDGDVVVIKKKENGYEVTIENNGNTVEREMMEINWDISSAEKMGYPHFMLKEIMEQPEVLKVSAKISAEEIKELAKCIKDYDRVYFVAMGTSLHAAMVVEYLFAKLGKLVIACDASEFLNKGVVDDKTLVIGITQSGETYDTLKALRFAKKNKAKTGAIVNVLGSTATREADITVMMGAGIEIAVCATKTYTSQLMILYRLFIEYGKLLGRDMSEYEKEIDKIPNYIKEVLDKKETIKEIANNLKVNNYIFISKGINIASALEGALKFKEITYLHAEGMSGGLLKHGTISLIDENMDTVAIVPPRDSAVFNSILSNIEEVKARGGKVIAITPTEIDGAENILVPEVIEEISPIVYAPAFQLLAYYKAVELGRDVDKPRGLAKSVTVE

SEQ ID NO: 486 - protein, 1195 aa, Methanococcus jannaschii (Methanocaldococcus jannaschii DSM 2661)
  Mja Helicase precursor
MDKILEILKDFGIVELRPPQKKALERGLLDKNKNFLISIPTASGKTLIGEMALINHLLDGNKNPTNKKGIFIVPLKALASEKYEEFKSKYERYGLRIALSIGDYDEDEDLSKYHLIITTAEKLDSLWRHKIDWINDVSVVVVDEIHLINDETRGGTLEILLTKLKEFNVQIIGLSATIGNPDELAEWLNAELIVDDWRPVELKKGIYKNEAIEFINGEIREIKAVDNNDIYNLVVDCVKEGGCCLVFCNTKRNAVNEAKKLNLKKFLTEEEKIRLKEIAEEILSILEPPTEMCKTLAECILNGSAFHHAGLTYQHRKIVEDAFRKRLIKVICCTPTLCLNANTEILQESGFRKITELNKDEKVFALCGKEIKPVDGWKVHKTPQHEYNIVVKTVNGLEITTTPNHIFLVKENGSLKEKEAKDLKVGDYVATVDRIRVKEKDIDLSNGDLYFIGYFIGDGYTGVIEKNTLKATPDLAFNPKYPPNFDDSELHKKYFLKCRISKGVAHYIYSKKLRKIFNKLNMLTKDNKNIDAFCNLPLDKLAYLIAGLFDSDGYIYLNRKNIEFYSISEKLVEQLQFVLLRFGIHSSIRKKKTKTMVSPTNGKEYKCKDIYVLTIRDFMSIKRFYENIPLRHEEKRRKLEEIIKNKEIGQIPSEFVALRFTPIAKIWCDCGFSVDLTMFKPRTKRQRELNKKRVKLLFELLDGKKLITNYKEYYSKRKNPYFDFIVREKINGNNYYSLNEKGRVLMSLLNKHIKDKENLEEMYNFLVNLEKCPICGKPIHKEMRYSWKKECYDGDIYWDRIKEIKKIKVNDKYAYDIELPDDGSNSHYIVANGFIVHNSAGLNLPCRRAIVKDLTRFTNKGMRYIPIMEIQQCIGRAGRPGLDPYGEGIIVAKNDRDYLRAYQALTQKPEPIYSKLSNQAVLRTQLLGLIATGEIRDEYDLEWFIRNTFYAHQYGNLREVAKNINEVIRFLEENEFIIDFMPTELGKRVSELYIDPLSAKFIIDGLEEMENEEEIYYLYLISKTLEMMPNLRVYNSEELNLIDEMDSLGIKSFEIEDLEAFKTAKMLYDWINEVPEDEILKRYKIEPGILRYKVENAVWIMHALKEIAKLIGKSSDIPEKLEIRLEYGAKEDIIELLSIKYIGRVRARKLYNAGIRSIEDIINNPSKVASIIGEKIAKKILDELGVKFGQQKLSF

SEQ ID NO: 487 - protein, 785 aa, Methanococcus jannaschii (Methanocaldococcus jannaschii DSM 2661)
  Mja Hyp-1 precursor
MIANVDLHIHSRFSGGTSKDMNVENILKYGKLKGLNIIGTGDCTHPDYLEEIKQYKDRELILTTEIEDKNRVHHLILLPSISKVEELREILKKYSKDIDKEGRPRVSIGGAELLEIVRDVGGLIGPAHCVPPDTLLILENGFKRIVDIKVGDKVLTHENRFKKVEKVYKRRYIGDIIKIKVRYFPEEIILTPEHPVYAIKTEKRCDGSHGICKFNCLTQYTNPSCKKRYRKYKREWIIAKDLKVGDVIVYPIPNRVRDIKYLSLDKYLSNIKREFCRSRIPEKIEVSEEFCRLVGYFLSEGYCFRDGIGFALGENEKKIIDDIEYLMKKIFNLKPKIRDDGRSEGIELKYYSRVLRDFFGDMFYCGDEKRAWNKALPNEFLYLPKNKQLQIFIGWWRGDKGVTTSEILMNQLRLISLRLGFIITFSKHVPKNPKIGDREVIKYHARWQGRVSILDEKIVDELKNEDIKLPKKDVRYGWIKGNYLYAPIIRIGREYYDGFVYNLEVEDDSSYVTVSGTLHNCFTPWTSLYKSFDSIYDCYNKKPDFVELGLSADTDMADMIPELRDLPFLSNSDAHSYHPHRLGREFNQIEVDYIGGIEDNFEQIKKAIKHNKIIANYGLDPKLGKYHLTACSKCHTRFKLEDAKKYNWKCPKCGGSIKKGVLSRVEELSDGKIEHPKFRPPYYKLIPLAEMISLTIGKGIFTKAVQSLWEEFIKKYGNEIEVLINADIDELSKIHPKVAETINLFRKGKIYIYPGGGGEYGKISFKPQKVEWYREEVTLDRWLKQ

SEQ ID NO: 488 - protein, 1155 aa, Methanococcus jannaschii (Methanocaldococcus jannaschii DSM 2661)
  Mja IF2 precursor
MAKKNTKKDNKNQNLRCPIVCVLGHVDHGKCLMPHEKVLTEYGEIKIEDLFKIGKEIVEKDELKEIRKLNIKVHTLNENGEIKIINAPYVWKLKHKGKMIKVKLKNWHSITTTPEHPFLTNNGWIKAENIKKGMYVAIPRKIYGNEDFEKFIEFINSKILTNELIVKVNEKDLKNVELPSTKIYKKQKNVFRSEDIIEHNLNIEKISFSPRIHRCGKPQHYIKLPKSLNEWKAIFYFAGVMFGDGCVDRIANNDEEVFNKLKSLNNLGIEVERIKRKSSYEIIFKNGKNALINLLKILFDYPSEKKSHNIKIPQILYIAPKELVAEFIKGYFDADGYVNLRQNRIEVISASKEFIEGLSILLLRFEITSKIYEIKKSYKETKKKYYQLNIVGKRNLKNFKNIGFSIKYKEENLNKIIEKSRKSEKYPINKDMKRLRILFGMTRNEVNVSYYAKYENGKEIPSYEIVKKFLNSLKPKNLDKKIKVLEGKERDVNYLKAFESDGLIENGRLTKLGREALNIWKNHEFGKENIDYMKSLIENIAFVEVEDVEIIDYDGYVYDLTTETHNFIANGIVVHNTTLLDKIRKTRVAKREAGGITQHIGASEIPIDVIKRLCGDLLKMLKADLKIPGLLVIDTPGHEAFTSLRKRGGALADIAILVVDINEGFKPQTVEAVNILRQCKTPFVVAANKIDLIPGWNSKEGPFILNFNEKNQHPNALTEFEIRLYENIIKPLNELGFDADLYSRVQDVTKTVCIIPVSAVTGEGIPDLLMMVAGLAQKFLEDRLKLNVEGYAKGTILEVKEEKGLGTTIDAIIYDGIAKRGDYLVVGLPDDVLVTRVKALLKPKPLDEMRDPRDKFKPVNEVTAAAGVKIAAPELDKVIAGCPIRIVPKDKIEEAKEEVMKEVEEAKIEVDDEGILIKADTLGSLEALANELRKAGVKIKKAEVGDVTKKDVIEVASYKQSNPLHGAIVAFNVKILPEAQKEIEKYDIKVFLDNIIYKLVEDFTEWIKKEEERIKYGEFEKLIKPAIIRILPDCIFRQKDPAICGVEVLCGTLRVGAPLMREDGMQLGYVREIKDRGENVKEAKAGKAVSIAIDGRVVLKRHVDEGDYMYVAVPESHVRELYHKYMDRLRNDEKEALLRYMELMQKLTNNIFWGR

SEQ ID NO: 489 - protein, 721 aa, Methanococcus jannaschii (Methanocaldococcus jannaschii DSM 2661)
  Mja Klba precursor
MIIKNQLIFVNFYVILIIWWFVMGILDKIQKKSEKIEKEKKSETVIPSDTKLKPIEPHPTINKKATVGNDETILDTYSIKIDEIEMEVVIKREEGYIYYLVPEIDKINMSLSKLTKDHLNHIKSQISDLGLIEYDQIREYLTNFSMRYNLAIPYIDSLAKFFYLVIGRLGLLEVPLNDDRLEEVMVNGYNVPVFVFHRKHQMCETNIVLDRNEVDRIIESIANLVNRPIDSRVPMLDAFLPDGSRVNATTADITMNGATLTIRKFSKNPLTVIDLINFGTLDIDTAAFLWQAVEGYFGAKPANTLIAGGTGSGKTTLLNVLSLFSMYNERIITIEDTPELQIPHKHVIKMVTRPARPGMPEYEVTMDDLIKNALRMRPDRIFVGEVRGKEAHSLLVAMNTGHDGALAYDEPIYLSDGNIINIGEFVDKFFKKYKNSIKKEDNGFGWIDIGNENIYIKSFNKLSLIIEDKRILRVWRKKYSGKLIKITTKNRREITLTHDHPVYISKTGEVLEINAEMVKVGDYIYIPKNNTINLDEVIKVETVDYNGHIYDLTVEDNHTYIAGKNEGFAVSNCSGTLHANSADEAILRLTSPPMNVPKIMLTALNFIINQQRIRRAGKTIRRILGIVEIVKGGGEGHEFAKTTLYEYNGLKDSLERRGICMWEEEVCEIAGITKEELLRDRENRKKVLSYLYKNNIRKLENVSDYIMRYQVDPEKLLRSIR

SEQ ID NO: 490 - protein, 1188 aa, Methanococcus jannaschii (Methanocaldococcus jannaschii DSM 2661)
  Mja PEP precursor
MLIIQNTKGDSMKFIAWLDELSNKDVDIAGGKGASLGEMWNAGLPVPPAFVVTADAYRHFIKETGLMDKIREILSGLDVNDTDALTNASKKIRKLIEEAEMPEDLRLAIIEAYNKLCEMCGEDEVTVAVRSSATAEDLPEASFAGQQDTYLNIKGAENVVKYVQKCFSSLFTPRAIFYREQQGFDHFKVALAAVVQKLVNAEKAGVMFTVNPISENYDELVIEAAWGLGEGVVSGSVSPDTYIVNKKTLEIVDKHIARKETMFVKDEKGETKVVEVPDDMKEKQVLSDDEIKELAKIGLNIEKHYGKPMDVEWAYEKGKFYMLQARPITTLKKGKKEKKAKEEDIEAKILLKGIGASPGIATGVVKIIHDVSEIDKVKEGDILVTEMTTPDMVPAMKKAAAIVTDEGGLTCIEGDAKILTDRGFLKMKEVYKLVKNGEKLKVLGLNAETLKTEWKEIIDAQKREARRYEIGVYRKNKNTKDTIKITPDHKFPVFVNGELSKVQLCDIIDNNLSVLSIDYIPMIEEKYESLAEVMYLGGAVLSDGHIVRRNGKPIRVRFTQKDTEEKKDFIEKVKGDVKLIGGNFIEISNRNNVIEYQTSRKIPSEILGFIEVNINTIPLYATKDEIADLIAGFVDGDGCLSGKRRVEIYQNSSHIKKIEGLIVGLYRLGIIPRLRYKRSSTATIYFNNNLETILQRTRRIKLDKLKEFKKPVEDKKLIDISQILPELKEFDYKGYLYKTYKEKLFIGINKLEEYLSKIDKDGIERIKQKIKLLKESDIYSIRIKKVGEDYGEVYNITVKAENEFNHNYVVWTKHYTPIVVFNCHAAIVSRELGTPCVVGTKKATKVLKDGMIVTVDGEKGIVYEGEIKKVEEKEKKQEVVVQQAPIITATEVKVNVSMPEVAERAAATGADGVGLLRAEHMILGLGKHPRKILEEEGEEALIEALMEGIRKVADAFYPRPVTYRTLDAPTDEFRGLEGGENEPIEHNPMLGWRGIRRDLDEVDILKCELKAIKRLREEGYKNIEIMIPLVTHPDEVRRVKEIMREVGLEPCKDIPFGIMVETPAAALIIEDFIKEGINFVSLGTNDLTQYTIAIDRNNELVSKYYKEDHPAVLKLVEHVIKTCKKHGIKTSICGQAGSRPHIVEKLVEWGIDSVSANIDAVETIRRVVARTEQKVILNYIRKSYVERE

SEQ ID NO: 491 - protein, 1634 aa, Methanococcus jannaschii (Methanocaldococcus jannaschii DSM 2661)
  Mja Pol-1 precursor
MGMSMGKIKIDALIDNTYKTIEDKAVIYLYLINSILKDRDFKPYFYVELHKEKVENEDIEKIKEFLLKNDLLKFVENIEVVKKIILRKEKEVIKIIATHPQKVPKLRKIKECEIVKEIYEHDIPFAKRYLIDNEIIPMTYWDFENKKPVSIEIPKLKSVAFDMEVYNRDTEPNPERDPILMASFWDENGGKVITYKEFNHPNIEVVKNEKELIKKIIETLKEYDVIYTYNGDNFDFPYLKARAKIYGIDINLGKDGEELKIKRGGMEYRSYIPGRVHIDLYPISRRLLKLTKYTLEDVVYNLFGIEKLKIPHTKIVDYWANNDKTLIEYSLQDAKYTYKIGKYFFPLEVMFSRIVNQTPFEITRMSSGQMVEYLLMKRAFKENMIVPNKPDEEEYRRRVLTTYEGGYVKEPEKGMFEDIISMDFRCHPKGTKVVVKGKGIVNIEDVKEGNYVLGIDGWQKVKKVWKYEYEGELINVNGLKCTPNHKIPLRYKIKHKKINKNDYLVRDIYAKSLLTKFKGEGKLILCKDFETIGNYEKYINDMDEDFILKSELIGILLAEGHLLRRDIEYFDSSRGKKRISHQYRVEITVNEDEKDFIEKIKYIFKKLFNYELYVRRKKGTKAITLGCAKKDIYLKIEEILKNKEKYLPNAILRGFFEGDGYVNTVRRAVVVNQGTNNYDKIKFIASLLDRLGIKYSFYTYSYEERGKKLKRYVIEIFSKGDLIKFSILISFISRRKNNLLNEIIRQKTLYKIGDYGFYDLDDVCVSLESYKGEVYDLTLEGRPYYFANGILTHNSLYPSIIISYNISPDTLDCECCKDVSEKILGHWFCKKKEGLIPKTLRNLIERRINIKRRMKKMAEIGEINEEYNLLDYEQKSLKILANSILPDEYLTIIEEDGIKVVKIGEYIDDLMRKHKDKIKFSGISEILETKNLKTFSFDKITKKCEIKKVKALIRHPYFGKAYKIKLRSGRTIKVTRGHSLFKYENGKIVEVKGDDVRFGDLIVVPKKLTCVDKEVVINIPKRLINADEEEIKDLVITKHKDKAFFVKLKKTLEDIENNKLKVIFDDCILYLKELGLIDYNIIKKINKVDIKILDEEKFKAYKKYFDTVIEHGNFKKGRCNIQYIKIKDYIANIPDKEFEDCEIGAYSGKINALLKLDEKLAKFLGFFVTRGRLKKQKLKGETVYEISVYKSLPEYQKEIAETFKEVFGAGSMVKDKVTMDNKIVYLVLKYIFKCGDKDKKHIPEELFLASESVIKSFLDGFLKAKKNSHKGTSTFMAKDEKYLNQLMILFNLVGIPTRFTPVKNKGYKLTLNPKYGTVKDLMLDEVKEIEAFEYSGYVYDLSVEDNENFLVNNIYAHNSVYGYLAFPRARFYSRECAEIVTYLGRKYILETVKEAEKFGFKVLYIDTDGFYAIWKEKISKEELIKKAMEFVEYINSKLPGTMELEFEGYFKRGIFVTKKRYALIDENGRVTVKGLEFVRRDWSNIAKITQRRVLEALLVEGSIEKAKKIIQDVIKDLREKKIKKEDLIIYTQLTKDPKEYKTTAPHVEIAKKLMREGKRIKVGDIIGYIIVKGTKSISERAKLPEEVDIDDIDVNYYIDNQILPPVLRIMEAVGVSKNELKKEGAQLTLDKFFK

SEQ ID NO: 492 - protein, 1634 aa, Methanococcus jannaschii (Methanocaldococcus jannaschii DSM 2661)
  Mja Pol-2 precursor
MGMSMGKIKIDALIDNTYKTIEDKAVIYLYLINSILKDRDFKPYFYVELHKEKVENEDIEKIKEFLLKNDLLKFVENIEVVKKIILRKEKEVIKIIATHPQKVPKLRKIKECEIVKEIYEHDIPFAKRYLIDNEIIPMTYWDFENKKPVSIEIPKLKSVAFDMEVYNRDTEPNPERDPILMASFWDENGGKVITYKEFNHPNIEVVKNEKELIKKIIETLKEYDVIYTYNGDNFDFPYLKARAKIYGIDINLGKDGEELKIKRGGMEYRSYIPGRVHIDLYPISRRLLKLTKYTLEDVVYNLFGIEKLKIPHTKIVDYWANNDKTLIEYSLQDAKYTYKIGKYFFPLEVMFSRIVNQTPFEITRMSSGQMVEYLLMKRAFKANMIVPNKPDEEEYRRRVLTTYEGGYVKEPEKGMFEDIISMDFRCHPKGTKVVVKGKGIVNIEDVKEGNYVLGIDGWQKVKKVWKYEYEGELINVNGLKCTPNHKIPLRYKIKHKKINKNDYLVRDIYAKSLLTKFKGEGKLILCKDFETIGNYEKYINDMDEDFILKSELIGILLAEGHLLRRDIEYFDSSRGKKRISHQYRVEITVNEDEKDFIEKIKYIFKKLFNYELYVRRKKGTKAITLGCAKKDIYLKIEEILKNKEKYLPNAILRGFFEGDGYVNTVRRAVVVNQGTNNYDKIKFIASLLDRLGIKYSFYTYSYEERGKKLKRYVIEIFSKGDLIKFSILISFISRRKNNLLNEIIRQKTLYKIGDYGFYDLDDVCVSLESYKGEVYDLTLEGRPYYFANGILTHNSLYPSIIISYNISPDTLDCECCKDVSEKILGHWFCKKKEGLIPKTLRNLIERRINIKRRMKKMAEIGEINEEYNLLDYEQKSLKILANSILPDEYLTIIEEDGIKVVKIGEYIDDLMRKHKDKIKFSGISEILETKNLKTFSFDKITKKCEIKKVKALIRHPYFGKAYKIKLRSGRTIKVTRGHSLFKYENGKIVEVKGDDVRFGDLIVVPKKLTCVDKEVVINIPKRLINADEEEIKDLVITKHKDKAFFVKLKKTLEDIENNKLKVIFDDCILYLKELGLIDYNIIKKINKVDIKILDEEKFKAYKKYFDTVIEHGNFKKGRCNIQYIKIKDYIANIPDKEFEDCEIGAYSGKINALLKLDEKLAKFLGFFVTRGRLKKQKLKGETVYEISVYKSLPEYQKEIAETFKEVFGAGSMVKDKVTMDNKIVYLVLKYIFKCGDKDKKHIPEELFLASESVIKSFLDGFLKAKKNSHKGTSTFMAKDEKYLNQLMILFNLVGIPTRFTPVKNKGYKLTLNPKYGTVKDLMLDEVKEIEAFEYSGYVYDLSVEDNENFLVNNIYAHNSVYGYLAFPRARFYSRECAEIVTYLGRKYILETVKEAEKFGFKVLYIDTDGFYAIWKEKISKEELIKKAMEFVEYINSKLPGTMELEFEGYFKRGIFVTKKRYALIDENGRVTVKGLEFVRRDWSNIAKITQRRVLEALLVEGSIEKAKKIIQDVIKDLREKKIKKEDLIIYTQLTKDPKEYKTTAPHVEIAKKLMREGKRIKVGDIIGYIIVKGTKSISERAKLPEEVDIDDIDVNYYIDNQILPPVLRIMEAVGVSKNELKKEGAQLTLDKFFK

SEQ ID NO: 493 - protein, 1613 aa, Methanococcus jannaschii (Methanocaldococcus jannaschii DSM 2661)
  Mja r-Gyr precursor
MIPMIYKEMCPNCNGEITSERLAIGVCEKCLKEENVFEKLKLCEKLREEKTLKNLKDYCIIWNEFKEFEEFVKDLGFELLSIQKMWAKRVLKNKSFSIVVPTGVGKSFFGILMSLFLAKKGKRCYIILPTTLLVKQTYEKISSLTEKNNLNIRVVAYHSELSTKEKKEVKERIENNDYDVLITTSNYLTKNMPKCKFDFVFVDDVDALLKASKNIDRTLKLLGFDEEIINEAYKIIYLIKIGKIEDAMKKREILKKKISKIKHGCLIIASATGKSYGDRVKLYRELLDFEIGFGMNKLRDVVDIYDEEFSKEKILEYIKLFGSGGIVFVSIDYGVEKAQEIEKYLLENNIKAKLIHSKDKKGFDDFREGKIDVLIGVASYYGVLVRGLDMPERVRYAIFYGIPKFKIRLKEYINSLKEKGELKEDINIEGKTEEEIRQIITEKLKIKNFSLRKEDDEYLLLIPDVKTYIQASGRTSRMTEFGLTKGASIVLVDEKEIFEALKKYMLFMYESEFKRIDEVNLEELIKKIDEDREKIKVGRAKGKVPDLLKSVLMVVESPNKARTIANFFGKPSVRKINNRNVYEVCIGDLNLIITASGGHVFDLVTKEGFYGVKIENNLYIPIYTSIKKVNGEQFTDQKDLEELIKQLMEKGERVNAMDAKENIEIIREIADEVDAIFIATDIDTEGEKIGYDIAINALPFNRNIYRVGFNEITKRAILKAVESFKKGEELSLDENKVKGQVVRRIEDRWIGFRLSQKLWEVFNKNYLSAGRVQTPVLGWIIERYNEHKIKVPYLSLKLENDIYIGKIWEDEFDKDEVEVEVKVYEKEIPPLPPFTTDTLLEEATKRFGLSTDEIMSIAQELFELGLCLTPDTYVVLGDGRIETIEDIVNAKERNVLSLDLDNLSIKIDTAIKFWKLRYNGNLSKITLSNNYELKATPDHCLLVLRDNQLKWIPAKDIKENDYIAMPFNYKVERKPISLLNLLKYLDITDVLIEFDENSTIFEKIAEYIRNNIKTSTKYKYLRNRRVPLKYLIEWNFDLDEIEKEAKYIYKSVAGTKKIPLFKLDERFWYFAGLVLGDGSIQDSKIRIAQTPLKDVKSILDETFPFLHNWISGNQVIISNPIIAEILEKLGMRNGKLNGIIFSLPESYINALIAGYFDTDGCFSLLYDKKAKKHNLRMVLTSKRRDVLEKIGIYLNSIGILNTLHKSREVYSLIISNKSLETFKEKIAKYLKIRKEAFINGYKTYKKEHEERFECDLLPVKEVFKKLTFEKGRKEILKDSKIHIENWYKEKTNNIPREKLKTVLRYANNSEHKEFLEKIVNGDISFVRVKKVENIPYDGYVYDLSIKHNQNFISNGVISHNCTYHRTSSTRVSLDGMRVAREYLKLNNLEDYLKNREYFMEGAHECIRPTKPMNTDELIEFLKENNIKLTKNHIKVYDLIFRRFIASQMKEAVVEYEEIYIKDLDEKVEGYVDIKFDGWSRIYNLKLKKLPRIEKSSLKVLDKKLRKIPKVPLYDEGEVVKLMKERGIGRPSTYAQIIKKLLDRGYVVKSKDKNKLIPTKLGIEVYNYLINNYPHLISEERTRELEEIMDKIENGEVDYIEVLKALHEEILSIR

SEQ ID NO: 494 - protein, 1847 aa, Methanococcus jannaschii (Methanocaldococcus jannaschii DSM 2661)
  Mja RFC-1 precursor
MVIIMEKPWVEKYRPKTLDDIVGQDEIVKRLKKYVEKKSMPHLLFSGPPGVGKCLTGDTKVIVNGEIREIGEVIEEISNGKFGVTLTNNLKVLGIDEDGKIREFDVQYVYKDKTNTLIKIKTKMGRELKVTTYHPLLINHKNGEIKWEKAENLKVGDKLATPRYILFNESDYNEELAEWLGYFIGDGHADKESNKITFTNGDEKLRKRFAELTEKLFKDAKIKERIHKDRTPDIYVNSKEAVEFIDKLGLRGKKADKVRIPKEIMRSDALRAFLRAYFDCDGGIEKHSIVLSTASKEMAEDLVYALLRFGIIAKLREKVNKNNNKVYYHIVISNSSNLRTFLDNIGFSQERKLKKLLEIIKDENPNLDVITIDKEKIRYIRDRLKVKLTRDIEKDNWSYNKCRKITQELLKEIYYRLEELKEIEKALEENILIDWDEVAERRKEIAEKTGIRSDRILEYIRGKRKPSLKNYIKIANTLGKNIEKIIDAMRIFAKKYSSYAEIGKMLNMWNSSIKIYLESNTQEIEKLEEIRKTELKLVKEILNDEKLIDSIGYVLFLASNEIYWDEIVEIEQLNGEFTIYDLHVPRYHNFIGGNLPTILHNTTAALCLARDLFGENWRDNFLELNASVSKDTPILVKIDGKVKRTTFEELDKIYFETNDENEMYKKVDNLEVLTVDENFRVRWRKVSTIIRHKVDKILRIKFEGGYIELTGNHSIMMLDENGLVAKKASDIKVGDCFLSFVANIEGEKDRLDLKEFEPKDITSRVKIINDFDIDEDTAWMLGLYVAEGAVGFKGKTSGQVIYTLGSHEHDLINKLNDIVDKKGFSKYENFTGSGFDRKRLSAKQIRILNTQLARFVEENFYDGNGRRARNKRIPDIIFELKENLRVEFLKGLADGDSSGNWREVVRISSKSDNLLIDTVWLARISGIESSIFENEARLIWKGGMKWKKSNLLPAEPIIKMIKKLENKINGNWRYILRHQLYEGKKRVSKDKIKQILEMVNVEKLSDKEKEVYDLLKKLSKTELYALVVKEIEIIDYNDFVYDVSVPNNEMFFAGNVPILLHNSDERGIDVIRTKVKDFARTKPIGDVPFKIIFLDESDALTADAQNALRRTMEKYSDVCRFILSCLTGDAKITLPDEREIKIEDFIKMFEERKLKHVLNRNGEDLVLAGVKFNSKIVNHKVYRLVLESGREIEATGDHKFLTRDGWKEVYELKEDDEVLVYPALEGVGFEVDERRIIGLNEFYEFLTNYEIKLGYKPLGKAKSYKELITRDKEKILSRVLELSDKYSKSEIRRKIEEEFGIKISLTTIKNLINGKIDGFALKYVRKIKELGWDEITYDDEKAGIFARLLGFIIGDGHLSKSKEGRILITATINELEGIKKDLEKLGIKASNIIEKDIEHKLDGREIKGKTSFIYINNKAFYLLLNFWGVEIGNKTINGYNIPKWIKYGNKFVKREFLRGLFGADGTKPYIKKYNINGIKLGIRVENISKDKTLEFFEEVKKMLEEFEVESYIKVSKIDNKNLTELIVKANNKNYLKYLSRISYAYEKDNFARLVGEYLRIKEAYKDIILKEIAENALKEADGEKSLRELARKYNVPVDFIINQLKGKDIGLPRNFMTFEEFLKEKVVDGKYVSERIIKKECIGYRDVYDITCHKDPSFIANGFVSHNCNYPSKIIPPIQSRCAVFRFSPLKKEDIAKKLKEIAEKEGLNLTESGLEAIIYVSEGDMRKAINVLQTAAALSDVIDDEIVYKVSSRARPEEVKKMMELALDGKFMEARDLLYKLMVEWGMSGEDILNQMFREINSLDIDERKKVELADAIGETDFRIVEGANERIQLSALLAKMALMGR

SEQ ID NO: 495 - protein, 1847 aa, Methanococcus jannaschii (Methanocaldococcus jannaschii DSM 2661); identical to SEQ ID NO: 494
  Mja RFC-2 precursor

SEQ ID NO: 496 - protein, 1847 aa, Methanococcus jannaschii (Methanocaldococcus jannaschii DSM 2661); identical to SEQ ID NO: 494
  Mja RFC-3 precursor

SEQ ID NO: 497 - protein, 1750 aa, Methanococcus jannaschii (Methanocaldococcus jannaschii DSM 2661)
  Mja RNR-1 precursor
MISAKDFAEKVMEFYVIKRDKRKEKFNVNKLAKSLINSGVNYGDLDTIISEVCAKVYNGITTDELKDIVYNVLKKIDKDVAENYRNGIILKVRTSEKEFESFDKEKIAKALIRETGADEETARKIADEVERELKKLKVKYLTAPMIREIVNYKLIEYGFEELRHKHTRLGMPVYDITKLIKSGSRENANLMYNPESIHKWVADETMKQYALLAIFPKHIADAHIKGDIHLHDLEYAATRPVCLQHDLRPFFKYGLKVDGTGLHTSVSKPAKHPEVAIQHAAKVMMAAQTNMSGGQSIDEFNVWLAPYVRGLSYEKIKQLMQMFIYELNQMYVARGGQSLGRDELIFIKEGDKLKVCKIGEAIDEFMEKYKDKIIVDGDTEILYLDGIAEVYTISVNVKTGKAEFKRVYAISRHKPRGKVYKVIGKDGTSIIVTEDHSLFNYDENGNLVCVKPRQMKHIIRNFNNPYDVEYRIGDYIETNYQRTDSKYNSRQNDIPEKLKITKELCQFLGLFVAEGSYITNGISITTKDDDIAKFIERFVKEQINENIAVKRYEDSVRFVNKGFYRFLKEHINGKAINKNSPEFILKGDKEMKLAFLGGLISGDGYVSKDGRVQIYTTSEQLLGQLHLLLSDLGMIYSITKIKEEGEKIEIKRNEIVRNYKLYVIEIAKNCTEDLKPYVIPKYKKERIKPANYDQLPYDYRIIKEHLRKITDKKPYNDYAWKSNNRKLKLNTLEKIEQLNPHLREEINKFKLNIPFEIKEIKEIDYNGYVYDLSVEDNENFITATGILCHNTIFSSINLELEIPEFLKDKPAVIAGTTRGTYGDYEEEAKLILEALVDVMMEGDAMGKPFLFPNFIIKLRENAFKDENKELMYKIHQLSAKFGIPYFINMLPDWQVTNTNAMGCRTRLSGNWTGDAEIDTLRTGNMQWYSLNLPRIAYEANGDDTKLFEILHERLEILKEALLIKHEVTKERLYVDNLMPFLTQEFDGESYYRYENTTKTFGFVGLNEMLKYHLGEELHESKDAVKFGEKVIEYIREYADKLKEETGLRWTVTQTPAESSLPYDEKILIFENNEYKLVKIGEFVEKYLNRYKDRAITYGDNNIEVYIKDENIYAPSFDKDGKIVLKPITHAIRHRGKEIYEIELESGKKVRVTGDHSVFTINDNLDVVEVKASDLKVGDFIITPKIIPSISKDKIYLSEIVKNKDKYYVKIKDHIKFIEEHEEILKESYKEYKTKWKDLKPVLKKKNAFRLDLIEDLVDKEKIEKISYGHANYINNKIKLDEKFGYLIGAFLSEGHWNDKCVEISSTNKEFIENLVEIIEEILGKDAYYITVKGDKRRYKDLYVIGLNKTVAMIFESLGLNKLSSNKEIPSILLSNETFLKGLIKGYIDGDGSIYVDESKRDYSIRLYTTSETLRDTLCLALKILGINYRLSIDKKSKVNENWRDCYVIKITGKENIEKLLDVEIKNNGGKDVIPKIAEKFKEIINQYSQREWKERFGIDVNNLHIWEDLKKGYMSRYRAKKVLNIMKNVKEIEEKYGRLLDKIGQLIDNDLLFERIKSIRVLDEIPEYVYDISVEGTENFIGGEGFICLHNTAGRFARLDYKYYKEETISVVRGDLNDVDSLYYTNSSHVRVDAPITLGEKVRIEEKFHPLCNGGHIMHIWNIESAADPEVLMDITKKITKTHIGFWTYTKNLSVCNRCGISMGGLRDRCINCGSEDVAKFSRITGYLQNISNWNRAKQKELEDRKLPRI

SEQ ID NO: 498 - protein, 1750 aa, Methanococcus jannaschii (Methanocaldococcus jannaschii DSM 2661); identical to SEQ ID NO: 497
  Mja RNR-2 precursor

SEQ ID NO: 499 - protein, 1345 aa, Methanococcus jannaschii (Methanocaldococcus jannaschii DSM 2661)
  Mja rPol A' precursor
MVILMERYEIPKEIGEIMFGLLSPDYIRQMSVAKIVTPDTYDEDGYPIDGGLMDTRLGVIDPGLVCKTCGGRIGECPGHFGHIELAKPVIHIGFAKTIYKILKAVCPHCGRVAISETKRKEILEKMEKLERDGGNKWEVCEEVYKEASKVTICPHCGEIKYDIKFEKPTTYYRIDGNEEKTLTPSDVREILEKIPDEDCILLGLNPEVARPEWMVLTVLPVPPVTVRPSITLETGERSEDDLTHKLVDIIRINNRLEENIEGGAPNLIIEDLWNLLQYHVNTYFDNEAPGIPPAKHRSGRPLKTLAQRLKGKEGRFRYNLAGKRVNFSSRTVISPDPCLSINEVGVPEVVAKELTVPEKVTKYNIERIRQLLRNGSEKHPGVNYVIRKMIGRDGTEQEYKVKITESNKDFWAENIREGDIVERHLMDGDIVLYNRQPSLHRMSIMAHRVRVLPYRTFRHNLCVCVDGDTTVLLDGKLIKIKDLEDKWKDVKVLTSDDLNPKLTSLSKYWKLNADEYGKKIYKIKTELGREIIATEDHPFYTTNGRKRCGELKVGDEVIIYPNDFPMFEDDNRVIVDEEKIKKVINNIGGTYKNKIINELKDRKLIPLTYNDQKASILARIVGHVMGDGSLIINNKNSRVVFRGDIEDLKTIKEDLKELGYDGEEIKLHEGETEITDYNGKKRIIKGKGYSFEVRKKSLCILLKALGCVGGDKTKKMYGIPNWIKTAPKYIKKEFLSAYFGSELTTPKIRNHGTSFKELSFKIAKIEEIFDEDRFIKDIKEMLKEFGIELKVRVEEGNLRKDGYKTKVYVASIYNHKEFFGRIGYTYANKKETLARYAYEYLLTKEKYLKDRNIKKLENNTKFITFDKFIKEKCLKNGFVKEKIVSIEETKVDYVYDITTISETHNFIANGFLTGNCPPYNADFDGDEMNLHVPQSEEARAEAEALMLVEKHILSPRFGGPIIGAIHDFISGAYLLTSNYFTKDEATLILRSGGIKDELWEPDKVENGVPLYSGKKIFSKALPKGLNLRYKAKICRKCDVCKKEECEYDAYVVIKDGELIKGVIDKNGYGAEAGLILHTIVKEFGPEAGRKFLDSATKMAIRAVMLRGFTTGIDDEDLPEEALKEIEKVLDEAEEKVKEIIEKYERGELELLPGLNLEESREAYISNVLREARDKAGAIAERYLGLDNHAVIMAVTGARGNILNLTQMAACLGQQSVRGKRIFRGYRGRVLPHFEKGDLGARSHGFVRSSYKKGLSPTEFFFHAMGGREGLVDQAVRTAQSGYMQRRLINALQDLKTEFDGTVRDSRGIMIQFKYGEDGIDPMLADRGKAVNIDRIIDKVKMKYNQ

SEQ ID NO: 500 - protein, 968 aa, Methanococcus jannaschii (Methanocaldococcus jannaschii DSM 2661)
  Mja RtcB (Mja Hyp-2) precursor
MKDVLKRVSDVVWELPKDYKDCMRVPGRIYLNEILLDELEPEVLEQIANVACLPGIYKYSIAMPDVHYGYGFAIGGVAAFDQREGVISPGGVGFDINCLTSNSKILTDDGYYIKLEKLKEKLDLHIKIYNTEEGEKSSNILFVSERYADEKIIRIKTESGRVLEGSKDHPVLTLNGYVPMGMLKEGDDVIVYPYEGVEYEEPSDEIILDEDDFAEYDKQIIKYLKDRGLLPLRMDNKNIGIIARLLGFAFGDGSIVKENGDRERLYVAFYGKRETLIKIREDLEKLGIKASRIYSRKREVEIRNAYGDEYTSLCEDNSIKITSKAFALFMHKLGMPIGKKTEQIYKIPEWIKKAPKWVKRNFLAGLFGADGSRAVFKNYTPLPINLTMSKSEELKENILEFLNEIKLLLAEFDIESMIYEIKSLDGRVSYRLAIVGEESIKNFLGRINYEYSGEKKVIGLLAYEYLRRKDIAKEIRKKCIKRAKELYKKGVTVSEMLKMDEFRNEFISKRLIERAVYENLDEDDVRISTKFPKFEEFIEKYGVIGGFVIDKIKEIEEISYDSKLYDVGIVSKEHNFIANSIVVHNCGVRLIRTNLTKEEVQSKIKELIKTLFKNVPSGLGSKGILKFSKSVMDDVLEEGVRWAVKEGYGWKEDLEFIEEHGCLKDADASYVSDKAKERGRVQLGSLGSGNHFLEVQYVEKVFDEEAAEIYGIEENQVVVLVHTGSRGLGHQICTDYLRIMEKAAKNYGIKLPDRQLACAPFESEEGQSYFKAMCCGANYAWANRQMITHWVRESFEEVFKIHAEDLEMNIVYDVAHNIAKKEEHIIDGRKVKVIVHRKGATRAFPPKHEAIPKEYWSVGQPVIIPGDMGTASYLMRGTEIAMKETFGSTAHGAGRKLSRAKALKLWKGKEIQRRLAEMGIVAMSDSKAVMAEEAPEAYKSVDLVADTCHKAGISLKVARMRPLGVIKG

SEQ ID NO: 501 - protein, 673 aa, Methanococcus jannaschii (Methanocaldococcus jannaschii DSM 2661)
  Mja TFIIB precursor
MVWLMEALKTKENETTKEKKLTTKVEKSEKKEENVREEEIVCPICGSKEVVKDYERAEIVCAKCGCVIKEKLFDIGPEWRAFDHEQKIKRCRVGAPMTYSVDYNEPIIIKENGEIKVVKIGELIDKIIENSENIRREGILEIAKCKGIEVIAFNSNYKFKFMPVSEVSRHPVSEMFEIVVEGNKKVRVTRSHSVFTIRDNEVVPIRVDELKVGDILVLAKELPNIEEDIEIDKKFSKILGYIIAEGYYDDKKIVLSYDYNEKEFINETIDYFKSLNSDITIYSKDLNIQIEVKNKKIINLLKKLRVKNKRIPSIIFKSPYEIKKSFIDGIFNGKDAKVFVSKELAEDVIFLLLQIKENATINKKSINDIEVYEVRRITNIYTNRKLEKLINSDFIFLKIKEINKVEPTSGYAYDLTVPNAENFVAGFGGFVLHNTIHDKGLSTVIDWRNKDSYGKDLSANKRAQLYRLRKWQRRIRVSDAAERNLAFALSELDRITSKLGLPRHVRENAAIIYRGAVEKGLIRGRSIEGVVAAAIYAACRRCRVPRTLDEIAEASRVDRKEIGRTYRFLARELNIKLTPTNPIDYVPRFASELGLPGEVESKAIQILQQAAEKGLTSGRGPTGVAAAAIYIASVLLGCRRTQREVAEVAGVTEVTIRNRYKELTEHLDIDVTL

SEQ ID NO: 502 - protein, 895 aa, Methanococcus jannaschii (Methanocaldococcus jannaschii DSM 2661)
  Mja UDP GD precursor
MNISVIGTGYVGLIQAVGLAEFGFDVVGIDIDESKVKALNRGECPLYEEGLEGLLKKHVNKNLTFTTSYKPIKDSDVIFLCVGTPQDKDGNADLRFLFSAVEKIKETIDKEDYKVIVIKSTVPVGTNRRVKELLKDYNVDVVSNPEFLREGIAVYDFFNPERVILGFENLNNKKPIEIMEEVYKYFKDKNIPFVITNWETAELIKYASNAFLATKISFINELAKLSDKVKADIKTISYAMGLDPRIGNKFLNAGIGYGGSCFHPDEVLFIDRGRGLECITFKELFELEDKDNVKILSFDGEKLSLKKLKLASKRYYNDDLITLRFNLGREIKITKDHPVVILEDGELKIKLTSDVKEGDKVILPYGNFGEEREIEIDILEELSKTDLIEKVWIHNKDLATNEFNIIKPYLSNKYPHDVKRNGTIRAKDILPIKEILDKYGSKNRLFTAKSKSTTIPYKIKIDKDFARLIGYYLSEGWISKDYGRNGVVRKRIGLCFGIHEEEYINDVKNILNKLGIKYIEKIKDGSHSILISSKILAYVFENILNCGINCYNKNIPPQMFNAKEEIKWEFLKGLFRGDGGIVRLNNNKNLNIEFATVSKKMAHSLLILLQLLGIVASVKKCYNNKSTTMAYIIRINGLEQVKKIGELFGKKWENYKDIAESYKRNIEPLGYKKSDNFAILEVKEIIKEHYSGYVYSVETENSLLITSYGILIHNCFPKDVKALIKQFENNNIEPILIKATDIVNEEQIKWFFEKIKNYYGNLNGKTFAVLGLAFKPNTDDLRESRAIKLIDMLLESGAIVKGFDYVEKARENTINMYKLDKSKGFYGYNLYVLDDLYETVKNVDGIIITVEYDFNKEDWEKIGNLVKEKVVFDGRNILDVEKIKKLGFKYYGVGR

SEQ ID NO: 503 - protein, 1249 aa, Methanopyrus kandleri AV19
  Mka CDC48 precursor
MPGLPIKLRVEKAYPEDVGKRAVRMDKASRDRIGVSEGDLVKITGSKTTVARVLPAKKEDVGKGIVRMDKYERQNAGASVGEPVEVDRAEEKVAKRVELMPTERVVVPVQAGLKEEVEEELTREHEQDILEQIKRYLRSRAQQTPIPATHRDVIPLEVQGKTIAGHVLIKFPDSLLVVGIEPEDATVIGPETEIEVKPYSEDLAKAAEIPDVTYDDIGGLDREIELIREYVELPLKRPELLKELGIKPPKGVLLYGPPGTGKTLLAKAVANECGAKFYSINGPEIMSKYYGESEARIREVFEEARKNAPAIIYIDEIDAIAPKRGETGEVERRVVAQLLTLMDGLSEDERVVVLASTNRPDDIDPALRRPGRFDKEIEIGVPDKEGRKEILQIHTRDMPLADDVDLDKLAELTHGFTGADLEALCKSAGLKALRRAIRKIGAKLAEKGEKEEREVAVKVSELSDEELMEVLEKGLDRARIPEEKKRALRRVLREAEEEEKEEVAYTDALDKVLEAEELPEIREELKVTMRDFMEALKEIEPSALREVIVEVPDVSWDDVGGLEDVKQELKEAVEYPLKYPEVYEKLGTRPPKGILLYGPPGTGKTLLAKAVANESDANFIAVRGPEVLSKWVGESIPGDEVVWAKVDGEAKLIPIEDLYELWKEGRDVEVAALTEEGVVWSSVDRVARHRRRTGLVKIITRTGREVIVTEDHSVFTVRDGKIVDVPTSELSEGDWIVLPARLPAGDSDEIDGIKIDEDLAFLLGLYVAEGSLTNQKDAVRIHNKDPEVIEEIDRIVREKGWEGRYYESDHSYWIKSRKLRQLCEKLGTKAREKRLGPLLSLKPELLAAALRGYYTGDGSFSVKPHGRSAIIEATTVSKRLADELLVALQILDIVARRYECDDTKGSTRYRVMITKSEYIRTFVEKVGFAQSEKNERIRKFLAERKWTRGRSDIPTELIGSPYTYVEVEYISDRVAADGGLMKAELEHLYFDKIKEIVPLDRDDEYVYDVVEVKLGHNFVGGQGVLLHNSEKKIREIFQKARQTAPCVIFFDEIDAIAPKRGTEVGGSRVTERIVNQLLTEMDGIEATEDVFVIAATNRPDIIDEALLRPGRFDRIVYVPPPDEEAMKEIVKIHTRDMPLAEDLTVDDIVEILRRREREEDAKYTGADIEAVCMEAAMLALREVLDELERIEKESETEEELEARKEALLEELRVERRHFEKAVEKVPPSVPKEKLEEYEKLKEEYQRLAG

SEQ ID NO: 504 - protein, 635 aa, Methanopyrus kandleri AV19
  Mka RFC precursor
MAEHELRVLEIPWVEKYRPKRLDDIVDQEHVVERLKAYVNRGDMPNLLFAGPPGTGKTTAALCLARELFGEHWRDNFLELNASVSADTPILVRRGGEVLRVTFEDLDSWYFGDRGGEYVDVSDLEVLTVDRNFRVTWARVSKLIRHRARKILRVHLEDGTIELTGNHAVMVLDEGGLRAVKASEIEEGSFLLSFVAELDEQPTDGGTVVTSVGSGSRVSDTTYELPVEVRVELLRELADDGVIEASEDVSVDLAWLARISGVESRVTDDGVELVWETRTGDLLPADPVLKLVERLESDLVDDLESWVFDGRVSKEAVRKVLSSVDAKNLRGDARRAYRMLRTLVRSDVHAVKVEDLDVMDYDGYVYDVSVPGNEMFFAGEVPVLLHNSDERGIDVIRTKVKNFARTRPMGGARFKIIFLDEADNLTRDSQQALRRIMEMYSDACRFILAANYSSAIIDPIQSRCVVFKFTKLPESAIKERLRKIAESEGVEITEDALDAIVYVSEGDMRRAINVLQAAAALGREIDEDTVFQIAATARPEEVREMIHHAWNGDFERARELLHELLTRYGMSGEDVVRQVHREIFDMDEIPEEAIPELVNAVGDFEYRLIRGSDERIQLEALLARIHALGNEYSGG

SEQ ID NO: 505 - protein, 988 aa, Methanopyrus kandleri AV19
  Mka RtcB precursor
MAPKSMLKHIRNNVVWELPEDYKGCMKVPGRIYATEKLIDGMEKGVFDQVANVACLPGIYGYSIALPDAHYGYGFPIGGVAAFDVEEGVVSPGGVGYDINCLAPGTKILTEHGCWVKVEDLPKMLTDQKLKVYDVDEGREDDSEIKFVMERGIEEDERAVVLVTESGLTIEGSEDHPVLTPEGYVELGEIEEGDLVVVYPFEGVEYEEKEGTILDESDFEDVDPQVLRYLEERDLIPLRWSDPKVGTLARILGFAMGDGHLGEQAGRLTLSFYGDERTLRELKRDLESLGVKANLHVRKRRYEIETASGRYEGEATSVELRVASRSFALLMEKLGMPRGRKVETPYKVPDWIKEAPLWVKRNFLAGLFAADGSVVKFKRYTPLPINLTQAKVEELEENLREFMNDVAKLLREFGIETTLYEVKSKKNVVYKLAIVGEENIKRFLGKVGYEYDPEKKVEGLAAYAYLKLKERVKKDRKEAAETAAEVYEETGSITKAHEAVADVVNRRFVERVVYDGGISSVRVPEDFPTFERFKEERVLAGGFVIEEVVEVKGVEPEYDRFYDIGVCHGAHNFIADGVVVHNCGVRVMKTDLTEDDVRPKLRELLETIFRNVPAGLGSRHRRVRLSTQELRQVMLYGAEWAVEEGFGFDEDLDHIESRGNMTHAYETIGWEEYGPRDDVASKRAIERGRPQLGTLGSGNHFLEVQVVDEIYDKEAAEKMGIREEGQVTIMVHTGSRGFGHQVCSDHLRIMERSMRDVERRFGVRIPDRQLACAAMGTDEAKRYFNAMNAAANYAFANRQMISHWTRESFVEVFGDEYGDADDMGIEVIYDIAHNMAKIEKHPVDGEERWLVVHRKGATRAFSEEALKKHGEPVPFEGLPQPVLIPGDMGTGSYILIGTEKAMEETWGSTCHGAGRTMSRAAAKRKFWGEDVARELERQGILVKAASMPVVAEEAPPAYKDVDEVVRAVAEAGISDPVVRLRPIGVVKG

SEQ ID NO: 506 - protein, 990 aa, Methanopyrus kandleri AV19
  Mka VatB precursor
MAEAERPAGKEYTTISEVSGPLMVVEGVEGAKYGEVVEVETPTGEVRRGQVLEARRDAAVVQVFEGTSGLDTTSTKVRFTGETLRIPVSTDLLGRILNGRGEPIDGGPEIVPEDELDIHGAPINPAARKYPSDFIQTGISAIDGMNTLVRGQKLPIFSGSGLPHNELAAQIARQATVPGEEEEFAVVFAAMGITHEEAAFFRREFEETGALDRAVLILNLADDPSMERIITPRIALTVAEYLAFENDMHVLVILTDMTNYCFAPGTRVITASGDVVEIDEIVERAAETAVDGGLREGSTEVTVGVTNVRTLAAWDGDLTSNDVVAVEKIEAPSRAVRVRTRSGAELVVSEDHKFLVDTEDGPRMVEASELKSGDELYSVRELRVSEKVPTYLELLLEAEDKFYVHPTEEFEEAVAERYGSLAEACREKELPYRAREAKERRYYELSEFARLATAVIESVDEATEYIDYVTAGGRKRVKFSSPRPGKEVMYVAGLIASDGSVDTERGFVMFSNTERELLSAFEEIVTEEFGVDASKTENQNGVTMLRVNSRVLARVFERLADPKTVLKMPRELVAAYLAGYVDGDGHLKDGKIVITTADRERAGDLQLLLKRLGVPSVLRERDGAYDVVVTGHDAAELAEELPLRHPKKAEAAASMSSGRRSSRFDRVSRRFGRLLREVRRKYGVRASDLGSSSTISQIESGERRATRRLALEIVERLEEVVGDVEEVRELRELAEGNYVLDEVVEVETVEYEHEYLYDVTVVPDHTLVVENGIITSNCEALREISAAREEVPGRRGYPGYMYTDLATIYERAGCIRGRKGSITQMPILTMPHDDITHPIPDLTGYITEGQIVLSRDLHRRGIYPPIDVLPSLSRLMDEGIGKGKTREDHPDLSNQLYAAYAEGRDLRDLVAVVGEEALTERDRKFLKFADEFEQRFVKQGRDENRSIEETLDLGWELLAILPERELKRVSDELIEKYHPKYRQKKEEQEE

SEQ ID NO: 507 - protein, 549 aa, Mycobacterium kansasii
  Mkas GyrA precursor
RPARSHAKSARSVAETMGNYHPHGDASIYDTLVRMAQPWSLRYPLVDGQGNFGSPGNVPPAAMRYCVTGDALVRLPFGQSMRIADVVPGARPNSDNAVELKVLDRHGNPVAADRLFHSGDHQTYMVRTAEGYEVTGTANHPLLCLVDVGGVPTLLWKLIEEIHPDDYVALQRTPPMELGPADWHDTMEALLLGAFISEGCVSETRAGFANLDRDYFTMVARAYDAVVGDKRDVYQQTIASGSLQHTLYTQNVTALKQSRLWQILGMRSADTYVPEWMWHSPAAVKRVFLQALFEGDGSCSRRPHNTIQISYNTVSKQLAMDVQQMLLEFGVISRRYLHAAGEYKVVITDRAQAELFPKQIGFGGAKQTELSKILAAMPPCAGRDSDHVPGLARFIRRHCDSRWVDKEWLHKHNIDHLSRWRRDGAEILSHIADPDVRTIATDLTDGRFYYARVASVTDTGVQPVYSLRVDTDDHAFLTNGFVSHNTEARLTPLAMEMLREIDEETVDFIPNYDGRVQEPTVLPSRFPNLLANGSGGIAVGMATNIPPHN

SEQ ID NO: 508 - protein, 604 aa, Mycobacterium leprae, strain TN
  Mle DnaB precursor
MAVVDDLAHSGMDAVPPSEDFGRQPPQDLAAEQSVLGGMLLSKDAIADVLERLRSGDFYRPAHQNVYDAILDLYGRGEPADAVTVAAELDRRGLLRRIGGAPYLHTLISTVPTAANAGYYAGIVAEKALLRRLVEAGTRVVQYGYAGAEGADVAEVVDRAQAEIYDVAECRLSENYVPLEDLLQPTMDDLDAIASNGGISRGAPTGFTELDEVTNGLHPGQMIIVAARPGVGKALALDTPLPTPTGWTAMGDVAVGDELLAVDEAPTRVVAATEVMLGRPCYEIEFSDGTVIVADAQHQWPTSYGIRTSAQLRCGLDIIAAAGSTPRHAGRLTTAAFMAPVLCIDSVRRVRSVPVRCVEVDNAAHLYLAGRGMVPTHNSTLGLDFMRSCSIKHRLASVIFSLEMSKSEIVMRLLSAEAKIKLADMRSGRMTDDDWTRLARRMSEISEAPLYIDDSPNLTMMEIRAKARRLRQKTNLKLVVVDYLQLMTSGKRFESRQVEVSEFSRHLKLLAKELELPVVAISQLNRSPEQRTDKKPMLSDLRESGSLEQDADVVILLHRPDAFDRDDPRGGEADLILAKHRNGPTKTVTVAHQLHLSRFTNMAR

SEQ ID NO: 509 - protein, 711 aa, Mycobacterium leprae, strain TN
  Mle RecA precursor
MAQVPDREKALELAMAQIEKNYGKGSVMRLGDEMCQPISVIPTGSIALDVALGIGGLPRGRIVEIYGPESSGKTTVALHAVANAQAVGGVAAFIDAEHALEPEYAKKLGVDTDSLLVSQPDTGEQALEIADMLIRSGALDIVVIDSVAALVPRAELEGEMGDSYVGLQARLMSQALRKMTGALSNSGTTAIFINQLREKIGVMFGCMNYSTRVTLADGSTEKIGKIVNNKMDVRVLSYDPVTDRIVPRKVVNWFNNGPAEQFLQFTVEKSGSNGKSQFAATPNHLIRTPGGWTEAGNLIAGDRVLAVEPHMLSDQQFQVVLGSLMGDGNLSPNLCDRNGVRFRLLGYGCKQVEYLQWKKALMGNIRHTVRENSMGASFIDFTPLPELVELQRAVYLGDGKKFLSEEYLKALTPLVLAIWYMDDGSFTVGSKRVQERTAGGSGRIEICVDAMTEGTRVRLRDYLCDTHGLDVRLREVGSAGKAVLVFSTAATAKFQSLIAPYVAPSMEYKLLPQFRGRGSVTPQFVEPTQQLVPARVLDVHVKLSTRSMNRFDIEVEGNHNYFVDGVMVHNSPETTTGGKALKFYASVRMDVRRIETLKDGVDAVGNRTRVKIVKNKVSPPFKQAEFDILYGKGISREGSLIDMGVEQGFVRKSGSWFTYEGEQLGQGKENARNFLLENADVANEIEKKIKEKLGIGAVVTDDDILPTPVDF

SEQ ID NO: 510 - protein, 800 aa, Bacteriophage Aaphi23
  MP-Aaphi23 MupF precursor
MLMNLPEILKSQKKWKARKFRTVKTSKRTELWYRQQLKQFVKTMTDDIERALQQPQGSFFMDDAEGFKAISAKALLAYLEKYEKTDRTSQAENIAQGFVSRGDAQNQAEVSTNLKNQTGVDLAGYLRNSPNIAEKVNALTIDNVQLITNISSQYLDKVKSAVTRAMVSGSLNKDLAAQIKAIGQKTEKRAAFIARDQSSKLNAALTQARHEDLGVKKYMWSTAGDERVRDSHEELDGKVFSYDKPPEVGNPGHDFNCFPGQSELKGLPRPEKLYRRWYSGKLTELVTDNGTVLLATPNHPILTSNGIKSIDSVNVGDYLACEIKQTFDTVKLNGKNLIPTIEQVFNSLLLNGVRTSISSSKSGKFHGDFSDSEIEIISIDSFLIDVLNALFIKKLPELGFTNADMVICKALFSTDSHFDLLKCASGSTGSSFMSRFNLLCSLLVAHLTPLELFCLGLGANIGIIGKQIPANNISRDVEMFSNHIFACAALIHGKDFINWQRDRIMSLVAPNFGHRYTDSFETLSKRLLVTTNNSANFGNAQSLGIEFRRVVNKVVTQASCHIYNLQTVSGYYNINSVFVSNCRCVAIPVFDEAQSKAKAQETLSEPVKENLTLSIDKLVEKSKKIEQTITADINNITIKAGGKLVGLENRLKTAPSIKRKIEAEVADGFSKSLSLNKIGDAIRYTTVFKEGDFVTRYKAMQYLLAIKGYKTIIVKNTWKNDSAYTGVNTFIQNEDGDVFEMQYHTQQSFDLKNGLLHKIYKQFRNPKTPFHEKEKLLLEMRKLSSKIKVPKGIELIEDKK

SEQ ID NO: 511 - protein, 903 aa, Mycobacteriophage Bethlehem
  MP-Be DnaB precursor
MAVHYPESLLPAPSHIQGPTWRQYEDGSWFLPEKTLGWQIISWLFEYVNSPAGDGPFVPTLEQARFIAWWYAVDDQGKYAYREGTLRRMKGWGKDPMIGALALAELCGPVAFSHFDDNGNPVGKTRHAAWVTIAAVSQDQPLALNTEVPTPSGWTTVGDLSVGDYVLGSDGQPHRVQRETPVLEGLATYVVRFDDGTEITASASHGWTTQRLTGHGDSYETVTVTTEELAQTVTNSKGRKRHRIPVVGMELPNQELPLDPWFLGLWLGDGATSDSTVSFDYRLRDEYATLLKPLVQEFQTVVWDNPVPGTNVGTFRIKNNDRTQDDKSIRSLLRKAGVLGNKHIPAAYMQAGTDQRFELLRGLIDSDGGIDSVGRAYFVNANRNLVYQFQELVVGLGFRCTVREHGGDGALRAEFNPGNAVRVSNLAYKFERQRPYSSRNRSQHRWVESVTPVESVPVKCIGIDTEDHLFQVSRSRILTHNTKNTFSLFPIMVSKKLKTEYGLSVNRFIIYSEIGGRLEAATASPASMEGNRPTFVVQNETQWWGVGPGGEVNDGHQMAEVIEGNMTKVDGARTLSICNAHRPGDDTVAEMSYLNWLDILAGDAIDTGVLYDALEAPADTPVSEIPFPSDDPEGYEAGVAQLMKGLEIARGDSIWLPLDDILMSVLTAKNDVIESRRKFLNQVNATEESWIAPSEWDRNHDINLPPLRKGERITLGFDGSLSNDHTALTACRVEDGALFLVKVWVPEKYEGHKVPRQDVDAYVRSMFEKYDVVGMRADVKEFEQSVDAWGQDFRRKLKINASPGNPVAFDMRGQQKRFALDCERFRDAVLAGEVKHDNNPVLKAHITNAHQHPTIYDAISIRKPGKESKRKIDAAVTAVLAWGSRQDFLLSKSNTGKGAGLLR

SEQ ID NO: 512 - protein, 572 aa, Mycobacteriophage Bethlehem
  MP-Be gp51 precursor
MTQRIVFLPDTQLPYEARKEMQAVIRFIGDVQPYGVVHIGDILDLPQPSRWNKGTKGEFEGSVYRDADYAKKHLLEPLRKVYDGWIGAHEGNHDCSWTNARAVTRRGFVHVDDLTTDDEVMSVDDQGRTIWQQIDEVVRFPFSGTLYSLGGREINATITANHRVVGLNREKTKWVEHTPTSLPGNKMWVYTAGEGSNEDYPLTDTEIRLAVWGLTDSHRSPDGRWTFYQSGEKAEQVRKLLADAGIEYRERARNRGITEIDGKVLKAPPKTQYEFSLGKVQELDDLLDRGRSELPTWTLSLSQRQARLFLEEYRFTDGTDTTSAGDSYVLYVCKDRMREQLQMLAAANGLRASTTEYRPGHWRLNISNRALSGLYKNTVEEVAYEGEVWCLRVPNGRFFIEDGGKIHLTGNSRARDYLSKNAPALEGTHAFDIDVLLDFDGFGVELLPDFYDIAPGWISTHGHMGKMTLSQIAGSTALNGAKKFGKSVVCGHTHRQAVVSHSFGYGGSVRKTVTGMEVGHLMDMKKANYLKGGAGNWQMGFGMLTVDGKHVKAEIVPILGGKFTVDGRVWEV

SEQ ID NO: 513 - protein, 587 aa, Mycobacteriophage Catera
  MP-Catera gp206 precursor
MGKEGRKSIFRSLAERDLLIPYFRNALLSQEWPDEYTIKVDSSPYYGKGDGYFHPSTHALMPARQLYYHFHPETRDKIVQEDRTITQEMTLTMGSAIHAVVQTQFQMAGLIKGPDDCEVEYVDRTHHVRGRVDFIVHHPNGQVIPVELKSLACSTPILTTNGWSTMGALQDGDEVYAPDGQPTKVIKAHPINLNRPCFKVRFRDGQEVVTDAEHLWQVNDRNNGGRDRVMTTQEIADAPWGGRYRFRVPVTEPLQTPEADLPVDPWLLGAWLGDGDASMVSICSGSQDLDYLISRVEGLGLSHRVNRYGSRAASVYVHGMRAVFSELGLLKNKHIPDRYLTASVAQRRQLLAGLMDSDGTVSDRQVTISMKNERLMRQVLQLVRSLGYRAGFGSRMARLNGRDCGLVYVVRFHTGWGESPFDMPRKRDGWEQATKTSVQNLRLNAIVAVEPVETVPVRCITVAHESSLYVAGEGFVPTHNTQNSRSFDFQDTIKPIWDAQLSLGLHGTGHPLGILLVVESGYPFRMREYRVPRNDQLLTQIFQKFDYVRECIALNKVPEYCCMPQSKEMDACPARYQCWLKDKVEAS

SEQ ID NO: 514 - protein, 887 aa, Mycobacteriophage CJW1
  MP-Mcjw1 DnaB precursor
MEVCGYTLDDIECTEVGAHFCVPRANKAQAFFEEILVHTKGQYTRKKFILEDWQRDDIVRPLFGRVEYSDEFGCYKRRYEIAWIELARKNGKALDVETPILTGNGWKKMGDIQVGDYVHAADGTLARVSYVSERHWRDCFSVQFADGAELVASDHHLWAVNDRLKGERVIDTAELYRTQTYGARGDRRYTVTVPEALDRDEAPLPLDPYILGAWLGDGTATRAEFTSEDPEIFAAIEAAGYPLSYDYASGNARTRGAKGLVAVLRKMGVLGAKHVPQDYLIGSRAQRLALLQGLMDTDGSVITGPNTPRVEFCNTNRDLAEAALFLARSLGWKATLKESRARLNGKDCGPRFRVSWTAYSDMSPFRLQRKSEKLAAAPARATRARTNTITSVTPVPTVETVCIQIDHPSHVFLAGKSLTPTHNTELLAGIMLYLLVADGEQSGEIYGVARDKKQAALAFDVAAQMVKFSPILSKRLKVVDYKKRIYDAKTNSFYDVIAADAKSALGSNPSGCGADEILAWQDGGMWDSLRTGMGSGARVQPLMVASTTAGNDTEGFAGLKHREMERVMEDPDNPDFKHIFVYMRNTPMEEDPWNEECWPHANPALGRFLSWEAMRKQAAEARNNPIAEMAFRQFKLNQWQNSTIRWMRMPAWDECKGTVFKSNKDLFDAFAGQSCWFGLDLAARRDLCSICYLFPQSDGSVDLLWRHWIPESALAKLDRLNDGRFAKEFVPGGWLKVTEGDVLDFDVVYDDIEADAKRFTILGGDADQWSSDPVIQEIEKRTYLYEDIFAYKNDFAHMSDSMHRIFEWTLAKNLRHHGNPLARFCFSACEARVAAYDPNLIRPDKPDRDMAAKRIDAVPTAVMATNAFYTRGNDYDSVYEEREALSV

SEQ ID NO: 515 - protein, 850 aa, Mycobacteriophage Omega
  MP-Omega DnaB precursor
MGVQEPRIWLSPEAKSSAGQEAIDLAAACGLILDPWQELCLHEALKESEELVQLESGAWVKKWAASSFGLVVSRQNGKGSILEALELAGLILFGERLIIHSAHEFKALAIDTPILSERGWTTMGDLVDGDRVYGPDGQLTNVIAHPIRYERPCYRLTFDDGQTIVADEDHLWTVYDAVKREHRTLTVRELVDGGVFTTRRNAGRADSNIYRYRVPVTEPLAGVEADLPVDPYLLGYWLGDGDTNAGRFTVGEEDLEAFKLTLESLGYEYSDSVDPRTGAHTICAYGFIQGLREAGVVGNKHIPETYLTASMEQRRALLAGIMDSDGGVTGHQISVTMKNEALMRQVLMLARSLGYKSFFTSHLSMLNGEHKARVYRVKFANRQELNPFRLPRKAAKVLPPLGRVTRAQYNAIVSIEPVESVPTRCITVDNDSRLYVVGHGFVPTHNTAVNGMERLESLIAKSGLKYKAKQAHGAESIEILDGPNPGARVMFQTRTDRSGLGLTADRVIFDEAMTITPGSLKALLPTVSSRPNPQIVYTGTAADQRTQPYCHTFGGVRYRALEQLRTGERKRLCFLEWSAPDDLPEEKFGDPQYWAMANPGLGYRQTEEKILDEYEEMWANLRDFGVDRLGIGDWPQFGAEMSEIPLDKWRRLNNPSPDLAGARALILYRTPEGGPWAIVGSQRCTDGRIHVEVGYAGTDPVDRVVDKFIQAITAWGPEEILVGRGGAAEVIPQIEAAGFTVYSPNQSEEAQACGGFLNDALVDPENPLLSHGDQHSLNAAITRAVKRDLPSGGFVWDCIEPSTYAQLMGVTLGRWALLKHAINAKPTPAIHDWPDQQEIDSWIQELYEEA

SEQ ID NO: 516 - protein, 572 aa, Mycobacteriophage U2
  MP-U2 gp50 precursor
MTQRIVFLPDTQLPYEARKEMQAVIRFIGDVQPYGVVHIGDILDLPQPSRWNKGTKGEFEGSVYRDADYAKKHLLEPLRKVYDGWIGAHEGNHDCSWTNARAVTRRGFVHVDDLTTDDEVMSVDDQGRTIWQQIDEVVRFPFSGTLYSLGGREINATITANHRVVGLNREKTKWVEHTPTSLPGNKMWVYTAGEGSNEDCPLTDTEIRLAVWGLTDSHRSPDGRWTFYQSGEKAEQVRKLLADAGIEYRERARNRGITEIDGKVLKAPPKTQYEFSLGKVQELDDLLDRGRSELPTWTLSLSQRQARLFLEEYRFTDGTDTTSAGDSYVLYVCKDRMREQLQMLAAANGLRASTTEYRPGHWRLNISNRALSGLYKNTVEEVAYEGEVWCLRVPNGRFFIEDGGKIHLTGNSRARDYLSKNAPALEGTHAFDIDVLLDFDGFGVELLPDFYDIAPGWISTHGHMGKMTLSQIAGSTALNGAKKFGKSVVCGHTHRQAVVSHSFGYGGSVRKTVTGMEVGHLMDMKKANYLKGGAGNWQMGFGMLTVDGKHVKAEIVPILGGKFIVDGQVWEV

SEQ ID NO: 517 - protein, 423 aa, Mycobacterium shimodei
  Msh RecA precursor
REKIGVMFGCMNYSTRVTLADGSTEKIGKIVNNKMDVKVLSYDPDSDRIVPRKIVNWFNNGPAEQFLQFTVEKSGGNGKSQFAATPNHLIRTPAGWTEAGDLNTGDRVLAAEPHLLSDQQFQVVLGSLMGDGNLSPNRRDRNGVRFRLGHGAKQAEYLQWKTALMGNIGHTVRENAKGASFVDFTPLPELAELQRAVYMGDGKKFFSEEYLKALTPLALAIWYMDDGSFTLRSRGLQERTAGGSGRIAICVEAMTEGTRVRLRDYLRDTHGLDVRLRSAGSAGKTVLVFSMAATAKFQELVAPYMAPSMEYKLLPRFRGRSTVRPQFVEPTQRLVPARILDVHVKPHTRSMNRFDIEVEGNHNYFVDGVMVHNSPETTTGGKALKFYASVRMDVRRIETLKDGTDAVGNRTRVKVVKNKVSPP

SEQ ID NO: 518 - protein, 782 aa, Mycobacterium species KMS
  Msp-KMS DnaB precursor
MAVVDDRGHPDMDAPPPSEDFGRQPPHDAAAEQAVLGGMLLSKDAIADVLERLRPGDFYRPAHQNVYDAVLDLYGRGEPADAVTVAAELDRRGLLRRIGGAPYLHTLISTVPTAANAGFYAGIVAEKALLRRLVEAGTRVVQYGYAGADGADVADVVDRAQAEVYDVVDRRSSEDFAVLESLLQPTMDEIDAIASQGGIARGVPTGFTELDELTNGLHSGQMVVIAARPGMGKALALDTPLPTPDGWTTMGEVEVGDELIGADGRPTRVVAATDVMVGRPCYEVEFSDGTVIVADAQHQWLTDTRASGRSARVAAAVRTTEQIAATLRCPTADRRLNHSVANAAPLQAPTRELLVPPYTLGAWLGDGTSAAAQITTADPELVMRIEAEGVEFGTLQGRLRTIGVLGDKHIPIEYLRASESQRRALLAGLLDTDGTVAVGGGVQFSVTNKRLAADVAELVVSLGYRCRSTTKHVKGRSADSSVAYTLNFSTDDDVFGLARKAILHKERRGASTTVRSDSRFIVDVRPVRSVPVRCVEVSNDSHMYLAGRSMVPTHNSTLGLDFMRSCSIKHQLPSVIFSLEMSKSEIVMRLLSAEAKIKLADMRSGRMSDDDWTRLARRMSEISEAPLYIDDSPNLTMMEIRAKARRLHQKAGLRLIVIDYLQLMTSGKKVESRQQEVSEFSRNMKLLAKELEVPVIAMSQLNRGPEQRTDKKPMLSDLRESGAIEQDADMVILLHRPDAFERDDPRGGEADLIVAKHRNGPTKTITVAHQLHLSRFANMAHA

SEQ ID NO: 519 - protein, 1257 aa, Mycobacterium species KMS
  Msp-KMS GyrA precursor
MTDTTLPPGDEAGDRIEPVDIQQEMQRSYIDYAMSVIVGRALPEVRDGLKPVHRRVLYAMFDSGFRPDRGHAKSARSVAETMGNYHPHGDSSIYDTLVRMAQPWSLRYPLVDGQGNFGSPGNDPPAAMRYCVTGDALVRLPLGQSVRIDGVVPGAKPNSDNPIDLKVVDRHGDPVAADRLFHSGEHQTYKVTTTEGYTVTGTENHPLLCLVDVGGVPTLLWKLVEEIRPGDTVVLQRSQPMEFGPADWQETLEALLAGAFISEGFISEKRAGFNNLDRDFFNMVVAAYDAVVGGRRYVSSRTIASGSLLHELDIHNLESLRRSRLGVAVGQRSADKFVPEWIWQSPAAVKRVFLQALFEGDGSCSRLPRNTIQVSYSTRSERLAADVQQMLLEFGIVSRRYRHAVGEYKVALTNRAQAELFARQIGFGGAKQVKLLEILSALPEEAAGLDRDFVPGLARFIRQHSGGRWADKEWLRKHNVDRISRWQRNGAEILGRIADPEVRAVATDLTDGRFYYATVASVADAGVQPVYSLRVDTEDHAFITNGFVSHNTEARLTPLAMEMLREIDEETVDFIPNYDGRVQEPTVLPSRFPNLLANGSGGIAVGMATNIPPHNLRELADAVYWCLENFEADEETTLAAVMERVKGPDFPTHGLIVGSQGIEDTYKTGRGSVKMRGVVEIEEDSRGRTGIVITELPYQVNHDNFITSIAEQVRDGKLAGISNIEDQSSDRVGLRIVVELKRDAVAKVVLNNLYKHTQLQTSFGANMLSIVDGVPRTLRLDQMIRYYVEHQLDVIVRRTRYRLRKANERAHILRGLVKALDALDEVIALIRASQTVDIARAGLIELLDIDEIQAQAILDMQLRRLAALERQRIVDDLAKIEAEIADLEDILAKPERQRAIVRDELKEIADKYGDDRRTRIVPADGEVSDEDLIAREDVVVTITETGYAKRTKTDLYRSQKRGGKGVQGAGLKQDDIVNHFFVCSTHDWILFFTTQGRVYRAKAYELPEASRTARGQHVANLLAFQPNERIAQVIQIKSYEDAPYLVLATRNGLVKKSRLTDFDSNRSGGIVAVNLRDGDELVGAVLCSSEDDLLLVSAKGQSIRFSATDEALRPMGRATSGVQGMRFNADDELLSLNVVRPDTYLLVATSGGYAKRTSIEEYTAQGRGGKGILTIQYDRRRGNLVGALIVDDDTELYAITSGGGVIRTAARQVRKAGRQTKGVRLMNLGEGDTLIAIARNAEAGDSTDEVNTDPDAV

SEQ ID NO: 520 - protein, 782 aa, Mycobacterium species MCS; identical to SEQ ID NO: 518
  Msp-MCS DnaB precursor

SEQ ID NO: 521 - protein, 1257 aa, Mycobacterium species MCS; identical to SEQ ID NO: 519
  Msp-MCS GyrA precursor

SEQ ID NO: 522 - protein, 703 aa, Methanothermobacter thermautotrophicus (Methanobacterium thermoautotrophicum)
  Mth RIR1 precursor
MISLSTTALKVLEERYLLRGEGGEVVETPEEMFRRVARAVASADEAYGDDPAVAEEAFYSVMGNLEFLPNSPTLMNAGTPINQLSACFVLPVEDSIDSIFSSLRDMAIIHKSGGGVGFSFSRLRPRGDIVASTMGVASGPVSFMRIFDVAVDVIKQGGRRRGANMGVLHVSHPDIFSFIDAKSREGPLRNFNLSVAVPDEFMDDRPVDLINPRNGEVVDSVESRVILKRIVEAAWRSGDPGILFEDRINRYNPTPQLGRIEATNPCVSGDTIVMTSGGPRTVAELEGKPFTALIRGSGYPCPSGFFRTCERDVYDLRTREGHCLRLTHDHRVLVMDGGLEWRAAGELERGDRLVMDDAAGEFPALATFRGLRGAGRQDVYDATVYGASAFTANGFIVHNCGEQPLLTHESCNLGSVNLSLMVGPSGINWEKLRRTIHVAVHFLDNVIDVNSYPLRPVEEMTLRTRKIGLGVMGFADMLIKLGIPYNSVAALEVAGRVMSFISSEARRASMELARERGSFPEFKGSIWDIQGFECMRNATLTTIAPTGSLSIIAGTSSGIEPLFAVSFTRNILGRSFHELHPLFKTMAGRLDKRSLEAIESRGSLRGVPGVPARIRRLFVTAHEIDPVFHVKMQAAFQRYVDNAVSKTVNLPADSSPADVERVFRAAHELGCKGVTVYRYGSKVDEVLRFPEYAGSCRDMTCPN

SEQ ID NO: 523 - protein, 424 aa, Mycobacterium thermoresistibile
  Mthe RecA precursor
REKIGVMFGCFDYSTRAQLADGTTEKIGKIVDNKMDVEVLSYDPDTDRIVPRKVVNWFNNGPAEQLLQFTVEKSGGNGRARFAATPNHLIRTPGGWTEAGDLIAGDRVLAAEPHRLSDQQFQIVLGSLMGDGTLSPDPRGRNGVRFRMGHGADRVDYLEWKTALLGNIKHSTGENAEGARFVDFTPLPELAELRRAVYLGDDGRKFISEEYLKALTPLALAIWYMDDGSLTVRSEGLQQGTAGGSGRIEICVEAMTEGSRIRLRDHLRDTHGLDVRLRQAGAGGKAVLVFSTAATAEFQELVAPYMAPSMEYKLLPRFRGQSRVVPQFVEPTQRLVPARILDVHVEPHTRSMNRYDIEVEGNHNYFVDGVMVHNSPETTTGGKALKFYASVRIDVRRIETLKDGTEAVGNRTRAKIVKNKVSPP

SEQ ID NO: 524 - protein, 846 aa, Mycobacterium tuberculosis strains H37Rv & CDC1551; identical to SEQ ID NO: 471
  Mtu SufB (Mtu Pps1) precursor

SEQ ID NO: 525 - protein, 874 aa, Mycobacterium tuberculosis, CDC1551; identical to SEQ ID NO: 470
  Mtu-CDC1551 DnaB precursor

SEQ ID NO: 526 - protein, 874 aa, Mycobacterium tuberculosis H37Rv
  Mtu-H37Rv DnaB precursor
MAVVDDLAPGMDSSPPSEDYGRQPPQDLAAEQSVLGGMLLSKDAIADVLERLRPGDFYRPAHQNVYDAILDLYGRGEPADAVTVAAELDRRGLLRRIGGAPYLHTLISTVPTAANAGYYASIVAEKALLRRLVEAGTRVVQYGYAGAEGADVAEVVDRAQAEIYDVADRRLSEDFVALEDLLQPTMDEIDAIASSGGLARGVATGFTELDEVTNGLHPGQMVIVAARPGVGKSTLGLDFMRSCSIRHRMASVIFSLEMSKSEIVMRLLSAEAKIKLSDMRSGRMSDDDWTRLARRMSEISEAPLFIDDSPNLTMMEIRAKARRLRQKANLKLIVVDYLQLMTSGKKYESRQVEVSEFSRHLKLLAKELEVPVVAISQLNRGPEQRTDKKPMLADLRESGCLTASTRILRADTGAEVAFGELMRSGERPMVWSLDERLRMVARPMINVFPSGRKEVFRLRLASGREVEATGSHPFMKFEGWTPLAQLKVGDRIAAPRRVPEPIDTQRMPESELISLARMIGDGSCLKNQPIRYEPVDEANLAAVTVSAAHSDRAAIRDDYLAARVPSLRPARQRLPRGRCTPIAAWLAGLGLFTKRSHEKCVPEAVFRAPNDQVALFLRHLWSAGGSVRWDPTNGQGRVYYGSTSRRLIDDVAQLLLRVGIFSWITHAPKLGGHDSWRLHIHGAKDQVRFLRHVGVHGAEAVAAQEMLRQLKGPVRNPNLDSAPKKVWAQVRNRLSAKQMMDIQLHEPTMWKHSPSRSRPHRAEARIEDRAIHELARGDAYWDTVVEITSIGDQHVFDGTVSGTHNFVANGISLHNSLEQDADVVILLHRPDAFDRDDPRGGEADFILAKHRNGPTKTVTVAHQLHLSRFANMAR

SEQ ID NO: 527 - protein, 790 aa, Mycobacterium tuberculosis H37Rv,Also CDC1551; identical to SEQ ID NO: 472
  Mtu-H37Rv RecA precursor

SEQ ID NO: 528 - protein, 790 aa, Mycobacterium tuberculosis So93/sub_species="Canetti"
  Mtu-So93 RecA precursor
MTQTPDREKALELAVAQIEKSYGKGSVMRLGDEARQPISVIPTGSIALDVALGIGGLPRGRVIEIYGPESSGKTTVALHAVANAQAAGGVAAFIDAEHALDPDYAKKLGVDTDSLLVSQPDTGEQALEIADMLIRSGALDIVVIDSVAALVPRAELEGEMGDSHVGLQARLMSQALRKMTGALNNSGTTAIFINQLRDKIGVMFGSPETTTGGKALKFYASVRMDVRRVETLKDGTNAVGNRTRVKVVKNKCLAEGTRIFDPVTGTTHRIEDVVDGRKPIHVVAAAKDGTLHARPVVSWFDQGTQDVIGLRIAGGAIVWATPDHKVLTEYGWRAAGELRKGDRVAQPRRFDGFGDSAPIPADHARLLGYLIGDGRDGWVGGKTPINFINVQRALIDDVTRIAATLGCAAHPQGRISLAIAHRPGERNGVLDLCRRAGVHGKLAWEKTIPNWFFEPDIAADIVGNLLFGLFESDGWVSREQTGALRVGYTTTSEQLAHQIHWLLLRFGVGSTVRDYDPTQKRPSIVNGRRIQSKRQVFEVRISGMDNVTAFAESVPMWGPRGAALIQAIPEATQGRRRGSQATYLAAEMTDAVLNYLDERGVTAQEAAAMIGVASGDPRGGMKQVLGASRLRRDRVQALADALDDKFLHDMLAEELRYSVIREVLPTRRARTFDLEVEELHTLVAEGVVVHNCSPPFKQAEFDILYGKGISREGSLIDMGVDQGLIRKSGAWFTYEGEQLGQGKENARNFLVENADVADEIEKKIKEKLGIGAVVTDDPSNDGVLPAPVDF

SEQ ID NO: 529 - protein, 863 aa, Mycobacterium vanbaalenii PYR-1
  Mvan DnaB precursor
MEPPPSEDFGRQPPQDAAAEQAVLGGMLLSKDAVADVLEKLRPGDFYKPANQLVYDAILDLYGRGEPADAVTVAAELDRRGLLRRVGGAPYLHTLISTVPTAANAGYYAEIVAEKSLLRRLVEAGTRVVQYGYAGADGADVNEIVDRAQAEIYDVTERKSSEDFVILEEILQPAMDEIDAIASEGGVSKGVPTGFTDLDELTNGLHPGQMIVVAARPGMGKALALDTPLPTPTGWTTMADVAVGDLLIGADGKPTRVVAATEVMVGRPCYEVEFSDGTVIVADAEHQWLTETRASRKSAQAAAVGYNRYKNQRTFAAVRTTREIGETLRCPTADRRLNHSVVNAAPIEAPVADLLLPPYTLGAWLGDGTSRAAQITTADPEILMRIEAEGLVTVPLPGARMRYGLQLPTEAPAGTRECVVCGASFTPSTSQVRTCGRSCGGRARFVSEPVAAPTCSHCGGPSCGLRLCQSCRNAVGTVQGRLRTIGVLGNKHIPTEYLRASEAQRRALLAGLLDTDGTVTNGGAVQFSVTSRRLAADVAELVVSLGYRCQVATKAVKGRTEASSTAYILNFSTTDSVFGLHRKDLSHKERRSKSSVRSNTRFIVDVREIETVPVRCVEVDNDDHMYLASRSMIPTHNSTLGLDFMRSCSIKHHLPSIVFSLEMSKTEIVMRLLSAEAKIKLADMRSGRMNDDDWTRLARRMSEISEAPLYIDDSPNLTMMEIRAKARRLKQKADLRLVVIDYLQLMTSGKKVESRQQEVSEFSRQIKLLAKELEVPVVAMSQLNRGPEQRTDKKPMLSDLRESGSIEQDADMVILLHRPDAFESDDPRGGEADLIVAKHRAGPTRTITVAHQLHLSRFSNMAK

SEQ ID NO: 530 - protein, 885 aa, Nocardia farcinica IFM 10152
  Nfa DnaB precursor
MTTTDDRGHTDFPPEPPGEDFGRQPPHDMAAEQSVLGGMLLSKDAIADVVEVIRPGDFYRPAHQAIYDTILDLYGRGEPADPVTVAAGLDRRGELKRIGGAPYLVTLTQTVPTAANAGYYAEIVAEKAILRRLVEAGTRIVQYGYAGADGQDIAEVVDRAQAEVYEVTERRTTEDFLPLEELLQPTMDEIDSIASRGGISLGVPTGFSELDELTNGLHPGQMIIVAARPGVGKSTLGMDFMRSCSIKHGLASVIFSLEMSRTEIVMRLLSAEAKIKLADMRSGRMSDDDWTKLARRMSEISEAPLFVDDSPNLTMMEIRAKARRLKQRHDLKLVVVDYLQLMTSGKKVESRQQEVSDFSRNLKLLAKELEVPVVAISQLNRGPEQRTDKRPMVSDLRESGCLPASTRILRADTGAESTLGELLASGEQPLVWSLDERMRMVARPMVKVFPSGRKEVFRLRLASGREVEATGNHPFLTVDGWIPLDRLTVGDRLATPRSVPEPVHTERMADAEVVLLAHMIGDGSCVRRQPVRYASIDEQNLAAVSEAAEHFGVTAVRDDYAAARVTTLRLPAPYRLSRGKRNPIAAWLDELGLFGLRSHEKFIPRRVFALPNDQVALFLRHLWATDGSVRWDSTYRQARVYYTSTSRRLIDDVAQLLLRLGVHGRIRRVTKPGYRDAWHLTIDGADNQTVFLRDVGVHGARGDAAQVALAELEPLVRNTNVDTVPNEVWNQVRHLLATKNITHREFSAAMGSRFCGSTMWKRSPSRSRLARVAAVLDDADIEMYATNDVFWDKIVEITSLGEQDVYDGTVPGTHNFVAQSISVHNSLEQDADMVILLHRPDAFERDDPRGGEADLIVGKHRNGPTATITVAHQLHLSRFVDMARG

SEQ ID NO: 531 - protein, 1102 aa, Nocardia farcinica IFM 10152
  Nfa RIR1 precursor
MLNLYGPDGKIQFDKDREAARQYFLQHVNQNTVFFHNLDEKLDYLVEENYYEPEVLDRYSRAFVKSLFQQAYDKKFRFPTFLGAFKYYTSYTLKTFDGKRYLERFEDRVCMVALTLAAGDEELARKLVDEIIDGRFQPATPTFLNSGKKQRGEPVSCFPAGTPVDTIDGPKPIESLRAGDRVLSHDGSYATVEKLIENTNDQPLVSISHFGHKEPIRCTPEHPILVWTDRDVETLIDGDGADPFNGFVWLAAQDVHPSDFIVATAPLETRERRVFDLMNHVGEGTYEEVDGLIRKVNTDARHRNKQRHRQGFVAVTRYVEESYDLGLILGWYLAEGHVSKRSGVEDVRPTGVHFTLGANEIERHVELGMAFKQVFGVDLVLHTNHSDHSTRMVCNSKIVASLLLSLAGTGYSTKRLAHEVMTADEDFQRGLLVGLFRGDGCTTTGGMVLDLVNQELIDQVQLLLRRLGIVSVVRTYTNQAGNPTGQVFVPGLPGTNEEFIFDVDKNLQNYTGRKGTKRTTYQVVHGRHVYGIRAVERTGETPRQVYNLHVEGTHTYTIRGAVVHNCFLLRIEDNMESIGRSINSALQLSKRGGGVALLLSNIREHGAPIKKIENQSSGVIPIMKLLEDSFSYANQLGARQGAGAVYLHAHHPDIYRFLDTKRENADEKIRIKTLSLGVVIPDITFELAKKNEDMYLFSPYDVERIYGKPFADIDVTEKYYEMVDDKRIRKSKIKAREFFQTIAELQFESGYPYIMFEDTVNRANPIAGKITHSNLCSEILQVSTPSEFNDDLSYAKVGKDISCNLGSLNIAKAMDSPDFAQTIEVAIRALTAVSDQTHITSVPSIEQGNQQSHAIGLGQMNLHGYLARERIHYGSDEGIDFTNMYFYTVVYHALRASNRLAIERGTYFGGFPESKYASGEYFDKYTEQVWEPKTERVRQLFADAGVRIPTQDDWRELKASVMEHGIYNQNLQAVPPTGSISYINHSTSSIHPVASKIEIRKEGKIGRVYYPAPYMTNDNLEYYQDAYEIGYEKIIDTYAAATQHVDQGLSLTLFFKDTATTRDLNKAQIYAWRKGIKTLYYIRLRQMALEGTEVEGCVSCML

SEQ ID NO: 532 - protein, 539 aa, Neosartorya fischeri
  Nfi PRP8 precursor
TAFPSWEGLFWERACLAKGTRLLRYDGSEIEVQDVKEGDLLLGPDGGPRRAFNIVNGEDRLYRIKIDGSKEDLVVTPNHILVLHREKRATTFESMPSTNAEEPGNGDDDELPEVSAAERYDTVEMTAAEFAALSTEERSRYRVFRCPGFELPEQSVPVNPYFLGLWLGDGNSRSTTIYNSHGETVREFLVNHAAELDMYLTWHGQLGYATVPDTIEHRPVVRQARQTIRKLRLAAKSIAQPEVSEGLMPSQGSTEEPSQASTIKPVHQASMVEQKADLDLLETDSEDEEADSADEDELGDPDASEFRPEPESQLSQSHFSNRRRNHRLRTGRRAYGDLNGDEEDELLHQIVEQSEGSRVDSLPRALDALGVIAQKETGPETDRKHIPSIYMKNSRSVRLAVLAGLIDSDGWYVYPENMLGFAQSERCHSKLFWDVVALARSLGLSVWTKRHMMWNPARTERYPQLFAQISGNVAEVPCLLARKKGVERLIPQTHSFMIKDISLEPETTEWAGFRVDKDQLYLRHDYLVLHNSGFEESMK

SEQ ID NO: 533 - protein, 217 aa, Neosartorya glabra FRR2163
  Ngl-FR2163 PRP8 precursor
FWWTSQRHDGKLWNLNAYRTDVIQALGGVETILEHTLFKATAFPSWEGLFWERACLAKGTRLLRYDGSEVEVQDVKEGDLLLGPDGGPRRAFNIVSGEDRLYRIKIDGSVEDLVVTPNHILVLHRESAAESYDTVEMTAAEFAALSTEERGRYRAFRSPSFELSEKAVRVNHRFMIKDIRLELETTEWAGFRVDKDQLYLRHDYLVLHNSGFEESMK

SEQ ID NO: 534 - protein, 231 aa, Neosartorya glabra FRR1833
  Ngl-FRR1833 PRP8 precursor
FWWTSQRHDGKLWNLNAYRTDVIQALGGVETILEHTLFKATAFPSWEGLFWERACLAKGTRLLRYDGSEIEVQDVKEGDLLLGPDGGPRRAFNIVNGEDRLYRIKIDEGIEDLVVTPNHILVLHREKKAGNNEDDGLPEVSAAERYDTVEMTAAEFAALSTEERSRYRAFRCPGFELSEKAVPANHSFTIQDIRLELESTEWAGFRVDKDQLYLRHDYLVLHNSGFEESMK

SEQ ID NO: 535 - protein, 1037 aa, Natronomonas pharaonis DSM 2160
  Nph CDC21 precursor
MARAEDTEIIDKFEQFYRDYYRDEIGQLAQKYPEDQRSLYIDWDDLYRFDADLADDLVAQPDQIRDYAEEALRLYDLPVDVQLGRAHVRVHNLQQTTGIRDIRARHRGNLVEVTGIVRKATDVRPKITEAAFECQRCGTLTRIPQTAGDFHDPHECQGCERQGPFDINFDQSEFVDAQKIRVQESPEGLRGGETPQSIDVHIEDDITGKVTAGDHVRVAGVLHLDQQGSEQEKSPVFDVYMDGMSVEIEDEQFEDMDITDEDKQRIIELSNDDGIYQQMVESMAPSIYGYEQQKLAIIMQLFSGVTKDLPDGSRIRGDLHMLLIGDPGTGKCVDGDTSVTLASGDEKPIRDIVESTLEDPTEISDGFYQESDIDVLTTDGGAVAPGRATKVWKRQAPEKMYRIRTESGRELEVTPSHPLFVQSEGGLSPLVADDLSENDFVAVPRALPADDGDDFGQHVDDLGSVTARKTADAEAVRSEDAATTPDVIPNVGDQLRRIRTSLRLSQHDCGLPRSTYQQYERGDRNPSRSRLQTVLTAFERRIEQLSSLSDRVDDGDSDAIAAARDELNPSQASLASGMDATRTAIGDDERTEARPDGGAVADAERAVADALCRALAVADDVERLRSLADGDIGWDRIDSIEPVEPEDEWVYDLEVESTHSYLSNDVVSHNSQLLQYVKNIAPRSVYTSGKGSSSAGLTAAAVRDDFGEGQQWTLEAGALVLADQGIAAVDELDKMRSEDQSAMHQALEQQEISVSKAGINATLKSRCSLLAAANPIHGRFDEYEPFAEQIDLDPPLISRFDLIFTVTDQPDEEEDRQLAEHIIETNYAGELQTHRTKAATSNVSQEQVDSVTEDVAPAIDDELLRKYVAYAKRNCYPTMTEEAKEAIQEFYVDLRLEGQSEDNPVPITARKLEALVRLAEASARIRLSDTATKDDAERVIEIVRSSLEDVGVDPETGELDADIIESGTSKTQRDRIKNIKSLISEVETEYDEGAPIDVVLDRAEEMGMDRSQAEHEIEKLRRQGDVYEPQTDHLRTV

SEQ ID NO: 536 - protein, 1740 aa, Natronomonas pharaonis DSM 2160
  Nph PolB-1 precursor
MEQGTLGDFDTGASDDADAGRPAAEAAAVAGSDDGDASVVDVADYEFPDADGQIECAVTQVDYTVEGGGDDEHPVLHVFGRRPNDGDDEPLHIRVYGFKPYFYTPLSELDIADSAEAPLTEADIVDSRLDHDRLTGVETEADDGDGPNELVVYESIRGEKLVKVFGQTPRDVGQLRDRFEHYEADILFPNRLLIDKDITSGVRAPNRELDDGSLKVHHSELTATAVDAESRLHILDIEVDDRHGFPEDGEEEIVCLTSYDSYRDEYVIWLSESDDGVGGPEALGGYDPIGDGPLDVDVRRFDEEATMLVDYLDYIEDTDPDVLSGWNFDDFDAPYLIDRIDRIASRHDRLYSDRLSRVREVWDSGWGGPNIKGRVVFDLLYAYQRTQFSELDSYRLDAVGEEELGVGKERYPGDIGDLWEDDPERLLEYNLRDVELCVELNRKQNIVEFWEEVASFVGCKLEDATTPGDAVDMYVLHKIHGEFALPSKGHQEGEEYEGGAVFDPISGVKEMVSVLDLKCFSGDTDVATPDGIKNIQEVAVGDPVYTLNPETFECEIKPVVDTQSYRNKYGELHHVAGRTHDFKVTENHRFLLSETVDLDSPGPDDYALSEYRELPEYERLAFPNHEPMAGATREEFDLAGAVDDGHAVVCAHDGRSAFRTAMPAGVEAALDRADGTSQLAATEEKTGTYRIPIDTYRERRDVIDEHADEVLLKYEREDNQIPTGFGMDDWLELVGWFVTAGRFAHEAKRIVLRRQDEEGRSAIRSLLERMELPYDADGTRVTVSNRVLYDWFVKNCGDGATETRLPEWVFELDAAHLRTLLETLVDGDGSRTDSGLGEFWTQSDRLKDDVVRLAVRCGEKPTVSENQDGTWYVSVGTRGSMKKSNATVEDHDGDVHCITAEDNHVVLAGRNGHLQWVGQSLYPMCMVTINASPETKVDPDNYGAETYAAPNGTHFRKEPDGVIREMVDELLEEREEKKSLRNEHEPSTDAYETYDRQQSAVKVIMNCFTPDTEVLTPDGVRNIRALDIGDEVYSLDPETMEMEVKPVVDTHAYPDYRGELVDIQTGEIDFRVTPNHRMLVRKNGTNGITDDEYRFVEAGALDLATTYELPHDWAGPDGEDVTQIDLTELIDEEYEVWVRPEVHGRTFTAELGWKPRRVPKADIDTVGYVFTADEFKQHREYIESVCEQSYIRRESGLKWIPRVYDGDDFLELLAWYVTEGNAHTSERKEFDGQRHGSSTVQIAQEPVVADGGDTHATIGTLLDRMGFDYDNDNGSYQVTSKLLGDLFCTLGGGGSEDKRIPQLVFEASRRQKERFMQTLISGDGDRQPNSWQYNTASERLRDDVLRLCAHLGVPASYSEESGVYRIYVTEDGTNTLRMDRSAERTTADDGVYCVTVEDNHTLLAGRAGKFQFVGQSLYGVLGWDRFRLYDKEMGAAVTATGRDVIEFTEQAAAELDKDVIYGDTDSVMLELGNEVSEDEAIEQSFEIESHINDAYDRFAERLNAEEHRFQIEFEKLYRRFFQAGKKKRYAGHIIWKEGKEVDDLDITGFEYQRSDIAPITKEVQREVLEMIVTGEDPEDIKSYVHDVIERVREGDISHEELAIPGGIGKKLDNYETDTAQVRGAKYANRLLGTNFTSGSKPKRLYLAKVHPSFFRKMESEEGLDPSTDQLYGEFKREAESGEAVICFEYEDQIPDAFEVDYEKMLDKTLKGPIARVLEALDISWDEVESGQEQTGLGSFM

SEQ ID NO: 537 - protein, 1740 aa, Natronomonas pharaonis DSM 2160; identical to SEQ ID NO: 536
  Nph PolB-2 precursor

SEQ ID NO: 538 - protein, 894 aa, Natronomonas pharaonis DSM 2160
  Nph rPol A'' precursor
MTEITDDVEAIVEDTDLPRRLKDEVYETLESRSGVAPEDVEDIVQAVESQYLETRVDPLDPVGTVSAQSIGEPGTQMSIPADEQVVVRRNGETELTEIGPLVDSLMDSRETRSFDDHEVTLAPDGIEVPSLSSEETVEWKPIEEVSRHETPDELLRFELESGRSIRATKAHSFVTRQENEVVPVAGEELEAGDWLPVVASLDATDTQETVDLRKYLPAGDYWYTSVLADGGAEAVPGGPDQLRNKRAALEAGELAEHTAYPVQGTVGLPEQFPLDEETGFFVGAWLAEGSLADHYVSISNVDAAFQSRIRSFAERFDLTVNEYENDSGFAAGYDIRLNGTILSDFLRAACTDDGEKSIPGFAIGANEAFLKGLLQGYFSGDGNVGTNAIRSSSTSDRLTAGVGLLLARFDVYATLGQQEDSRTLRVPKKHVSRFDNRIGMVGERGAELEALAESADSDGPDATDQIPNFGDALEAVAEAADIPQRQVNSATKRQRIDRSRLARLVAAAEAELDGEQSELDALRQAVTGDVVWDRIESIETVESDHEYVYDVSVEGLETFTTADGVVTHNTMNTFHYAGVAEIDVTQGLPRLIELVDARKTPDTPMMTVHLEGEYARDRERAHEVVWKIEATKILALGDVSTNVADMLVQIDLNEETLAERWPTMESIDDIAGRIAGTIEGELGVDTARPKPTVIEFGPEEPSYRQLLQLVEELREIVFKGIEEINRVVIRKEETEQGEEFVLYTEGSDLKEVLDIEGVDASRTTCNNIHEIHNNLGIEAAREAIIEETMNTLEEQGLDDVNIRHLMLVADIMTNNGEIESIGRHGISGNKDSVLARAAFEVTVNHLLDAAIHGEVDDLDGVTENVIVGKPIKLGTGDVDLRMGATRDSGSRADD

SEQ ID NO: 539 - protein, 715 aa, Nostoc punctiforme
  Npu GyrB precursor
MPYEKLEITTPAPVLSWANHSLGPEETKMAKNVASLPFVFKHVALMPDVHLGKGALVGSVIATKEAIIPAAVGVDIGCFIGDTLIPLADGKSYRIKDLMDWGTEFIVYACTPTGKIVAAQATAKLTRRNAPLVKVILDNGEEIICTPDHQFMLRDGTYKEAQLLQAETSLMPFYSKTDKDGYTLITQPYSSRWQKAHWIIARSGLLGKVPRFEGQKTFIHHQNFDESDNRPENLEFMGNRDHSAYHRSLVERNQHWHSAEFEEKRVASLAQKAKTSEGYQYYAERGTRNIFQYMEQQPEHFKNAVAGNGNRGKQYLVEYNKTEKGRGKSQEIANRYYTCEICGVDVKTPIGLHNHRRKEHQCNHKVVAVNLLNYTEDVYCLTVPEYHNFALKAGVFVHNCGMSAIKTSFTAEQLEGKLKKIRLDIEAAIPTGFNENKDVEKSVSNWQHWDDFKDLHRGVQDLQGKAMKQMGSLGGGNHFIEVCLDTENQVWLMLHSGSRNIGNKLAQCHIYTARELAKMAGNKLPDPDLAHFVAGTREFQAYWHDLQWSQNYARVNRDVMMARFKHIVEKHLVGGKATKPLLQVNCHHNYAEKEVHFDEDVYVTRKGAVRAQTEDYGIIPGSMGAKSFIVKGKGNAHSFCSCSHGAGRLMSRNKAKNVYTLDDLIEQTNGVECRKDEGVLDEIPGAYKPIEQVMANQADLVEVVATLKQVLCVKG

SEQ ID NO: 540 - protein, 215 aa, Neosartorya quadricincta, strain NRRL 4175
  Nqu PRP8 precursor
AYRTDVIQALGGVETILEHTLFKATAFPSWEGLFWERACLAKGTRLLRYDGTEVEVQDVKEGDLLLGPDGGPRRAFNIVNGEDRLYRIKIDEGIEDLVVTPNHILVLHREKKARNNEDDELPEVSAAEPYDTIEMTAAEFAALSAEERGRYRAFRCPGFESPEKAVPVNHSFMIKDIRLELETTEWAGFRVDKDQLYLRHDHLVLHNSGFEESMK

SEQ ID NO: 541 - protein, 824 aa, Nocardioides species JS614
  Nsp-JS614 DnaB precursor
MSVTEQGPRGLPEPPIDDWGDGPAAYAPGERPTSPGDRTPPQDMAAEQSVLGSMLISKDAIADVAEVLRGVDFYRPSHETIHDAIIDLYGRGEPVDMVTVAAELQRRGELQRIGGAPYLHTLSANVPIAANAGYYAEIVREKAILRRLVDAGTKIVQIGYAGEGQVDDIVDTAQAEVYKITDRRAAEDYAPLSDIMDGVLDEIEAIGNREAGLYGVPTGFADLDDLTNGLHSGQMIIVAARPAMGKALALDTALPTPSGWTTMGDVQVGDQLYDAHGRPTTVVAATEVLTGRPCYEVEFSDGSRIVADAQHQWLTESRAARKSRWAADKQYNRARNQNIVASVVTTEAIAGTLRVGADQRANHAVLTADPLSGSDVDLPIPPYVLGAWLGDGHSASARITCETPEIPMYLEACGLRVDHQGAMLYSLKFPDGDPRGSVQGVLRTIGVLNDKHIPADYLRASEGQRRDLLAGLMDTDGTVVRGVGSCQFAVTNKRLADDVYELVVSLGYKCGRTTRRVQGRSPETSTCHILNFSTVDDVFRLERKHLLHKEERPVTRARIARRYITAVRPIESVPVRCVEVDNTEHLYLAGESMIPTHNSTLALDLCRAASIHNNLTSVFFSLEMTRSEITMRLLSAEAKVPLNHIRNGNMNDDDWAKLARKMGEVSSAPMFIDDSPNMTMMEIRAKARRLKQRHDLRLVVIDYMQLMTSGRKVESRQLEVSEFSRQIKLLAKELEVPIIALSQLNRGPEQRGDKRPMMSDLRESGSLEQDADMVILLHRDDVYEKESTRPGEADLIVAKHRNGPTRDITVAFQGHYSRFVDMAH

SEQ ID NO: 542 - protein, 932 aa, Nocardioides species JS614
  Nsp-JS614 TOPRIM precursor
MAGRIRDEDIAEVREKARIDDVVSQYVTLRPAGGGSLKGLCPFHDEKSPSFNVNPSRGFFHCLAGETKVLTWDGPRPISELAGGTHRILNVHGDWAEAPLKSYGVQRLWRIVVTRNRERKELFATDGHRWFVPSGRTGSKHREVLTKELKAGDRLVSKFPRSRIQRTTPSPFGIAHGFTYGDGTRSGTGSMALLRPPKDLAMLKWFSNSHTSASGDNLLVHHLPRFFKELPDPDESVSYLYGWLAGYFAADGCVAADGTVILNSARRENLEFVRMVTTRLGIATYGITTQSRVGLGKEHSDLHRVHFVNDDLTESFFLLDEHRRRFAEATKKYARRGWVVQAVEETDRVEEVYCAEVEDGHAFTLEDNILTGNCFGCSEGGNVITFLMKIDGLTFGEAVERLADKVGVQLRREEGDVREERPKGPPRRRLVEAHKVAQEYYADQLATPDALVARQFLGGRGFDQAAAEHFGIGFAPRDGDALKTHLRQKGFSAEEMTVGGLIGPSGYDRFRGRLLWPIRDASGDTIGFGARRIFDDDRIDAKYLNTSETPIYKKSQVLYGIDLARRDIGRSSQAVIVEGYTDVMACHLSGVTTAVATCGTAFGDDHSRVLRRFLNDHQVTHGEIIFTFDGDAAGQKAALRAFGGDQNFVSQTYVAVEPGGLDPCDLRIQQGDAAVRELVARRVPLYRFVLTNVVREFDLDRADGRIAAVREAAKLVLSSRDNSVAQSSFARDISELTGVDPNEVLVEVRRVVARHRNGDRGAVAEPPTNRSAVPSLHDPRFAIERETLQLVIQHPMTIGRSTGDIGPNDFVHPTYRAVWELVAAAGGPGAGAGDPSWANRLRDAATDPAASSVISALAVEPLKKEPDAAYVAEHVFRLLELTAARRIAAIKSKLQRTNPVEHAEEFNKMFGELAALEAHRRALRDRLAGSAT

SEQ ID NO: 543 - protein, 1172 aa, Nostoc species PCC7120, (Anabaena sp. PCC7120)
  Nsp-PCC7120 RIR1 precursor
MVRELERKRQSARFPESAPAANPVFFRTYSRRTEAGLRETWDEVCDRTLKDLIELGKLSPEEVAILDKTQRNLTALPSGRWLWVGGTDWINKSKNFSGAYNCTSTNLQDWKAFGLMMNLAMMGCGTGAVIEPEYINQLPPIRNHLNIIVKGEIGTTPKHLRREYTQTHIEGNSATIYVGDSREGWVESYQALLELSTDERFTDEVQVFVDVSDVRQSGETLNGFGGVANPVKLPGLYQRCAAILNKALGRKLNSVECCLLIDEGAVTIVAGNIRRCLPEDALVHTAKGLVPIRDVQVGDLVQTPLGFRRVVDKFDQGFQDVYEIETNATYPRATLNHRQAVLEDAKGGIVWKHIASLEAGDRLLHNKQVLPGTVTHLPADFTESRPSHSRTAKSFVVPELTAEVAWLIGFTHGDGYVALGRNKYDKPYGRVEWSMNSLDAEVTSRIQAKIDAALALFGLSAVHSITKGENTAKSICSSIRLAEYFHRHIKQPNIPLTVPSFILQGSVDIRAAYLAGLMDSDGAVNNRPPHLITSVYRSFIRQVSVVLSSLGIAGRLTTTYPQNSNWQVKYNLTIPALKERYNALISPHSAKGELRQGLKMYGFTVPGAVMRETYTYSEMREMGFQGSRTVDANYERYVAEADISLDIPVTVKGLGSYDHVQTYDIEVDEAHCFYCDGYLTHNSAGMRQFISDDQLGAAAKDNLWQQDENGRWRIDPERDSLRMANHTRVFHRKPTLEECVDAVRKQYYSGEGAIQWAGEAVARANIDLLPTQALKVEFLKAYEQGTAKDWLQKRHPHFDEKELKHRLARYALNPCGEIIGSNFHCNLSEIHLNQIDPFNYKEQEEAFTAGALSVATLLNHKFPEPRYQYSRELDPIVGVSFTGLFDFFVHAFGAEWLQWWEAGRPATPQGLAFKREEEKYLSSWREIVQRVVWDYCDRHNIKRPNRCTTVQPSGTKSLLTGASPGWHPPKAQRFIRRITFRKNDPVALACIDYGYNVIPSQSDKDEQGNLLNDPLDPRVSEWLVEIPVAVSWADIPGADTIDISKFNAIAQMDFYMQVQKFYVTHNTSATIEVREHEVETLGTQIWQAIQNDEGYISAALLARFDDHQTFPRLPFEPISKEQYEQMVKEVVQRRKTDDFYAVLSRYDFGDLMEVGPAGCDSDKCMMPEQSPN

SEQ ID NO: 544 - protein, 1112 aa, Pyrococcus abyssi
  Pab CDC21-1 precursor
MDREEIIERFLRFLREYAEEGEEPLYIGKIKDLLAITPKRSIAINWMHLNSFDPELAEEVLENPEECILAAEDAIQIILKEDIMREDVPRIHARFYNLPKTLMVKEIGAEHINKLIQVEGVVTRVTEIKPFVSSAVFVCKDCGHEMVVQQKPYEGFVAVKKCEKCGSKNVQLDVEKSKFVNFQMFRIQDRPETLKGGQMPRFIDGILLDDIVDTAMPGDRVVVVGILRVVQEKREKVPTFKKVIEVNYIEPVSKEIEELEITPEEEQKIRELAKRKDIVDAIVDSIAPAIYGYREVKKGIALALFGGVPRTLPDGTRLRGDIHVLLVGDPGVAKCVDYETEVVLGNGERKKIGEIVERAIEEAEKNGKLGRVDDGFYAPIDIEVYSLDLETLKVRKARANIAWKRTAPKKMMLVKTRGGKRIRVTPTHPFFVLEEGKVAMRKARDLEEGNKIATIEGLSVSWDEVAEILEYEPKDPWVYDLQVPGYHNFLANGIFVHNSQLLRYIANLAPRAIYTSGKSSSAAGLCVAPETLIITENGTKEIGEVVERWMKELGEIEYDDGISYSPAFEKVASLNGGKVKMLPVRRVWKLRSPGKMIKIRSESGKQITVTPETKLLTIIDGSLEWVEARKLKKGNYVAVVNKERSIVPIGDFLAKLLKFYGVELNLNEAVERDQARKLLETLKSKGLSDVTIEIPEKLRRFIKCDRVRYVDLVEMLSSMEGELKEEVMLLLSDVGDIHEVIQERLKEIGKILESDASWERIAEVEEVVRDGHVYDLTVEGSHSFIANGFVVHNTAAVVRDEFTGGWVLEAGALVLADGGYALIDELDKMNDKDRSVIHEALEQQTISLSKAGITATLNARTTVIAAANPKQGRFNRMKRISEQINLPPTLMSRFDLIFVLVDEPDEKIDSEIARHILRVRRGESEVVTPKIPHDLLRKYIAYARKNVHPVISEEAMEEIEKYYVKMRKSVKKSSEEEIKPIPITARQLEALIRLSEAHARMRLSPIVTREDAREAIKLMEYTLRQIAVDETGQIDVTILEVGQSARKLSKVERILDIIEKLEGTSEKGAKIDDILEEAKKFGIEKQEAREILEKLLEQGQIYMPENGYYRTV

SEQ ID NO: 545 - protein, 1112 aa, Pyrococcus abyssi; identical to SEQ ID NO: 544
  Pab CDC21-2 precursor

SEQ ID NO: 546 - protein, 992 aa, Pyrococcus abyssi
  Pab IF2 precursor
MTKRIRQPIIAVLGHVDHGKCLLPDEKVVVPSVGFVTLKELFETASKVVERDDEKEIRELDERITSVNGDGKTGLVKASYVWKVRHKGKVIRVKLKNWHGVTVTPEHPFLTTKGWKRADQLRPGDYVAVPRFIHGNEDEKIFLSYVKVKKSGEEWKEYFYLAGRKGNIDVNLLFVAPKRYVVEFLRGYFEERSEVKGESVIVEARELVEPLSLALLRFGIFSKIQGSKLIVTGKRNLEAFKDYIGFKDEREKALEEAIEKVKGSEVYPIFEEIRRLRLLFGFTREELGSYAKYENSEAPTYEELMEILDFIERGSPSLSKKIAILEGKLKAELRVLEEEGLIKDGKLTPLGRELLEVWRNREFDSKDVDYIRNIAETLVFIPVENVEEEEYDGYVYDLTTETHNFIANGILVHNTTLLDRIRKTNVAAKEAGGITQHIGATEVPIEVVKKIAGPLIKLWKAEIKLPGLLFIDTPGHEAFTSLRARGGSLADLAVLVVDINEGFQPQTIESIEILRKYRTPFVVAANKIDRIKGWVIEEDEPFLMNIKKQDQRAVQELETKLWELIGKFYEFGFQANRFDRVQNFTRELAIVPISAKYGIGIAELLVLIAGLSQRYLEEKLKIEVEGPARGTILEVREEPGLGHTIDVIIYDGTLHKDDTIVVGGKDKAIVTKIRALLKPKPLDEIRDPRFRFDYVDEVTAAAGVKIAAPGLEEALAGSPVIAAPTPEDVEKAKQEILEQIERVVISTDKVGVIVKADTLGSLEALSKELQEKEIPIRKADVGNVSKTDVMEALSVKEEEPKYGVILGFNVKVNEDAEEVAKAKDVKIFVGNVIYKLIEDYEEWVKEEEEKKKRELLSKVTFPGVIRLYPDERYVFRRSNPAIVGIEVIEGRIKPGVTLIKQNGQKVGVIRSIKSRDEFLQEAKKGQAVAIAIEGAIVGRHIHPGETLYVDLSRDDAITLLKHLRDTLEDTDIKALKMIAKVKAKEDPFWRAI

SEQ ID NO: 547 - protein, 814 aa, Pyrococcus abyssi
  Pab KlbA precursor
MSEEKKKVRSWIDEILSGDNLTLEAILKKSESERKEEKKEETPLPKTESLSLASILAGVQKKEETEKETETLPFAVLEKTGGAPRLEDILKRSRPQERKEEGVGIQGILVPSSKYAGQVVRVLDVYGNVRIVRVKGEAVPIYEISVPELSREEEKLLKLVRDRAIVEIQIDPESIPNLEERRKVFLREVRKMVKEMAPTLSEGRVELLSELIVQNMIGYGKLDPLVRDDNLEEIMVIGIDRPVYVWHRRFGMCKTNIVFKTERELLTIIERIAREVGRRIDQQNPLLDARLPDGSRVNATLPPISLDGPTLTIRKFKKDPLTIIDLIKFRTLSSDVAAFLWLLVDGLGVKPANILVAGGTGSGKTTTLNSLAMFIPPSERVISIEDTAELQLPIEHWVRLETRPPNVEGKGEITMDDLVKNTLRMRPDRIIVGEVRGPEARTMFTAMNTGHDGALYYFSEIQLPNGKEFIGKLVDELFEKYHDKIGKYKDMEYVELNEEDTFEVISIGPDLSARRHKVTHVWRRKVKDGEKLVKIRTASGKELVLTQDHPVFVLLGRDVARRDAGNVKVGDEIAVLNTRPDFSVLSPPAMPELLSEPFNYELSSIGDVAWDEVVEVDEIDAKGLGVEYLYDLTVDINHNYVANGIVVSNCMGTIHSNSARETIIRLESPPMNVPKIMIPALDIIIMQVRYHTRKKGTIRRVTEIAEVSGIEGESIQLNFLYKYDPAKDELVRTEVPSRFLQILSYHTGMSLEEIHLEIEKRKLVLDWMIEKGLRRIDEVGAQIREFYIDEEEFFKKIQREAATMEISRRVKEFI

SEQ ID NO: 548 - protein, 998 aa, Pyrococcus abyssi
  Pab Lon precursor
MLKFYKMGIKRLSGEMTMGEERMDLGIEFETTEEIPVPERLIDQVIGQDHAVEVIKTAAKQRRHVLLIGEPGTGKSMLGQAMAELLPTEDLEDILVFPNPEDENMPRIKTVPAGQGRRIVEEYKRKAKEQENIRFYLLFFVFFIVAMAVFMSRGDPNTLLLGVFVILIALMVTANMRFRTQAMVPKLLVDNSGRKRAPFVDATGAHAGALLGDVRHDPFQCFSGEETVVIRENGEVKVLRLKDFVEKALEKPSGEGLDGDVKVVYHDFRNENVEVLTKDGFTKLLYANKRIGKQKLRRVVNLEKDYWFALTPDHKVYTTDGLKEAGEITEKDELISVPITVFDCEDEDLKKIGLLPLTSDDERLRKIATLMGILFNGGSIDEGLGVLTLKSERSVIEKFVITLKELFGKFEYEIIKEENTILKTRDPRIIKFLVGLGAPIEGKDLKMPWWVKLKPSLFLAFLEGFRAHIVEQLVDDPNKNLPFFQELSWYLGLFGIKADIKVEEVGDKHKIIFDAGRLDVDKQFIETWEDVEVTYNLTTEKGNLLANGLFVKNSGGLGTPAHLRVEPGMIHRAHKGVLFIDEIATLSLKMQQSLLTAMQEKKFPITGQSELSSGAMVRTEPVPCDFILVAAGNLDTIEKMHPALRSRIRGYGYEVYMRTTMPDTVENRRKLVQFVAQEVKKDGRIPHFTRDAVEEIIREAQRRAGRKGHLTLRLRDLGGVVRAAGDIAVRKGKKYVTREDVLEALQMAKPLEKQLADWYIERKKEYQVIRTEGGEIGRVNGLAIIGEQSGIVLPIEAIVAPAASKEEGKIIVTGKLGEIAREAVLNVSAIIKRYKGEDISRYDIHVQFLQTYEGVEGDSASISVATAVISALEEIPVRQDVAMTGSLSVRGEVLPVGGVTPKIEAAIEAGIKKVIIPKANEKDVFLSPDKREKIEIIPVERIDEVLEVALVESEKKKELIKRIRETLPLGVSESAGSETLHEHGRDSGSALSVEESKA

SEQ ID NO: 549 - protein, 1042 aa, Pyrococcus abyssi
  Pab Moaa precursor
MAETVGEIPSGEKEFEASTKRLREIIEFPELSEDEFHELLKSASRGYGSPLPHRTYSLCPETRRVVPAVVWEKDGKVWITKKCPEGMITDLYYEDVELYYRFSRWKFEEKKLFSVNVENTGVNCPFDCGLCARHRSHTSLLNIVLTNRCNLNCWYCFPPTEEAVFKFGDKVKIATFEEVAKNFKFEHKVEIDGFKGEYSIPNDLYVLTFNDGKAEWTRVTKFLRRKHEGKIRVIKTKTGRTIRTTPEHKFFVYKDGELVKKRADELEPGDELVLLWRFESEETLTEINLLEAFKDLPQEEKEKVYVRGIKDLDLTPLKEKYGDKVYYWARQDSMPLSVFYELNVDLDKEFRLGRDATTYELPSKLKITPSLAKLIGYFVSDGNYSDKDLRITVGHEDVEKEIVNILEELGLPYSFLEWEGKTKQIVIGSRLLRLVFKHVFKIPEGAPNKRLPEGFLSFPFEAKVALLSGLFNGDGYVVRGEHHLSIGYASTSKGLIRDILYLLASLGIFARVYRVPKEKMKGANHDLYKLYIAGTDLVRLVELLELREGHREKLGEIGNRKPARVKKIADFYIDVVDEVSEEEYSGYVYDLEVENEGHSFVAADGILVSNCFFYAREGEPIYEPTLEQIRMMLRNAKKEHPIGANAVQFTGGEPTLRDDLIEIIKIAKEEGYDHVQLNTDGIKLAFDPELVKKIRQAGVNTLYLSYDGMTPQTNWKNHWEIPLIFENVRKAGGPGIVLVPTLIRNVNDHEAGAIINFGLNHLDIVRGVNFQPISLVGRVPKKERQRFRITIAGAIKKIEEQTNGVISKDDWYPIPIAGHIARFFEVFTGSKYYMTSHFACGAATYVFLDREEKKVIPIPRFLDVEGFVEFLLEKAEEIEKARFKGLAKLKAIGETVFIKFKQFYDEKNAPKGLDVLGLIKNAFVHGNYDALGKFHMNTLFLGMMHFMDEYNYDVERVERCVIHYAMPDGRIVPFCTFNVIPELYRDKVQRQFSYSWEEWKKLHPDWDYMKDKYVRTKEFVEKMKKSELYRKTYIDIVNYFER

SEQ ID NO: 550 - protein, 1455 aa, Pyrococcus abyssi
  Pab Pol-II precursor
MELPKEMEEYFEMLQREIDKAYEIAKKARAQGKDPSLDVEIPQATDMAGRVESLVGPPGVAKRIRELVKEYGKEIAALKIVDEIIEGKFGDLGSREKYAEQAVRTALAILTEGIVSAPIEGIANVKIKRNTWADNSEYLALYYAGPIRSSGGTAQALSVLVGDYVRRKLGLDRFKPSEKHIERMVEEVDLYHRAVTRLQYHPSPEEVRLAMRNIPIEITGEATDDVEVSHRDVPGVETNQLRGGAILVLAEGVLQKAKKLVKYIDKMGIEGWEWLKEFVEAKEKGEPKEEGKEESLAESTLEETKVEVDMGFYYSLYQKFKEEIAPSDKYAKEVIGGRPLFSDPSKPGGFRLRYGRSRASGFATWGINPATMILVDEFLAIGTQLKTERPGKGAVVTPVTTIEGPIVKLKDGSVLRVDDYNLALKVREDVEEILYLGDAVIAFGDFVENNQTLLPANYCEEWWILEFVKALKEIYEVHLEPFTENEEESIEEASDYLEIDPEFLKEMLRDPLRVKPPVELAIHFSEVLGIPLHPYYTLYWNSVEPKDVEKLWRLLKNYAEIEWSNFRGIKFAKKIVISQEKLGDSKRTLELLGLPHTVRDGNVIVDYPWAAALLTPLGNLNWEFMAKPLYATIDIINENNEIKLRDRGISWIGARMGRPEKAKERKMKPPVQVLFPIGLAGGSSRDIKKAAEEGKVAEVEIAFFKCPKCGHVGPEHLCPNCGTRKELLWVCPRCNAEYPESQAEGYNYTCPKCNVKLRPYAKRKIRPSELLNRAMENVKVYGVDKLKGVMGMTSGWKMPEPLEKGLLRAKNDVYVFKDGTIRFDATDAPITHFRPREIGVSVEKLRELGYTHDFEGKPLVSEDQIVELKPQDIILSKEAGRYLLKVAKFVDDLLEKFYGLPRFYNAEKMEDLIGHLVIGLAPHTSAGIVGRIIGFVDALVGYAHPYFHAAKRRNCFPGDTRILVQIDGVPQKITLRELYELFEDERYENMVYVRKKPKREIKVYSIDLETGKVVLTDIEDVIKAPATDHLIRFELEDGRSFETTVDHPVLVYENGRFIEKRAFEVKEGDKVLVSELELVEQSSSSQDNPKNENLGSPEHDQLLEIKNIKYVRANDDFVFSLNAKKYHNVIINENIVTHQCDGDEDAVMLLLDALLNFSRYYLPEKRGGKMDAPLVITTRLDPREVDSEVHNMDIVRYYPLEFYEATYELKSPKELVGVIERVEDRLGKPEMYYGLKFTHDTDDIALGPKMSLYKQLGDMEEKVRRQLEVAKRIRAVDEHGVAEKILNSHLIPDLRGNLRSFTRQEFRCVKCNTKFRRPPLNGKCPVCGGKIVLTVSKGAIEKYLGTAKMLVTEYNVKNYTRQRICLTERDIDSLFENVFPETQLTLIVNPNDICQRLVMARTGEVNKSGLLENLSNGSKKTEKAEKAEKPRKKSDEKPKKKRVISLEEFFSRKSK

SEQ ID NO: 551 - protein, 1437 aa, Pyrococcus abyssi
  Pab RFC-1 precursor
MRDMEEVREVKVLEKPWVEKYRPQKLEEIVGQEHIVKRLKHYVKTGSMPHLLFAGPPGVGKCLTGDAKVIANGELTTIGELVERISNGKLGPTPVRGLTVLGIDEDGKLVELPVEYVYKDKTSELVKIRTRLGRELKVTPYHPLLVNRRNGKIEWVKAEELKPGDRLAIPSFLPAMLNDNPLAEWLGYFFGNGYTDSEERVVFESKSKELRKRFMELTRKLFQDAEIKEDSGKVYVSSSEVKRLVKSLNKDSIPEQAWKGLRSFLRAYFDCNAEIKDKIIVSTAGKEIAEQISYALAGLGIVAEVDDKGSVIISDPENVSRFLDEIGFSVEEKKEEAKALIKKSTLNLGIYVDKELISYVREKLKLSFYENETMWSPEKAREIAWKLMKEIYYRLDELERFKKALSKSVIIDWSEVEKKKEEISEKTGISVNEILEYAKGKRKPSLEEYVKIAKALGVELKETLEAIFTFGKKYLGYVISDEIETLEEVRKEELKRLKELLNDEKLKKGVAYLIFLAQNELLWDEIIEVEKLKGDFVIYDLHVPKYHNFIGGNLPTVLHNTTAALALARELFGENWRHNFLELNASDERGINVIREKVKEFARTKPIGGASFKIIFLDEADALTQDAQQALRRTMEMFSSNVRFILSCVTGDTKVYTPDEREVKIRDFMNYFENGLIKEVSNRIGRDTVIAAVSFNSRIVGHPVYRLTLESGRIIEATGDHMFLTPEGWKQTYDIKEGSEVLVKPTLEGTPYEPDPRVIIDIKEFYNFLEKIEREHNLKPLKEAKTFRELITKDKEKILRRALELRAEIENGLTKREAEILELISADTWIPRAELEKKARISRTRLNQILQRLEKKGYIERRIEGRKQFVRKIRNGKILRNAMDIKRILEEEFGIKISYTTVKKLLSGNVDGMAYRILKEVKEKWLVRYDDEKAGILARVVGFILGDGHLARNGRIWFNSSKEELEMLANDLRKLGLKPSEIIERDSSSEIQGRKVKGRIYMLYVDNAAFHALLRFWKVEVGNKTKKGYTVPEWIKKGNLFVKREFLRGLFGADGTKPCGKRYNFNGIKLEIRAKKESLERTVEFLNDVADLLREFDVDSKITVSPTKEGFIIRLIVTPNDANYLNFLTRVGYAYAKDTYARLVGEYIRIKLAYKNIILPGIAEKAIELATVTNSTYAAKVLGVSRDFVVNRLKGTQIGITRDFMTFEEFMKERVLNGYVIEKVIKKEKLGYLDVYDVTCARDHSFISNGLVSHNCNYSSKIIEPIQSRCAIFRFRPLNDEDIAKRLRYIAENEGLELTEEGLQAILYIAEGDMRRAINILQAAAALDRKITDENVFLVASRARPEDIREMMLLALKGNFLKAREKLREILLKQGLSGEDVLVQMHREVFNLPIDEPMKVYLADKIGEYNFRLVEGANEMIQLEALLAQFTLIGKKK

SEQ ID NO: 552 - protein, 1437 aa, Pyrococcus abyssi; identical to SEQ ID NO: 551
  Pab RFC-2 precursor

SEQ ID NO: 553 - protein, 2122 aa, Pyrococcus abyssi
  Pab RIR1-1 precursor
MPVEKVMKRDGRIVPFDESRIRWAVQRAMWEVGVRDERKLDEVVKNIVKRINELYDGKIPHIENIQDIVELELMRAGLFEVAKAYILYRKKKAEIREEKKRILNKKELDEIDKRFSINALRVLASRYLKRDENGNIIESPRELFERVSILAVIPDLLYDERVFDKDGNYKQDLKRVEYYLENFEKFDGKYSIGKYKLNKYHFERMVNLYRELAEKGKMKVSIDEFLSMLERGEFDKYEKEIEEYFKLMTNQVFMPNTPALINSGRPLGMLSACFVVPIEDDMESIMKAAHDVAMIQKMGGGCIDGNAKIIFENEGEEHLTTMAEMYERYRHLGEFYDENYNRWGIDVSSVPIYVKSFDPETRRVVKGRVRAIWKYELGEEIPKYEIRTHKGTKILTSPWHPFFVLTPDFEVIEKRADELKVGDILIGGMPDGEDHELIFDYWLAGFIAGNGNLDDSEREYKARELLDGIENGIPPKILRKGKNAVLSFITGLFDAEGHVNDKSGIELGMVNKKLIEAVTHYLNSLGIKARMREKRRKNGIDYIMHVEEYSSLLRFYELIGKHLQNNEKKEKLEILLHKHNGGAFDLSLNFNAFKEWASRYGVEFKTNGNQILAIIGNEKVSLGQWHARGHVSKAVLVKMLRKLYEVTKNDEVKEMLHLIESLEVVKEITITNEPKTFYDLTVDKYQNYLAGENGMIFVHNTGLNFSKLRPEGDIVGTTTGAACFTGDTRILTEKGLIPIEEIVHETGKKPKVVTHAGLKDIIETYDNGEMEVFRVTTEDGYELKVTGDHKFLVFDENGNPTLKPLKELKVGDYVYILAPEWKGGEYVELDTNIELKGKGYNVNLPSKLDEKLAYLLGIIYADGHIRHYFENGKRKNSKIEIYLHQDETEIKEKVKRYFKEIFGIEPKEFLKEEQHKVILVIPSTKIVKFLEINGLLKDKSENIRVPEAIFRSRPSVIAAFLAGFFDGDGSIDQNYRIAFKSISREFIKEAQLLFLALGIVTSIQEYNPPNPNNKTVYTLRVQTRDMKIKAFNVLKESVKLSKIMKEAISKLEENGKNKKFSFPFNAIYHIKDPKIRAKIQRDYKILSYNSKVTHRAFINNILKLKEELGLDDEEVKYFEMLSKLYPTKITKIEPLGKAHVYDLQVEDVHLLTGNGIYTSNSGPVSFMHLIDAVSDVIKQGGVRRGANMGILEIWHPDIEKFIHAKEKNIGTNVLSNFNISVGIWEDFWEALKEGKKYPLINPRTGEVVKEIDPKTLFEELAYMAWAKADPGVIFFDIINRRNVLKEAKGGPIRATNPCVVGETRILTPEGYIKAEELFKLAKERGKMEAIAVEGIAEGGEPYAYSLEILLPGDKQVKYETVHGNAVEVADPVSVPAYVWKVGMKEVARVRTKEGYEITATLDHKLMTPEGWKEIKDLKPGDKILLPRFEVEEDFGSESIGEDLAFVLGWFIGDGYLNVKDKRAWFYFNAEKEEEIAWKIREILAKRFEIKAEPHRYGNQIKLGVRGKAYEWLESIVKTNEKRIPEIVYRLKPNEIASFLRGLFSADGYVDNDMAIRLTSKSRELLREVQDLLLLFGILSKIYERPYKREFKYTTKDGEERTYTTEGYYELVIANYSRKIFAERIGLEGYKMEKLSLEKIKVDEPIVTVESVEILGKKLVYDFTVPEHHMYISNGFMSHNCGEEPLYEYESCNLASINLAKFVKYDENGKPYFDWDEYAYVIQKVAKYLDNSIDVNKFPLPEIDYNTKLTRRIGVGMMGLADALFKLGIPYNSEEGFKFMRKVTEYLTFYAYKYSIEAAKKRGTFPLYEKTGYPKGELPVEGFYHPEIWNLPWDKLVEEIKKYGVRNAMVTTCPPTGSVSMIADTSSGIEPIFALVYKKSVTVGEFYYVDPVFEAELKRRGLYSEELLKKISDNYGSVQGLEEIPEDMRRVFVTALDIHWLDHLLAQANIQMWLTDSASKTINMINEATVEDVKAAYLIAHFLGCKGVTVYRDGSLSVQVYSVEGEKKRRYKPKPSEYAKKVLLEIVEKEPWIKNFINVDEILNGKRQELNFSLTGLKRETHEVKKVEVKQQNNKIPEEKIKELLGVVYCPVCYEREGKLVELRMESGCATCPVCGWSKCVIS

SEQ ID NO: 554 - protein, 2122 aa, Pyrococcus abyssi; identical to SEQ ID NO: 553
  Pab RIR1-2 precursor

SEQ ID NO: 555 - protein, 2122 aa, Pyrococcus abyssi; identical to SEQ ID NO: 553
  Pab RIR1-3 precursor

SEQ ID NO: 556 - protein, 916 aa, Pyrococcus abyssi
  Pab RtcB (Pab Hyp-2) precursor
MTVPLKRIDKIRWEIPKFDKRMRVPGRVYADDVLLEKMKSDRTLEQAANVAMLPGIYKYSIVMPDGHQGYGFPIGGVAAFDVNEGVISPGGIGYDINCLAPGSKVLTEHGYWLKVEELPEKFKLQGVKVYNLDEGHNDTSNVAFVAEREVETGEMAVRVTTESGRIIEGSEDHPVLTPEGYVYLGNLKEGNLVIVYPFEGVEYEERKGVILDEDAFKDEDPQVLSFLREKGLVPLRWDDPRIGTIARILGFAFGDGYLGEMGGRLTLTFYGKEETLRELKKDLERLGISANLYVRESIETTSGHSEGKSLSIELRVTSRSFALFLEKLGMPRGKKTEKAYRVPGWILEAPLWVKRNFLAGLFAADGSIVEFKGNTPLPINLTQSKSDELAENLVEFLGDVAKLLAEFGIETTLYEVKSKKGVTYRLSIVGEDSIRTFVERINYEYDPEKKVKGLIAAAYLKLKERIVKEAHEAVKDDFPTFEEFAKERGYEGGFVAEKVVKVERVKPEYTKFYDIGVYHEAHNFIANGIVVHNCGVRLIRTNLTEKDVRPRIKQLVDTLFKNVPSGVGSQGRVRLHWTQIDDVLVDGAKWAVDNGYGWEEDLERLEEGGRMEGADPDAVSQRAKQRGAPQLGSLGSGNHFLEVQVVDKIFDPEVAKVYGLFEGQVVVMVHTGSRGLGHQVASDYLRIMERAIRKYRIPWPDRELVSVPFQSEEGQRYFSAMKAAANFAWANRQMITHWVRESFQEVFRQDPEDLGMSIVYDVAHNIGKVEEHEVDGKKVKVIVHRKGATRAFPPGHEAIPKIYRDVGQPVLIPGSMGTASYVLAGTEGAMKETFGSTCHGAGRVLSRKAATRQYRGDRIRQELLNRGIYVRAASMRVVAEEAPGAYKNVDNVVKVVSEAGIAKLVARMRPIGVAKG

SEQ ID NO: 557 - protein, 1017 aa, Pyrococcus abyssi
  Pab VMA precursor
MVAKGRIIRVTGPLVVADGMKGAKMYEVVRVGELGLIGEIIRLEGDKAVIQVYEETAGVRPGEPVIGTGSSLSVELGPGLLTSIYDGIQRPLEVIREKTGDFIARGVTAPALPRDKKWHFIPKVKVGDKVVGGDIIGEVPETSIITHKIMVPPGIEGEIVEIAEEGEYTIEEVIAKVKTPSGEIKELKMYQRWPVRVKRPYKEKLPPEVPLITGQRVIDTFFPQAKGGTAAIPGPFGSGKCVDGDTLVLTKEFGLIKIKDLYKILDGKGKKTVNGNEEWTELERPITLYGYKDGKIVEIKATHVYKGFSAGMIEIRTRTGRKIKVTPIHKLFTGRVTKNGLEIREVMAKDLKKGDRIIVAKKIDGGERVKLNIRVEQKRGKKIRIPDVLDEKLAEFLGYLIADGTLKPRTVAIYNNDESLLRRANELANELFNIEGKIVKGRTVKALLIHSKALVEFFSKLGVPRNKKARTWKVPKELLISEPEVVKAFIKAYIMCDGYYDENKGEIEIVTASEEAAYGFSYLLAKLGIYAIIREKIIGDKVYYRVVISGESNLEKLGIERVGRGYTSYDIVPVEVEELYNALGRPYAELKRAGIEIHNYLSGENMSYEMFRKFAKFVGMEEIAENHLTHVLFDEIVEIRYISEGQEVYDVTTETHNFIGGNMPTLLHNTVTQHQLAKWSDAQVVIYIGCGERGNEMTDVLEEFPKLKDPKTGKPLMERTVLIANTSNMPVAAREASIYTGITIAEYFRDMGYDVALMADSTSRWAEALREISGRLEEMPGEEGYPAYLASKLAEFYERAGRVVTLGSDYRVGSVSVIGAVSPPGGDFSEPVVQNTLRVVKVFWALDADLARRRHFPAINWLTSYSLYVDAVKDWWHKNVDPEWKAMRDKAMELLQKESELQEIVRIVGPDALPERERAILLVARMLREDYLQQDAFDEVDTYCPPEKQVTMMRVLLNFYDKTMEAISRGVPLEEIAKLPVREEIGRMKFEPDVGKIKALIDKTNEQFEELFKKYGA

SEQ ID NO: 558 - protein, 1150 aa, Pyrococcus furiosus
  Pfu KlbA precursor
MGVYEVRKNMEEDKKKKKSWIDEILSSDNLSLESILKKSEEEKPKKVSVESKSLSLGDILSGRVKEEEKKREASPLQSLLGGGPPKLEEILKKEEPKREEKKPKIERGALGLQEILAGTTPRTTSYAGEVRVLDVYGNIRILKVKGEPVPIYEINMPKLSKEEERLVKMVRDRAIVEIQIDPESIPNPEERRKVFLREVRRMVKEMAPTLSEGRVELISELIVQNMIGYGKIDPLVRDDNLEEIMVIGINKPVYVWHRRFNMCKTNIVFTDERELLTIIERIAREVGRRIDQQNPLLDARLPDGSRVNATLPPISLDGPTLTIRKFKKDPLTIIDLIRFGTLNSEVAAFLWLLVDGLGVKPANILVAGGTGSGKTTTLNSLAMFIPPSERVISIEDTAELQLPIEHWVRLETRPPNVEGKGEITMDDLVKNTLRMRPDRIIVGEVRGPEARTMFTAMNTGHDGALYDFSVIQLSNGRFVLIGDLVEELFKKYAEKIKTYKDLEYIELNEEDRFEVVSVSPDLKANKHVVSRVWRRKVREGEKLIRIKTRTGNEIILTRNHPLFAFSNGDVVRKEAEKLKVGDRVAVMMRPPSPPQTKAVVDPAIYVKISDYYLVPNGKGMIKVPNDGIPPEKAQYLLSVNSYPVKLVREVDEKLSYLAGVILGDGYISSNGYYISATFDDEAYMDAFVSVVSDFIPNYVPSIRKNGDYTIVTVGSKIFAEMLSRIFGIPRGRKSMWDIPDVVLSNDDLMRYFIAGLFDADGYVDENGPSIVLVTKSETVARKIWYVLQRLGIISTVSRVKSRGFKEGELFRVIISGVEDLAKFAKFIPLRHSRKRAKLMEILRTKKPYRGRRTYRVPISSDMIAPLRQMLGLTVAELSKLASYYAGEKVSESLIRHIEKGRVKEIRRSTLKGIALALQQIAKDVGNEEAWVRAKRLQLIAEGDVYWDEVVSVEEVDPKELGIEYVYDLTVEDDHNYVANGILVSNCMGTIHANSARETIIRLESPPMSVPRIMIPALDIIIMQVRYHSRKKGTLRRITEIAEVSGIEGESIQLNFLYKYDPAKDELIRTEVPSRFIQTLSYHTGLSIEELKWEIEKRRLILDWMIEKGIRRIDEVGYYIKEFYIDEEELLKKIEREAETIETSKRAKEFI

SEQ ID NO: 559 - protein, 1740 aa, Pyrococcus furiosus
  Pfu RIR1-1 precursor
MAVEKVMKRDGRIVPFDESRIRWAVQRAMWEVGIRDEKKLDEVVKSIVQRINELYDGKIPHIENIQDIVELELMRAGLFEVAKAYILYRKKKAEIREEKKRILNKKELDEIDKRFSINALRVLASRYLKKDENGNIVESPRELFERVAILAVIPDLLYDERVFDKNGNYSQDLKRVEYYLEHFEEFDRKYSIGKYKLNKYHFERMVNLYKELAEQGKMKVSIDEFLAMLEKGEFNEYEKEINEYFRLMTNQIFMPNTPALINSGRPLGMLSACFVVPIEDDMESIMKAAHDVAMIQKMGGGCIDGKAKIIFENEGEEHLTTMEEMYERYKHLGEFYDEEYNRWGIDVSNVPIYVKSFDPESKRVVKGKVNVIWKYELGKDVTKYEIITNKGTKILTSPWHPFFVLTPDFKIVEKRADELKEGDILIGGMPDGEDYKFIFDYWLAGFIAGDGCFDKYHSHVKGHEYIYDRLRIYDYRIETFEIINDYLEKTFGRKYSIQKDRNIYYIDIKARNITSHYLKLLEGIDNGIPPQILKEGKNAVLSFIAGLFDAEGHVSNKPGIELGMVNKRLIEDVTHYLNALGIKARIREKLRKDGIDYVLHVEEYSSLLRFYELIGKNLQNEEKREKLEKVLSNHKGGNFGLPLNFNAFKEWASEYGVEFKTNGSQTIAIINDERISLGQWHTRNRVSKAVLVKMLRKLYEATKDEEVKRMLHLIEGLEVVRHITTTNEPRTFYDLTVENYQNYLAGENGMIFVHNTGLNFSKLRPEGDIVGTTTGAASGPVSFMHLIDAVSDVIKQGGVRRGANMGILEIWHPDIEKFIHAKEKNIGTNVLSNFNISVGIWEDFWEALKEGKKYPLINPRTGEVVKEVDPKTLFEELAYMAWAKADPGVIFFDVINRRNVLKKAKGGPIRATNPCVVGDTRILTPEGYLKAEEIFSLAKERGKKEAVAVEGIAEEGEPYAYSVEILLPGEEKVEYETVHGKVLAVADPVAVPAYVWKVGRKKVARVKTKEGYEITATLDHKLMTPEGWKEVGKLKEGDKILLPRFEVEEEFGSESIGEDLAFVLGWFIGDGYLNVNDKRAWFYFNAEKEEEIAVRIRDILVKHFGIKAELHRYGNQIKLGVRGEAYRWLENIVKNNEKRIPEIVYRLKPREIAAFLRGLFSADGYVDKDMAIRLTSKSRELLREVQDLLLLFGILSKIYEKPYESEFHYTTKNGEERIYRSKGYYELVITNYSRKLFAEKIGLEGYKMEKLSLKKTKVDQPIVTVESVEVLGEEIVYDFTVPNYHMYISNGFMSHNCGEEPLYEYESCNLASINLAKFVKYDENGKPYFDWDEYAYVIQKVAKYLDNSIDVNKFPLPEIDYNTKLTRRIGVGMMGLADALFKLGIPYNSEEGFKFMRKVTEYLTFYAYKYSVEAAKKRGTFPLYDKTEYPEGKLPVEGFYHPEIWNLPWDKLVEEIKKYGLRNAMVTTCPPTGSVSMIADTSSGIEPVYALVYKKSVTVGEFYYVDPVFEEELKKRGLYSEELLKKISDNYGSVQGLEEIPEDMQRVFVTALDIHWLDHIIAQASIQMWLTDSASKTINMINEATVEDVKAAYLIARFLGCKGVTVYRDGSLSVQVYSVEGEKKKRRFKPKPSEYAKKILLEIVEKEPWIKNFINVDEILNGKKEQLLFSLRPANESKLKVPGREEEVRPGNIPEEKIRELLGVVYCPVCYEKEGKLVELKMESGCATCPVCGWSKCVIS

SEQ ID NO: 560 - protein, 1740 aa, Pyrococcus furiosus; identical to SEQ ID NO: 559
  Pfu RIR1-2 precursor

SEQ ID NO: 561 - protein, 1013 aa, Pyrococcus furiosus
  Pfu VMA precursor
MPAKGRIIRVTGPLVIADGMKGAKMYEVVRVGELGLIGEIIRLEGDKAVIQVYEETAGLKPGEPVEGTGSSLSVELGPGLLTSIYDGIQRPLEVLREKSGHFIARGISAPALPRDKKWHFTPKVKVGDKVVGGDIIGEVPETSIIVHKIMVPPGIEGEIVEIADEGEYTIEEVIAKVKTPSGEIKELKMYQRWPVRVKRPYKEKLPPEVPLVTGQRVIDTFFPQAKGGTAAIPGPFGSGKCVDGDTLILTKEFGLIKIKDLYEKLDGKGRKTVEGNEEWTELEEPITVYGYKNGKIVEIKATHVYKGASSGMIEIKTRTGRKIKVTPIHKLFTGRVTKDGLVLEEVMAMHIKPGDRIAVVKKIDGGEYVKLDTSSVTKIKVPEVLNEELAEFLGYVIGDGTLKPRTVAIYNNDESLLKRANFLAMKLFGVSGKIVQERTVKALLIHSKYLVDFLKKLGIPGNKKARTWKVPKELLLSPPSVVKAFINAYIACDGYYNKEKGEIEIVTASEEGAYGLTYLLAKLGIYATIRRKTINGREYYRVVISGKANLEKLGVKREARGYTSIDVVPVDVESIYEALGRPYSELKKEGIEIHNYLSGENMSYETFRKFAKVVGLEEIAENHLQHILFDEVVEVNYISEPQEVYDITTETHNFVGGNMPTLLHNTVTQHQLAKWSDAQVVVYIGCGERGNEMTDVLEEFPKLKDPNTGKPLMERTVLIANTSNMPVAAREASIYTGITIAEYFRDMGYDVALMADSTSRWAEALREISGRLEEMPGEEGYPAYLASRLAEFYERAGRVVTLGSDYRVGSVSVIGAVSPPGGDFSEPVVQNTLRVVKVFWALDADLARRRHFPAINWLTSYSLYVDAVQDWWHKNVDPEWRRMRDKAMELLQKEAELQEIVRIVGPDALPERERAILLVARMLREDYLQQDAFDEVDTYCPPQKQVTMMRVLMTFYERTMDAISRGVPLEEIAKLPVREEIGRMKFEPDIEKIRALIDKTNEQFDELLKKYGA

SEQ ID NO: 562 - protein, 1108 aa, Pyrococcus horikoshii OT3
  Pho CDC21-1 precursor
MEREEIIERFLKFFREYAEEGEEPLYMGKIKDLLTITPKRSIVINWMHLNSYDPELAEEVIENPEECILAAEDAIQIILKEDFLREDVPKIHARFHNLPKTLMVKEVGAEHINKLIQVEGVVTRVTEIKPFVSVAVFVCKDCGHEMVVPQKPYEGFVAVKKCEQCGSKNVQLDVEKSKFVNFQMFRIQDRPESLRGGQMPRFIDGILLDDIVDTAMPGDRVIVVGILRVIQEKREKVPTFKKVIEVNHIEPISKELEELEISPEDEQKIRELAKRKDIVSAIVDSIAPAIYGYKEVKKGIALALFGGVSRTLPDGTRLRGDIHVLLVGDPGVAKCVDYDTEVLLGDGRKRKIGEIVEEAIKKAEKEGKLGRVDDGFYAPINLELYALDVRTLKVRKVKADIAWKRTTPEKMLRIRTKRGREIRVTPTHPFFTLEEGRIKTKKAYELKVGEKIATPREEAPEAEIFWDEVVEIEEYKPNNSWVYDLQVPEHHNFIANGIFVHNSQLLRYVANLAPRAIYTSGKSSSAAGLCVAPDTLINTDNGRVEIGKFVEEWMKEVGEISEEGISYAPCFRKVETFKDGKIVESPIRRVWKLRAPKKLVRIKTENGRSIALTRETKLLTINDGELSWVEAGEVKVGTYVGTVKSEKDVIPGAGKTIRDVSKLYNMEMEVKDYLTREEVRKAIEKLEEIMNPMNIKIPGVQESYEELLRKLETTNDERVRNETLILLSDVSDAHELAKEKIEKIKEIVNSEVHWEKVTEVGEVDGVEYVYDLTVEGSHNFVANGFIVHNTAAVVRDEFTGGWVLEAGALVLADGGYALIDELDKMSDRDRSVIHEALEQQTISLSKAGITATLNARTTVIAAANPKHGRFNRMKRVSEQIDLPPTLLSRFDLIFVLMDEPDEKVDSEIARHILKVRRGESEVVTPKIPHELLRKYIAYARKNIHPVISEEAMEEIEKYYVKMRRSAKKSSGDEIKPIPITARQLEALIRLSEAHARMRLSPIVTREDAREAIKLMEYTLKQIAVDEAGQLDVTILEVGQSARKLSKVERILDIVEKLERTSEKGAKIDDILEEAAKFGIEKSEAREILEKLLEKGQIYMPENGYYKTV

SEQ ID NO: 563 - protein, 1108 aa, Pyrococcus horikoshii OT3; identical to SEQ ID NO: 562
  Pho CDC21-2 precursor

SEQ ID NO: 564 - protein, 1044 aa, Pyrococcus horikoshii OT3
  Pho IF2 precursor
MSYVKRIRQPIIAVLGHVDHGKCLLPEERVILPDYGPITLEELFNMTKETVFKDEEKEVRKLGIRMPVAGVDGRVRLLEGPYVWKVRYKGKMLRVKLKDWHSVAVTPEHPFLTTRGWVRADQLKPGDYVAVPKILPGKDDKEKFLQYVHEKLKGKVHIKLPSSDEEWETFFYFAGTIFGRENSVNPEGLTHEVKALLELFKVLFEYPREVLRVLFMAPVRYVANFLRGFFDINGYVNGEELRVEVRGAPHEVLEELSLILLRLGIVSKIYPTSLAISGRRNLELFRRYIGFSEKQKAKELEGIIRRSENSESYPIFEELRRIRLLFGFTRAELSSTIPLYSKYESKEAPSYEILMKILNTIEKGSKDLNKKITILEGRVRDHEYIEEFKREGLIKDGKLTELGKELLEVWRNREFDSRDVNYLRNIIENFVFLPVEKIEEFEYDGYVYDVTTETHNFIANGILVHNTTLLDKIRKTNVAAKEAGGITQHIGATEVPIDVVKKIAGPLIKLWKAEIRLPGLLFIDTPGHEAFTSLRARGGSLADLAVLVIDVNEGFQPQTIESIEILRRYRTPFVVAANKIDRIRGWVIEEDEPFLMNIKRQDQRAIQELETKLWELIGKFYEFGFQANRFDRVQNFTRELAIVPISAKYGIGIAELLVLIAGLSQKYLEEKLKIEVEGPARGTILEVREEPGLGHTIDVIIYDGTLHKDDTIVVGGKDKAIVTKVRALLKPKPLDEIRDPRFRFDYVDEVTAAAGVKIAAPGLEEALAGSPVIAAPTPEDVERAKEEIMRQIESVVISTDKVGVIVKADTLGSLEALSKELQEKEIPIRKADVGNISKTDVMEALSVKEENPKYGVILGFNVKVNEDAKEVAKAKEVPIFVGNIIYKLIEDYEAWIKEEEEKRKRELLAKVTFPGVIKLYPDERYVFRRSNPAIVGIEVLEGRIKPGVTLIKQNGQKVGTIRSIKSRDEFLQEARKGQAVAIAIEGAIVGRHIHPGETLYVDLSRDDAIILLKHLRDVLEDTDIKALKMIAQVKAKEDPFWRAV

SEQ ID NO: 565 - protein, 1136 aa, Pyrococcus horikoshii OT3
  Pho KlbA precursor
MSEKEEKKRARSWIDEILSSDNLTLEAILKKSSGEGKSTPEKPKTESLSRGNILPTPSPQKQEAGEGLPLAFLEKTGALRLEDILKKPEEERKEEEVPIRIQEILTPPTSKKYTGQILKVLDVYGNVRIIRVKGEAVPIYELSIPELSKDEEKLLKLVRDRAIVEIQIDPESIPNLEERRRIFLREVRKMVKEMAPTLSEGRVELLSELIVQNMIGYGKLDPLVRDDNLEEIMVIGTNRPVYVWHRRFGMCKTNITFTSEREILTIIERIAREVGRRIDQQNPLLDARLPDGSRVNATLPPISLDGPTITIRKFKKDPLTIIDLIKFRTLNSEVAAFLWLLVDGLGVKPANILVAGGTGSGKTTTLNSLAMFIPPSERVISIEDTAELQLPIEHWVRLETRPPNVEGKGEITMDDLVKNTLRMRPDRIIVGEVRGPEARTMFTAMNTGHDGALYDFSIIQLSNGRFVLIGDLVEELFKKYSDKIERYKDLEYIELNDEDRFEVVSVGPDLKANKHIVSRVWRRRVREGEKLIRIKTRTGNEVILTRSHPLFAFSNGDVVRKEAGNLKVGDRVAVMMNPPKPPQTKAVVDLSIYAKISDYYLVPNGKGMIKVPNKGLPPEKAQYLVSVNSHPVKLVREVDEKLSYLAGVILGDGYISSNGYYISATFDDEDYMEAFVSVISDFIPNYIPNVKENGKYMVVTVGSKIFAEMLSRIFGIPKGRKLEWDVPDIVLSNDDLMRYFIAGLFDADGYVDENSIILVTKSENVARKIWYALQRLGIISTVSRVKNKGFKEGEIFRVIISGVDDLAKFARSIPLHHSRKRAKLMEVLKTKKTHRGRRAYRVPISAEMIAPLRQMLGLTVSELSKLASHYAGEKVSESLIRHVEKGRVKEIRRSTLRGIALALQQVAKDVGDEEAWVKARRLQLIAEGDVYWDEVVSVEEVDPKELGIEYVYDLTVEDDHNYVANGILVSNCMGTIHSNSARETIIRLESPPMNVPRIMIPALDIIIMQVRYHTRKKGTIRRMTEIAEVSGIEGESIQLNFLYKYDPAKDEIVRTEVPSRFLNILSYHTGMGMDELYYEIEKRKLVLDWMIEKGIRRIDEVGAQIREFYIDEEEFFKKLEREATTIEMSKRVKEFI

SEQ ID NO: 566 - protein, 1352 aa, Pyrococcus horikoshii OT3
  Pho LHR precursor
MMGNVRWAKRKYTDDEIYSILDPLVREWFKRKFNSFTPPQRYAIVEIHKGENVLISSPTGSGKTLSAFLAIISELISLGRKGKLEDKIYCVYISPLRALNNDIRRNLEEPLREIKELAQELGEEIPEIRIAVRTSDTSSYEKSKMVKKPPHILITTPESLAIALNAPKFRERLRDVRWVIVDEVHALAENKRGSHLALTLERLRELVGRDFVRIGLSATIHPLEEVAKFVFGFNDDGTPRSGLIVDVSFAKQTEIKVESVVEDLIYTDAETLSNALYNRLAELIRKHKTTLIFTNTRSGAERVAFNLKKRFPEFKGLIETHHSSLSREVRLDVEEKLKRGELRAVVCVSGDSKVLTEKGPVEIRHLNSGMIVGINGFKSRFVKFQELHQVKYQEYGVKIRTQLGFEVKCTREHRFLTIDKNGELRWVEAWRLKEGDYVGIIRKLPSPNSKVLILDFLPESTYLWLNKEFLKKLKVSIKEKFGSIKNYAKERGFNSSYLVKQLNGLSPFRWGRLRVILNDVSIEISRDDIERITSRRGKYSLPPELTPGIARLLGFWMASGSLNRNTLIFYSQDKKILERYEDLCKREFRVKGRIKAQDKGTYILEIPSSLLSFVFKNLARPKLEVPPIIYILPEKHKEEFLAGYFDGNGFIKIENGRIHSLGFFAFNRKFAEGIRDILLQLGILSSINEQTFEVSIIEGEKFLKIVNSWRSNYYKEWEDVIPNLEKRLKEIEEKLGYPGTYNRREIRRSELKAIIKLYEKVARERGLNDVLKELSYLKELSEGDIFFDRITSIEPVYLDVAYGIINSETGNYVVNGFVSKNSSTSLELGIDIGTIDLVVLVGSPKSVNRALQRIGRAGHRLHEVSRGIILALDRDDLVEVTVLAHNARNRKLDRIKIPKNPLDVLVQHILGMALEKVWEIEEAYRVVRRAYPYHELPFSDFMNVLKYLAGEYSGLEEKRVYAKIWLENGKFGRRGKMTRAIYYMNTGTIPDEAKIDVFTLDKKYIGTVEEEFAERLMPGDIFVLAGRTYEFVKSRGNKIYVIPREGAKPTIPSWFSEMLPLSFDLAIDIQRFRGEVKKLLTSKRAESLLMKKYGIDNVTAKAIISYFREQAKYSIIPDDETVLVEIVREGNVTKYFFHTLIGRRANDALSRAFAYMISKKKKCNVGIAITDNGFMLKVPVDKELKEGEILELFYVENLREILKRALDNTELLKRRFRHVANRGLLILRRYMGREKSLSRQQMNAQTLLNFLKKNHPNFPLLKEVYREIMEDKMDIENAELFLKWIKEGKIKVTVREHPYPSPFAFNLEVIGASDVVLMEDRRELIKELHKKIMAIIKGVPSPTAPRSPITGV

SEQ ID NO: 567 - protein, 1127 aa, Pyrococcus horikoshii OT3
  Pho Lon precursor
MLSGESEMDEERMDLGIEFETTEEIPVPERLIDQVIGQDHAVEVIKTAAKQRRHVLLIGEPGTGKSMLGQAMAELLPTEELEDILVFPNPEDENMPRIKTVPAGQGRKIVEEYRRKAKEQEGVRFYLLFFVFFIVAMAVFLSHGDPNTLLLGVFVILVALMVTANMRFKTQAMVPKLLVDNSGRKRAPFVDATGAHAGALLGDVRHDPFQCFSGEEVIIVEKGKDRKVVKLREFVEDALKEPSGEGMDGDIKVTYKDLRGEDVRILTKDGFVKLLYVNKREGKQKLRKIVNLDKDYWLAVTPDHKVFTSEGLKEAGEITEKDEIIRVPLVILDGPKIASTYGEDGKFDDYIRWKKYYEKTGNGYKRAAKELNIKESTLRWWTQGAKPNSLKMIEELEKLNLLPLTSEDSRLEKVAIILGALFSDGNIDRNFNTLSFISSERKAIERFVETLKELFGEFNYEIRDNHESLGKSILFRTWDRRIIRFFVALGAPVGNKTKVKLELPWWIKLKPSLFLAFMDGLYSGDGSVPRFARYEEGIKFNGTFEIAQLTDDVEKKLPFFEEIAWYLSFFGIKAKVRVDKTGDKYKVRLIFSQSIDNVLNFLEFIPISLSPAKREKFLREVESYLAAVPESSLAGRIEELREHFNRIKKGERRSFIETWEVVNVTYNVTTETGNLLANGLFVKNSGGLGTPAHLRVEPGMIHRAHKGVLFIDEIATLSLKMQQSLLTAMQEKKFPITGQSELSSGAMVRTEPVPCDFILVAAGNLDTIEKMHPALRSRIRGYGYEVYMRTTMPDTPENRRKLVQFVAQEVKKDGRIPHFTRDAVEEIVREAQRRAGRKGHLTLRLRDLGGVVRAAGDIAVRKGKKYVTREDVLEALKLAKPLEKQLADWYIERKKEYQVIRVEGGEIGRVNGLAIIGEQSGIVLPIEAIVAPAASKEEGKIIVTGKLGEIAKEAVLNVSAIIKRYKGEDISKYDIHVQFLQTYEGVEGDSASISVATAVISALEEIPVRQDVAMTGSLSVRGEVLPVGGVTPKIEAAIEAGIKTVIIPKSNEKDVFLSPDKRKKIKIIPVERIDEVLEVALVESEKKRELIKRVRESLPLWMEETPSGETLHEHKGGATLPLEESKA

SEQ ID NO: 568 - protein, 1235 aa, Pyrococcus horikoshii OT3
  Pho Pol I precursor
MILDADYITEDGKPIIRIFKKENGEFKVEYDRNFRPYIYALLRDDSAIDEIKKITAQRHGKVVRIVETEKIQRKFLGRPIEVWKLYLEHPQDVPAIRDKIREHPAVVDIFEYDIPFAKRYLIDKGLTPMEGNEKLTFLAVDIETLYHEGEEFGKGPVIMISYADEEGAKVITWKKIDLPYVEVVSSEREMIKRLIRVIKEKDPDVIITYNGDNFDFPYLLKRAEKLGIKLLLGRDNSEPKMQKMGDSLAVEIKGRIHFDLFPVIRRTINLPTYTLEAVYEAIFGKPKEKVYADEIAKAWETGEGLERVAKYSMEDAKVTYELGREFFPMEAQLARLVGQPVWDVSRSSTGNLVEWFLLRKAYERNELAPNKPDEKEYERRLRESYEGGYVKEPEKGLWEGIVSLDFRSLYPSIIITHNVSPDTLNREGCEEYDVAPKVGHRFCKDFPGFIPSLLGQLLEERQKIKKRMKESKDPVEKKLLDYRQRAIKILANSILPDEWLPIVENEKVRFVKIGDFIDREIEENAERVKRDGETEILEVKDLKALSFNRETKKSELKKVKALIRHRYSGKVYSIKLKSGRRIKITSGHSLFSVKNGKLVKVRGDELKPGDLVVVPGRLKLPESKQVLNLVELLLKLPEEETSNIVMMIPVKGRKNFFKGMLKTLYWIFGEGERPRTAGRYLKHLERLGYVKLKRRGCEVLDWESLKRYRKLYETLIKNLKYNGNSRAYMVEFNSLRDVVSLMPIEELKEWIIGEPRGPKIGTFIDVDDSFAKLLGYYISSGDVEKDRVKFHSKDQNVLEDIAKLAEKLFGKVRRGRGYIEVSGKISHAIFRVLAEGKRIPEFIFTSPMDIKVAFLKGLNGNAEELTFSTKSELLVNQLILLLNSIGVSDIKIEHEKGVYRVYINKKESSNGDIVLDSVESIEVEKYEGYVYDLSVEDNENFLVGFGLLYAHNSYYGYYGYAKARWYCKECAESVTAWGRQYIDLVRRELEARGFKVLYIDTDGLYATIPGVKDWEEVKRRALEFVDYINSKLPGVLELEYEGFYARGFFVTKKKYALIDEEGKIVTRGLEIVRRDWSEIAKETQARVLEAILKHGNVEEAVKIVKDVTEKLTNYEVPPEKLVIYEQITRPINEYKAIGPHVAVAKRLMARGIKVKPGMVIGYIVLRGDGPISKRAISIEEFDPRKHKYDAEYYIENQVLPAVERILKAFGYKREDLRWQKTKQVGLGAWIKVKKS

SEQ ID NO: 569 - protein, 1434 aa, Pyrococcus horikoshii OT3
  Pho Pol-II precursor
MVLMELPKEMEEYFSMLQREIDKAYEIAKKARAQGKDPSLDVEIPQASDMAGRVESLVGPPGVAERIRELVKEYGKEIAALKIVDEIIDGKFGDLGSKEKYAEQAVRTALAILTEGVVSAPIEGIASVKIKRNTWSDNSEYLALYYAGPIRSSGGTAQALSVLVGDYVRRKLGLDRFKPSEKHIERMVEEVDLYHRTVSRLQYHPSPEEVRLAMRNIPIEITGEATDEVEVSHRDIPGVETNQLRGGAILVLAEGVLQKAKKLVKYIDKMGIEGWEWLKEFVEAKEKGEEIEEEGSAESTVEETKVEVDMGFYYSLYQKFKSEIAPNDKYAKEIIGGRPLFSDPSRNGGFRLRYGRSRVSGFATWGINPATMILVDEFLAIGTQLKTERPGKGAVVTPVTTIEGPIVKLKDGSVVKVDDYKLALKIRDEVEEILYLGDAVIAFGDFVENNQTLLPANYCEEWWILEFTKALNEIYEVELKPFEVNSSEDLEEAADYLEVDIEFLKELLKDPLRTKPPVELAIHFSEILGIPLHPYYTLYWNSVKPEQVEKLWRVLKEHAHIDWDNFRGIKFARRIVIPLEKLRDSKRALELLGLPHKVEGKNVIVDYPWAAALLTPLGNLEWEFRAKPLHTTIDIINENNEIKLRDRGISWIGARMGRPEKAKERKMKPPVQVLFPIGLAGGSSRDIKKAAEEGKVAEVEIALFKCPKCGHVGPEHICPNCGTRKELIWVCPRCNAEYPESQASGYNYTCPKCNVKLKPYAKRKIKPSELLKRAMDNVKVYGIDKLKGVMGMTSGWKMPEPLEKGLLRAKNDVYVFKDGTIRFDATDAPITHFRPREIGVSVEKLRELGYTHDFEGNPLVSEDQIVELKPQDIILSKEAGKYLLKVAKFVDDLLEKFYGLPRFYNAEKMEDLIGHLVIGLAPHTSAGIVGRIIGFVDALVGYAHPYFHAAKRRNCFPGDTRILVQINGTPQRVTLKELYELFDEEHYESMVYVRKKPKVDIKVYSFNPEEGKVVLTDIEEVIKAPATDHLIRFELELGSSFETTVDHPVLVYENGKFVEKRAFEVREGNIIIIIDESTLEPLKVAVKKIEFIEPPEDFVFSLNAKKYHTVIINENIVTHQCDGDEDAVMLLLDALLNFSRYYLPEKRGGKMDAPLVITTRLDPREVDSEVHNMDIVRYYPLEFYEATYELKSPKELVGVIERVEDRLGKPEMYYGLKFTHDTDDIALGPKMSLYKQLGDMEEKVKRQLDVARRIRAVDEHKVAETILNSHLIPDLRGNLRSFTRQEFRCVKCNTKFRRPPLDGKCPICGGKIVLTVSKGAIEKYLGTAKMLVTEYKVKNYTRQRICLTERDIDSLFETVFPETQLTLLVNPNDICQRIIMERTGGSKKSGLLENFANGYNKGKKEEMPKKQRKKEQEKSKKRKVISLDDFFSRK

SEQ ID NO: 570 - protein, 1624 aa, Pyrococcus horikoshii OT3
  Pho r-Gyr precursor
MKAIYRGMCPNCRGAITDERLSNKNPCEGCLSEPILSEDYNELIVAVRNALKLRGTLKDWEELYRLNKEVSEIEELFEKSTGFKFWSAQRTWVKRIIRGKSFSIIAPTGMGKSTFGAFISIYFATKGKKSYIVVPTTPLVIQTVKKIESMLEKANVSVRLVYYHGNLRKKEKEEALEKIRNGDFDILITSSQFLATRFKELLKDKKFDLIFVDDVDAFLKASKNIDRSLIMLGFSEEIIGRAWEVIKLKKQLAKLLQNEKKNEEEIEKLNKEIEKIEDEIEEYKRRNKIGILIVASATGSAKGDRIKLYRELLGFEVGSGRSVLRNIVDTYLLPEKPIEEHVVELLRKLGKGGLIFVPIDKGIEYAEELTDYLKSQGFKVELVSAKNKKGLELFEKGEIDYLVGVATYYGTLVRGLDLPHLIRFAIFTGVPKFRFSMDLEQPTIYRVLGLMSEILEFLPEEKKSEGEKLYARLRRLIRNIPQYELMKIEEALAEGLELEGFHNHVLEVFKQSVEFLREVLKDEEVIKKIAENPFLSLKEIEGKLYIEIPDVRTYIQASGRTSRLFAGGITKGLSVIIVDDQKVFNGLIRQMRWRFVEFDIKKFEEVNLKEVLKEIDRDREKVKLVIEGKISEQVKDLVKSALMIVESPNKARTIASFFGQPSKRKIGDLTAYEVSIGDKMLTILASGGHMFDLVTNEGYHGVLILKNNGKPYFVPVYDTIKRCRDCGHQFVDWEQKGVCPRCGSRNVHDALENVKAMRELALEVDEILIGTDPDTEGEKIAWDIRNVLAPYAPNIKRIEFHEVTRPAILRAIREARDINEDRVNAQLVRRIEDRWIGFELSQKLWEVFENRNLSAGRVQTPVLGWIVQRYKEFTESETDFLGIILENGINVTIENAKGEVREVEVKDVIIEEKDVNPLPPYTTDTMLQDASRFLGFSATKTMQLAQDLFEAGLCVTPDTLVSLSDGRIIEIREAVENSEESLLGINGLKPKEAKALKFWEIDWDGPIKVIKLKNGHEIKATPDHGLLVMRDGKIGWVSAKNIREGDYVAFIYNLGHRGGKKYTLPQLLKELGISEYENSSSQELNNREQEMDSKQISIELDERFWYIFGVILGKGTLKGDKVVIFQKDVKPVIEEALPFVRIFESADHIGFSHLILAEVFRRLGVGEGKLHSLVFGLREEYINAMIAGYFDASGTFLRRAVLTSKRGDILRMLSVYLYQIGIVNNLRRDEHAGVWELIISDLEKFREKIYPYLRIKKSQFDKVYSISKNEGDFLPVASIFRKLKFRDGFKNRILDEEIPRDEVAKVLEYAEDSPEKEFLNSLVEARVTWVRVEKIEERHYTGKLYDFTTTTENFISNGIVSHNCTYHRTDSIHVSNTGIEVAKEYITQEIGEEYFTPRKWGEEGAHEAIRPTRPIDTGRLIQLIRDGIITIPKNLTRDHFRLYDLIFRRFMASQMKPAKILYEKAIISTPFKDVEVEGYIDVLYDGWSKIKSLPLRQIPKLEKGQRLRVKEVKQWRAPKVSLYTQGDVIALMKERGIGRPSTYAKIVQTLLQRGYVIETKGKKKLVPTEKGIKVYQYLITKYKDLVSEERTRQLEKIMDMVEEAKADYQDVLNELYEEIKRYVR

SEQ ID NO: 571 - protein, 529 aa, Pyrococcus horikoshii OT3
  Pho RadA precursor
MMIMVKKGSDPEVVEIDEIEGLGLELEEESTTSKKKKKEKEIKSIEDLPGVGPATAEKLREAGFDTLEAIAVASPIELKEVAGISEGAALKIIQAARKAANLGTFMRADEYLKKRESIGRISTGSKSLDKLLGGGIETQAITEVFGEFGSGKCFARDTEVYYENDTVPHMESIEEMYSKYASMNGELPFDNGYAVPLDNVFVYTLDIASGEIKKTRASYIYREKVEKLIEIKLSSGYSLKVTPSHPVLLFRDGLQWVPAAEVKPGDVVVGVREEVLRRRIISKGELEFHEVSSVRIIDYNNWVYDLVIPETHNFIAPNGLVLHNTQLAHTLAVMVQLPPEEGGLNGSVIWIDTENTFRPERIREIAKNRGLDPDEVLKHIYVARAFNSNHQMLLVQQAEDKIKELLNTDKPVKLLIVDSLTSHFRSEYIGRGALAERQQKLAKHLADLHRLANLYEIAVFVTNQVQARPDAFFGDPTRPIGGHILAHSATLRVYLRKGKGGKRVARLIDAPHLPEGEAVFRITEKGIED

SEQ ID NO: 572 - protein, 855 aa, Pyrococcus horikoshii OT3
  Pho RFC precursor
MHNMEEVREVKVLEKPWVEKYRPQRLDEIVGQEHIVKRLKHYVKTGSMPHLLFAGPPGVGKCLTGDTKVIANGQLFELRELVEKISGGKFGPTPVKGLKVIGIDEDGKLREFEVQYVYKDKTERLIRIRTRLGRELKVTPYHPLLVNRRNGEIKWVKAEELKPGDKLAVPRFLPIVTGEDPLAEWLGYFLGGGYADSKENLIMFTNEDPLLRQRFMELTEKLFSDARIREITHENGTSKVYVNSKKALKLVNSLGNAHIPKECWRGIRSFLRAYFDCNGGVKGNAIVLATASKEMSQEIAYALAGFGIISRIQEYRVIISGSDNVKKFLNEIGFINRNKLEKALKLVKKDDPGHDGLEINYELISYVKDRLRLSFFNDKRSWSYREAKEISWELMKEIYYRLDELEKLKESLSRGILIDWNEVAKRIEEVAEETGIRADELLEYIEGKRKLSFKDYIKIAKVLGIDVEHTIEAMRVFARKYSSYAEIGRRLGTWNSSVKTILESNAVNVEILERIRKIELELIEEILSDEKLKEGIAYLIFLSQNELYWDEITKVEELRGEFIIYDLHVPGYHNFIAGNMPTVVHNTTAALALSRELFGENWRHNFLELNASDERGINVIREKVKEFARTKPIGGASFKIIFLDEADALTQDAQQALRRTMEMFSSNVRFILSCNYSSKIIEPIQSRCAIFRFRPLRDEDIAKRLRYIAENEGLELTEEGLQAILYIAEGDMRRAINILQAAAALDKKITDENVFMVASRARPEDIREMMLLALKGNFLKAREKLREILLKQGLSGEDVLIQMHKEVFNLPIDEPTKVYLADKIGEYNFRLVEGANEMIQLEALLAQFTLVGKKK

SEQ ID NO: 573 - protein, 1291 aa, Pyrococcus horikoshii OT3
  Pho RIR1 precursor
MKCRGVIMVVEKVMKRDGRIVPFDESRIRWAVQRAMWEVGVRDEKKLDEVVKAIVQRINELYDGKIPHIENIQDIVELELMRAGLFEVAKAYILYRKKKAEIREEKKRILNKKELDEIDKRFSINALRVLASRYLKRDENGNIIESPRELFERVAILAVIPDLLYDERVFDKDGNYSQDLKRVEYYLEHFEEFDGKYSIGKYKLNKYHFERMVNLYKELAEKGKMKVSIDEFLGMLERGEFNKYEKEIDEYFRLMTNQIFMPNTPALINSGRPLGMLSACFVVPIEDDMESIMKAAHDVALIQKAGGGTGINFSKLRPEGDIVGTTTGAASGPVSFMHLIDAVSDVIKQGGVRRGANMGILEIWHPDIEKFIHAKEKNIGTNVLSNFNISVGIWEDFLEALKEGKKYPLINPRTGEVVREVDPKSLFEELAYMAWAKADPGVIFFDIINRRNVLKEAKGGPIRATNPCVVGDTRILTPEGYLKIEDLFRMAKERNNGEKVVAVEGIAEGGEEFAYPVAILLPNEEEKEVIYETVHGKQLAIADPIEVKAYVWKVGKKKVARIKTKEGYEIIATLDHKIMTKDGWKAVEDLKEGDLIVLPRFEVEDNFGSESIGEDLAFVLGWLIGDGYINTDDKRVWFYFNAEKEEEIAQKISEILKKRFNSKAEPHRYGSEIKLGVRGEAYKFFEKIVKTNDKRVPEIVYHLKPNEIRAFLRGLFTADGYVDNDGAIRLTSKSRELLRDVQDLLLLFGIISKIYERPYKGTFEYTTKEGEKKVYTAQGYYELVIANYSRKLFAEKIGFEGEKQKKIKLNKTKIDEPYARVESVEIIGEEIVYDLTVPGIHSYISNGFISHNCGEEPLYEYESCNLASINLAKFVKYDENGKPYFDWDEYAYVIQKVTKYLDNAIDVNKFPLPEIDHNTKLTRRIGVGMMGLADALFKLGIPYNSEEGFKFMRKVTEYLTFYAYKYSVEAAKRRGTFPLYEKTEYPKGKLPVEGFYHPEIWNLPWDKLVEEIKKYGLRNAMVTTCPPTGSVSMIADTSSGIEPIYALVYKKSVTVGEFYYVDPVFEAELKKRGLYSEELLKKISDNYGSIQGLEEIPEDMKRVFVTALDIHWLDHLLAQASIQMWLTDSASKTINMINEATVEDVKAAYLIAHFLGCKGVTVYRDGSLSVQVYSVEGEKKKRKYKPKPSEYAKKVFLEIVEKEPWIKNFINVDEILNGKRESNLTFSLSIKKEHQEKPQENKGIPEEKIKELLGVVYCPVCYEREGKLVELRMESGCATCPVCGWSKCVIS

SEQ ID NO: 574 - protein, 964 aa, Pyrococcus horikoshii OT3
  Pho VMA precursor
MVAKGRIIRVTGPLVVADGMKGAKMYEVVRVGELGLIGEIIRLEGDKAVIQVYEETAGVRPGEPVVGTGASLSVELGPGLLTSIYDGIQRPLEVIREKTGDFIARGVTAPALPRDKKWHFIPKAKVGDKVVGGDIIGEVPETSIIVHKIMVPPGIEGEIVEIAEEGDYTIEEVIAKVKTPSGEIKELKMYQRWPVRVKRPYKEKLPPEVPLITGQRVIDTFFPQAKGGTAAIPGPFGSGKCVDGDTLVLTKEFGLIKIKELYEKLDGKGRKIVEGNEEWTELEKPITVYGYKDGKIVEIKATHVYKGVSSGMVEIRTRTGRKIKVTPIHRLFTGRVTKDGLILKEVMAMHVKPGDRIAVVKKIDGGEYIKLDSSNVGEIKVPEILNEELAEFLGYLMANGTLKSGIIEIYCDDESLLERVNSLSLKLFGVGGRIVQKVDGKALVIQSKPLVDVLRRLGVPEDKKVENWKVPRELLLSPSNVVRAFVNAYIKGKEEVEITLASEEGAYELSYLFAKLGIYVTISKSGEYYKVRVSRRGNLDTIPVEVNGMPKVLPYEDFRKFAKSIGLEEVAENHLQHIIFDEVIDVRYIPEPQEVYDVTTETHNFVGGNMPTLLHNTVTQHQLAKWSDAQVVIYIGCGERGNEMTDVLEEFPKLKDPKTGKPLMERTVLIANTSNMPVAAREASIYTGITIAEYFRDMGYDVALMADSTSRWAEALREISGRLEEMPGEEGYPAYLASKLAEFYERAGRVVTLGSDYRVGSVSVIGAVSPPGGDFSEPVVQNTLRVVKVFWALDADLARRRHFPAINWLTSYSLYVDAVKDWWHKNIDPEWKAMRDKAMALLQKESELQEIVRIVGPDALPERERAILLVARMLREDYLQQDAFDEVDTYCPPEKQVTMMRVLLNFYDKTMEAINRGVPLEEIAKLPVREEIGRMKFERDVSKIRSLIDKTNEQFEELFKKYGA

SEQ ID NO: 575 - protein, 1521 aa, Pelodictyon luteolum DSM 273
  Plut RIR1 precursor
MKISRLFTSPGENVYDRFEYTQKSSVLRNTDGSKVFEMNELEVPKHWSQMAADILAQKYFRKTGVPQVDGDGNPLLDEEGRPVTGSEHSIRQVVHRLAGCWRQWGEKHGYFDSPEDAEAFYDEVAYMLIAQQGAPNSPQWFNTGLNFAYGITGPAQGHYHVDPATKKVVESEDAYTRPQAHACFIQSVNDDLVNEGGIFDLAVREARVFKFGSGSGTNYSNLRSSGEKLSGGGSSSGLMSFLKIFDSAAGAIKSGGTTRRAAKMVIIDIDHPDVEKFIEWKAREEDKVASLVAGSRICSRFLQAIVEEAILNGADRLENPKLQRLIENALHRAVPMSYIIRVLALVEQGYTTLDFEEYDTHYESEAYQTVGGQNSNNTVRVTNAFMKAVENNELWMLKERTTGKTARAVNARELWEKILLSAWKCADPGLQFDTTINEWHTCPAAGRINASNPCVTAETLVATDRGLERIGELVGQSRGIRGIEGKLHWVEKIFPTGTKEVYELRTKAGYRLKLTGDHPVYTENRGDVKACELSKDDVVRLVGAEFGKESTGSVDVAQLIGLLVGDGCITRNAELTASGEQRRVAFLAMDKAEAEITGWANTLINDLRPELGEHNKQGSLTQTLTSSRVAVGSPRILNLLENYAVLDGGSEKKMFSDAVFRLQQAEQAALLRGLFTADGTVANYGVKSRYVALDSTSLDLLLQVQLLLLNFGIKAKIYENRRAGDLVSMLPDGKGGMREYPVQEMHSLRISRSSRVLFQESIGFMEESRKAEALARLNMTVDTYRDPLVDRVASLRSIGRQPVFDLTEPENHHFIANGIGVHNCSEYMFLDNTACNLASLNLIHFVDEESGHVKINELRHAAALWTVVLEISVLMAHFPSPDIARLSYEYRTLGLGFANLGTVLMVLGIPYDSPKALALAGAISAIITGQAYVTSAEISRDLGPFDGYQANSKEMLRVIRNHRRAARNESEEEYEELSVKPRGIDSEYCPKELFEAAGSVWDEALQKGKKYGFRNAQVSVIAPTGTIGLVMDCDTTGIEPEFAIVKFKKLAGGGYFKIVNQSVHKALKRLGYAAQEIEEIEKYCKGSGSLEGCPSINSQWLMNRGFTEEKIALLESNLAAVFDIRFAFNKWILGEEFCQSLGFTEAQLNDPGFDMLQALGASAEDAEAANDFICGTMTIEGAPHLKLEHLPVFDCASRCGQKGLRFINHMAHVRMMSSVQPFISGAISKTVNMPATATTAEIGEVYLSGWQHMVKAITVYRDGSKLSQPLNISSYQDLDEVIMLGNEEDLDETKGPREVQERIIERVYHRSERRLLPKRRKGFIREAYVGGHKVFLRTGEYEDGSLGEVFIDMYKEGASFKGLLNCFAVLASKALQYGMPLEELVDSFTFTRFEPAGAVQGHNAIKNSTSILDYVFRSIGYDYLGRKDFVHVKAVDEVPEHGADAKNSNGQTSPVAALEAEAVPAAHHAGSEYTNTLKSQVMQAKVQGYTGEQCENCGSMRVKQNGTCKVCEDCGMTTGCS

SEQ ID NO: 576 - protein, 1184 aa, Polaromonas naphthalenivorans CJ2
  Pna RIR1 precursor
MKREHFGRPQDLTATQPISHDVLKEKYLKPGESGVEDVYRRVARALASVELPAEREKHEALFLENLHAGAIGAGRIMSAAGTAIQATLINCFVQPVGDCIQGVDDGGYPGIYEALREAAETMRRGGGVGYDFSRIRPRGAEVKATASMASGPCSYINVFDQSCSTVESAGARRGAQMGVLRIDHPDVHEFITAKRTPGRWNNFNVSVGMSDGFMQALNDDQPWELVHKAKPGAALMAKGAFQRADGLWVYQTVAAREMWDTVMRSAYDFAEPGILFLDNINTDNNLRYCEAIAATNPCVTADTRLATQHGLVPIGWLQANGGALDCTVDRRALGEDRRGTVTRAAVPAFLSAGQAEVFKVTTAEGYQIKATAWHEFYTARGKLKLSELKAGDELWVQSGKGQFGAQGSGALGLLIGLITGDGHFTNRGKDEQAAVISLWGEERQLADDIAGSVNALIAGTSLAPRDYLVKPVAVAERNMVFIRSTMLVRVLDGYGFNGETKLEVPEVVWRGSEACMRGYLQGLFQTDGTVNVSSNSQSCSVRLSSSHRPLLQDVQVLLANFGVFSRIHERREAGPRSLPDGQGGQRDYLCQTQHELIVDGESREAFMREIGFLLPAKREKYDAWVADKALVKTQRFAATITAIEPAGVEPVYDTTQPDGNTVIFNGLVTGQCGEQPLPPYGCCDLGPIILTRFVRHPFGFGGEPEFDFEAFEASVATQVRALDNVLEVTFWPLPQQQTESSAKRRIGVGFTGLGNALAMLRLRYDAPEGRDMAARIAVRMRDAAYAASSELAKEKGAFPKFDANGYLATGTFASRLPAALQQAIRAHGIRNSHLLSIAPTGTVSLAFADNASNGIEPAFSWMYKRKKRESDGSTTEYAVEDHAWRLYRELGGDVNKLPGYFVSALDMSATSHIAMMQAVQPFIDTAISKTVNVPADYPYGDFKSLYHQAWRAGLKGLATYRPNAILGAVLETHASPDATPAAAAPAPMDPMRTVIESRPKGALSAVAEKVEYWTQEGHKTLYIVVSFLPVPSASGSGTVERAIEFFMPVGQSGESQQWITSSMRMLSLAARGGFLERALSDMRKVAWDRGPVRLGTYEKADGTRVPLWHDSEVAAIAYAVQNIIARRAAQSALSLAPAEPVQVASSLAPPVMAGKKCSECGAHAVIRKDGCDYCTQCGHLGTCG

SEQ ID NO: 577 - protein, 1189 aa, Polaromonas species JS666
  Posp-JS666 RIR1 precursor
MKREHFGQPHDVTATQPISHDVLKEKYLKPGENGVEDLYRRVARALASVEPEAARAEHEALFLENLHAGAIGAGRIMSAAGTSIQATLINCFVQPVGDCIQGMDDGGYPGIYEALREAAETMRRGGGVGYDFSRIRPRGAEVKATASMASGPCSYINVFDQSCSTVESAGARRGAQMGVLRIDHPDVFEFITAKRTPGRWNNFNVSVGVSDAFMQALGDDQPWELVHRAKPGARLIAQGAFQRADGLWVYQTLAASELWDTVMRSAYDFAEPGILFLDHINQDNNLRYCESIEATNPCVTADTWVMTTAGPAQVSELTGRSFSAVVDGKAYAVTSDGFFRTGHKPVLALRTREGPALRLTADHRVRRVARRTRYTLEAEWTEAGQLQPGDEILLHDHRALGGWEGAGTHAEGYLLGLLIGDGTLKSDKAVISVWAPELKVAGGGAVAYAQTGAGGIVQAAEAAAATLSHRVDFRGFQRSISGRGEARMASGAVRHLAHEMGMRPGHKTITTAMEKASSVFTEGLLRGLFDADGSVQGSQEKGVSLRLSQSDLSLLQTAQRMLLRLGIASTIYPNRRLAQARPLPDGRGGLRVYETASQHELVISADNLRIYAERIGFADTDKADRLDQALGSYNRSLNRERFTVTVESLTEEGSEDVFDVTVADIHAFDANGLYVHNCGEQPLPPYGCCDLGPIILTRFVRNPFGFNGVPDFDFDAFGKSVTTQVRALDNVLDLTFWPLPQQQAESAAKRRIGVGFTGLGNALVMLCLRYDAPEGREMAARIAVCMRDAAYAASVALAKEKGAFLKFDAEGYLAPGTFANRLPAGLQQAIRAHGIRNSHLLSIAPTGTVSLAFADNASNGIEPSFSWMYRRRKRESDGSTTDYAVEDHAWRLYRELGGDVDRLPGYFVSALEMSAASHIAMMEAVQPFVDTAISKTVNVPVDYAYDDFKGLYQQAWRARLKGLATYRPNAILGAVLETHASAAATPPAAPTPVDPMRTVIESRPKGALSAVAEKVEYWTQEGHKTLYIVVSFLPVPAASGEGTVERAIEFFMPVGQSGESQQWITSSMRMLSLAARGGFLERALSDMRKVAWDRGPVRLGTYEKADGTRVPLWHDSEVAAIAYAVQNIIARRARQPAAGTTPVVEPQVDPALAPPVMAGKKCSECGAHAVIRKDGCDYCTQCGHLGVCG

SEQ ID NO: 578 - protein, 940 aa, Pseudomonas aeruginosa phage phiEL
  PP-PhiEL Helicase precursor
MLGLFSVKIKQTGDYVHITGVSYYDLAKDIEKFYSTSLLTKHQIRRESWDTIKVHNFFLVELHHIVGELLKIRNLRTRRRALSELKELIETETWIKDTVNPGGKPFDLKKLNQFNTVPFPQQLDFLQQYPIIVNSYHLKGMLLDAKPGSGKAMPLSTRVKVPNGWKALGDLKVKDIVVTPGGDTACVESIYPQGITEVYRFYFEDGRTADSHPYHLWKTTVNGVDEILTTLEVLHKARKEDVYFPLVGEINGCNPHCDTSSEVAARELVNTDVVIGDNVLELPYRDRFNIVTSVIEHVGCLISESVLSAYHENRIGMENFRRLMWSIGGTATEPVLVNGLYKVDFKHRDVGKMMTGLIGDNPRIQGMYNFSQYEDLQLKLAYWEKVENQETCCIALDNDEKLYVVDDYIVTHNTFTSLAWSQLINTAPTVVFCPMNIVDKVWVEQPLQHFKVPPRIWTSISGKVLEEGYDFYIVHYDYMTSGMGKYLENFLIALSKKHKGALKMILDESQNFNDPKAARTRKLIEWCDMELFGHHLPMSGTPLKAQGSEIFPTTCMIDPYFDKKAREFFMASYGRNRPSLMDLLSRRIGRMKFTIPELVGLGDPPPMELVKVKIPNSDQYTLDAIRLQMQIYIGERIAFYTKHMPSFLEFYNDVMTSYELSIQGNAKAVENLVKYKQIVHRFRTRGYNSFTDNQDSQFCKLVEEDIEKGLKGTTLKDFRNIKSAVKYLGLKLRGEALGNVLGRARINAIKDTIAHAGLPELIDNVEKKTLIFTSYVDALKLCEEYLTKVGYPNVTVYGENSNERDTNIKRFEKDPTLRALIAIFDSLKEGYPLIMANLTILLNAPFREYEVKQVQARTWRTGQDAPCYFKLLDMDTGDKLNIMTRSINIMEWSKEQVDILMSKEQGHELLGNITGQEMFDMGDEPETHSLYTSRSVLSLF

SEQ ID NO: 579 - protein, 1088 aa, Pseudomonas aeruginosa phage phiEL
  PP-PhiEL ORF11 precursor
MTDEQDTSLSYAKWLVKYLRCNNLPKELIDDKRLRIDWEARTDDETLLAHFNEDSLSGIKTVRFLKDFFNYQAGYDRETRNTSFLRTTEVFRQQGINNFYFILQLNNPLLKGVDPFDPNLTPEQQVWVLEECRSNFWYFLREVCRLKPNQPFLANRGNISFIWSYLNHITTYMIMPRQQGKQQRNSAKVRIVPKDTLKTITPQDTWKRIEHLRVGDQVLDRSGKPCQVIGIHPQGKRRLYRVITSDGRATDVGTEHLWTLKDYSNCLNGRALWNDYSTVDVINLLKKKVKLQLPLPAPVPGSEQDLPIDPYVLGLIYCGQDQDGKVIIPTRTDAVKQYVVDHLPRGVTVIQGVANSCLERTDNQPYLFNREHGLPDQYLEAPLNARRDLLQAFLDVRGKVGRGKVFIALNRVLGGQLAYLARSLGGTGKVTKNGVEITLPEEVPPFKFREENVVFDNRLLIERVTFVGDDDCTCIEVDNSEQLYLTDDFIVTHNTVSVQVIDFWLTYIMGRGYTSHLITLKSDNRAQFIAAIKQIRSSIPSYLINSTYKDKDAGTSLTYKAFGEDNVNTLYINVPQISQDAAGDLGRGLRVGTTNYDESGYIRFIDTIIDGCSPSSLTEMALCREQGLPYGITHITTPNTTLHPSGEFMFNKLMSATEWREKFFDCFSESHLRQMLLRASPTKTTSPSVSMVYNYLQLGKDKAWVRETIDLLGLSLAKAKIDLLLMWVEDGENRLFDDVTREAINNMKRDVVWSKEYRDCNLYVDFFVTQQELLEMAKKEYNDHFLIGVDTSSAINKDACTIVIRSMKTGKVIGVGRYPLTFLDDVTAIVVDLLDVIQNSTLIIERNYAHHMIDSLLIMLPAKGMDPFKRVFNQIYQDTVNNAKEFEEVQNTKFAYRNKAFYLKYKQYFGFVTTKTTRDVLYGLIQEAVGNTGYGLCYAKLADELINLKLKGDRIDHDAKQHDDLVIAWLLSYWFIKLGENKSLYGIPPGIALTDTRNLLNSAQNQGRTEYEPYVVQLIDKVRSKVHSLTEELMSTQDNILALRLEVEIRKLAKMLPPEQNRMMTIDVLLENAKVERNKRLLQQRRTA

SEQ ID NO: 580 - protein, 1036 aa, Pseudomonas aeruginosa phage phiEL
  PP-PhiEL ORF39 precursor
MVMKIKLREWANLPEETVLRWLNTRRWVEVTDDLDQVALTDTYALIITWHGMIIHRHYNDVPYSIKEMVPSNKVEGGEDTVYNDGTNATPINQFLKVILPTIIDPVEVDGIKRLIHIWQNKLNNLLVVMSERYVISATAESVAEFMEDEGISGIRDRVLSKEISIDEGEREFADYVRTAHSIANNTLTLLSRTGGVAINQAYQKTIIRGKVFDLNNSIMPNAITVPYAHGITNLADMLGERNAAGKAGVLSSKIKIPGGWKTMGNIRVGDEVVTPDGGTAKVLAVHPQGVTKVVRVHFKDGRYTDVSPDHLWKVRRHHWCNDKAMAKLTREEVEERVWRVITTNELKDYIGLSTKVYVQLIEPERNADKPFKIHPYVLGVLLGDGCISQKAVDITKPYQQLFDKVQSLLPEHLECVWRPNRKGDGEPKTFGIRFKDRRSEQHINWHIRDGLKELGLYGMRSWGKVIPEEYLHGSAKQRLELLQGLLDTDGTVDKHKSVSFSSSSKLLSLGVQYLVRSLGGMARLQERTPHYTHNGEKREGRTDYRVYIRYPRPEELFTLDHKRERAVSHQHTETLRLQVTHIEERPDEETQCITIDHPDHLYITDDFIVTHNSLTNNGKALKSSEWFHRKVHILSAVVADIDHFMDCGTTTTVPIRIPNMQAAMALLGKFRVTDTGELELIDQTTVWSIKPGEWVNIRSVAFCNHYNSASPCRVCYGMMASSIPYNVMMKKGADVGMWCTTSICNPIGQGMLSTKHFIRNATTRKFVPATKDKNVIYSNGDDIFLTKELCAPGTELVLKADIVNILSDIRSLDVLDNLSLDKLPYFSEVTFRYEVEDIMMGGKTLQQHAACTSVSSRNARFSLEFLNYLLSKGWANEGKKHITVDLSEWNTLSPIFTLPYVREDLDMHRARVENFITFNKRNNAWRQQIVTPRLFGEVLAEYWGLINQETKGINIIHPEVLLYSTLCRDPMRGDYSLANGKGPKYFVNFQECIKGRGAGMLMIYENQQNVLSDPKTFRVVNRQGSPLECFFSLAVS

SEQ ID NO: 581 - protein, 760 aa, Pseudomonas aeruginosa phage phiEL
  PP-PhiEL ORF40 precursor
MRATATISKANHYFRINGFYEEFAVRVILPFCKLNLCKMAKKPIPGTRKQAWFVQHVFARSNYDKSEYRLPIETLKEFVEFAGYRGYKESRLKIQDEPEIEGKDVVFEFNPGFDQFREGQGEWIEYMLSDGHLKVNNASTGFGKMQPLYAKIKVPGGWKTMREMTVGTEVIAADGTVTQVTGVYPHGKQPIYRLHFEDGRYTDAGLDHLWKVFTEETQAWTVVNTRSVQTLLAKEPDGVFIPLCEPEDGPEKPFVTDQLEGSRQQRLEHLRRLMDEKGYVRDDGSLSFSSEDEVESTTVQYLVRSLGGIARKVPSTGLYRRRQYRVYIKHPRPEELFTLTNKGGYLTSKSGNQSLKLRVNRIEFIGEHEAQCISVAHPDRLYITDDFIVTHNTYMAIHSMVKIGKRTLITMQPRYQINWVRELNKIVKLIPGDLLIWENTLESLYECLEDGKFDPKIIIIPMSRIEVFLRKGKETRDGLHMDDLIKRINPGLRIIDEGHEAIHQIFLSLMFGNIKKLFLLSATLKADDPFTNKMYQYLFPKRLRLKEAEPEHYIDVVAYLYRLNTRRYHLKTEQFGAYNDKTFEKSILKSGVLLAFYFKLVNKAFKEYYLNVRREGTKCLFFFSRVSMCDAMLELFRKEYPGWDFETFTGDDSKLKDKKDKYLKHEIIITTPNSCGTGKDIGGLVTVICAHTVASTQANKQIIGRLRALSGKFNNEIDPAFVFLVCLDLAKHVEYLAKREQVFFEKQKTFKRINSECSLD

SEQ ID NO: 582 - protein, 568 aa, Porphyra purpurea (chloroplast)
  Ppu DnaB precursor
MLTQESEDLLKQIEKLSPDFFYFKSNSLVYRAILETVNPIDKIALVSLLTALNTNNLIRQLGRLETIMKLIENSPASNIIYEYSKVILDNYVKRLLLKSGDSLCLISCSKKQITQSVITSVASQLTIAYEILEDEGTYTLAEIFASLLVSLDTKKKISINSGIFSGFWQLDLITNGFQKSDLIIIAGRPSMGKTAFAINITRHIIKTSQYYVILFSLEMSTEQLLRRILAQECHLNSQKIQSGQLTNVEWQRIVEESKILANLNFYIDDSAEISCDIIKVKVKLLRLQGKKIKLIIIDYLQLLQESKKSENRSQELSLITRSLKILARELNLPILVLSQLNRNLESRHNKRPLLSDLRESGCISKFSHIMWSHVSKPLFNFSIKKSHMHNFNKNIYQLLDQGEAFISRQDKKTTYKIRTNSEKYLELTSNHKILTLRGWQRCDQLLCNDMITTQIGFELSRKKKYLLNCIPFSLCNFETLANINISNFQNVFDFAANPIPNFIANNIIVHNSIEQDADLVIMLYRESYYNKEMEMEDMTEIIVAKHRNGPLGTFQLKFDANLANFLNV

SEQ ID NO: 583 - protein, 1312 aa, Pyrococcus species GB-D
  Psp-GBD Pol precursor
MILDADYITEDGKPIIRIFKKENGEFKVEYDRNFRPYIYALLKDDSQIDEVRKITAERHGKIVRIIDAEKVRKKFLGRPIEVWRLYFEHPQDVPAIRDKIREHSAVIDIFEYDIPFAKRYLIDKGLIPMEGDEELKLLAFDIETLYHEGEEFAKGPIIMISYADEEEAKVITWKKIDLPYVEVVSSEREMIKRFLKVIREKDPDVIITYNGDSFDLPYLVKRAEKLGIKLPLGRDGSEPKMQRLGDMTAVEIKGRIHFDLYHVIRRTINLPTYTLEAVYEAIFGKPKEKVYAHEIAEAWETGKGLERVAKYSMEDAKVTYELGREFFPMEAQLSRLVGQPLWDVSRSSTGNLVEWYLLRKAYERNELAPNKPDEREYERRLRESYAGGYVKEPEKGLWEGLVSLDFRSLYPSIIITHNVSPDTLNREGCREYDVAPEVGHKFCKDFPGFIPSLLKRLLDERQEIKRKMKASKDPIEKKMLDYRQRAIKILANSILPEEWVPLIKNGKVKIFRIGDFVDGLMKANQGKVKKTGDTEVLEVAGIHAFSFDRKSKKARVMAVKAVIRHRYSGNVYRIVLNSGRKITITEGHSLFVYRNGDLVEATGEDVKIGDLLAVPRSVNLPEKRERLNIVELLLNLSPEETEDIILTIPVKGRKNFFKGMLRTLRWIFGEEKRVRTASRYLRHLENLGYIRLRKIGYDIIDKEGLEKYRTLYEKLVDVVRYNGNKREYLVEFNAVRDVISLMPEEELKEWRIGTRNGFRMGTFVDIDEDFAKLLGYYVSEGSARKWKNQTGGWSYTVRLYNENDEVLDDMEHLAKKFFGKVKRGKNYVEIPKKMAYIIFESLCGTLAENKRVPEVIFTSSKGVRWAFLEGYFIGDGDVHPSKRVRLSTKSELLVNGLVLLLNSLGVSAIKLGYDSGVYRVYVNEELKFTEYRKKKNVYHSHIVPKDILKETFGKVFQKNISYKKFRELVENGKLDREKAKRIEWLLNGDIVLDRVVEIKREYYDGYVYDLSVDEDENFLAGFGFLYAHNSYYGYYGYAKARWYCKECAESVTAWGREYIEFVRKELEEKFGFKVLYIDTDGLYATIPGAKPEEIKKKALEFVDYINAKLPGLLELEYEGFYVRGFFVTKKKYALIDEEGKIITRGLEIVRRDWSEIAKETQAKVLEAILKHGNVEEAVKIVKEVTEKLSKYEIPPEKLVIYEQITRPLHEYKAIGPHVAVAKRLAARGVKVRPGMVIGYIVLRGDGPISKRAILAEEFDLRKHKYDAEYYIENQVLPAVLRILEAFGYRKEDLRWQKTKQTGLTAWLNIKKK

SEQ ID NO: 584 - protein, 1065 aa, Pichia stipitis CBS 6054, taxon:322104
  Pst VMA precursor
MAGALENARKEIKKLSLDADESLYGQIYSVSGPVIIAENMIGCAMYELVKVGHDTLVGEVIRISGDKATIQVYEETAGVTVGDPVLRTGKPLSVELGPGLMETIYDGIQRPLKAIKEQSQSIYIPRGIDAPALSRTVNYDFTPGSLKVGDHITGGDIFGSIYENSLLDDHKILLPPRARGTITSIAEAGSYNVDDNVLEVEFDGKKHSYSMMHTWPVRVPRPVAEKLAADYPLLTGQRVLDSLFPCVQGGTTCIPGAFGCGKTVISQSLSKFSNSDVIIYVGCFAKGTKVLMANGDDKNIEDIAVGEEVLGKDGLPREVVALPRGRETMYEVSEKTQHRAETVFGTASYTCNATHKLVLQTNQRVNITNHVLRGESQTSVTYFQMKTAVADGREIELPKLCTKSFQHSSHGRENAWKKAEVFASTISRDPIDWTAEARDISRLGYHVRRATRQLWSPVLVEKEVLAPMIAKRGFDESIAPYMAYLVGLWVGDGYSDRATFSIDIQDVEIHERIKDFASHAGLTPRIACYKKSRDATISLHNSETRGKNVRQNLNTGNLLWSLLAEICGKKENEMLFKLVPSFLRSESIAVREYFISGLVDSDGHVKRDEADKCYSATVKTIYPAVRDGLVSVARSLGIQTSVSVEEAKEVNSVKHQESYAIYMANSSALDSVLSKCAAPRKRAEEPVCVNREPHPYTFHMVEKEEDDFYGITLSEDSDHQFLLSNLALVHNCGERGNEMAEVLMEFPELFTEINGRKEPIMKRTTLVANTSNMPVAAREASIYTGITLAEYFRDQGKNVSMIADSSSRWAEALREISGRLGEMPADQGFPAYLGAKLASFYERAGKSVALGSPERLGSVSIVAAVSPAGGDFSDPVTTSTLGITQVFWGLDKKLAQRKHFPSINTSVSYSKYTNVLDKYYDANYPEFPALRNKIKEILSDAEELEQVVQLVGKSALSDSDKITLDVASLIKEDFLQQNGYSTYDAFCPIWKTFDMMRAFISYHDEAQKAVANGAQWSKLSESTSDVKHSVSSAKFFEPSRGEAEGKTEFNTLLTSISERFAEASE

SEQ ID NO: 585 - protein, 6274 aa, Pseudomonas syringae pv. tomato str. DC3000
  Psy Fha precursor
MDVHQLALLARQPSAVLTERRSFWGMPKRGLALILANAMFWQPLLVQAEGIVVSGPNTSLSQAGNGVPIVNIATPNASGLSHNQYQQFNVESQGVILNNSTNQTQSTQLGGIIVGNSNLRGTAATTILNEVVGANASQLKGYTEVAGQAARVIVANPYGISCNGCGFINTPQVTLTTGKPVLDANGQLQRFNVQGGSISIDGVGLNADNVDQFDIITRSAKINAELHARRLNIIAGRNDVDAQTLNATALADDGGAKPELAIDSSALGGMYAGTIRLVGTEAGVGVRLAGNLAASGGDIQIDANGHLNVMQTAASAAVTVKANSAEVNGPVYAGASLAVTTAGDLVTRQNVAARDALTLSAGGQLNNSAVIEAGVNADNSRNGSGDVTLSANGLSNSGSITASRALQATVTQVLNNQGATLNGQASTRIAAAAIDNRQSGRILSQSGSVDINASQVLNSQSGLISSSGSLTITAGSLDNSQQGKLSSSSALSARISGQFLNQLGLVSANGYLLLNAATLDNRSAEISSLGNLTSTVGQFNNSEKGRLLANGSLQLTSDTLNNQNGSLAGQQNVQLTLGQLTNTGNGSVYGKNNLNLTLNGALNNDQGALRSDGTLDVRAASLSNNSGSTTSAGAASVTTSGAVVSRGGQILSDAGLTLISGSLDNSQSGRIAGNGVVLSTGAFDNQRSGNLSSTGTLQLTAAQVNNSDAGRIASAMALTAVVTGLNQTNDGRVYSNTDVSLDLSNGLLTNQGGLINAPGQLVLKNLNVVNNQSGKISSANGFTLAATSLDNTDGSLLSDKALVVRVNQLLTNLRGLVSATGLDLTAGSLNNRNGEISSLGGLTANIGQFDNREKGRLLANGALLLTADGLNNLNGIVSGQQGVQLNLGQLDNTGSGSLYAKSSLGLNVSGTLNNDQGVVRSDGTMDLKAAGLANTNGSVTSAGTGVLNFNGAAVNQGGQIVSDAQLTLTSGSLDNSQRGRIAGNGVLLSTGTFNNQQGGSLSSTGALRLTAGQVDNSAAGRIASAMALTAVVTGLNQTNDGRLYSNSDVSLDLSNGLLTNQGGLINAPGQLVLKNLSVVNNQSGKISSANGFTLAATSLDNTDGSILSDKALVVRVNQLLTNLRGLVSATGLDLTAGSLNNRNGEISSLGNLTANIGQFDNREKGRLLANGALLLTADGLNNLNGVVSGQQAVQLNLGQLNNTGAGSLYAKNALNLTLGGVLANDQGVVRSDGTMDLKAAGLANTNGSVTSAGTGVLNFNGAAVNQGGQIVSDAQLTLTSGSLDNSQRGRIAGNGVLLSTGTFNNQQGGSLSSTGALRLTAGQVDNSAAGRIASAMALTAVVIGLNQTNDGRLYSNTDVSLDMSNGLLNNQSGQISAPGQLLLKNLNVVNNQSGKISSANGFTLAATSLDNTDGSLISDKALIVRINQLLNNVRGQISASGVTLSAATLDNRNAELSSLGNLTANIGQFDNREKGRLLANGALLLTADGLNNLNGIVSGQQGVQLNLGQLTNTTGGSIYAKSSLGLTVIGAVNNDQGVLRSDGSLTLRAASLTNNAGSISSAGVASINVDGDVVNRGGQVLSDATLTLTSASLDNSQSGRIASKGLVLTTGVFDNHQDGRLTSTGELQLNAGLVNNSDAGRIASAMALTAVVTGLNQTRDGRLYSNSDVSLDLSNGVLTNQGGLINAPGQLLLKNLTSVSNRKGEISSANGFTLAATSLDNTEGSLLSDKALVVRINQWLTNLRGKISANGVNLSAATLDNRNAELSSLSTLTATLGGFDNTDKGRLLANGALLLTADTLNNQNGIVSGQQDMQLNLGQLSNTGAGSVYAKNRLGLTLTGALNNDQGVLRSDGALDLKAGSLANTGGSVTSAGVSGLATDAAVVNQGGQILSDATLTLTSASLDNSQSGRIASKGLVLTTGAFDNHQDGRLISTGTLQLNAGQVNNSEAGRIASAMALTAVVTGLDQTSDGRLYGNGDVSLDLSNGVLTNQGGQLSAPGQLLLKNLSSVNNRSGKISSANGFTLAATTLDNTAGSVISDKALIVRIDQLLTNLRGLISATGVELNAATLDNRNAELSSLGKLTATVGQFDNSGKGRLLANGALLLTADNLNNQGAGAVSGQQEVQLTLGQLTNIGSGSVYAKNTLGLTVSGALNNNQGVVRSDGTLDVSGASLANTAGSITSTGVSVLKVDGAVVNRGGQILSDSTLSLSSASVDNSQNGRIAGKGVTLATGAFDNQQGGRLTSTGTLKIDAGQVNNSDAGRIASAMALTAVVTGLDQSNDGRLYGNGDVSLDLSKGVLNNQGGLITAPGQLLLKNLTSVNNQNGEISSAKGFTLAATSLDNTAGSVLSDSALIVRVDQLLTNLRGLVSGNGIDLTANELNNQSGSVSSDADLLLTIAGTLSNQKGELTSAGNTTLNALSLANANGQVMADRFLKLVITDAIDNQAGTLGAGKGADIRAVSLDNRQAGALVTDGQLDLTLTDALDNRASGSLQAKGLMNLTSQTLDNRGGRITAQNMLMVRSASVDNRGGAIRAEKGLQLFVDALDNSQSGLSTAQKGLINSNAGLELVGTRLDNQNGLLNAAGLMQLQADSVLNGSGRIASQADLVAHIGGLTQQGGELVAQGNLTLTGNILDNQSGGLVGSTKALKIDVADIDNKAGELSSQIGVEIIAQTLDTSNGGKVLAGTALGLTVARLINLNKGLLFGNTLRLEGTRLDNAGGTLASQQDLNIGLSGALDNTGGLLSSESAMTVSAASLQNAAGSLSSADALSVTTTGALSNQAGSITTDAALTLTSASLDNSKAGKLSGKGATQVTTGTFDNSQNGRLTSSDTLRLTAGKVINQSAGRIASALALTASVTSLDQQAGELFSNTSLSLDLNNGQLNNQGGLINASGVLLLKNLNGIANQNGEISSAQAFSLNASSFDNSGGKLLSSQALTLVVNKALSNLKGNISGASLNINSDSLDNTQGMISSRAGLDVTVNTALTNAQGTLIGDGNVNLSAATADNRQGQMASKQNLDAQIGNLQQQNGQMLAQGTLTLRGDTLDNRQNGFIGATQALAINVTNIDNRGGELSSQDTMTLTGQQLNNSDKGQVLAQKALTLNIAQTTNRANGLLSSQAGLTLIGSTLDNTGGALSALKALGIDLSAALDNSQGLISGEDILTLNAGSLTNTAGSVSSAANLKLDSAGAISNQGGKLVTDGALNLTSTRLDNSQRGTISGKGLLTLKTGNFDNSQNGRVSSNDRLELTSAQLTNSSGGSIGSSQALTASVSRLSQQGGKLFSNTSLSLDLNNGQLDNQNGLINAPGALVLKNVNEVLNQNGEISSAQAFTVNAQQLNNTGGKLLSNQLLTLRIARALNNVKGMIAAAGVDAVVNTLDNTGGTLTSRNDLGLTVAGLLTNRDNGLINATQALKVGAASLDNQNGQVLGGTSLILNATSINNTAKGLINSTGTLNLTAGSLDAGNGGEVSAARDMTLVLNALSLNGGRVMGDAGLSIDMVGNDLNNLGGLITADGQLTFSRLRDLNNQSGEVSSAQSFTLSGRTLDNSSGKLISSNVLTVGATNLLNQNGLISGWQGLNVSGNRLDNRNSGTLSSRSGNLVTTLTGELLNGGNGALVSQNTLSVTADSLDNSGGILSSGTGQTLTVSGLLNNSQNGLIDSGAGLVINANALNNAAGNMTAQQDVSFGGSSLDNSAGNLSSKGAMTLDLLGSLTNTRGKLASGGTLLLRRSTAINNQAGQLISQSLMTLNTSGQLDNSNRGTVAANNTLTVVASGNVLNDADGLIYSQSANAHVQAASLSNVRGTVQSVGALRVDVVGDVNNQNGRIIAQGGDLNVSAANLYSQGGVLSSLQGLFTASVTGVLKNGYDANRQGGVIQAQRLNLTALSSFDNYGGRVSARTGEALINTASFDNRNGGLYAKGLVRVTGGNFDNSGDNDGQIAGGQVELNLSGALNNRFGIIESDSTLAVTAQSLDNQTGQLRALGGGGATNFQIGNLFDNRNGTLESANSDLILNAGSFLNGGGSLLHTGNGTFDISTANLTNAGGSIVTRGGLTLTADSWTNSSVIQAGRLTVNVGTLNQTAGGQLLASSLFSGSGSNWTNDGLIASDGSLSLNLGGTYGGNGRLSSVGTLGLSAAQVNLNAASTIAGGGDTSVSVGGQLSNVGRLTSATNLTVNAGSINNQGTLGSGQALTVTTGSLVNDRGLIFSGSNMSLRVSSLNNSYANIYSLGNLTIDRNGQGALADSIVNSSASIQSDGSMSLAASTIQNIRAILTTSNGGIYSAMIKEGACNREFYNNDCKTSTQTHTWDVTQREKLEVTAASAASGIAAGGSLSMNGGDLLNQSSTIATGGNFTATLNNLTNTGVEASDTETVTVYRSMRTSNASMWTKAAQDFTDKYWLGSSGYDASLTGLQAALADFVRITETDMPEFYKVTRLSNGDQSYAAVIQAAGAVNVNAQNDINNSVVRAGYTYVSGGSRTDTNAPGTQFSTRITVNQQLPPDLAQQQVNPLSLPGFSLPTGQNGLFRLSGQSGTAVAVAQPVGLPQSWTMGSAAVSVAQREQTVSDAQASTIQIGSVSQISNAARQLASVTRQSAGVSANASAFDTSAPGAAPIGGLVLPGHTSDSAGVTSVDSVTGIATGNQGSGVLLPVQNTGSTSGLPTITAISSGNSAAQNAGRVQGTQVSQAGQVVNGTQGSLVSAINQATTGVQSGTTATVTQVVVNAQGGQVIAPVRNPVATQGGPLVTSVGNPAVSQGVSVAAPVRNTVAAQGGPVTAAVLNPVVTQTNPVSATQNTSNQPATVAQASAITPVVSAAAQTVTRVEGLPSSSFVSRPQKYLIETNPVLTELKQFLSSDYLLAGLGYDPEVSAKRLGDGLYEQRLVQQAVVARTGQAFIDGQTSNEAQFKYLMNNAIASKQQLNLAVGVSLSSQQVAALTHDIVWLEEHEVNGEMVLVPVLYLAQADNRLGPTGALIAGNDVSLIAGQNLDNVGTLRAANNLSAAAGNDLVNSGLIEAGNRLDLLAGNDLINKAGGIIAGRDVTLTAIRGDVINERTVTSHQSAADDATWRKDFADSAARIEAANDMSLQAGRDVKNTGGVLQAGRDLSIAAGRDVAIDSAQTENGQTRGANSSNSSITQLGSTVSAGRDLTAQAGRDINVIASSIDAKRDIAMAATENLTLSSAADEQHSYGKSKKVTEQEDHVSQVSADLKAGGSVALQAGQNLAVISSRITAGKEAYLVAGENLDILAAQDSDYSLYDMKKKGSFGAKKTQRDEITDVKNIGSEITTGGDLLLSSGGDQKYQVAKLESGKDLTIESGGAVTFEGVKDLHQESHEKSKSDLAWNSSKGKGNTDETLRQSELVAKGEVAIRAVQGLKIDIKQIDQQSVSQTIDAMVKADPQLAWLKEAELRGDVDWRQVKEVHDSFKYDNSSLGQGAMLAIIIVVTVLTAGAGTFAAAGTAAGSAATGAATAAGVSATTAATIGTAANAAAVASLTSITAQGVVSTINNKGNLGAALKDTFSSDSLKSAAISGLTAGFTAGVIDPQLGGTTKPFNSLTKGFDLSTLGGAGGFALHAGAQGLASGAINTAVNGGSLGDNLVNGLVSQAGTVAAAIGFNQVGSFADQKFTEATLAGDVSGKAMWAEGGIGRTTLHALMGGAVSSATGGDFTTGAVAAGASQAMAGTLNEVFKNNPEYRQAAAQIVGLTAAGLAGGDVEKAAWVSAMADQYNRQLHPNEIPLLEKQSSSLAQEANISPAEAEKRLAQALAYYTDKDWNNALAAKGVVPDALTLKHLGIALSPLADSYAVVGDVPVVAGSKSYTPAETVALITEYRNTHTAEYADPSINNLNMQGAYAGDPKYQYADFYRKNLAVKTDFLSAVSGNLAGIAQGSGGALSDSLGSAWALMSDPVGVSEQAANGLMGLSKSPWGSFKNSVEASQTKEAMATIYDMQGNTAASAAIRAKSDLEFALNFLPANRAKTLAELGAGRKFAMDGPCCFAAGTMVSTPDGERAIDTLKVGDIVWSKPEGGGKPFAAAILATHIRTDQPIYRLKLKGKQENGQAEDESLLVTPGHPFYVPAQHGFVPVIDLKPGDRLQSLADGASENTSSEVESLELYLPVGKTYNLTVDVGHTFYVGKLKTWVHNTGPCELPEGYFGAAGGNGPKATATSAAEGATPRVSIDPPDGSFSISDWTGYPAGVPVPQGPFRLLEGTEYNAARNVANKANSALRREQGLVGQPVDVHEINPVKFGGSPTDSANKVILPRDVHRQQVTPWWNQLQKDLGK

SEQ ID NO: 586 - protein, 922 aa, Picrophilus torridus, DSM 9790
  Pto VMA precursor
MSGSIYSVSGPVVIAQDIENAKMFDVVRVGELGLIGEIIRISGNKATIQVYEDTSGLRPGEKVYSTGKPLSVELGPGLLSSIYDGIQRPLDVIRAKTGDFIAKGVNIPPLNEEKLWDFKPLVNEGQQVKSNFIIGEVDETEIIKNKIMVPYGVEGTVKSIKSGKFKVSDTVAIIETKNGDYEIKLKQIWPVREARRVFHKFPPEIPLITGQRVIDAFFPVAKGGTVAVPGPFGSGKCVTGDTPVLLADGTVMSIEDIYNKSSGTVEYKNENETLIRLDEPLRLYSFYNGHVNESTSNYIYKGKSDSIIKIRTASGREVKVTPVHKLFRFVDDKIIETEARYLNTGDFIASIKRFNNKDENYLSGDESELLGLYASYGSIEDGILIDASIKDRFINLAMNIFKLKTIKIEYRNDRVLIKNDGLKDFIARMISSGIPSEVMRSRACAASFINGYLYGKLYHDDVIKLHDNEQNILKISYMLTGLGIIHSIRNNLIEIKAENMKILNSMENELIDNNETLLISNNANDDFDLYPDEIESIEILPGPFDVYDVTTPDFGSNFVGGYGAILLHNTVIQHQLSKWSDSDIVVYVGCGERGNEMTEILSTFPELMDPKTGKPIMQRTVLIANTSNMPVAAREASIYTGVTIAEYYRDMGYNVALMADSTSRWAEALREISGRLEEMPGEEGYPAYLGRRISEFYERSGNAQIIAEDQRTGSVTLIGAVSPPGGDLSDPVVQNTLRVTRVFWALDASLASRRHFPSINWLTSYSLYTNNLSKWYTENVGPDWPEIYKTMMDLLEKESELQEIVQLVGYDALPEKEKNVLDIAKMIREDFLQQNAFDDIDTYCSIKKQYMMLKIIKTVYEMQMNALNHGMKISQITSIPARSKISRMKEVSEQDFPAFYKNIIKEINDEYNSMIEVGGVNA

SEQ ID NO: 587 - protein, 566 aa, Porphyra yezoensis chloroplast, cultivar U-51
  Pye DnaB precursor
MLTQQSISLLKSVEKISPDFFYFTSTSLLYRAALENVNHAKTKSVRNFFINLKNEKMIQDLNELNEVFSLIEQAPLSDTISEYSAVVIDNYIKRLLLACGDSLCLISCSKQLIEQKNITSIVSQLTKAYEILDEKDTQTLATILANLLVHLDTRKKISINSSILSGFTELDSITQGFKKSDLIILAGRPSMGKTAFAINITRYVINQKRSYVILFSLEMSTEQLLRRILAQECNLNGQKIQSGQLNNDEWQYVIQKSKTLANLNLYIDDSAKISTDTIKTKVKFFKLQGKNIELIIIDYLQLLQESRQSDNRSQELSLITRSLKILAKDLSLPILALSQLNRNLETRSDKRPLLSDLRESGCISKFNYLQTSLYNQLQILFNCYYKKIEVINFSAQKQQLFLAIKCSISKTGKKTVYKIITEAGKYIQLTSNHKLLTTQGWKRCDKINQNDMIAIQIKNFEEQKNVFNSFSSLTFESIQKINVTSLQIVFDLECKPLCNFISNNFIVHNSIEQDADLVIMLYRESYYTQETRSRDFTEVIIAKHRNGPTGTFQLKFNAQIAKFSDA

SEQ ID NO: 588 - protein, 1131 aa, Roseovarius species 217
  Rsp Rir1 precursor
MSRFAAPIAEQIWNMKYRFKTEDGGDASVEDSWRRIARALAVLEAEPEVWEDRFFHALEDFKFLPAGRITAGAGTARKVTLFNCFVMGTVPDDMGGIFDNLREAALTMQQGGGIGYDFSTIRPKGAEVKGVSADASGPLSFMDVWDAMCRTIMSAGSRRGAMMATMRCDHPDIEAFIAAKSDPARLRMFNLSVLITDAFMEAVKADGPWDLVFGGRVYHTVQARDLWNRIMQATYDYAEPGVIFIDRINAANNLSYCETIAATNPCVTAETWVMTDEGARQVSALLDRPFRAVVNGIAYDSGEHGFFCTGLKPVKRLSTACGRHLRLTADHLVRKVVGKTRWRQEVEWVPAGDLRPGDEVKLHDHRTAMIQTRPEDERGYLLGLLIGDGVIRDDKTLISVWPQEECIGAQPLGHPVMHKVEALLRDLPHRADFAGWQKVEGRGEYRIGTAALTALAAEYGLTRGRKTITPEIEGAETAGFGAAVLRGLFDADGSVQGAQEKGVSVRLAQSDLALLQAAQRMLARLGMNAVIYENRREAGRAFLPDGKGGQAHFETKAQHELVISGENLATYQERIGFTDVAKARRLAVALSGYKRALNRERFSAVVADVVDDGMAEVFDVQVPGVNAFDANGFYVHNCGEQPLPPYGACLLGSINLARLVTEPFATGARVDAAALDDLVRVAVRMMDNVVDVSGFPLPAQAAEAQAKRRIGLGVTGLADALLMVGLRYGSDEAVQQTEAWLHAIARAAYLASVDLAREKGAFPLFDRDAYLASGTMQAMDEDVRAAVAAHGIRNALLTSIAPTGTISLYAGNVSSGIEPVFAYSYTRKVLQKDGSRTEEEVVDYAVQMWRDRMGDAPLPSYFVNAQTLPPEDHVKMQAAAQKWVDSSISKTINCPEDISFEAFKNVYLQAWDLGCKGCTTYRPNDVTGSVLSVSETSDKVPGETRGDIPVTGGEVVYMSEPLDRPKELEGATYKLKWPDSNHAIYVTVNDIVLNGHRRPFEVFINSKNMEHYAWTVALTRMISAVFRRGGDVSFVVEELKAVFDPRGGAWMQGKYVPSILAAIGGVLEQHLVQIGFLEGEGMGLKQDPQAQIVGIDGARKGPACPACGQYDMRMIEGCMTCGSCGHSKCSG

SEQ ID NO: 589 - protein, 1032 aa, Salmonella phage SETP12
  SaP-SETP12 dpol precursor
MNLLYLDTETFSEADLKKVGSYAYAEHPTTEIVICTYAFDEGPVQVWDATDGSDMPRDLRRAMLKLQKPDSNLKLVGQNFLMFDRLVIKHCWGFELLVENIIDTMIVAFRHALPGSLASLCEVLNIDASMAKDKRGKALIQRFSKPTPKNYKIRRYTAATHPKEWAEFIAYAKSDITSMREVYKKMPKWGNSEFEDRVLWLDQVINDRGFKVDVALAEAAIEAVTRHKEELQEEAQRKYGGSLTGKDFLPILQELAPAHRIHNAQKSTLNDLLADEDLPDDARTIIEMRLGAASTASTKYAPLLLGRSSDDRRRGCLQYGGAKRTLRWAGKGFQPQNLARGYYHDDELDRGIAALLKGRAHRRFDVAKLTASTVRSCIIPEAGRKFVVADYSNVEGRGLAWLAGEETALDTFRAGLDIYCVTAGKMFGMDPDDIKKERKDLRQIGKACLHRHTQVLTDGGFKDIMAVTSTDKVWSGEKWVNTKGAHLMGWKPVINVDGVLMTEDHKILTHSWKQAKQLVSNKYMMDRALEIGMDAWLSCASYQNDKAKDNYSSNVIVERCLGGSIMTMSGRVKPLNATAAPLKQQKNIVNSISATKTQCRMMRTERDYSTGCPRRSREQQAPGIRVIKTMGQEASRYSTSGGLIKGLFLDMFKLWKAGMTRTSKWIESTQTVTTNLETFGLSAVLKTAGTDGKYLSFNESMMQPLPALLNLNGKLTYCEPVYDLIDVEDGNRFLIASDSGFLVAHNCELGLGYEGGVGAFVTFAKNLGLDLIEMAKTMDGTFPDHIWAATARGYEWARIQEAKRPPHPGEKDDRPSYILDKKVWRTCDAIKRMWRESHPETVAFWRDLKDGILAAVRNPGREFWAGAHLRRNGERAIRIWRTVEFDSSGRKVPGWWLCMELPSGRILSYPGIGVSVTKETDEDGRINTNVRIKYQGENQLTRQWTTLYTHGGKACENIVQALCRDLLAYAMLNVEAGGYPIVLSVHDELVCETPDTPDYTVAELEKLMCALPGWADGFPLVAEGAELKRYAK

SEQ ID NO: 590 - protein, 1032 aa, Salmonella phage SETP3; identical to SEQ ID NO: 589
  SaP-SETP3 dpol precursor

SEQ ID NO: 591 - protein, 821 aa, Salmonella phage SETP3
  SaP-SETP3 Helicase precursor
MSKFTRRPYQKLMTSFMLRHPRCNIWASMGSGKCLKRGTEVIMFDGTTKKVEDVIVGDVLMGPDSTPRNVLSLGRGREMMYEVKPRKGESYTVNESHILSLRTTTGIAKGSWPDNTVFDISVRDWLKLPKYVTGPNGYLKGWRVPVDFPRKEQDEALLPPYLMGLWLGDGTSSSGAITSGENEKEIRAYLESYAARNGMQIRKEGLTWSISHGNTGHKKHGFTHALKSAGVLNNKHIPHNYKCGDRRQRLELLAGLLDSDGYCDLSKAGFDWISVSERLADDFCYLCRSLGFAAYKKKTCKRCANTDVWGDYFRVSVSGDFSEVPFVRGRHQNLPKRNINKNVLNVGIESITPVGVDDYFGFTIDGDSRFLLGDFTVTHNTSSTLWVLNRLFRNGQLNDDDRVLILAPLRVASGTWPAEQARWNFPCLRVVDATGSEKRRIAALESDANVVCTNYEVIEWLIDYYGKDDWPFTVIVADESTKLKSFRSRSGGSKRAKALSKVAFGKVKRFINLTGTPSPNGLKDLWGQNWFIDAGERLGSSYTAFTDRWFNSVQKGKSAMAREYHARPGADNEIHQKMKDISLTIDAAEWFGCEAPVIVPVEIDLPKKARQAYIDMEEKLFAELESGEVEAANAAAKTSKCLQIASGAVYVSGPDGEATKDWEKVHDTKLDALESIVEELQGAPLLVAYQFKHELERILRRFPQAQAFAKGAKGNKQMESWNRGEIEILCVHPASAGHGLNLQDGGHHLAFISQGWNLEHYLQVVERIGPVRQKQAGHERPVFLYHIVAKDTLDEVVAARTDEKKSVQEELLNYMKRRGKR

SEQ ID NO: 592 - protein, 1032 aa, Salmonella phage SETP5; identical to SEQ ID NO: 589
  SaP-SETP5 dpol precursor

SEQ ID NO: 593 - protein, 1075 aa, Streptomyces avermitilis MA-4680
  Sav Helicase precursor
MDLVPALEEPLKKVLGPATAKVMAEHLGLHTVGDLLHHYPRRYEERGQLTHLADLPMDEHVTVVAQVADARLHTFASAKAPRGKGQRLEVTITDGSGRLQLVFFGNGVHKPHKDLLPGTRAMFSGKVSVFNRRLQLAHPAYELLRGADDEAAESVDSWAGALIPIYPATAKLESWKIAKSVQTVLPSVQEALDPLPDSLRDGRGLISLPEALLKIHRPHTKADIEDARARLKWDEAFVLQVALARRRHADAQLPAAARKPKPDGLLTAFDAKLPFTLTEGQQKVSKEIFDDLATEHPMHRLLQGEVGSGKAQPLDSLVLAPTGFRRMGDLREGDEVVVPNGEIALIDGVFPQGVRDVWRIVLSDGSSVECDDEHLWIVGTSCGWHRGQTPKVMTTREIRLDTFKANGSSKWYVPAATPVDLGPDVGLPLDPYLFGLLLGDGSFRHNLRLSTVDDEIRDAAADAVAPDCRLVPVTGSRCDYTIQLKQRSGGVRNPVIQALRRLDLWGKTSHGKFIPEDFKNTSIKNRLSLLQGLLDTDGTVHADGMSVSLRSASLRLAEDVAWLVRSLGGRARVLPEKAAFHVSVALPDEYAPFRLSRKADRVRPRPKYNTFRRGIRAVEYVGRKPAQCISVGHPSHAYVTDNFTVTHNTMVALRAMLAVVDSGGQAAMLAPTEVLAQQHHRSITEMMGELAEGGMLGGAEHSTKVVLLTGSMGAAARRQALLDLVTGEAGIVIGTHALIEDKVQFHDLGLVVVDEQHRFGVEQRDALRGKGKQPPHLLVMTATPIPRTVAMTVFGDLETSVLDQLPAGRSPIASHVVPAADKPHFLARAWERVREEVGKGHQAYVVCARIGDEEDDPKKAKKKSPEDEAEKRPPLAVLEVADQLAKGPLQGLGVEVLHGRMPPDDKDAVMRRFAAGERDVLVATTVIEVGVNVPNATAMVIMDADRFGVSQLHQLRGRVGRGSAAGLCLLVTEMPEASPARQRLNAVASTLDGFELSRIDLEQRREGDVLGQAQSGVRSSLRMLAVIEDEEIIAEAREEAAAVVAADPELGHLPGLRTALEALLDEEREQYLDKG

SEQ ID NO: 594 - protein, 608 aa, Saccharomyces castellii, strain CBS4309
  Sca-CBS4309 VMA precursor
ISQSLSKYSNSDSIIYVGCFAKGTEVLMADGSDKAIEAIEVGEQVMGKDGAPRTVIALPRGTETMYEVCHTTQHRNGNEKFGLMNYVCSGNHKLVLRTPQLIRTTIHELRGKHYTSVTFFVTEKSANGTIVKQRTKTFQHEFHGGEEAATKLAADFASTIDPKHIDWDIEAKDYKQLDHYVKKSSYQMINPVFKESGNLANILGDAGIEKTLAAKMAWLLGFWVGNGHMETAQFPVDSWDTQLVDRISEYGKHFNLTTTTENHYRSNHVESNKDIEIFEMNEAQIEEAEQTGVVAFDSNRKGDPSETELIEAEIFNESRPSTAGLFTPAAISPASLVTDLSVTLRGTGIGGAGVSKERNLNNIFWDIVTSFGVRTNGQGSTYEKSVPLHLSYDDIEVREQFIAGLIDSDGYVKSADNRFSATVTTIYKGVSEGLIRLARSLGIRVSVSTEKEHVDKNNVKHKSCYRVFLSGEALIGVLRFCALDRKRTAFKEFTREAVPFYFTLQEKDQDEYYGITLPDETDKQYLLSSLALVHNCGERGNEMAEVLMEFPELFTEKDGRKEPIMKRTTLVANTSNMPVAAREASIYTGITLAEYFRDQGKDVSMIAD

SEQ ID NO: 595 - protein, 545 aa, Saccharomyces cariocanus, strain="UFRJ 50791
  Scar VMA precursor
ISQSLSKYSNSDAIIYVGCFAKGTTVLMADGSIECIENIKIGDKVMGKDGKPREVIKLPRGNETMYSVVQKSQHRAHKTDSSREVPDLLKFTCNSTHELVVRTPRSVRRVSRTMKGVEYFEVISFEMVQKKVPDGRIIELVKEVSKSYPASEGPERADELVESYRKASTKPYFEWTVEARDLSLLGSHVRKATYQTYAPILYENDYFFNYMENSKFHPTIEAPKVLAYFLGLWIGDGLTDRTTFSIDSRDTSLMERVTEYAEKLDLCAEYKDRKEPKVAKTVNLYSKSVRANGIRNNLNTENPLWDAIVGLGFLKDGVKNIPSFLSTDNIGTRETFLAGLIDSDGYVTDEHGITATVKTIHTSVRDGLVSVARSLGLVISVNAEPAKIDMSGTSHKMCYAIYMSGGDILLNVLSKCASFKKFRPAPVAPPVRECRGFYFELQELEEDDYYGITLSDDSDHQFLLANQVVVHNCGERGNEMAEVLMEFPELYTEMSGTKEPIMKRTTLVANTSNMPVAAREASIYTGITLAEYFRDQGKNVSMIAD

SEQ ID NO: 596 - protein, 1071 aa, Saccharomyces cerevisiae (nucleus)
  Sce VMA precursor
MAGAIENARKEIKRISLEDHAESEYGAIYSVSGPVVIAENMIGCAMYELVKVGHDNLVGEVIRIDGDKATIQVYEETAGLTVGDPVLRTGKPLSVELGPGLMETIYDGIQRPLKAIKEESQSIYIPRGIDTPALDRTIKWQFTPGKFQVGDHISGGDIYGSVFENSLISSHKILLPPRSRGTITWIAPAGEYTLDEKILEVEFDGKKSDFTLYHTWPVRVPRPVTEKLSADYPLLTGQRVLDALFPCVQGGTTCIPGAFGCGKTVISQSLSKYSNSDAIIYVGCFAKGTNVLMADGSIECIENIEVGNKVMGKDGRPREVIKLPRGRETMYSVVQKSQHRAHKSDSSREVPELLKFTCNATHELVVRTPRSVRRLSRTIKGVEYFEVITFEMGQKKAPDGRIVELVKEVSKSYPISEGPERANELVESYRKASNKAYFEWTIEARDLSLLGSHVRKATYQTYAPILYENDHFFDYMQKSKFHLTIEGPKVLAYLLGLWIGDGLSDRATFSVDSRDTSLMERVTEYAEKLNLCAEYKDRKEPQVAKTVNLYSKVVRGNGIRNNLNTENPLWDAIVGLGFLKDGVKNIPSFLSTDNIGTRETFLAGLIDSDGYVTDEHGIKATIKTIHTSVRDGLVSLARSLGLVVSVNAEPAKVDMNGTKHKISYAIYMSGGDVLLNVLSKCAGSKKFRPAPAAAFARECRGFYFELQELKEDDYYGITLSDDSDHQFLLANQVVVHNCGERGNEMAEVLMEFPELYTEMSGTKEPIMKRTTLVANTSNMPVAAREASIYTGITLAEYFRDQGKNVSMIADSSSRWAEALREISGRLGEMPADQGFPAYLGAKLASFYERAGKAVALGSPDRTGSVSIVAAVSPAGGDFSDPVTTATLGITQVFWGLDKKLAQRKHFPSINTSVSYSKYTNVLNKFYDSNYPEFPVLRDRMKEILSNAEELEQVVQLVGKSALSDSDKITLDVATLIKEDFLQQNGYSTYDAFCPIWKTFDMMRAFISYHDEAQKAVANGANWSKLADSTGDVKHAVSSSKFFEPSRGEKEVHGEFEKLLSTMQERFAESTD

SEQ ID NO: 597 - protein, 516 aa, Saccharomyces cerevisiae strain DH1-1A
  Sce-DH1-1A VMA precursor
PGAFGCGKTVISQSLSKYSNSDAIIYVGCFAKGTNVLMADGSIECIENIEVGNKVMGKDGRPREVIKLPRGSETMYSVVQKSQHRAHKSDSSREMPELLKFTCNATHELVVRTPRSVRRLSRTIKGVEYFEVITFEMGQKKAPDGRIVELVKEVSKSYPVSEGPERANELVESYRKASNKAYFEWTIEARDLSLLGSHVRKATYQTYAPILYENDHFFDYMQKSKFHLTIEGPKVLAYLLGLWIGDGLSDRATFSVDSRDTSLMERVTEYAEKLNLCAEYKDRKEPQVAKTVNLYSKVVRGNGVRNNLNTENPLWDAIIGLGFLKDGVKNIPSFLSTDNIGTRETFLAGLIDSDGYVTDEHGIKATIKTIHTSVRDGLVSLARSLGLVASVNAEPAKVDMNGTKHKISYAIYMSGGDVLLNVLSKCAGSKKFRPAPVATFVRECQGFYFELQELKENDYYGITLSDDSDHQFLLANQVVVHNCGERGNEMAEVLMEFPELYTKMSGTKEPIMKRTT

SEQ ID NO: 598 - protein, 1022 aa, Saccharomyces cerevisiae OUT7091
  Sce-OUT7091 VMA precursor
GAIYSVSGPVVIAENMIGCAMYELVKVGHANLVGEVIRIDGDKATIQVYEETAGLTVGDPVLRTGKPLSVELGPGLMETIYDGIQRPLKAIKEESQSIYIPRGIDTPALDRTIKWQFTPGKFQVGDHISGGDIYGSVFENSLISSHKILLPPRSRGTITWIAPAGEYTLDEKILEVEFDGKKSDFTLYHTWPVRVPRPVTEKLSADYPLLTGQRVLDALFPCVQGGTTCIPGAFGCGKTVISQSLSKYSNSDAIIYVGCFAKGTNVLMADGSIECIENIEVGNKVMGKDGRPREVIKLPRGRETMYSVVQKSQHRAHKSDSSREVPELLKFTCNATHELVVRTPRSVRRLSRTIKGVEYFEVITFEMGQKKAPDGRIVELVKEVSKSYPISEGPERANELVESYRKASNKAYFEWTIEARDLSLLGSHVRKATYQTYAPILYENDHFFDYMQKSKFHLTIEGPKVLAYLLGLWIGDGLSDRATFSVDSRDTSLMERVTEYAEKLNLCAEYKDRKEPQVAKTVNLYSKVVRGNGIRNNLNTENPLWDAIVGLGFLKDGVKNIPSFLSTDNIGTRETFLAGLIDSDGYVTDEHGIKATIKTIHTSVRDGLVSLARSLGLVVSVNAEPAKVDMNGTKHKISYAIYMSGGDVLLNVLSKCAGSKKFRPAPAAAFARECPGFYFELQELKEDDYYGITLSDDSDHQFLLANQVVVHNCGERGNEMAEVLMEFPELYTEMSGTKEPIMKRTTLVANTSNMPVAAREASIYTGITLAEYFRDQGKNVSMIADSSSRWAEALREISGRLGEMPADQGFPAYLGAKLASFYERAGKAVALGSPDRTGSVSIVAAVSPAGGDFSDPVTTATLGITQVFWGLDKKLAQRKHFPSINTSVSYSKYTNVLNKFYDSNYPEFPVLRDRMKEILSNAEELEQVVQLVGKSALSDSDKITLDVATLIKEDFLQQNGYSTYDAFCPIWKTFDMMRAFISYHDEAQKAVANGANWSKLADSTGDVKHAVSSSKFFEPSRG

SEQ ID NO: 599 - protein, 1022 aa, Saccharomyces cerevisiae OUT7112
  Sce-OUT7112 VMA precursor
GAIYSVSGPVVIAENMIGCAMYELVKVGHDNLVGEVIRIDGDKATIQVYEETAGLTVGDPVLRTGKPLSVELGPGLMETIYDGIQRPLKAIKEESQSIYIPRGIDTPALDRTIKWQFTPGKFQVGDHISGGDIYGSVFENSLISSHKILLPPRSRGTITWIAPAGEYTLDEKILEVEFDGKKSDFTLYHTWPVRVPRPVTEKLSADYPLLTGQRVLDALFPCVQGGTTCIPGAFGCGKTVISQSLSKYSNSDAIIYVGCFAKGTNVLMADGSIECIENIEVGNKVMGKDGRPREVIKLPRGSETMYSVVQKSQHRAHKSDSSREMPELLKFTCNATHELVVRTPRSVRRLSRTIKGVEYFEVITFEMGQKKAPDGRIVELVKEVSKSYPVSEGPERANELVESYRKASNKAYFEWTIEARDLSLLGSHVRKATYQTYAPILYENDHFFDYMQKSKFHLTIEGPKVLAYLLGLWIGDGLSDRATFSVDSRDTSLMERVTEYAEKLNLCAEYKDRKEPQVAKTVNLYSKVVRGNGVRNNLNTENPLWDAIIGLGFLKDGVKNIPSFLSTDNIGTRETFLAGLIDSDGYVTDEHGIKATIKTIHTSVRDGLVSLARSLGLVASVNAEPAKVDMNGTKHKISYAIYMSGGDVLLNVLSKCAGSKKFRPAPVATFVRECQGFYFELQELKENDYYGITLSDDSDHQFLLANQVVVHNCGERGNEMAEVLMEFPELYTEMSGTKEPIMKRTTLVANTSNMPVAAREASIYTGITLAEYFRDQGKNVSMIADSSSRWAEALREISGRLGEMPADQGFPAYLGAKLASFYERAGKAVALGSPDRTGSVSIVAAVSPAGGDFSDPVTTATLGITQVFWGLDKKLAQRKHFPSINTSVSYSKYTNALNKFYDSNYPEFPVLRDRMKEILSNAEELEQVVQLVGKSALSDSDKITLDVATLIKEDFLQQNGYSTYDAFCPIWKTFDMMRAFISYHDEAQKAVANGANWSKLADSTGDVKHAVSSSKFFEPSRG

SEQ ID NO: 600 - protein, 592 aa, Saccharomyces dairenensis, strain CBS 421
  Sda VMA precursor
ISQSLSKYSNSDTIIYVGCFAKGTQVMMADGSDKSIEEIQIGEQVMGKDGNPRTVIALPRGKETMYEVCHITPHRTTSGENFGVMDYVCSGNHKLVLRTPQNVTLTTHELDGQTYTNVSYFALEESAYGQIVAKKTKSYQHQRHGGKQETEKKVNEFLATINPDSIEWDVEAKDYKKLGYNVKKSSHQMINPVFKESGNLIAKLNELGFSKEIAPQMGWLLGFWVGNGSITTSSFSIDSLDTQLLDRITEYGKLFALTTTSATNHCRNYSGSGNQDIELSKINNGKVETDGTITFDDDTEREPSEQELIDMESSGCKASSEMTVALGAPLVRGNAIRQLLTENNVFLKLIESFGVRKENGSEYVKAIPMHLSYDDIEVREQFIAGLVDSIGHVKRTSNGTIECAAISTAYKSVSEGLIRLARSLGIKVSVTTKRECLDKHNVKHQICYSICLSGATLSGALRFCALDKNNANSKKPFVRGPVPFYFTLKEKDEDNYYGITLPDSTDKQYLLSSLALVHNCGERGNEMAEVLMEFPELFTEQTGRKEPIMKRTTLVANTSNMPVAAREASIYTGITLAEYFRDQGKDVSMIAD

SEQ ID NO: 601 - protein, 969 aa, Staphylococcus epidermidis RP62A
  Sep RIR1 precursor
MSKWIEKNNEIMRRDELGQLSLSKDKEAIKLYLEHIKSKTKQFSNQIARLRYLVEEDYYIDVFKDYSEETLLELLDYAYSFGFEFQSFMAASKFYDTYALKTRDKSQWLEDFEQHNVIVSLYLAGGDVDLAKRYIKAHTLQTVQTATPTYLNAGRKQRGELASCYLFTMDDTLNSINFIRSQVSQASKIAGGVAVNLTRLRGRGATLKGVKNVGKGIVPVAKLIEGEVSYADQLGQRAGAGAAYLNIFHSDVIELLNTKKVNADEDTRLATLSIGLIVPSLFFDLAKEDKDLYMFEPYSIQEEFGKDVILDDININDWYDKFVENENVIKHKINAREMLNLIAQIQLQSGYPYIMYKDNANKNHALNELGEIKMSNLCVTGDTELLTEKGYVKAKDLYESQEDLKVVIDNRTKNYDINNKGTDIVNAIPMQLTAKQAEIYEITTKQGFKIKSTEWHKYYRKINDSIEKVQLNQLEVGDKLLVQSGNGSYGDFHDPKLAFLMGLIAGDGTFGRDGSVKIYLYHEKQYLKETIEELVAYIIDKYRNKNEFLHHSANLHPKFVENKELQKLTISSVELYKILSRFGFNRETKLRFPNLLKNATKNTITAYLSGLYQMDACVNTNEKYKAMSIELTTISEELARDIQMQLLNLGVYSSIYQSEREISLLPDGNGGMKEYKVQNTYKISIQDRSSRDLFMKEVALKPKDIHKAMIFNLTLRPNSRKPKHDFTAEITEIKYIGKEDVYDTTQEDYHSLIFNGIVTGNCTEIFQYMHVSDIKDYYEPDELGQDIICNLASLNMVKSIEEKEIEESIRTGMRALTFVANNSRIEHLPTVHKANKNNRAVGLGVMSFHSMCAKNKIRYGSEESLDLLNVYCMMMDYYSLDESMKIAVERNDKFYGFDQTDYKAKDGKEFGEYFYKNNRVTKNVEPITPKVKEIFKGIYIPTKEDWQRLAREVDKNGLYNSYRLSIAPY

SEQ ID NO: 602 - protein, 1067 aa, Saccharomyces exiguus, strain="IFO1128"
  Sex-IFO1128 VMA precursor
LEDHDESEYGSIYSVSGPVIVAENMIGCAMYELVKVGHDNLVGEVIRIDGDKATIQVYEETAGATVGDPVLRTGKPLSVELGPGLMETIYDGIQRPLKTIKDISQSIYIPRGIDAPALSRDIKWNFTPGKYVVGDHISGGDIFGSIFENSLLDNHKILLPPRARGTITWIAPAGEYTVDEKVLEVEFDGVKSDYSMYHTWPVRVPRPVAEKLSADYPLLTGQRVLDALFPCVQGGTTCIPGAFGCGKTVISQSLSKYSNSDAIIYVGCFAKGTQVMMADGSDKSIEDIQLGENVMGKDGTPRTVISLPRGKETMYEVCHSSTKGTTKDTLMNYVCSGNHKIVMQTPQQIGITEHGIDGKTYTSVSYFALRDSQHGYPIVKKLTKSFEHQQHGGKEQTLITVNNFVSSLKSEPINWDVEAKHYESLGHYVKKCSYQLINPVFHQSGKLAQEIASLNYSKDKAPLLAWLIGFWVGNGAMRHSQFVVESQDIELVNRIQDIAGLLNLSATTACYYSGSKDDEAKLAKLNSSSAEGFEDDLEGNPSVKELADMDRLSESKTATLPTAFGVENIDELIISLGEGRGNGNVFAQVIGSFGIDLADKDTLVTKIAHELAGDAFEVREQFVAGLVDAAGYVRKDVYDHASEATISTESKSTVLGLVKIARSLGIKITVTSDDSDDSDEHDHAHCGHDHGSSSSYTAVMTGDALTNSMRFCAIGRNRVAAKEFMRQAVPFYFSLEKKSEDDYYGITVPDNTDKQYLLSSMALVHNCGERGNEMAEVLMEFPELFTEINGRKEPIMKRTTLVANTSNMPVAAREASIYTGITLAEYFRDQGKNVSMIADSSSRWAEALREISGRLGEMPADQGFPAYLGAKLASFYERAGKAVALGSPDRIGSVSIVAAVSPAGGDFSDPVTTATLGITQVFWGLDKKLAQRKHFPSINTSVSYSKYTNVLDKFYDQNYPEFPTLRNRMKEILSNAEELEQVVQLVGKSALSDSDKITLDVASLIKEDFLQQNGYSTYDAFCPIWKTFDMMKAFIAYHDEAQKSVANGANWSKLAEATSDVKHQVSS

SEQ ID NO: 603 - protein, 1080 aa, Stigeoclonium helveticum, strain UTEX 441
  She RPB2 (RpoB) precursor
MSTSQSLNIIPIEYSLQTYQRSNQDTSMLHRPVVKEGEWVQAGDLLSDCASSIGGEFSIGQNILIAYLPWEGYNYEDAILISERLVYDDLYTSIHIERYDISTEKNPYGIEKITKDIVLLKDTTELNHLDKNGIAQLGAWLKEGDILVGKITPTESKKEVARYVQLYNDILGKKINYAIRDSSLRVPRGLEAKVIRVKTFPERKNETKNWENKIGLKSKALAFSVQHFLSKNQSNKKRTLSLKSKWEKETSLSSFSSLAWQKKSPLFFVFKNGIFEKLKNFPKKKKKNERVFALKKKSSKKFRFFELQKKFRFFFRNFFFFKAPKKKSPLFFFFKSETFDKERNFQKMSPNQSKQNWVKISIKKEWQKVGSFGKKKASKGKISFFPSFPQASLVGKASFFSPSRFEKKRDASNFLKSSCISSVHIYLAEKRKVQVGDKMAGRHGNKGIISQILPRQDMPYLPDGTPIDMALNPLGVPSRMNVGQIYECLLGLAGKHLGEQYRIQPFDEAFGPEASRSFVFSKLYSAKTKTGQSWLFQPTNPGKLKLFDGRTGNCFDQAITTGYSYMIKLVHLVDEKIHCLTVDHEVLTTKGWIPLNKVKTSHFVATLKKNGQLVYQNPTNIYHYPEFKGELYHIKNVNLDLLVTLNHRMYVKNGIIEATSSVDYQLIPAKDIVGQHKKYCKTAFWDKENYQFILPSVISNSIVIPEKTMNMEAWLQFFGIWIAEGWALTNTISNNNVTNFNQSSSSPYVVQISIKKKKVLEILNNVIPILGYSFNYYDNNITICDKQLWAYLRPLSLGNPYRKLPIWVWDLSQDQARVLLLAMITVFKNGTNSKWEKAASLSSRLSLASVFPEFLKKRIDKGLSYYTSSVELADDISRLALHAGWSGNNYLLKKKGSISSFDGKQIICQFDIWRISIIQSKNQPAVNHGYHSKGKEEVLPYQGAVYCLSVPNEIFYVRRNGLSVWTGNSRSSGPYSLITQQPLKGRSKHGGQRLGEMEVWAIEAYGAAFTLLELLTIKSDDVTGRLTIWDYVLYKKPLYIGTPASFKVLICELQALCLDIGIYKADKSNILKQINVSSMG

SEQ ID NO: 604 - protein, 968 aa, Shigella flexneri 5 str. 8401
  ShP-Sfv-5 Primase precursor
MRPSELSDLLWAQVDRVAPHLLPNGKIEGHEWVAGNVNGDKGNSLKVNLIGKKKWADFAEGDGGDMLDLWMACRGINLHQAMQEAKAFLGIKDDDHHFDARREKKFSRPDRKKIARYVTRTESHLEYLQSRGISPEVVKRYEVVSGKVWNGERELDALVLPYKRDGELLQVKRISTERPDGKKVIMAEGDCEPCLFGWQALDAGVRAVVLCEGEIDCMSYAQYGISALSVPFGGGKGAKQQWIEFEYHNLDRFEEIFISMDVDDVGREAAREIVSRLGEHRCRLVTLPYKDINECLMNGVTEDEIWQYIGTASYFDPEELYSAREFYQDTINAFYGKQQYLFNPPWESLADKFQFREAELTLVNGVNGHGKACPLNEPILLADGTWTTHGNVKIGDQVASVDGNPSTVTGIFPQGVRDVYRVTFEDGRYVDCAGDHLWEVTSRGFTKGEKRRVIDTFGLKRLSETKRHKNGVRIPEITGDFGDHSEPLAWVIGSLLGDGSLSNGSVKFSNVEPYMIERMKAELPDYNFSGDGKDWLISTARGQVNPLMETLRGYGLMGCTAKNKFIPRVFFSANKSTRIGMLCGLLETDGYVEKDGTLVFSSASEELRNGVVQLVNSLGGSCRTRVKTGVTYTYKDDKQHGMDSYEARIRLTREIREAIRSPRLNGRLTAHRFEGCGVFVRNVEKIGNAECLCIMVDHPRHLYVTRGYVATHNTEVVGHMALEAMRQGVKTCIASLELKPGILLKRLTRQATCCKMPPVLEIDSAFKFYDERLWVFGLTGTAKADRLIEIFDYARRRYGIQLFIIDSLMKCGIGDDDYNGQKAFVDSICDFKNKTNSHVILVTHSRKGDSEEKPTGKMDVKGSGAITGLTDNLFIIWRNKARERALQRVQSGEKMSEKDEQLLASPASVLMLEKQRNGEGWEGGVPLFLDEQSHQFLQLESGSPYSYIANMPKSEYDEAWRQENVTEY

SEQ ID NO: 605 - protein, 1060 aa, Staphylothermus marinus F1
  Smar 1471 precursor
MFSRRERKERLTKLPGEEEVSEAVKSIIVPAEPIQVAKRDPSWRIIESYYVYKPFVKIVIAETPQGPMYFVEEYGLTPSDKEVLEKLTDILMDEIRPPTRPEDIKDLKGYVFKETERIADKYREKLGLVGARKIKLLYYIERNLLGYGPIDPLMKDPNIEDISCNGVNIPIYVWHKKYESIPTNITFIDEDYLNEFVMKMAHMAGKHISIAFPILDAMLPEKHRLAATFGREVSVKGPTFTIRKFRERPFSVTEIIQSGVINSLVAAYLWTLIEHGKTAMIAGGTGVGKTTMLNVISMFIRPGMKIVTIEDTPEINLPHPNWVQLTSRETYLVGTSSLGTNIRLFDLVKLSLRYRPDYIIVGEVRGEEAFVLFQAMASVSYDTPVLIRDPINKIHLVKIGEFIDKFYEEGEERTAKHVNGYYVLSHDGFQVVWKPIKYVLRHRTNEIYEIIYEGGGKLEATGSHSVFVLDPDTLDIVEKPVMLLNKGEYLVSFNGVKENKDHQTIDLIDLVSDYNDVYVDNIPSELKKHTGGRNPIPLKQYMILRKRVITKKNNSLIKLRRSKYTLPIRLVLDEKLAFLFGAYIANGCVKERRDKLICFTFGKSAKNIADKVMNIMYEKFNIKPFIDDRGTYIIYEYPHTLLAIIFEKLLGRKLEEKKMPEILWSSPKSVIRAFFEGLRAYSQRTLRRRYTSYTTANKNLAYQLLWLARFAGFYSVLKEEKEAGKNNGKTYYHVIVYLDQSYRKPNASERVPVKPILKLIKYTKPRTMPPELAYIKRREFISRKTALKALEWIRRDGSFTDFSREYLRKIESLINGDIIVLKIKDVRKKQYKGYVYDISVPITEAFFGGNIPILLHNTGHGGLSTIHAETLDYAIKRLTSPPMNIPPTYMKLMNTFIHLQRVIARIEKGVVRVRRRATIVQEVEDFGKYRTIAVWDPRTDQFKVNLEESLHLRDIAAKRGLELEDIIDEIYRKATVLNWMIYKNIFNVWDVSRIIFNYYYDPVSVYKRAVRELEEAGREAGVPTMVAPEEVASTEELVGGTKEMGEATKELFERTRELEK

SEQ ID NO: 606 - protein, 1047 aa, Staphylothermus marinus F1
  Smar MCM2 precursor
MTYTLEKEKTEPDLVTRFKRFLWDFRDRRTGMFKYRERISHMALMGQRSLLIDFNDITLFDRGLAHIIENNPDTAIEAASIAIKELMRRENPEYAESVDKFYPRFRNPSKVLRIRELTSEYIGKFVAVEGILTRLTRVEARLVKAVFKHAECGAEFEWPEEGEMGERIEKPSYCPICGKTGKFQLLLNKSRFIDWQKIVVQEKPEEIPPGQIPRSIEVVLTGDLVDSARPGDRVLVTGILRVMPTSSVQRGIGKSVFGFYLEANYVDVQQKVLEEIEITREDEDKIKELARDPWIREKIIASIAPAIYGHWNIKEAIALLLFGGVPKLLPDGTRIRGDIHILLVGDPGTAKSQMLQYTAKIAPRGIYTSGKGSTAAGLTASVLRDKATGEYYLEAGALVLADGGVACIDEIDKMREEDRSAIHEALEQQSYHKDFKIMLADGRKVRIGDLVDELIGKNREKVIKGKDTEILFVDDLFLLSYNMRSGEQVLVKADRVSRHKAPDQFIKLRFSNGAEIIVTPEHPVLIINNGKIKTVRADTVRKGTLTIGVLGHKIIKEVNEDDIINNIRRKIVLDKELPYIHAKNISEAVEMRDQLMSIDIPTFIVKHKNEIRLYPSGPCSLRRLLLMHGVEEVVFSDELLYEIMNCHLYPATWYELLYSMGLTKIAKELNVYDFEILAGIIKKVEKEVIMLSQVLGLRNETQTELLHLKSRRELLIRLKDKLDMLRKRLKDLEEALGKDAVIRMITDVEVIKNTDSDWVYDITIEPYHLFVSDGLILHNTVSIAKAGIVARLNARASVLAAGNPKLGRYDHSLPVSKNIDLPPPILSRFDLIFIVEDIPEKTKDTLLAKHILDIHTDYEKAKPLIDTQLLKKYISYARRYIRPKLTQEAKKLLLDFYVNMRLSGVKASKEGPPAIAMTPRQLEALIRLSEAHAKMALKTKATIEDAEEAIRLMYYSLRKVGYDVKSGRLDIDLVELGVSRSKQVKMKEFMKFIDKVFEEYDEIEYKELYNLAKEKGFDKEFVIEMIRRLKKDGLVYEPRPGVLSKVY

SEQ ID NO: 607 - protein, 1046 aa, Saccharomyces pastorianus IFO11023
  Spa VMA precursor
ISLEDHAESEYGAIYSVSGPVVIAENMIGCAMYELVKVGHDNLVGEVIRIDGDKATIQVYEETAGLTVGDPVLRTGKPLSVELGPGLMETIYDGIQRPLKAIKEESQSIYIPRGIDTPALDRTIKWQFTPGKFQVGDHISGGDIYGSVFENSLISSHKILLPPRSRGTITWIAPAGEYTLDEKILEVEFDGKKSDFTLYHTWPGRVPRPVTEKLSADYPLLTGQRVLDALFPCVQGGTTCIPGAFGCGKTVISQSLSKYSNSDAIIYVGCFAKGTNVLMADGSIECIENIEVGNKVMGKDGRPREVIKLPRGSETMYSVVQKSQHRAHKSDSSREMPELLKFTCNATHELVVRTPRSVRRLSRTIKGVEYFEVITFEMGQKKAPDGRIVELVKEVSKSYPVSEGPERANELVESYRKASNKAYFEWTIEARDLSLLGSHVRKATYQTYAPILYENDHFFDYMQKSKFHLTIEGPKVLAYLLGLWIGDGLSDRATFSVDSRDTSLMERVTEYAEKLNLCAEYKDRKEPQVAKTVNLYSKVVRGNGVRNNLNTENPLWDAIIGLGFLKDGVKNIPSFLSTDNIGTRETFLAGLIDSDGYVTDEHGIKATIKTIHTSVRDGLVSLARSLGLVASVNAEPAKVDMNGTKHKISYAIYMSGGDVLLNVLSKCAGSKKFRPAPVATFVRECQGFYFELQELKENDYYGITLSDDSDHQFLLANQVVVHNCGERGNEMAEVLMEFPELYTEMSGTKEPIMKRTTLVANTSNMPVAAREASIYTGITLAEYFRDQGKNVSMIADSSSRWAEALREISGRLGEMPADQGFPAYLGAKLASFYERAGKAVALGSPDRTGSVSIVAAVSPAGGDFSDPVTTATLGITQVFWGLDKKLAQRKHFPSINTSVSYSKYTNVLNKFYDSNYPEFPVLRDRMKEILSNAEELEQVVQLVGKSALSDSDKITLDVATLIKEDFLQQNGYSTYDAFCPIWKTFDMMRAFISYHDEAQKAVANGANWSKLADSTGDVKHAVSSSKFFEPSRGEKEVHGEFEKLLS

SEQ ID NO: 608 - protein, 768 aa, Spirulina platensis, strain C1
  Spl DnaX precursor
MTYEPLHHKYRPQTFADLVGQEAIAQTLTNAIRSRRIAPAYLFTGPRGTGKTSSARILAKSLNCLQTSNPTETPCGICEVCRGITTGATLDFVEIDAASNTGVDHIRDLIERTQFSPVQCRYKVYVIDECLTGDALILSDRGWLRIDDPTLQECRVLSYNESTQQWEWQQVLRWLDQGVRETWKIKTFQTEIKCTGNHLIRTDKGWIKAANITPKMKILSPEIDAAVKTALQDVESIEKLGVNHVYDIEVEHNHNFVANGLLVHNCHMLSTAAFNALLKTLEEPPDRVVFVLATTDPQRVLPTIISRCQRFDFRRIPLQAMATHLETIAAKENIAITPEAVMMVAQIAQGGLRDAESLLDQLSLLSGEITVERVWDLVGAVPERDLMTLLEAIAEGKATAILDQTRELLNRGRDPLIVLQNLGEFYRDLLIAKTAPNRQDLVKLTQPTWESLCAFSQRWEHEIILAGQKHLRDSEVQIKNTTQPRLWLEVTLLGLLPEALRPQTVSTGVVNVQPQPISNQPTSKMRSQPVYKPPAPAQPVSQAVSVPDAPPPPPPPPQPTTANQEEAVNYSLEELWEQILSAIEQLGTQALMRQHGCLRSHHGNVVCIGLKSHPLLKIAQAKISSLEVACQKVFNTKIQVNLEVGMGAVSPGVHPEKTPISQRVQSPPPPPPEPPPPTREPETERPPELTTPKIEDISVKVADNDNNSPVDDVATAAEKLAEFFDGEIIPWYPENTQVTTVSSSSVALEDTIEFYSPEDDDSEDDVPF

SEQ ID NO: 609 - protein, 850 aa, Salinibacter ruber DSM 13855
  Sru DnaB precursor
MRGGTGEQQREQAQAVHEQSGRVPPQAVDVEKSVLGAMLIEREAIPQAIEILPSDAFYESKHQSIYGCIQDLFERGNPVDLVTLTEELRRRDKLEEIGGAYYLTELTTQVASAANVEYHARIIAEKSLLRRMIETMTTVVQKAYDPGADAFELLDEAESKIFQISDNQLRKAAAPMNEVVKDTLERLETIHGQDGGITGVPSGFPKLDDLTSGWQDSDLIIIAARPSMGKCLGKGTPVMMYDGRTKPVEKVEVGDRLMGDDGSPRTVQSLARGREQMYWVRQKRGMDYRVNESHILSLKKSRREGARDRGSIADISVRDYLDQSDKWKDDNKGFKVAAEFPDQPVPLDPYFLGLWLGDGKSDNARIYTTDEEVITGLQEIAEKRGDTISVSDEHRRCPAYLVKSGDRGGAMATRESVQGALRALGVLGDKHIPHLYLGNSRGKRLRLLAGLIDSDGHLNDGHGGTYEITQSSEQLARDIKFLCDTLGYRTSLTQKTARISSTGYESEVHRVRFNGNVDEIPVRVERKKASPWTDVRDWRMTGIDVEPDGVGDYFGFTLDGNGRFLLGDGTVTHNTAFALASAQNAATHPERSTGVAIFSLEMGAQQLAQRMLTSEARVDAHRARTGRMKDDDWQRLARAAGALSDADIYIDDTPGLSVLELRAKCRRLKAEHELGLVVVDYLQLMQASGANLRSGANREQEIAHISRSLKGLAKELDIPVIALSQLNRAVENRGGDKRPQLSDLRESGSIEQDADVVSFIYRAERYGITVDEQGNSTEGIAEIIVGKQRNGPIGSVELAFVDQYARFEPLTTQYDNPGGGPPQGDGSAPMPPDGNAGGGGGNSFEDDAPF

SEQ ID NO: 610 - protein, 1162 aa, Salinibacter ruber DSM 13855
  Sru PolBc precursor
MSSPPAVNTPAPADATQSAADTALFGKDPMPRLVDVHPMMDRPSNEPARVRVYQRSEDFASIHEQEDTFFPFFFLSDFSLLADRYRNGDVHTATPLNGDNFYQYLLTFETWSDYWDALRQVEHRSDSDQQAPDELYRVGSPAQQYLMQTGRSCLLGMTLDDLHRLQLDIEVYSEGSFPNADRPDDKVIIVALSDNRGWDEVLHLRDGIGEEQLLQELVYVLQERDPDVIEGHNIFEFDLAYLLDRCALHGVDFAIGRDGSVPRTYDSSMRFAERTVDYPAVDIVGRHVIDTYFQVMSFDVFSRDLPDYSLKTAARYFDLAPEERTYIEGTEIAKAWRTDRATLLEYALDDVIETKRLAGHLSGSTFYLAQMLPMTYGSSARRGPAGKIESLFVREYLRRRHALPRSEWGSQSMGGYTDIFITGVLGPIVYADVESLYPSIMLNYDVQPSGDTLDLFPQLLERLTDLRLKTKQDMKDAEEEEVRSELDARQSSYKVLINCFDPETEVVTVDGIRHVEEIEVGDRVYSLNPDTGAVEIKPVTATQSQHYAGPMVEIKNQHTDFLVTPNHRFLTQRFTSGEYTDLEWETAGDMLGDRIRRRLPSLRSLPATQERPGPISLSAVCDRLAIEHKTGPRGIKELRRQARWQPEEYELTDWLRILGWFATEGTLYKSKARQYENGNVRGVSYQTTLCQKNDIGRSEIATLLNRTGITYSSDQNDHSFCSKVLYEILEAECGSDSFSKHLPPWIFQLGPKDLKIVFDTLMQGDSAANGDRFTTSSNQLAEDFIRLAMHIGRRAFHMPNDGSHRIQVNTVRGQRPTIKPKHRQQVDYDGMIHCLTVADNHTVLAGRNRKFNWTGQSFYGLLGFGLSAFNDFEEADRVARTGQQILRQLIDEIRARGGTVIEVDTDGVLFVPPEDVRGEQAEIDYTVSLTEAMPEGIRVGFDGRFKKMLSYKKKNYALLTYDDELKFKGSSLISRSNEPFGRDFVRKAIRRLLDHDVAGLHELYVDTRDKIVNSDWEGVERFARTETLKDTLEQYEADVEAGQRPRAATYELAKEKQNRTGKPVKKGDRITYYITGDDATVTAFKHCRRAEEWDPEDPDENTAYYLKRLDEFASKFEPFFDEADFRLVFSPEDLFGFSADGIEIQREEHASDYAEDQEDVPF

SEQ ID NO: 611 - protein, 1116 aa, Synechocystis species, strain PCC6803
  Ssp DnaX precursor
MAYEPLHHKYRPQTFADLVGQTAIAATLSNAIEQERIVPAYLFTGPRGTGKTSSARILAKSLNCIAGDRPTATPCGQCATCRAITNGSALDVIEIDAASNTGVDNIREIIERAQFAPVQCRYKVYVIDECLTGDSQVLTRNGLMSIDNPQIKGREVLSYNETLQQWEYKKVLRWLDRGEKQTLSIKTKNSTVRCTANHLIRTEQGWTRAENITPGMKILSPASVDVDNLSQSTALTASLGGLSGAINYEAINTDKKNTTLSLSLKKQKPQDPFVNADVAKNLIFQHFCSAKEEKLKVSNPIGEDIPTKKATDFGISEQKKLHQGQNRWEQKFSVLSTEPCLGMEVLTIPTHIADSPACDGPTAPSSQNGWNIKRQDWDVCHPKYDSQPIKAMGKVPSAVKPVVPQTLLMFSAQSNLEVKENKFLRNGSRISLKKEWLGGTWTTVPSLFPNLGVHQFSYTQRAFSRKKINLLLNGLPIEDIPPVQNPIAEALTAKPITTQKWEQWPPASGYRTWKSIPSPQWHTNFEEVESVTKGQVEKVYDLEVEDNHNFVANGLLVHNCHMLSTAAFNALLKTLEEPPERVVFVLATTDPQRVLPTIISRCQRFDYRRIPLQAMVDHLRYIAGRENINIDQPALTLVAQIANGGLRDAESLLDQLSLLPDLITPDKVWDLVGAVPEQDLLALLEAIASDDAETLLATCRQILNRGREPLVVLQNLASFYLNLLIAQTAPQRSDLVAVTAETWQALCDTAPQWQRGVILQGQQKLKESEIQIRNTTQPRLWLEVTLLGLLPSACGLDTGAVSQTAVRTPVAQPITPPKPSNVVTFPGGSHNHLTVVDSPTMIPVSEPIVLEEKLEADVEPSSFEPSNAHWDLTQLWSETLNNLGALSQSLFKSFGSLINLVGNNATVSVTTQQLLKIAAGKKDELEAALGQACGQSVKVNLVVGKPSTPETTPVNSAPPPSHSKPPAFAPEPSPPPTAAVNANPAPTVPPSPPAIARGPATSEIKPSPRRESNNFSNPSRPKPKPAPAMEEPPPTDIGDSATRKAIEQFAKNFDGEIVASDAAPKQESDNGDDLSTEPTAELGQQPMDHNGHLQINQPTVLNRPAIAPEEEEDLPF

SEQ ID NO: 612 - protein, 1078 aa, Synechocystis species, strain PCC6803
  Ssp GyrB precursor
MTMTTTNYGADQIQVLEGLEPVRKRPGMYIGSTGPKGLHHLVYEVVDNAIDEALAGYCTHIEIDINADGSVTVVDNGRGIPTDIHPTTGRSALETVLTVLHAGGKFGGGGYKVSGGLHGVGVSVVNALSEWVEVKVWRQGKEHFQRFERGNPIGTLEATPNEGHSTGTQVSFLPDTQIFKDGIEFDYHTLASRLKELAYLNAGVRITFGDRRADSLKEEQFYYEGGIREYVTYMTTDKTPLHEEIIYTSGEKNDVQVEVALQWCVDAYSDTLLGFANNIRTIDGGTHLEGLKAVLTRTLNSVARKRNKLKDGDSNLGGENIREGLTGVISVKVPDPEFEGQTKTKLGNTEVRGIVDTLVGEALTEFLEFNPGVADAIIEKAVQAFKAAEAARRARELVRRKSVLESSTLPGKLADCSSKDPSESEIFIVEGDSAGGCFSGDTLVALTDGRSVSFEQLVEEEKQGKQNFCYTIRHDGSIGVEKIINARKTKTNAKVIKVTLDNGESIICTPDHKFMLRDGSYKCAMDLTLDDSLMPLHRKISTTEDSGITIDGYEMVWSPRSDSWLFTHLVADWYNRWQGIYIAEEKQHCHHKDFNKRNNNPDNLIRLSPEKHLALHRKHISKTLHRPDVVEKCRRIHQSPEFRRKMSARMQSPETRAILSKQAQAQWQNETYKLTMMESWRSFYDSNEDYRQQNAEQLNRAQQEYWAQAENRTAQAERVRQHFAQNPGLRQQYSENAVKQWNNPELLKWRQKKTKEQWTPEFREKRREALAQTYYRKTLAALKQVEIENGYLDISAYDSYRISTKDKSLLRFDRFCERYFENDENLAREAVLNYNHRIVNIEAVSETIDVYDIEVPHTHNFALASGVFVHNSAKQGRDRRFQAILPLRGKILNIEKTDDAKIYKNTEIQALITALGLGIKGDDFDISSLRYHRVVIMTDADVDGAHIRTLLLTFFYRYQRDLVDQGYIYIACPPLYKLERGKNHFYCYSDRELQEQISQFPPNANYTIQRFKGLGEMMPQQLWDTTMNPESRTMKRVHIEDAAEADRIFTVLMGDRVAPRREFIETYGTKLDLTDLDI

SEQ ID NO: 613 - protein, 591 aa, Synechococcus species JA-2-3B'a(2-13)
  Ssp-JA2 DnaB precursor
MISDYDLTGGDRLPPQNIEAEEEILGGILLDPDALVRVAEFLRPEMFYISAHQEIYRAALQLHSQGQPTDLMTVSAWLADHHLLERVGGTGAIRRLLEQTVSSVNIDQYARLVMDKYMRRQLIQVSNTLARLAYDTSQPLSQVMDQAEQQVFGLTQERVQRSLIPASEVLVNIFSDLEEKFQSGAQLPGIPTKFIDLDNLTQGLQRSDLLILAGRPSMGKTSLALNIAQNVAAYAKQPVAIFSLEMSREQLVQRLLASEARIDSSRLRSGRISEHEWQRLGQAIGFLSQLPLFIDDTPDCTVTEIRSKARRLQAEQGGTLGMVLIDYLQLMQGSAADNRVQELSRITRGLKAMAKELMVPVLVLSQLSRAVESRSDKRPQLADLRESGCLAGDTQVMDADRGKIWRLDQLAALPAAAELPRLLSLNGRGRLVPQQPVKVFCSGRQPTCVLKTRLNFSIRATGNHPFLTPDGWKTLDELQLEEEVAVVVQEGLIWDPVVLISEPGEPQPVYDIEMPRHHNFVANGLLVHNSIEQDADLVMMIYRPEYYDPNTSDRGIAEVIIAKHRNGPTGTVRLLFESQYTQFRNLADPNR

SEQ ID NO: 614 - protein, 1137 aa, Synechococcus species JA-2-3B'a(2-13)
  Ssp-JA2 RIR1 precursor
MQGLDPAETTGSLPLGEFPATAPAASPVFYRTYSRRRPDGSRETWSEVCDRTLADIARLGRFTPQERQLVERLQRQLKALISGRALWVMGTDWIQKPENFSGAYNCTSLAVVDWRAFGLMMDLAMMGCGTGAVLEPQFIRQLPPIVNRLRVHVKGSIGATPPEERQEHTRIHRQGSQVHIQVGDSRRGWVESYQALLELASDPSFGGQVEVTVDLSDVRPAGERLKGFGGVANPIKLPGLYERCAAILNRAVGRQLNSVECCLLIDEAAVVVVAGNIRRSAGIRQFAADDQLGSTAKDNLWQQDENGNWRIDPERDALRMANHTRVFHRKPTREECVEAVRKQFYSGEGAIQWAGEAVARANCDLIPPDLKPDFLKAYEAGTAREWLKGRDPSLGEEELQDRLWRYGLNPCVTADTWVHTGDGPRQVRDLIGKQHSTYVNGELFSTTPEGFFYSGTKPVLKLLTKEGFSLRLTGNHRVLKVTAQTQKAQYTEWVPAESLQPGDRILLHNHRDLTSWDGAGTWEEGWLLGNLLGDGGLTATPWNDTALLRYWQDTQAEMSQYAIQLLQTAVGYEPRQPEAYHYAQLGLRVIGSRGLAKLAAQFGMRPGQKQMTEALEATSFQFHRGFLCGLFDADGSVQGNQEKGVSVRLSQSHLGTLKAVQRMLARLGIIAVLYENRRPAGYRLLPNSARQPAPYACKAQHELVIANDNLHLFQEWVGFREPHKAQKLEALLNGYKRQLNRERFAVTVAALEADGVEPVYDCTVPGPACFDANGFVVHNCGEIIGHTFHCNLAEIHLNRLDPHNRQEQEEAFTAGALTVAALLHHRFVEPRFQRSREWDPIVGVSFTGLFDFCVKAFGVEWLRWWQEGRPDTPIGKEFKQQEREYLSRWKEIVHRVVWDYCDRHSLRRPNRCTTVQPAGTKSLLTNASPGWHPPKAQRYIRRITFAKNDPVALACLDYGYSVVPAQADKDENGNLLNDPFDPRCTEWLVELPVEVEWANLPGAGQIEIEQFSALAQFDFYMQVQKYYTTHNTSATIELREDEVEALGSRIYEAIRDDEGYISAALLARFDAPFPRLPFEKIDKPTYERLVAEVKKRRRTDNFFAALARYGRNFTLAAEGPAGCDALGCLLPDSAPQS

SEQ ID NO: 615 - protein, 591 aa, Synechococcus species JA-3-3Ab
  Ssp-JA3 DnaB precursor
MISDYDLTGGDRLPPQNIEAEEEILGGILLDPEAMARVAELLRPEMFYLSAHQEIYRAALQLYSQGQPTDLTTVSAWLADHQLLERVGGTAAIRRLVEQTVSSVNIDQYARLVVDKYMRRRLIQVSNTLARLAYDTSQPLPQLLDRAEQEVFSLTQERVQRSLVPASEVLVNIFSELEERFQSGAQIPGIPTKFIDLDNLTQGLQRSDLVILAGRPSMGKTSLALNIAQNVAAYVKQPVAIFSLEMSREQLVQRLLASEARIDSSRLRSGRISENEWQRLGQAIGFLSQLPLFIDDTPNCTVTEIRSKARRLQVEQGGTLGLVLIDYLQLIQGSESDNRVQELSRITRGLKALAKELMVPVLVLSQLSRAVESRSDKRPQLADLRESGCLAGDTRVRDVDRGKIWRLEQLAALPPSAELPRLLSLNGRGRLVPQQPVRVFCSGRQPTCLLKTRLNFSIRATGNHPFLTRDGWKTLDELQLEEEVAVVVQEGLIWDPVVFISEPGEPQPVYDIEMPRHHNFVANGLLVHNSIEQDADVVMMIYRPEYYDPNTSDRGIAEVIVAKHRNGPTGTVRLLFESQYTQFRNLADPYR

SEQ ID NO: 616 - protein, 1155 aa, Synechococcus species JA-3-3Ab
  Ssp-JA3 RIR1 precursor
MVQSKEAHSPAIQGLGMGSLGEFPATAPAAAPVFYRTYSRRRPDSSRETWSDVCDRTLADIARLGRFTPQERELVERLQRQLKALISGRALWVMGTDWIQKPENYSGAYNCTSLTVVDWRSFGLMMDLAMMGCGTGAVLEPQFINRLPPILNRLQVQVVGSIGATPRHSRQEHTPIQRQGSRVHIQVGDSRRGWVESYQALLELAADPSFGGQVEVTVDLSHVRPAGERLKGFGGVANPIKLPGLYQRCAAILNKAVGRQLNSVECCLLIDEAAATVVAGNIRRSAGMRQFAADDELGSSAKDNLWQQDEQGNWRIDPERDALRMANHTRVFHRKPTREECIAAVRKQFYSGEGAIQWAGEAVARANADLINTPELKREFLNVYASEGPEGARRWIEERQAASSSPSVQPPTWHRVQRYGLNPCVTADTWIHTGDGPRQVKDLIGKQHSTYVNGELFSTTPEGFFYSGTKPVLKLVTQEGFSLRLTGNHRVLKVIAQTPKAQYTEWVPAEELRPGDRILLHNHRDLTPWDGEGTWEEGWLLGNLLGDGSLATTQGNDTAVLRYGQDTQQERSLHAAQVLQAAVGYEPRRPETCYHPKLKCWVIHSTGLARLAAKFGMAPGQKQMTAALEATSFDFHRGFLCGLFDADGSVQGGQEKGVSVRLSQSNLDTLKAVQRMLARLGIVSAIYENRRPAGYRLLPDSKRQPAPYACKVQHELVISGDNLHQFQAVVGFREPRKAQKLGELLGSYQRRLNREWFTVTVAALEPDGVEPVYDCTVPGPSCFDANGLVVHNCGEIIGCDFHCNLAEIHLNRLDPHNRQEQEEAFTAGALSAAALLHHRFVEPRFQRSREWDPIVGVSFTGLFDFCVKAFGVDWLRWWQEGRPDTPLGREFKQQEREYLSFWKEVVHRVVWDYCDRHGLRRPNRCTTVQPAGTKSLLTNASPGWHPPKAQRYIRRITFAKNDPVALACLDYGYSVVPAQSDKDENGNLLNDPFDPRCTEWLVELPVEVEWANLPGAEEIEIERFSALAQFDFYMQVQKYYTTHNTSATLELREDEIEALGSRIYEAIRDDEGYISAALLARFDAPFPRLPFEKIDKATYERLMAEVKQRRKVDNFYEALARYDRNLALTAEGPAGCDALGCLMPEASPQGENLSR

SEQ ID NO: 617 - protein, 1004 aa, Staphylococcus phage Twort
  StP-Twort ORF6 precursor
MKLRIKNLFTYVEFEEDDKYLKDIFLKRVHKTIGARQQGFQFSPAYKRGSWDGYIDFYVYEEDKFPTGLLHRVELLLGELQSRYNFQYSKIDERSESFLAPEDIDKEIKLLDNKIGQITLREYQYQAVYESLVNFNGVLKIATNGGKCISMDSMILTTEGYKSLQEIFETQGVKVDNKEKVIELKYPLINRYGDVEYTSHFTKNGEKPTKRIKTNKGIELVNTYNHPLLVREGFNLIWKKSEDIEVGDILVSRVGDHQFGNNNTVENEEEAYALGCMVADSYLGSYSRLSFSNDKKEILDKVSKFWNTFSNKEVYYDTYKESKGITIHLHDTNKTKEFHDKYKIEYGVAKDKKIPKCIMESPENIQLAFVSGYLECESSISEKNLEVTSASKDLLKDLQLILSNIGIVSTNKEKVVKKYKHNKYYRLIVNRKELIKLLPLLRFETQQRKNQKENFLSNNTKIKSSYGNTIEGSRYLLKKYRDSLNIDKKEFSKYLSRDTITIDRLREVISLYPDGDKEIRELFENVVNNNIYYQKVEQVLEGEIIPTFDVCMPKTHSFIANTIVNHNTECASGIIDQLLPQLEKGETIAFFTGSTEIFHQSADRLKERLNIPIGKIGAGKFDVKQVNVVMIPTLNSNMKDPTEGLKVTPKQNISKKIAKEVLPKFEGGKNQKRFMGMYLKQFEPKTKVDQKVKDELINIYNTSKSDQELLLNLRKHNVIFQNIAKSKNEKKYNKYHQMREFLDSVAVMIVDEAHHSKSDSWYNNLMTCDNALYRIALTGSIDTQDDLLNMRLEALFGEVISRVSNEFLISEGHSAKPTINTIPIMTPKDIENQKEYRDVYDEGITNNEFRNKLIAKLTEKWYNKDKGVLIIVNFITHGENISKLLEELGIEHFFLHGEVDSELRQQKLNDMRSGKLKVMIATSLIDEGVDISGIHALILGAGGKSLRQVLQRIGRALRKKKDDNTTQIFDFEDRTHKFLYEHFKQRLSIYEEEKFEVKDVTRKG

SEQ ID NO: 618 - protein, 505 aa, Saccharomyces unisporus, strain CBS 398
  Sun VMA precursor
ISQSLSKYSNSDTIIYVGCFEKGTEVLMADGTDKVIEDITIGEQVMGKDGQPREVVGLPRGKMTMYQVCHKATEQNEIALMDYVCSGNHKFVLVTPQNVKITEHMLRGKMYTSVNYFVANDFENGQVVKLRTKTFQHDIHGGADGAKVEAQKFASTIDLSPISWEIEASKYVELDVNVRNATTQLINPVFYESGKLASRLQTKNIDQTSADKLAYVMGSWVGAGSMDQPTFAGNQLDEEFVSRLTEYGSGLDLTKNNSVWDIINESGLRTLNANGEATKTIPKELVSDSISVREHFIAGLVDTQGNVKRASTGAVETASISTVYERISNDLVKLARSLGIKASVSQQEEHVDAKGVDQQQTYNIKLTGSALNGVVRLSALSKNRDEPVSFERLPVPFHFTLLEKAEDNYYGVTLPDATDKQYLLSSLALVHNCGERGNEMAEVLMEFPELFTEINGRKEPIMIRTTLVANTSNMPVAAREASIYTGITLAEYFRDQGKDVSMIAD

SEQ ID NO: 619 - protein, 763 aa, Thermoplasma acidophilum, ATCC 25905
  Tac-ATCC25905 VMA precursor
MGKIIRISGPVVVAEDVEDAKMYDVVKVGEMGLIGEIIKIEGNRSTIQVYEDTAGIRPDEKVENTRRPLSVELGPGILKSIYDGIQRPLDVIKITSGDFIARGLNPPALDRQKKWEFVPAVKKGETVFPGQILGTVQETSLITHRIMVPEGISGKVTMIADGEHRVEDVIATVSGNGKSYDIQMMTTWPVRKARRVQRKLLSRDPLVTAQSGNRCAFPVAEAANCRVPGPFGSGKCVSGDTPVLLDAGERRIGDLFMEAIRPKERGEIGQNEEIVRLHDSWRIYSMVGSEIVETVSHAIYHGKSNAIVNVRTENGREVRVTPVHKLFVKIGNSVIERPASEVNEGDEIAWPSVSENGDSQTVTTTLVLTFDRVVSKEMHSGVFDVYDLMVPDYGYNFIGGNGLIVLHNTVIQHQLAKWSDANIVVYIGCGERGNEMTEILTTFPELKDPNTGQPLMTGLSFIANTSNMPVAAREASIYTGITIAEYYRDMGYDVALMADSTSRWAEALREISGRLEEMPGEEGYPAYLGRRVSEFYERSGRARLVSPDERYGSITVIGAVSPPGGDISEPVSQNTLRVTRVFWALDAALANRRHFPSINWLNSYSLYTEDLRSWYDKNVSSEWSALRERAMEILQRESELQEVAQLVGYDAMPEKEKSILDVARIIREDFLQQSAFDEIDAYCSLKKQYLMLKAIMEIDTYQNKALDSGATMDNLASLAVREKLSRMKIVPEAQVESYYNDLVEEIHKEYGNFIGEKNAEASL

SEQ ID NO: 620 - protein, 764 aa, Thermoplasma acidophilum, DSM1728
  Tac-DSM1728 VMA precursor
MGKIIRISGPVVVAEDVEDAKMYDVVKVGEMGLIGEIIKIEGNRSTIQVYEDTAGIRPDEKVENTRRPLSVELGPGILKSIYDGIQRPLDVIKITSGDFIARGLNPPALDRQKKWEFVPAVKKGETVFPGQILGTVQETSLITHRIMVPEGISGKVTMIADGEHRVEDVIATVSGNGKSYDIQMMTTWPVRKARRVQRKLPPEIPLVTGQRVIDALFPVAKGGTAAVPGPFGSGKCVSGDTPVLLDAGERRIGDLFMEAIQDQKNAVEIGQNEEIVRLHDPLRIYSMVGSEIVESVSHAIYHGKSNAIVTVRTENGREVRVTPVHKLFVKIGNSVIERPASEVNEGDEIACASVSENGDSQTVTTTLVLTFDRVVSKEMHSGVFDVYDLMVPDYGYNFIGGNGLIVLHNTVIQHQLAKWSDANIVVYIGCGERGNEMTEILTTFPELKDPNTGQPLMDRTVLIANTSNMPVAAREASIYTGITIAEYYRDMGYDVALMADSTSRWAEALREISGRLEEMPGEEGYPAYLGRRVSEFYERSGRARLVSPDERYGSITVIGAVSPPGGDISEPVSQNTLRVTRVFWALDAALANRRHFPSINWLNSYSLYTEDLRSWYDKNVSSEWSALRERAMEILQRESELQEVAQLVGYDAMPEKEKSILDVARIIREDFLQQSAFDEIDAYCSLKKQYLMLKAIMEIDTYQNKALDSGATMDNLASLAVREKLSRMKIVPEAQVESYYNDLVEEIHKEYGNFIGEKNAEASL

SEQ ID NO: 621 - protein, 1829 aa, Thermococcus aggregans
  Tag Pol-1 (Tsp-TY Pol-1) precursor
MILDTDYITKDGKPIIRIFKKENGEFKIELDPHFQPYIYALLKDDSAIDEIKAIKGERHGKIVRVVDAVKVKKKFLGRDVEVWKLIFEHPQDVPALRGKIREHPAVIDIYEYDIPFAKRYLIDKGLIPMEGDEELKLMAFDIETFYHEGDEFGKGEIIMISYADEEEARVITWKNIDLPYVDVVSNEREMIKRFVQIVREKDPDVLITYNGDNFDLPYLIKRAEKLGVTLLLGRDKEHPEPKIHRMGDSFAVEIKGRIHFDLFPVVRRTINLPTYTLEAVYEAVLGKTKSKLGAEEIAAIWETEESMKKLAQYSMEDARATYELGKEFFPMEAELAKLIGQSVWDVSRSSTGNLVEWYLLRVAYERNELAPNKPDEEEYRRRLRTTYLGGYVKEPERGLWENIAYLDFRCHPADTKVIVKGKGIVNISDVKEGDYILGIDGWQRVKKVWKYHYEGKLININGLKCTPNHKVPVVTENDRQTRIRDSLAKSFLSGKVKGKIITTKLFEKIAEFEKNKPSEEEILKGELSGIILAEGTLLRKDIEYFDSSRGKKRISHQYRVEITIGENEKELLERILYIFDKLFGIRPSVKKKGDTNALKITTAKKAVYLQIEELLKNIESLYAPAVLRGFFERDATVNKIRSTIVVTQGTNNKWKIDIVAKLLDSLGIPYSRYEYKYIENGKELTKHILEITGRDGLILFQTLVGFISSEKNEALEKAIEVREMNRLKNNSFYNLSTFEVSSEYYKGEVYDLTLEGNPYYFANGILTHNSLYPSIIVTHNVSPDTLEREGCKNYDVAPIVGYKFCKDFPGFIPSILGELITMRQEIKKKMKATIDPIEKKMLDYRQRAVKLLANSILPNEWLPIIENGEVKFVKIGEFIDRYMEEQKDKVRTVDNTEVLEVDNIFAFSLNKESKKSEIKKVKALIRHKYKGEAYEVELNSGRKIHITRGHSLFTIRNGKIKEIWGEEVKVGDLIIVPKKVKLNEKEAVINIPELISKLPDEDTADVVMTTPVKGRKNFFKGMLRTLKWIFGEESKRIRTFNRYLFHLEELGFVKLLPRGYEVTDWEGLKRYRQLYEKLVKNLRYNGNKREYLVRFNDIKDSVSCFPRKELEEWKIGTAKGFRAKCILKVDEDFGKFLGYYVSEGYAGAQKNKTGGMSYSVKLYNENPNVLKDMKNIAEKFFGKVRVGKNCVDIPKKMAYLLAKSLCGVTAENKRIPSIIFDSSEPVRWAFLRAYFVGDGDIHPSKRLRLSTKSELLANQLVFLLNSLGVSSIKIGFDSGVYRVYINEDLPFLQTSRQKNTYYPNLIPKEVLEEIFGRKFQKNITFEKFKELADSGKLDKRKVKLLDFLLNGDIVLDRVKNVEKREYEGYVYDLSVEDNENFLVGFGLLYAHNSYYGYMGYPKARWYSKECAESVTAWGRHYIEMTIKEIEEKFGFKVLYADSVTGDTEIIVKRNGRIEFVPIEKLFERVDYRIGEKEYCILEDVEALTLDNRGKLIWKKVPYVMRHRAKKKVYRIWITNSWYIDVTEDHSLIVAEDGLKEARPMEIEGKSLIATKDDLSGVEYIKPHAIEEISYNGYVYDIEVEGTHRFFANGILVHNTDGFYATIPGEKPETIKKKAKEFLKYINSKLPGLLELEYEGFYLRGFFVAKKRYAVIDEEGRITTRGLEVVRRDWSEIAKETQAKVLEAILKEDSVEKAVEIVKDVVEEIAKYQVPLEKLVIHEQITKDLSEYKAIGPHVAIAKRLAAKGIKVRPGTIISYIVLRGSGKISDRVILLSEYDPKKHKYDPDYYIENQVLPAVLRILEAFGYRKEDLKYQSSKQVGLDAWLKK

SEQ ID NO: 622 - protein, 1829 aa, Thermococcus aggregans; identical to SEQ ID NO: 621
  Tag Pol-2 (Tsp-TY Pol-2) precursor

SEQ ID NO: 623 - protein, 2605 aa, Trichodesmium erythraeum IMS101
  Ter DnaB-1 precursor
MQSDRLPPQNIESEEAILGGILLDPEAINRVTELLHPEFFAIQAHQIIYKAMCQLYSQGKPTDLMTVTSWLSDHNQLEKIGGRVKIVQLLERTVSAVNIDQYAALVLDKYIRRKLIQAGNEIFDLGFQTATKLEIILDQAEQKIFALTQDKPQQDLVPISETLINTFQEIEDRNEGVALPGLPCGFYDLDAMTGGFQRSDLIIVAGRPSMGKCAAYDTLVLQKDGSLVTLAEVYKRQEIELLTLGKNSKFYLTKPSAFIDDGIKPIFRVTTKLGRFVETTITHPFLTVNGWKPLSKLQVGEKIAVPRRLNIFGNETISESKFSSLINFDNLYLFPLVFQLERSQLALFIRYLFSLDGWVKIYQNKIVCFGYSTVSEKLIRQIQHILLRFGIVSGIEKFEEKRTEKIKVVKEVKSQRSHREEFTFATYRNCYCDGKWHLTITDALSQKNLMEDIGGFDSKNFYLFDLLQPHNSGNQELENHLIFWDELVNVLAKFAASKNQSLKNRTAKGKSPKNSENLTTTETICRKNILANMENLPSDNQNFDSEKLDLSQPHNSGNQELENHLIFWDELVNVLAKFATSKNQSLKNRTTKRNSPKNSENLTTTETICRKNILANMENLPSDNQNFDSEKLDLPQPHNSGNQELENHLIFWDELVNVLAKFAASKNQSLKNRTTKRNSPKNSENLTTTETICRKNILANMENLPSDNQNFDSEKLDLPQPHNSGNQELENHLIFWDELVNVLAKFATSKNQSLKNRTTKRNSPKNSENLTTTETICRKNILANMENLPSDNQNFDSEKLDLSQPHNSGTQELENHLIFWDELVNVLAKFAASKNQSLKNRTAKGKSPKNSENLTTTETICRKNILANMENLPSDNQNFDSEKLDLSQPHNSGNQELENHLIFWDELVNVLAKFATSKNQSLKNRTTKRNSPKNSENLTTTETICRKNILANMENLPSDNQNFDSEKLDLPQPHNSGNQELENHLIFWDELVNVLAKFATSKNQSLKNRTTKRNSPKNSENLTTTETICRKNILANMENLPSDNQNFDSEKLDLPQPHNSGNQELENHLIFWDELVNVLAKFATSKNQSLKNRTTKRNSPKNSENLTTTETICRKNILANMENLPSDNQNFDSEKLDLPQPHNSGNQELENHLIFWDELVNVLAKFATSKNQSLKNRTTKRNSPKNSENLTTTETICRKNILANMENLPSDNQNFDSEKLDLPQPHNSGNQELENHLIFWDELVNVLAKFATSKNQSLKNRTTKRNSPKNSENLTTTETICRKNILANMENLPSDNQNFDSEKLDLSQPHNSGTQELENHLIFWDELVNVLAKFAASKNQSLKNRTTKRNSPKNSENLTTTETICRKNILANMENLPSDNQNFDSEKLDLPQPHNSGTQELENHLIFWDELVNVLAKFAASKNQSLKNRTTKRNSPKNSENLTTTETICRKNILANMENLPSDNQNFDSEKLDLPQPHNSGNQELENHLIFWDELVNVLAKFAASKNQSLKNRTTKRNSPKNSENLTTTETICRKNILANMENLPSDNQNFDSEKLDLPQPHNSGNQELENHLIFWDELVNVLAKFATSKNQSLKNRTTKRNSPKNSENLTTTETICRKNILANMENLPSDNQNFDSEKLDLPQPHNSGNQELENHLIFWDELVNVLAKFATSKNQSLKNRTAKGKSPKNSENLTTTETICRKNILANMENLPSDNQNFDSEKLDLPQPHNSGNQELENHLIFWDELVNVLAKFATSKNQSLKNRTTKRNSPKNSENLTTTETICRKNILANMENLPSDNQNFDSEKLDLPQPHNSGNQELENHLIFWDELVNVLAKFATSKNQSLKNRTTKRNSPKNSENLTTTETICRKNILANMENLPSDNQNFDSEKLDLPQPHNSGNQELENHLIFWDELVNVLAKFATSKNQSLKNRTAKGKSPKNSENLTTTETICRKNILANMENLPSDNQNFDSEKLDLPQPHNSGNQELENHLIFWDELVNVLAKFATSKNQSLKNRTTKRNSPKNSENLTTTETICRKNILANMENLPSDNQNFDSEKLDLPQPHNSGNQELENHLIFWDELVNVLAKFATSKNQSLKNRTTKRNSPKNSENLTTTETICRKNILANMENLPSDNQNFDSEKLDLPQPHNSGTQELENSDIFWDKIVSIEPVGEKQVYDLTVPETHNFVANDICLHNTSFAVNIAHSIAANLKLPIAIFSLEMSKEQLVLRLLASEARIESNRLRAGRISQNEWEPLTSAITNLSEMPIFIDDTPNITVNEIRSKTRQLQSEQGGKLGLILLDYLQLMEGNNSDNRVLELARITRNLKGLARELSVPIIALSQLSRSVEARTNKRPMMSDLRESGCLTGESLICLADGKKIPISCLVGNSNFAVLALNENTWKFESAMVSRVFSTGVKPIFSLQTSSGKLIRATANHPFFSMGGWKQLNTLNIGDSLAILNQKMLKCSILYDGHFLSQSDFGPKYGRNLGSIVKSHEWEKSTEIDVEWDEIVEIMPHGEAEVFDLTVPGLHNFVANEIVVHNSIEQDADLVIMLYRDEYYSPDTPDQGIAEVIITKHRNGPTGTVKLLFDPQFTKFRNLAVDKR

SEQ ID NO: 624 - protein, 2684 aa, Trichodesmium erythraeum IMS101
  Ter DnaE-1 precursor
MSFVGLHIHSDYSLLDGASQLPQLIDRAVELGMPAIALTDHGVMYGAIQLIKLCRNKNIKPIIGNEMYVIKGDIEKQQRGKKFHQVVLAKNTQGYKNLVKLTTLSHLHGFQGKGIFARPCINKELLEKYHEGLIVTSGCLAGEVPQNIMRGELEEAKKIAKWYKDLFGEDYYLEIQDHGFQEDRVVNTGIVTIAKKLKIKIVATNDSHFISCRDVEAHDALLCINTQKLIAEEKRMRYSGTEYLKSAEEMKQLFRDHLENEVIEEAIANTLEVANKVKAYEGILGEPRIPDYPIPPDHNADTYLEKLAWSGLLERLKLKQKSEISPIYKERMETELKVLQDKGFSTYFLVVWDYIKYARDNNIPVGPGRGSAAGSLVAYSLRITNIDPVHHGLLFERFLNPERKSMPDIDTDFCIENRDVMIKYVTQRYGEERVAQIITFNRMTSKAVLKDVGRVLGISFGEANKMAKLIPVARGKPAKLKVMISDETPSPEFKKAYDNQETPIEDNKAGKISTISVRQWIDMAIRIEGTNKTFGVHAAGVVISKEPLDEIVPLQRNNDGSVITQYHMEDIESLGLLKMDFLGLKNLTIIQNTAELIKKNHHLPLVPDDLPANERKAIEILAKGNTKKMPEDVKKTYDLIKSGDLEGVFQLESSGMVDVVKKLKPTSIEDISSILALYRPGPLDAGLIPKFIDRKHGSEKIEYQHPKLEPILKETYGVLCLPKGTLIDQPDGSREAIENIKSGEVILTSDGRKVWEAKVAKQWRSGVREILKITLSSGTVIYSGKNHRFLTPEGDKFAWELQPQVGRVKNALIYGSAVYEKWQVSSNQKQLRKNDAYLLGLLVGKSNLISSTPNVSFSTQGAITWGKNLIDETWGGEAKHYFDTSRRQVYLNFNTQSKPTALTEFLDGIYGAQNWQVESVAKHLPEDILDYSEKDRIDLLRGLWDSGGFDGKKLLYYPGSSPQLLSQVCQLLGSLKIDYYLADNSVRISDRSRFIDILENYQMSSQQKEEISESYLPASSWFLKGGSENNIQKTDSSSRKTGEASQQKATLFTQNLFSAQTPAENWEKVGENHLLSSWFLTDASENNIQKTDSSSRKTGEASQQKATLFTQNLFSAQTPAENWEKVRENHLLSSWFLTNASEIYLQRIDSSSRKTGEASQQKATLFTQNLFSVQTPAENWEKVRENHLLSSWFLTDASENNIQKTDSSSRKTGEASQQKATLFTQNLFSAQTPAENWEKVRENHLLSSWFLTNASENNIQKTDSSSRKTGEASQQKATLFTQNLFSAQTPAENWKKSRKNHLPSSWFLKGGSENNIQKTDSSSRKTGEASQQKATLFTQNLFSAQTPAENWEKVRENHLLSSWFLKDASENNIQKTDSSSRKTGEASQQKATLFTQNLFSAQTPAENWEKVRENHLLSSWFLTDASENNIQKTDSSSRKTGEASQQKATLFTQNLFSAQTPAENWEKVRENHLLSSWFLTDASENNIQKTDSSSRKTGEASQQKATLFTQNLFSAQTPAENWEKVRENHLLSSWFLTNASENNIQKTDSSSRKTGEASQQKATLFTQNLFSAQTPAENWKKARENHLLSSWFLTNASEIYLQRTDSSSRKTGEASQQKATLFTQNLFSVQTPAENWKKARENHLLSSWFLTNASEIYLQRTDSSSRKTGGASQQKATLFNQNLFSVQTPAENWEKVRENYLLSSWFLTNASEIYLQRTDSSSRKTGEASQQKATLFTQNLFSVQTPAENWKKARENHLLSSWFLTNASEIYLQRTDSSSRKTGGASQQKATLFNQNLFSVQTPAENWKKARENHLLSSWFLTNASEIYLQRTDSSSRKTVEASQQKATLFTQNLFSAQTPAENWEKVRENYLLSSWFLTNASEIYLQRIDSSSRKTGEACQQKATLFNQNLFSAQTPAENWKKVRENHLLSSWFLTDASENNIQKTDSSSRKTVEASQQKATLFTQNLFSAQTPAENWKKSRKNHLPSSWFLTDASENNIQKTDSSSRKTGEASQQKATLFTQNLFSVQTPELENWECEKTYLQDVRVVHVVSVEEVGEAECFDLEMEDQSSPYFLAEGVVVHNCYQEQIMKMAQDLAGYSLGEADLLRRCLSGSTKVIDAATGNLFSLKEIAAQPEYWLSRKVFSLDLKSQQVVQQPITEIHPNGVRDVWQITTRTNRKVCATDDHLFYTVLGWKPLKDFSVGDRLGLPNKIPINYRSQISDSKVKFTAYLIGEGYLYTNSFSCSYFCNSDGELIADFYGCAEELFGSSAPIEKQLHLGNKSVIYVRIGLISGLKNWVDSYLQCANSRVQEIPNWIFSLSQSQLQLFLGILWSTSGIFDETIGYTYYSSNSEVLVRQVQHLFLRLGIVSLFNVNKVKGQGELDVSYVVEVRGREDMLKFYKLIKPYLSSYKQGLCESCYLVIKYQQSYQFKYFLTPDFFDLIVKAKKASSMTRALGVCGGEISSVWNFQNTSNRSLSFDKFNNFSTVLADEELTAIANSDVFWDEIISIEYIGKEEVFDLTIPETHNFIANDFIVHNCMGKKKVSEMEKHREKFIDGAAQRGVSSVVAKDLFEQMIKFAEYCLTYETEIMTVEYGPLPIGKIVEYRIECTVYTVDKNGYIYTQPIAQWHNRGMQEVYEYSLEDGTVIRATPEHKFMTEDGQMLPIDEIFERNLDLKCLGTLEL

SEQ ID NO: 625 - protein, 891 aa, Trichodesmium erythraeum IMS101
  Ter GyrB precursor
MASNNYGAEQIQVLEGLEAVRKRPGMYIGTTGPRGLHHLVYEVVDNSIDEALAGYCTHIEVDLNKDGSVKVTDDGRGIPVDTHSKTGKSALETVMTVLHAGGKFGGGGYKVSGGLHGVGVSVVNALSEWVEVTVWRDKKTHIQGYERGQPTGDLKSKPNKEKRTGTSVQFLPDQEIFTTGIQFDYNTIIGRLRELAYLNAGVKITITDNRLELVKSDEPKVESYCYEGGIKEYVTYMNREKQSLHEEVIFVRGEKNDVQVEVALQWCIDAFSDNVLGFANNIRTIDGGTHLEGLKTVLTRTMNGIARKRNKLKDSDPNLGGENVREGLTAVISVKVPEPEFEGQTKTKLGNTEVRGIVDSLVGEVLSEYLDFNPQVADAVLDKAIQAFKAAEAARRARDLVRRKSVLESSPLPGKLADCSTKNPEESEIYLVEGDSASGCFAGNQKVILADGRRLSFAEIVAEQAEGKEHFCYTINQSGNVAIERIINARITKKNASVIKIILDNNETIICTPDHLFMLRDGSYKPAALLTGNDSLMPLSQKSSQKTENSQELDGYEMVWSPQKESWIYTHLLPDFYNLKAGVYQSANGDSCYHVGFKKLNSTKTEGLLTEKHLEFHKTNLELAYRCSERDEFLARDIIPNYNDHYNYRVVSIEPLEERLDVYDIEVPNTHNFALASGVFVHNSAKQGRDRRFQAILPLRGKIINIEKTDDAKIYKNNEIQSMITALGLGIKGDEFDASQLRYHKVIIMTDADVDGSHIRTLLLTFFYRYQRALVDQGYIYIACPPLYKVERGRNHYYCYSDRELNELIQNEFPDNANYTIQRFKGLGEMMPVQLWDTTMNPETRTLKRVEIEDAAEADRIFTVLMGDRVAPRREFIETYGPKLKITDLDI

SEQ ID NO: 626 - protein, 1080 aa, Trichodesmium erythraeum IMS101
  Ter Ndse-1 precursor
MRILVTGGAGFLGSHLIDRLIEQGHEVLCLDNFYTGNKHNIYNWLNNPSFELIRHDITEPIRLEVDQIYHLACPASPIHYQYNPVKTIKTNVMGTLNMLGLAKRVKAKFFLASTSEVYGDPDVHPQTEEYRGNVNCIGIRSCFDSKTEILTEAGWVAFPNLQSEVKVATLNSEGKVEYHIPEEYIVQSYIGEMYRFANTNFDFCVTPNHWMYVRNKTGNLEFIRADEAKLWQSLEVLTGGDFEGEKEEWLELRKSPINSHRKVEKIFMDDWLEFLGYYISEGRVDVKKSLRVVGGNDAYVADYNILIGQENSELALKIASCLRRLGFNFSEILFDSDKHQFRVCSKQLAEMLLPLGKSGEKYIPRELLKLSKRQLLILFKALIMGDNSEQKNHYTYYSKSKRLADDIQELALRCGYAATVVSHAVGRDLYQVNIRPAEDANLVVPERFHYVGKVYCVNVTNHVVFVRRNGRAAWCGQCYDEGKRVAETLAFDYHRQNNVDIRVARIFNSLTGDQKVLYYIAKKLYYETFAECYDRINGDISSVSVPCFDENYQTVIKPISAIWKHHVKKKGFKIKITWGKQIKITEDHSLFTRNENNKPQAVFGNEIKVGDEIGIPSYISFLEQPLEPFHITDKILIQEEIYVESEDTISYIEKYGDKMREYLLAKSLSPSQFYSILKTYEAKNQIPWHLWKYLELPLSEKDKVCYLSKKAIKNWIDNVEELLWFLGFYVARGSLIKNEVVLKGEPSQLEKVIELIERIFEYKSEINDSGYISIKSKILVDLIGYGLNFGNQEKDIPNWILQLPEQQLIRFLKGFVAGNNLENQLNFYLEFKTDSQLVAEKLVLILSKFGLVADVSEIEVNEEDIAKIYRIIIEGLEDKNIHNLSKVEQKISALTTGDIAWGKIESIEEFEIDDYVYDFSVPNYENFIGGSYNVFAHNTYGPRMLENDGRVVSNFIVQALKGIPLTVYGDGSQTRSFCYVSDLIEGFIRLMNQDFIGPVNLGNPREYTILELAQKIQTMVNPGTEIIYKPLPQDDPKQRQPDITRGKKYLGWEPTVFLEEGLKLTIEDFRERLKNELPKN

SEQ ID NO: 627 - protein, 1080 aa, Trichodesmium erythraeum IMS101; identical to SEQ ID NO: 626
  Ter Ndse-2 precursor

SEQ ID NO: 628 - protein, 1531 aa, Trichodesmium erythraeum IMS101
  Ter Snf2 precursor
MAILHSFWVTEHEQPSFLFIWGEAWHRVTEEDAGEVEKITNNPYSITLDELLKLSEANIYLSLEKHKKSTNQTLGIPTKLSESNQKLYPIHSAISLSEIPENLYIYPWKIEGICLEPDEAIKFLQSIPLGQTTESFIGSDLKFWSHLARWSLDLLARCKFLPSIEQRSITQEFITTWQPLIDSSIDQTRLKNFAQQMPLVCRTYNLDWQLHPSLESLQIITKNNSYSNLPRLQSSQEIIQDFLKNTIDKQIRQLSAEISLTETTSLNSSIRQWLKSLSGKLSLKLPAPQETKKIQKILDNWKSPLQEYQAIENKFVACFCLHSPSNNSQQWKLEYCLQGLDNPDFLVDAKTIWENPVASLNYQGKTIKLPQETLLKGLGLASRIYPIIEPSLQEATPQYCLLTSQQAYDFIKSGSGRFIDSGLGVILPPSLANREGWASRLGLSIQATAPKMKKTEKLGLKSLLNFKWQLSIGGHKLTKAEFEKLVSQDSPLVEVNGEWVELQGQDVRAAKNFFASRKDQMSLSLEDALRLATGDTQTVEKLPVVNFEAGGQFQELLDTLTNNRSLEEVSTPENFRGELRNYQARGVSWLSFLERWGLGACLADDMGLGKCVLHDTEIYVNGMVMEAEQIWQAYAGEAEFDGEGFWTEPNKELLVNSLDETTGKIVFARIRRLYRQWVREKLRKVRLKDGSSITITCRHKLFIRDSWKNDFQVGDDVCVPAKLMWDGKPEDPDVVKFVAWQVAEGWERVNSGMFGVSQKGKDVLEGLLEVFSRLGKRYDIKINCPKVVAHGSKKNCYEFSAHSLEYRKFLEEKRYGWGKRSHEKTIPLFIMQADLDSVRVFLSNYFDAEGWVNKTVRCVEISTASSQLIQELSILLRRFGVWMKISPQQKCATNGTGVFCTYYIGTFGGNSARCFLQEIGFNDSGKQENLKSICEKIADSNVEGIPASDIVAELVEKTQLPVGSLGIQDPIYMDGCQDFSPTSLEKVINSIEDIISGAGEEEYGQLKSSKLRNKTLEAYSLLNILELEIYKTRLQKLLNQEVYYCQIESIEEMEYEGWVYDFEVSKYHNFVANNIICHNTIQTIAFLLKQQEQKALKGPTLLVCPTSVLGNWEREVKKFGPTLKAIVHHGDKRAKGKGFATAVKDTNLVITSYALLHRDEKILETIKWQSVIVDEAQNIKNPEAKQSQAARKLDASFRIALTGTPVENRLSELWSILDFLNPGYLGQKQFFQRRFAIPIEKYGDTSSLQILRSLVQPFILRRLKTDKDIIQDLPEKQENTIFCPLANEQALLYQNIVENSLAEIDTVGGIQRKGKILALLIKLKQLCNHPVLLQIKKGSRKKVEITDKNSGKLQRLGAMLEEIISEEERAIIFTQFAEWGKVLQPYLQKSLGREVSFLYGSTQRSKREEMIDQFQLDPQGPPVMILSLKAGGTGLNLTRANHVFHFDRWWNPAVENQATDRVFRIGQTRNVQVHKFVCTGTLEEKIHDLIESKKELAEQVVGAGEKWLTELDTDQLRNLLILDRNQVIKEE

SEQ ID NO: 629 - protein, 458 aa, Trichodesmium erythraeum IMS101
  Ter ThyX precursor
MQQARTHRIGCCLSGNTKVRFRYSSSSQEAKYYEETIEKLANLWHYGSKNQYTSKDAKCMQENISSRNIFTLDTQTNQIVSSKITNIYINGEKETYTIKTVSGKEIRATLEHQFWTNQGWKRLKDFNNSTQLCEVQLAGNKVTPQEVKFLEKEMFNEKWIPVRNYDGYKIYSLDILNSYLIQKENKEHSRSKSKNCLLPNLNYGIRYDRLSEVNINRLVMENLKLLGEYKELEVRHLNENSFNNKPKKFAWNSSKSDQIDNINNNSFSDNSGVFVEIESIEKFGKEITYDLEVEHPEHNFIANGLVVHNSFDVQSYRFCSGKVIAVADGKTDIETAFYLRPVGEYSDRKGKKYYYSAEQREKDLYWCLEAAKKYKLDMELGMSEEHARGKIPFDYRQHFVVSFNCRSLLHFLDLRFKKNAQLEIQKLCELMWPHFQDWVPNIAEWYEKNRLKKGKLAP

SEQ ID NO: 630 - protein, 1523 aa, Thermococcus fumicolans
  Tfu Pol-1 precursor
MILDTDYITEDGRPVIRVFKKENGEFKIEYDRDFEPYIYALLKDDSAIEDVKKITASRHGTTVRVVRAGKVKKKFLGRPIEVWKLYFTHPQDVPAIRDKIREHPAVVDIYEYDIPFAKRYLIDKGLIPMEGDEELKMLAFDIETLYHEGEEFAEGPILMISYADEEGARVITWKKIDLPYVDVVSTEKEMIKRFLKVVKEKDPDVLITYNGDNFDFAYLKKRSEKLGVKFILGRDGSEPKIQRMGDRFAVEVKGRIHFDLYPVIRHTINLPTYTLEAVYEAIFGQPKEKVYAEEIAQAWETGEGLERVARYSMEDAKVTYELGREFFPMEAQLSRLVGQSFWDVSRSSTGNLVEWYLLRKAYERNELAPNKPSGRELERRRGGYAGGYVKEPERGLWENIAYLDFRCHPADTKVIVKGKGVVNISEVREGDYVLGIDGWQKVQRVWEYDYEGELVNINGLKCTPNHKLPVVRRTERQTAIRDSLAKSFLTKKVKGKLITTPLFEKIGKIEREDVPEEEILKGELAGIILAEGTLLRKDVEYFDSSRGKKRVSHQYRVEITVGAQEEDFQRRIVYIFERLFGVTPSVYRKKNTNAITFKVAKKEVYLRVREIMDGIENLHAPSVLRGFFEGDGSVNKVRKTVVVNQGTNNEWKIEVVSKLLNKLGIPHRRYTYDYTEREKTMTTHILEIAGRDGLILFQTIVGFISTEKNMALEEAIRNREVNRLENNAFYTLADFTAKTEYYKGKVYDLTLEGTPYYFANGILTHNSLYPSIIISHNVSPDTLNREGCGEYDEAPQVGHRFCKDFPGFIPSLLGDLLDERQKVKKHMKATVDPIEKKLLDYRQRAIKILANSFYGYYGYAKARWYCKECAESVTAWGRQYIETTMREIEEKFGFKVLYADSVTGDTEVTIRRNGRIEFVPIEKLFERVDHRVGEKEYCVLGGVEALTLDNRGRLVWKKVPYVMRHKTDKRIYRVWFTNSWYLDVTEDHSLIGYLNTSKVKPGKPLKERLVEVKPEELGGKVKSLITPNRPIARTIKANPIAVKLWELIGLLVGDGNWGGQSNWAKYYVGLSCGLDKAEIERKVLNPLREASVISNYYDKSKKGDVSILSKWLAGFMVKYFKDENGNKAIPSFMFNLPREYIEAFLRGLFSADGTVSLRRGIPEIRLTSVNRELSDAVRKLLWLVGVSNSLFTETKPNRYLEKESGTHSIHVRIKNKHRFADRIGFLIDRKSTKLSENLGGHTNKKRAYKYDFDLVYPRKIEEITYDGYVYDIEVEGTHRFFANGILVHNTDGFFATIPGADAETVKKKAREFLNYINPKLPGLLELEYEGFYRRGFFVTKKKYAVIDEEGKITTRGLEIVRRDWSEVAKETQARVLEAILRHGDVEEAVRIVKEVTEKLSKYEVPPEKLVIHEQITRELKDYKATGPHVAIAKRLAARGIKVRPGTVISYIVLKGSGRIGDRTIPFDEFDPTKHRYDAEYYIENQVLPAVERILKAFGYKKEDLRYQKTRQVGLGAWLKMGKK

SEQ ID NO: 631 - protein, 1523 aa, Thermococcus fumicolans; identical to SEQ ID NO: 630
  Tfu Pol-2 precursor

SEQ ID NO: 632 - protein, 659 aa, Thermobifida fusca YX
  Tfus Hyp-2914 precursor
MPKPERFVSRSDLGWGPSNASYANPKLGLVIHYDGSNQNLAAKDHSACINYWKNTRSFHTGPARGWADIGYCVDEETEILTTDGWKTFRETAPGDLALTLNHSTGLAEWQPILDVYVFPAQPRTMIRMEGRTHSSLTTPQHRWPVERATRTTAASEETRRERTWATTETLTDGDRIPQAAPCRDLPTEPKWSDALVELVAWLWLGDHATRSRHSATLALSQRDGLGAARIRAALHSLFGPPAPQPSRGGRRPWWRERLTRSCVEFHLSPGASRMLLEHIPDGAVSFGFLRSLTRAQLNLFIDTSVRACRAHGTTTASRTALVHRDRRRAEAFQFAAILAGYPASLRHRTLPGPAPADVWLVHLDTAQDFAPKAATPGLTIAEEPYTGRVWCVRTPNATWLARRAGTVYFTGNSFGACPHGYVFEGRGLYKSQAAQPGGNATYYSVTLMCGPSDTITDAQINAVRQLREWLMEPAMSIAGTVKGHRDFISTSCPGDTLYRMVRDGVFSKPARWGTTDTEEDEVPHYLNIAQTKEVVVPPKQYVSLRWDTVWTDTAKTAHKDGLAVISKPCDLNGALWLDIEGLAEGEDVQVHMADWERATKKYSLHPIAEGIGTEGRSFPVFPVVNRLGSGRTMDLRVYNVGEQPFTIRRATFKGHVWLR

SEQ ID NO: 633 - protein, 1177 aa, Thermobifida fusca YX
  Tfus RecA-1 precursor
MSLARRSVTPIMKKKASTQQGFPVAASDRDKALETALAQIERQFGKGTIMRLGDDNRPPIESIPTGSISLDVALGIGGIPRGRIVEIYGPESSGKCLTADTYVWTDRGLETVAEVFGRAGLPLSSTSRVTDVRDRDIRVVNEKGELEQVAALTHNGRQPVVRITVASGRQVTVTRNHPLRVMNDDGFIVWREAGQLREGDVLVSAAFGAVQAASGGGLSEDEAVLLGYLTAAGSLDPAGHVCFTTTDIETGAEFAALAEWLLDTTVTAVPGDGQVAYVLSDPAARHTLAERYGVDYAAAARIPQCVRTAGDKMQRAFLAALYTAAGWTDTSAAVGLRTASAPLAREVQYLLYGLGIPADLDRSHGNGQHPWAVTISPAAAPRFHTEVGFRTAQQSPQTGLHEPTPQVEAIPNLTGLIHALRDSIGDRAESTDDPFPAASGGAYDRDQVRRVIDWAKRRTDEAPATANAILGYLTQLTDARYTYEPITAVEDAGQQPTFDLMVPRTHSFLANGILSHNTTVALHAVANAQRAGGIAAFIDAEHALDPSYAEKIGVNIDDLLLSQPDTGEQALEIVDMLVRSGAISIIVIDSVAALVPRAEIEGEMGDSHVGLQARLMSQALRKIAGALNQTKTTAIFINQLREKVGVMFGCMHYDTLVTLADGTQEKIGTIVDRKLDVEVLSYDPETDRIVPRRVVNWFDNGAADHFLQFTVGRSGKPGGAQFTATPNHLIRTPGGWREAGELIAGDRVLVHEPHYLNEQQRQVVYGSLMGRGTLVPDRHGGPGVHFCMAHTAEQAAYLDWKVSLLGNIAHSRTAEASATVGVEFTPMPELSELHRVVDFGDGHTHLTWEFLKQLTPLALAVWYLDAGTLTIPQSGTDDDARVQIDVETLSPGSRQRLVEYLRDTHELDAAVVQQGADARSLLEFTPAATVRFLELVAPYVPESMSSMLLAQFRGRCSVTPEYSDPVQRLVAAPVLDIQVKPGSTRKFDIEVEGNHNYFVDGVMVHNSPETTSGGRALKFYASVRMDVRRIETLKDGTEAVGNRTRVKVVKNKLAPPFKQAEFDILYGVGISREGGLLDLGVEHGIVRKSGAWYTYEGTQLGQGKENARNFLRANPDMADEIEKRIKQKLGIPTGDDSAPAEEAAKDEAKAASTTKRTTRKTTASTSASKSAAPSTDA

SEQ ID NO: 634 - protein, 1177 aa, Thermobifida fusca YX; identical to SEQ ID NO: 633
  Tfus RecA-2 precursor

SEQ ID NO: 635 - protein, 547 aa, Torulaspora globosa, strain CBS 764
  Tgl VMA precursor
ISQSLSKYSNSDVIIYVGCFAKGTPVMMHDGSVKAIETINVGEEVMGADGLGRKIVGLPRGREVMYKVSQKTEHRAYETDETRSAPVGLFEYTCNATHKLVVRTPRSCRTLNRTMKGVEYYEVVFFDLAKEKLKDGREIEVVKEISRSYPVTEGPERAAEIMKEYQEAGAGKQFFEWTIEARDVGALGAHVRKATHQVYAPVLYESDFFFHYVKDSKFCLKSEAPFALAYLLGLWVGDGLSDRAVFSVDSEDTTLFDRIIDFADILDLSAEYKDREIPKRAKTVGLFPKTIRGNDIGRNLNTDNPLWNAIVDLGYLKGGVKHVPSYLLTDSIPHREVFLAGLIDSDGYVRGEEAPAATIKTIHKTVMEGTVAVARSLGLTVSVNIEEAKVDKDGVNHRPAYAIYISGGDALLSVLANCASAKKHRAAPTKEVVRGLNEVYFEMKELQEDDYYGITLSENSDHQFMLANQLVVHNCGERGNEMAEVLMEFPELYTEKNGKKEPIMKRTTLVANTSNMPVAAREASIYTGITLAEYFRDQGRDVSMIAD

SEQ ID NO: 636 - protein, 1668 aa, Thermococcus hydrothermalis
  Thy Pol-1 precursor
FEPYIYALLKDDSAIEEVKKITAGRHGRVVKVKRAEKVKKKFLGRPIEVWKLYFTHPQDVPAIRDEIRRHSAVVDIYEYDIPFAKRYLIDKGLIPMEGDEELKMMSFDIETLYHEGEEFGTGPILMISYADEGEARVITWKKIDLPYVEVVSTEKEMIKRFLKVVKEKDPDVLITYNGDNFDFAYLKKRCEKIGIKFTLRRDGSEPKIQRMGDRFAVEVKGRIHFDLYPVIRRTINLPTYTLEAVYEAVFGTPKEKVYPEEITTAWETGEGLERVARYSMEDAKVTYELGREFFPMEAQLSRLIGQSLWDVSRSSTGNLVEWFLLRKAYERNEIAPNKPDERELARRRGGYAGGYVKEPERGLWDNIVYLDFMSLYPSIIITHNVSPDTFNREGCKEYDTAPQVGHKFCKDVQGFIPSLLGALLDERQKIKKRMKASIDPLEKKLLDYRQKAIKILANSLLPEEWIPLVENGKVRLHRIGEFVDKLMETDSELVKRNGDTEVLEVRGIRALSFDRKSKKARVMPVKAVIRHRYSGDVYEIVLGSGRRITVTEGHSLFAYGDGELREVTGGEIKAGDLLAVPRRVNLPEKKERLNLVELLRRLPEEETGDIILTIPVKGRKNFFKGMLRTLRWISGEEKRPRTARRYLEHLEGLGYVRLKKIGYEVTDREGLERYRKLYERLVEAVRYNGNKREYLVEFNAVRDVIALMPEEELRDWLVGTRNGFRMRPFVEIEEDFAKLLGYYVSEGNARKWRNQKNGWSYTVKLYNENQRVLDDMESLAERFFGRVKRGKNYIEIPRKMAYIIFENLCGTLAENKRVPEAIFTSPESVRWAFIEGYFIGDGDVHPSKRVRLSTKSELLVNGLVLLLNSLGVSAIKIRHDSGVYRVYVNEELPFTDYRKKKNAYYSHVIPKEILEETFGKVFQRSVSYEKFRELVKSEKLDGEKAKRIEWLLNGDVVLDKVLEVKKRPYEGYVYDLSVEEDENFLAGFGLLYAHNSYYGYYGYARARWYCKECAESVTAWGRDYIETTIHEIEERFGFKVLYADSVTGETEIIIKRNGKVEFVAIEELFQRVDYRIGEKEYCVLEGVEALTLDNRGRLVWKSVPYVMRHRTNKRIYRVWFTNSWYLDVTEDHSLIGYMNTSKVKPGKPLKERLVEVKPGELGESVKSLITPNRAIAHGIRVNPIAVKLWELIGLLVGDGNWGGQSNWAKYNVGLSLGLDKEEIEEKILKPLKNTGIISNYYDKSKKGDVSILSKWLARFMVRYFKDESGSKRIPEFMFNLPREYIEAFLRGLFSADGTVSLRKGVPEVRLTSVNPELSSSVRKLLWLVGVSNSMFVETNPNRYLGKESGTHSVHVRIKDKHRFAERIGFLLDRKATKLSENLGGHTSKKRAYKYDFDLVYPKKVEEIAYDGYVYDIEVEGTHRFFANGILVHNTDGFFATIPGADAETVKKKAKEFLKYINAKLPGLLELEYEGFYVRGFFVTKKKYAVIDEEGKITTRGLEIVRRDWSEIAKETQARVLEAILRHGDVEEAVRIVKDVTEKLSKYEVPPEKLVIHEQITRELKDYKATGPHVAIAKRLAARGIKIRPGTVISYIVLKGSGRIGDRAIPFDEFDPTKHRYDAEYYIENQVLPAVERILKAFGYKKEELRYQKTRQVGLGAWLKLKGKK

SEQ ID NO: 637 - protein, 1668 aa, Thermococcus hydrothermalis; identical to SEQ ID NO: 636
  Thy Pol-2 precursor

SEQ ID NO: 638 - protein, 1157 aa, Thermococcus kodakaraensis KOD1
  Tko CDC21-1 precursor
MDREEMIARFAKFLREYVDDEGNEVYINRLKDLLTVTPKRSLAIDWAHLNSFDPELADELLNNPEEAIASAEDAIQIVLREPPLLVEREFKVHARFYNLPKTLLVKELGSEHINKLIQVEGIITRVSEVKPFVEKAVFVCRDCGNEMVRLQRPYENLVKPAKCDACGSRNIELDVDKSRFLNFQSFRLQDRPESLKGGQMPRFVDAILLDDLVDAALPGDRVLVTGVLRVILEQREKRPIFKKILEVNHIEQLSKEIEELEISPEDEQKIRELAKRKDIVDAIVDSIAPAIWGHRIVKKGIALALFGGVQRTLPDGTKLRGESHVLLVGDPGVAKSQLLRYVANLAPRAIYTSGKSSSAAGLCVAPDSIIKTNLGQFKIGELVEKAIPEKVQDYKSVNAEKLGLYIKTLDGDMRVLRLWKLRAPEKLIRIEGDGLSITVTPETKLLTPNGWVEARNVDGEVVTENGPVKVSKQEIESPHDYVYDLTVEGSHSFIANGFVVHNTAAAVRDEFTGSWVLEAGVLVLADGGFALIDEFDKMSDRDRSAIHEALEQQSYHHDFELLLADGRKVKIGELVDKLIEKNRDRVILGKDTEILPVEDIELLAYDLEKREIVKVKADRVSRHKAPERFIKLRFSNGREITVTPEHPVMVWENGEITEKPAEKITPGDIALGVLRYPIQVDGKFKERYRDMREAEDYQDYLYSRGVVSKIKRTGIYFTVEKARRALPRELVKPLINAGKILRVTQTPKERASFNQKLVRENIIEGYLQRIIERMDELERLSREDPAKALELLPKTQLYYKYGITYGKLKKLAEARNSWAEGIIQSAVAERISLAKRELEEFFKWWNANVNFLKVKCVEEIKNDRWEWVYDVTVEPHHLFVSHGLVLHNTISISKAGITATLNSRTTVIAAANPKFGRFNRHKSLPEQLDLPPTLLSRFDLIFLLLDEPDEKVDASIAEHILKVRRGEAEAVTPKIPYDLLKKYIAYARKNVHPVLSREAMEEIKRYYVKMRKGLRRGDEDGVQPIPITARQLEALIRLSEAHARMRLSETVTREDARAAIEIIEAMMKTIAVDEEGNLDVSILEVGKSSKKINKIEKLVDIIKSLESEGEFGAPEEKVIEAAKQAGIGTKADIEKLLNELKSDGRVYEPRAGFYRVI

SEQ ID NO: 639 - protein, 1157 aa, Thermococcus kodakaraensis KOD1; identical to SEQ ID NO: 638
  Tko CDC21-2 precursor

SEQ ID NO: 640 - protein, 1144 aa, Thermococcus kodakaraensis KOD1
  Tko IF2 precursor
MTKRIRQPIIAVLGHVDHGKCLLPDEKVILPEHGPITLKGLFDLAKETVVADNEKEIRKLGAKLTIVGEDGRLRVLESPYVWKVRHRGKMLRVKLKNWHSVSVTPEHPFLTTRGWVRADQLKPGDYVAVPRVIHGNESDERFVSFVYEKLKNDELIAKLRGEVLSKISSEFKGDRAYKVERNVFRWEDIERLNLWDEVERVAFTPRMHRSGKPLHYVKLPRSPEEWEAFFYFAGVMFGDGSQDKIANNDVEVYEELKKLSVLGVAVKRVERTTSYEIELTNGKNALLRLLRVLFEYPERQKAKSIRVPRILFIAPRKYVSRFLRGYFDADGHVSLKDARIEVTSASQEFLEDLSLLLLRFGIVSKIYRSDYTTLVISGRRNLDLFRRYIGFSVKNKAEALEKAIKKSRRSESYPIFEELKRLRLLFGFTRTELNSNVPFYGKYESEEAPSYETLMRILDAIEKGSINLDKKIAVLEGRIRDHNYIKAFEKDGLIKDGKLTELGRELLEVWRNREFDSSDVDYIRNLAENLVFIPVEDIEEFEYEGYVYDVTTETHNFVANGILVHNTTLLDRIRHTNVAGKEAGGITQHIGATEVPIDVVKQLAGPLIKLWKGEIKLPGLLFIDTPGHEAFTSLRARGGSLADLAVLVVDINEGFQPQTIESIEILRRYRTPFIVAANKIDRIKGWVIEEDEPFLVNIKKQDQRAIQELETKLWELIGKFYEMGFNANRFDRVQDFTRELAIVPISAKYGIGIPELLVLIAGLSQKYLEEKLKIEVEGPARGTILEVREEVGLGTTIDVIIYDGTLRKDDTIVVGGKDKAIVTKIRALLKPKPLDEIRDPRFRFDQVDEVTAAAGVKIAAPGLEEALAGSPVIAARSEEEIEKAKQEILSQIQSVVINTGKIGVIVKADTLGSLEALSKELQEKGIPIRKADVGNISKTDVMEALSVKEEEPKYGVVLGFNVKVNEDAEEVANAKGVPIFVGNIIYKLIEDYEAWVKEEEEKRKRELLKNVTFPGVIRLYPDERYVFRRSKPAIVGVEVLEGRIRPGVTLIKETGEKVGVIKSIKNKNDFVQEAKKGDAVAIAIEGAIVGRHIHPGETLYVDLSKNDVIILAKQLKDELEETDIKALKMTAKVKAKEDPFWRAV

SEQ ID NO: 641 - protein, 1198 aa, Thermococcus kodakaraensis KOD1
  Tko KlbA precursor
MFQDEKKKKESLSWIDEILSGEEDPLAGILKKDDKKEQPSKNKVSEELPVPSSGVGSLEDILSGSTSEKRESRPTSETGADLLSQLLGGEEKPQKSMKEKTAEREKREPLPQSKPEPASTIPSATGATGADFLSELLGGSSGSATSQPVQTSPSKPVSNARSIFSESLREESSYAGRAQVLDAYGNVRILKVKGEPVPIYEIRLPKLSREEEQLFRRIKDRAITEIQIDPTAIPDPEERRKVFMNAVKRMIKEEAPHYSEGRIEVLADMIVQQMIGYGKLDPLVRDDNLEEIMVIGTNRPVYVWHRRFNMCKTNVIFDSDRDILNIIERIAREVGRRIDQQSPLLDARLPDGSRVNATIPPISLDGPTITIRKFKRDPLTIIDLIKYGTMSSEVAAFLWVLVDGLGVKPANVLVAGGTGSGKTTTLNSLGMFIPPSERVISIEDTAELQLPVEHWVRLETRPPNLEGKGEVTMDDLVRNTLRMRPDRIIVGEVRGPEARTMFTAMNTGHNGALYDFSVIQLSNGKFVLIGDVVEELFNKYSDRIKTYKDLEYIELDPEDQFEVVSVGPNLKAGKHTVTAVWRRKVRNGEKLIRIRTRTGNEVILTKTHPFFVFSDGDVVRKEAEKVRPGDRVAVMMRPPKAPQSPAVVPVEVYAGISDYYLVPNGNGMKKVPNRGVPPEDAEYLLSRNSKPVKLVREVGTSLAYVAGVILGDGYLSSDGYNLSVTFDDPDYMNSFTSAMSEFLPESAPRIKDNGTSTVVTYGSRIFNEMLSRIFGIPRGKKSSIWDVPDVVLTNDDLMRYFIAGLFDADGSVDETGPAVILTTKSESAARKIWYALQRLGIISTVSRVRNRGFKEGHIFRVIISSVEDLKKFDALIPLSHSRKREKLKAILKEKRPYRGRYTYRVPISPEMIKPLRTRLNLTVAELSKLASKYAGETITESLIRHVEKGRTSEIRRSALKGIALALQRIAQDIGDEDAWVMAKRLELIADGDVYWDRVVEVEEVDPEEIGIEYLYDLTVDEDHNYVANGILLSNCMGTIHANSARETIVRLESPPMSVPRIMIPALDIILMQVRFHSRKKGTIRRVTEIAEVSGLEGESIQLNTLYKYDPAKDELVPTGVPSRTVNILAQHTGMSVREIELEIEKRRLILEWMVEKGIRDIDKVGYYIRQFYIDEEWLLNKISAESDVETSKQIQALM

SEQ ID NO: 642 - protein, 1390 aa, Thermococcus kodakaraensis KOD1
  Tko LHR precursor
MSGIRWAEREYTDEEIYSILSEPVREWFKRKFGTFTPPQRYAVLEIHKGENVLISSPTGSGKTLSAFLSAINELILLGKESKLEDKIYVLYVSPLRALNNDIKRNLEGPLAEIKEVAKELGYELPEIRVGIRTSDTSSYEKSKMVKKPPHILITTPESLAIALNAPKFSERLKTVKYVIIDEVHALAENKRGSHLALSIERLQEMAENEFVRIGLSATIHPLEEVAKFVFGFNDDGTPRPGLIVDVSFAKQTEIKVESVVEDLIYTDAGTLSDALYNRLAELIREHRTTLIFTNTRSGAERVAFNLKKRFPEFEGLIEAHHSSLSREVRLDVEEKLKRGELKAVVCVSGDSKILTGKGPVEIGRLNSNMIAGIWRFQTELVRFEEPHRVEYRREGVKIRTRLGFEIKATKEHKFLTVDENGELRWVEAWKLKEGNWVGVVRRLPSPNVKVSILDLLPPNAYLKLKGEFLRELKLSIQAKFGSIRTYAKKKRWSESYLVKQLNGVYPFRWERLSAVLKDLDLRMTENDVERITSDKGKYSLPIEFTPSMARLLGFWMADGSWKGGTLTLFSSDRKMLEKYKELCKEEFGVVGRIRMLNESTYSLEISFNLLPAIFKNLTGNTERKSKLGTFPSIIYSLPEEHKREFLAGYFDGDGFLEVKGGRVYSAGFSTFNKRFAEGIRDILLQLGIVSSIRAREYDEVQKFKGRVIPKKGASYTVSVLGGEYLKRFFDAVRPWRSDYEGWEGMYNEGYSNSDVVPNLGKRLRSIRERLGISAYRMSKMGFYNPVRVELGEREISRRNLRLLVEFYERVAKEKRVEDVLEELSYLRELAEGDVFFDRITSVEPAYIDVAYGIINSETENYIVEGFISKNSSTSLELGIDIGTIDLVVLIGSPKSVNRALQRIGRAGHRLHDVSKGVILALDRDDLVEVTVLAHNARNRRLDRVRIPKNPLDVLVQHIVGMALYKVWEVEEAYRLVRRAYPFHELPFEDFMSVLKYLSGGYEGLEDRKVYAKIWLEDGKFGRRGKMTRAIYYMNVGTIPDEAKIRVYTMDKQMIGTVEEEFAERLMPGDIFVLAGRTYEFIKSRGNKIYVVPREGAKPTIPAWFSEMLPLSFDLALDVQRFRREVKELLNKKRAKSLLMRKYGIDERAAKAIIAYFREQERYSTVPDDETVLVEEVEKENTYEYFFHTLIGRRANDALSRAFAYAVGRRKGVNVGIALNDNGFLLRVPKEARLSEAEIRELFQLEDLREILKRALDNTELLKRRFRHVANRGFLILRRYVGGSKRLGRQQVIAVSLLKVLKEHYPDFPLLKEVYREIMEDKMDVENAELFLSWVREGKIKVVFERNELPSPFAFNLEAIGSSDVVLMEDRREMIKALYRKIMALIGENAT

SEQ ID NO: 643 - protein, 1670 aa, Pyrococcus/ Thermococcus kodakaraensis KOD1
  Tko Pol-1 (Pko Pol-1) precursor
MILDTDYITEDGKPVIRIFKKENGEFKIEYDRTFEPYFYALLKDDSAIEEVKKITAERHGTVVTVKRVEKVQKKFLGRPVEVWKLYFTHPQDVPAIRDKIREHGAVIDIYEYDIPFAKRYLIDKGLVPMEGDEELKMLAFDIQTLYHEGEEFAEGPILMISYADEEGARVITWKNVDLPYVDVVSTEREMIKRFLRVVKEKDPDVLITYNGDNFDFAYLKKRCEKLGINFALGRDGSEPKIQRMGDRFAVEVKGRIHFDLYPVIRRTINLPTYTLEAVYEAVFGQPKEKVYAEEITPAWETGENLERVARYSMEDAKVTYELGKEFLPMEAQLSRLIGQSLWDVSRSSTGNLVEWFLLRKAYERNELAPNKPDEKELARRRQSYEGGYVKEPERGLWENIVYLDFRCHPADTKVVVKGKGIINISEVQEGDYVLGIDGWQRVRKVWEYDYKGELVNINGLKCTPNHKLPVVTKNERQTRIRDSLAKSFLTKKVKGKIITTPLFYEIGRATSENIPEEEVLKGELAGILLAEGTLLRKDVEYFDSSRKKRRISHQYRVEITIGKDEEEFRDRITYIFERLFGITPSISEKKGTNAVTLKVAKKNVYLKVKEIMDNIESLHAPSVLRGFFEGDGSVNRVRRSIVATQGTKNEWKIKLVSKLLSQLGIPHQTYTYQYQENGKDRSRYILEITGKDGLILFQTLIGFISERKNALLNKAISQREMNNLENNGFYRLSEFNVSTEYYEGKVYDLTLEGTPYYFANGILTHNSLYPSIIITHNVSPDTLNREGCKEYDVAPQVGHRFCKDFPGFIPSLLGDLLEERQKIKKKMKATIDPIERKLLDYRQRAIKILANSILPEEWLPVLEEGEVHFVRIGELIDRMMEENAGKVKREGETEVLEVSGLEVPSFNRRTNKAELKRVKALIRHDYSGKVYTIRLKSGRRIKITSGHSLFSVRNGELVEVTGDELKPGDLVAVPRRLELPERNHVLNLVELLLGTPEEETLDIVMTIPVKGKKNFFKGMLRTLRWIFGEEKRPRTARRYLRHLEDLGYVRLKKIGYEVLDWDSLKNYRRLYEALVENVRYNGNKREYLVEFNSIRDAVGIMPLKELKEWKIGTLNGFRMRKLIEVDESLAKLLGYYVSEGYARKQRNPKNGWSYSVKLYNEDPEVLDDMERLASRFFGKVRRGRNYVEIPKKIGYLLFENMCGVLAENKRIPEFVFTSPKGVRLAFLEGYSSAMATSTEQETQALNEKRALANQLVLLLNSVGVSAVKLGHDSGVYRVYINEELPFVKLDKKKNAYYSHVIPKEVLSEVFGKVFQKNVSPQTFRKMVEDGRLDPEKAQRLSWLIEGDVVLDRVESVDVEDYDGYVYDLSVEDNENFLVGFGLVYAHNSYYGYYGYARARWYCKECAESVTAWGREYITMTIKEIEEKYGFKVIYSDTDGFFATIPGADAETVKKKAMEFLNYINAKLPGALELEYEGFYKRGFFVTKKKYAVIDEEGKITTRGLEIVRRDWSEIAKETQARVLEALLKDGDVEKAVRIVKEVTEKLSKYEVPPEKLVIHEQITRDLKDYKATGPHVAVAKRLAARGVKIRPGTVISYIVLKGSGRIGDRAIPFDEFDPTKHKYDAEYYIENQVLPAVERILRAFGYRKEDLRYQKTRQVGLSAWLKPKGT

SEQ ID NO: 644 - protein, 1670 aa, Pyrococcus/Thermococcus kodakaraensis KOD1; identical to SEQ ID NO: 643
  Tko Pol-2 (Pko Pol-2) precursor

SEQ ID NO: 645 - protein, 1798 aa, Thermococcus kodakaraensis KOD1
  Tko Pol-II precursor
MSEEIYSPEMKAYFESLQREIDRAYAIARKARAQGKDPSFDVEVPQATDMAGRVESLVGPPGVAERIRELVKEYGKEIAALKVVDEIIEGKFGDLGSKEKYAEQAVRTALAILTEGIVSAPLEGIADVKIKRNEWADGSEYLALYYAGPIRSSGGTAQALSVLVGDYVRRKLGLDRFKPSDEHIERMVEEVDLYHRAVTRLQYHPEADEVRLAMRNIPIEITGEETDKVEVSHRNVPGVETNHLRGGAILVLAEGVLQKAKKLVKYIDKMGIEGWDWIKEFVEAKEKGKSSEENKDESKAEDTGTESVAEKKENVEKGFYYELYEKFRANIAPNKKYTKEIIGGRPLFAEPSTNGGFRLRYGRSRVSGFATWSVNPATMLILDEFIAIGTQMKTERPGKGCIVTPATTVEGPIVRLKNGSVVRVDDYETALKVRNEVDEILYVGDALVNFGDFVENNQTLLPANYVEEWWVQELVQAIKDLYEVELQPFAENDREAVEEAAEYLEVDPDFLWNLLKDPLRVKPDVETAIHLSTVLDIPFHPYYTLYWNTLQPEEVEELQKALLGAQIEWAEFRKNRFAKKVVLENDKNIKRYLELLGLPHRLERVEKKRKVIVVEYPWSAALLTPLGNLEWEFKAKPFYTVIDIINENNRIKLRDRGISWIGARMGRPEKAKERKMKPPVQVLFPIGLAGGQSRDIKKAAEEGKTARVEIAFFKCPKCGHVGPEHLCPVCGTRKELLWHCPKCGADYPESDAKDFNYRCPKCDVELKPYAEREIKPADLLRQAMDNVKVYGIDRLKGVKGMTSGYKMAEPLEKGLLRVKNDVYVFKDGTIRFDATDAPITHFKPKEIGTSVEKLRELGYTHDFEGKPLERDDQILELKVQDVILPYEAGRYLLKVARFIDDLLEKFYGLPRFYNAEKMEDLVGHLVIGLAPHTSAGIIGRIIGFSDVLVGYAHPYYHAAKRRNCFPGDTRILVQINGLPQRITLRELYDLFEDERYENMAYVRKKPKADVKVYSFDPESGKVVLTDIEDVIKAPSTDHLIRFELELGRSFETTVDHPVLVYENGKFVEKRAFEVREGDRILVPNLKLPEKNIDYLDLLKEFSREEFAHLHDRIMVRGIAEWLRSVEADVKEDYLRRDSIPLSVLLRVLTEKEISIEEVPSCWLGFKRDKVRIKRFVPLKPLLRVVGYYLAEGYARESKSVYQLSFSMAEKEVREDLKRALREAFGDGFGIYERGGKVTVGSRILYLLFTEVLKAGKNAYSKRVPSLVFTLPREAVAEMLKAYFEGDGSALKSVPRVVAYSVNKALLEDIETLLLAKFGIRGYYTFDNNANRGNARGRLYHVERGTEAPVSKVYALNIAGEHYHRFFNSIGFVSERKNSIYELHAEKSPAQDRYSSQNGWLVKVRRIEYITPKDDFVFSLNAKKYHNVIINESIVTHQCDGDEDAVMLLLDALLNFSKYYLPEKRGGKMDAPLVVTTRLDPREVDSEVHNMDVVRYYPLEFYKATYELKSPKEVKVIERVEDRLGKPEMYEGIKFTHDTDDIGLGPKMSLYKQLGDMEEKVARQLALAERIRAVDEHHVAETIINSHLVPDLRGNLRSFTRQEFRCVKCNTKYRRPPLTGKCPKCGGKIVLTVSKGAIEKYLPTAKMLVTKYRVKDYTRQRICITEKDIKTLFENVFPEKQRTLMGFSADICEKMVKERTGHSNGKNGYLDEFNGKNGKASKKSGSLASKLSGKGKEPSKKKESAKPKRSEKVKNLTSFEAAAKNEQARGTAGNAKKAESEKPKRKKRKGISLDEFFGS

SEQ ID NO: 646 - protein, 1711 aa, Thermococcus kodakaraensis KOD1
  Tko r-Gyr precursor
MKAVYREMCPNCWGRISDERLVMRNPCEECLDEPVHADSYFQLVSAVRNALKLRGTLKEWEKIYQLENQTREIEEFFKKATGFTFWSAQRTWVKRLLKGRSFSIIAPTGMGKSTFGAFMAVWHALKGKKSYIVVPTTPLVIQTVRKIEGIMENANADVRLAYYHGNLRKKEKEEMLERIKNEDYDILVTSAQWLARNYEEVLKGRHFDFIFVDDVDAFLKASKNIDRSLYLLGFTDEIIQKAWEIIRLKKQMSRYLNGNSEDRNEKLNGLNREIEKLQREIEKFKRKNKIGIMIIASATGSARGDRIKLYRELLGFEVGSGRSALRNVVDSYLKPTKDIKEHVEELLTRLGKGGLIFVPVDQGLGYAEELANYLSEKGFKIELVSSKNKKALEKFENGEADYLIGSATYYGSLVRGIDLPHLIRYAVFTGVPKFRFSIDLERPTIYRALGLLSEIMDFLSEEDRRQAEKLHARLRRLIRNIPQFELLKIEEALAEGLPIENEFHNHVLGVFRELVEFLRRVLRDEEVLRKLAEDPFISLVKEEGKWYIEIPDVRTYIQATGRTSRLFAGGITKGLSVLIVDNEKVFNGLVRQMRWRFQEFKMVPFEELDLDEILRQIDEDREKVRLVMEGKISAKVKDLVRSALMIVESPNKARTIANFFGQPSKTRIGDLVAYEISVGDRMLTILASGGHMFDLVTNEGYHGVLIQNEGDMLKFIPVYDTLKRCRDCGHQFVDWEKKGVCPRCGSTNVRDALENVIAMREIAQEVDEILIATDPDTEGEKIAWDIRNVLAPYTPNIKRIEFHEVTRPAIMKAIQEARDVNENRVNAQIVRRIEDRWIGFELSQELQRVFESYNLSAGRVQTPVLGWIIERYKEFTESEVYFLGLTLENGLQVTIELGKDGKDVEPPEYVTVEEVQLEERELNPAPPYTTDAMLKDASTFLKLSAPETMRLAQDLFEAGLCVTPDTLVSLADGRIMEIKDAVEKSEGNLLSVNGLKPKEAKALKFWEIDWNGPLKVIKLKNGHEIKATPDHGLLVMREGKLGWVSAKNVREGDYVAFAYNTGHRGRDEYTLLKLMIKLGITDVMVELDEEYFNEKVAPIVRERISTSTKYKYLRRRVLPLYLLQEWGLDDYEAHVKSLYRQRAGSKPIPNFKLDGRFWYVFGLVLGDGTLRDSKVLISQTPLKDVKSVLEDVFPFLRVFETTNQVGFSNSIIAEVFRRLGARKGKLHPLVFGLREEYINAMIAGYFDTDGTFSILNDRKGPNFRGILTSKRGDVLRMLSVYLYQIGIMNYLRRDERTGVWDLIISNRSLEKFREKIYPYLRIRRAQFDEAYSVYRASRRAFEGDLLPVAPVFGKLKFKNGTKNRILKETGIDVWNWLKRPEGEIPRDKLSKVLEYAEESPEKEFLKSLVEAGVTWVKVKGVEEELYTGKLYDFTTTTENFLSNGAVSHNCTYHRTDSTHVSNTGIEVAKEYITQELGEKYFKPRPWGEEGAHEAIRPTRPIDTGRLMQLIRDGIIQLPRNLTRNHYRLYDMIFRRFMTSQMTPAKILYEKAVINAGVGKAELEGYVEIIEDGWTRLRSPPLRELPKLEKGMKLKVVEAKKWKAPKVSLYTQGDIIALMKERKIGRPSTYAKIVETLMRRGYVVETKGRKKLLPTEKGIKVYHYLVSKYRDLVSEERTRELEEIMDRIEEGIEDYIKVLGELYSEIQRYVSG

SEQ ID NO: 647 - protein, 836 aa, Thermococcus kodakaraensis KOD1
  Tko RadA precursor
MARKKKVEDEVKELEEFEELDVEESLSSSDKQSKPEKKISALEDLPGVGPATAEKLREAGYDTIEAIAVASPLELKEIAGISEGAALKIIQAAREAANIGTFMRADEYMKRRTTIGKISTGSKALDKLLGGGIETQAITEVFGEFGSGKCFAKDTKVYYENDTLVHFESIEDMYHKYASLGREVPFDNGYAVPLETVSVYTFDPKTGEVKRTKASYIYREKVEKLAEIRLSNGYLLRITLLHPVLVFRNGLQWVPAGMIKPGDLIVGIRSVPANAATIEESEAYFLGLFVAEGTSNPLSITTGSEELKDFIVSFIEDHDGYTPTVEVRRGLYRILFRKKTAEWLGELATSNASTKVVPERVLNAGESAIAAFLAGYLDGDGYLTESIVELVTKSRELADGLVFLLKRLGITPRISQKTIEGSVYYRIYITGEDRKTFEKVLEKSRIKPGEMNEGGVGRYPPALGKFLGKLYSEFRLPKRDNETAYHILTRSRNVWFTEKTLSRIEEYFREALEKLSEARKALEMGDKPELPFPWTAITKYGFTDRQVANYRTRGLPKRPELKEKVVSALLKEIERLEGVAKLALETIELARRLEFHEVSSVEVVDYNDWVYDLVIPETHNFIAPNGLVLHNTQLAHTLAVMVQKPPEEGGLGGSVIWIDTENTFRPERIKQIAENRGLDPEETLKNIYVARAFNSNHQMLLVEKAEEIIKEKAESDRPVKLLVVDSLMAHFRAEYVGRGTLAERQQKLAKHLADLHRLADLYDIAVFVTNQVQAKPDAFFGDPTRPVGGHILAHSATLRVYLRKGKAGKRVARLIDSPHLPEGEAVFRITEKGVED

SEQ ID NO: 648 - protein, 1746 aa, Thermococcus kodakaraensis KOD1
  Tko RIR1-1 precursor
MPVEKVMKRDGRIVPFDKERIRWAIQRAMLEVGVRDEKLLNRVVRRVVRRVNELYDGQIPNIENIQDIVELELMRAGLFDVAKAYILYRKKKAEIREEKKKILNKDKLDEIDKRFSLNALRVLASRYLIKNEKGEIIESPRELFERVAILAVIPDILYDERVFDKNGGHEQDVSAIERYRENLDEYDGKFSIGRFRLNKWHFERLLNLYRELAEKGQMKLPIDEVLKMLENGAFDNYEDEIEEYFRLMTGQYFMPNTPALINSGRPLGMLSACFVVPIEDDMESIMKAAHDVAMIQKAGGGCIDGNAKIIFENDGEEHIMTMAEMYERYKDLGEFYDPEYNRWGINVEEVPVYVKSFDPSTKEITKGKVKVIWKYELGEDVPKYEIKTNKGTRVLTSPWHPFFVITQDLKIVEKRADELREGDMLVGGMPSDDDYEFLLDYWLAGFIAGDGSIDKYRSHVKGHEYVYDRLRIYDYTTETLGIINDHLEKTFGKRYSLQRDRNIHYIDIKAKGITSHYIELLRGITNGIPQPILKEGRNAVLSFITGLFDAEGHVNSKPGVELGMVNRKLIEDITYYLNSLGIKARMRKKPRKDGVDYVMHVEEYSSLLRFYELIGKNLQNSEKRIKLEELLSKHNGGSFGLTLSFEDFKAWSSKYGVEFKTNGSQTLAIIKNEKVSLGQWHRRGRVSKAVLVKMLRKLYDTTKSEDVKRMLHLIEGLEVVKEINVTNEPKTFYDLTVERYQNYLAGENGMVFVHNTGLNFSKLRPEGDLVGTTTGAASGPVSFMHLIDAVSDVIKQGGVRRGANMGILEVWHPDIEKFIHAKEKNTGTNVLSNFNISVGLWEDFWEALKEGKRYPLINPRTGEKVKEIDPKSLFEELAYMAWAKADPGVVFFDVINRRNVLEPAKGEKIRATNPCVVGDTRVLTPEGYIKAEELFSLAKERGKKEAVAVEGIAEEGEPYAYSVEVLLPGEEEVKYETVHGKALAIADPVAVPAYVWKVGKKKVARVRTKQGYEITATLDHRLMTSEGWKEVGELKPGDEILLPRFEIEEDFGSESIGEDLAFVLGWFIGDGYLNVNDKRAWFYFNAEKEEDIAWKIREILAKHFGIKAEPHRYGNQIKLGVRGEAYRWLESIMGSNEKRVPEIIYRLKPREIAAFLRGLFSADGYVDNDNAVRLTSKDRGLLRDVQDLLLLFGILSKIYERPYSSEFKYTTKDGEERTYRAEGYYELVIANYSRKLFAEKIGFEGYKMEKLSLQKTKIDEPVVTVESVEVLGEEIVYDFTVPEHHSYISNGFMSHNCGEEPLYEYESCNLASINLAKFVKYDDEGKPYFDWDEYAYVIQKVAKYLDNAIDVNKFPLPEIDRNTKLTRRIGVGMMGLADALFKLGIPYNSKEGFDFMRKATEYLTFYAYKRSVEAAKERGPFPLYEKTRYKDGELPVEGFYHREIWNLPWDELVEEIKKYGVRNGMVTTCPPTGSVSMIADTSSGIEPIFALVYKKSVTVGEFYYVDPVFEAELKKRGLWSDEILKKISDNYGSVQGLEEIPEDMQRVFVTAMDIHWLDHILAQANIQLWLTDSASKTINMPNDATVEDVKAAYLLAYKLGCKGVTVYRDGSLSVQVYSVEGEKKKRVPAKPSDYAVEKLKTIVEAEPWLSRFINVEAILNGTNGKEKSAQAGGLTFSVSHVSAVKPAHEHSHHAKRPDIPEEKIRELLGVAYCPVCYEKDGELVELRMESGCATCPRCGWSKCVIS

SEQ ID NO: 649 - protein, 1746 aa, Thermococcus kodakaraensis KOD1; identical to SEQ ID NO: 648
  Tko RIR1-2 precursor

SEQ ID NO: 650 - protein, 1229 aa, Thermococcus kodakaraensis KOD1
  Tko TopA precursor
MVTLIIAEKPNVARKIAYALAEGKPVRKTIGKVSYYEFTRDGKKVIVAPAVGHLFSLAPKTKTYGYPVFDIEWVPVYVAEKGKSYAKDYIKALATLAKQADEFVVACDYDTEGEVIGYTALKYACGVDPSKAKRMKFSALTKKDLLKAWYNMEPTINFGMADAGIARHVLDWYWGVNLSRALTSAIKRASGKWMVLSTGRVQGPTLKFLVEREKEIQNFEPKPYWVIKMLLEKNGGQYTAVYEKEKVWDEEEAKKIVEEAKKGPAFVEKVEVKQQNRNPPVPFDLGTLQREAYSAFGYSPKKTLDIAQKLYEKGYCLHPDSLIPTPQGVKRIKELPEKGEVFALDFDLKLSRARYRLLERDADEPMYKVTLSDRTELYLTADHPVLVYRDDQLIFVPAEELRENDQVVLFINRSEYSPRTESPTLLGFLLENATSMKDYILYDPEFGGVLRNRIKDAGLKTEILWRFRIREPTYYKYLRGKMPVPIVRFLLEEGVVSIEELREVFRGFSYSTSLTPISFEFSEEFWYLFGLVAGDGHLAKKGAITIPAKDRTEDTVKAVKEIANSLQVPFAFDEKYKMIILRSKSLTRLFELLGCPYGNKTEIFRIPGEIMAKPEWMAAFLAGYYDADGHIGTKPTGGKKSHSPQIVLTSKNRMAIYTVKQMWQLLGVGTYLWEKKDRNGNFMAYELKVYSRDAWRFYEVMKNHLRIKRKDLEHVKEVAIRKRKAYSHHYSVLNVKSWEGKIKSSNVLWKKFDMSNQTAHGRGISLDKLQRIVDYLTDTDLRRIAMGDVYVLGIRSIEKFHYRGKVYDLVVDQYHNFIANGVVVHNCSYPRTSSQKLPKNLNFRSIIQNLAKLPEYKPFAHELLGKESLKPVEGKKDDPAHPAIYPTGELPKPGELTKDEGNLYDLIVRRFLALFMEPAVRETMKVVINSNNHRFILSGARTLKEGWLKVYGKYVKFDEVILPAFKEGEPVKVIQIKREKKKTKPPARYSPAAVIKKMEDLGIGTKATRAQILETLYQRGYIEGKKKIKVTPLGMRVVEALEKNVPDIVSVELTRAFEEKMEEIMAGKADKDQVIEESKEQLIKILQVFKEKELDIGKMLLESTGTGVTTSKEAAKKTGAVKDANDEEKSDGKAGEGTTPKAERKPLVVGKCPKCGGDLVIRYNRKTGKRFVGCSNWPKCDVTYPILQRGQVIPTEKTCCNGAPVVKIREKGREYEICLDMNCKDWKKK

SEQ ID NO: 651 - protein, 1702 aa, Thermococcus litoralis
  Tli Pol-1 precursor
MILDTDYITKDGKPIIRIFKKENGEFKIELDPHFQPYIYALLKDDSAIEEIKAIKGERHGKTVRVLDAVKVRKKFLGREVEVWKLIFEHPQDVPAMRGKIREHPAVVDIYEYDIPFAKRYLIDKGLIPMEGDEELKLLAFDIETFYHEGDEFGKGEIIMISYADEEEARVITWKNIDLPYVDVVSNEREMIKRFVQVVKEKDPDVIITYNGDNFDLPYLIKRAEKLGVRLVLGRDKEHPEPKIQRMGDSFAVEIKGRIHFDLFPVVRRTINLPTYTLEAVYEAVLGKTKSKLGAEEIAAIWETEESMKKLAQYSMEDARATYELGKEFFPMEAELAKLIGQSVWDVSRSSTGNLVEWYLLRVAYARNELAPNKPDEEEYKRRLRTTYLGGYVKEPEKGLWENIIYLDFRSLYPSIIVTHNVSPDTLEKEGCKNYDVAPIVGYRFCKDFPGFIPSILGDLIAMRQDIKKKMKSTIDPIEKKMLDYRQRAIKLLANSILPNEWLPIIENGEIKFVKIGEFINSYMEKQKENVKTVENTEVLEVNNLFAFSFNKKIKESEVKKVKALIRHKYKGKAYEIQLSSGRKINITAGHSLFTVRNGEIKEVSGDGIKEGDLIVAPKKIKLNEKGVSINIPELISDLSEEETADIVMTISAKGRKNFFKGMLRTLRWMFGEENRRIRTFNRYLFHLEKLGLIKLLPRGYEVTDWERLKKYKQLYEKLAGSVKYNGNKREYLVMFNEIKDFISYFPQKELEEWKIGTLNGFRTNCILKVDEDFGKLLGYYVSEGYAGAQKNKTGGISYSVKLYNEDPNVLESMKNVAEKFFGKVRVDRNCVSISKKMAYLVMKCLCGALAENKRIPSVILTSPEPVRWSFLEAYFTGDGDIHPSKRFRLSTKSELLANQLVFLLNSLGISSVKIGFDSGVYRVYINEDLQFPQTSREKNTYYSNLIPKEILRDVFGKEFQKNMTFKKFKELVDSGKLNREKAKLLEFFINGDIVLDRVKSVKEKDYEGYVYDLSVEDNENFLVGFGLLYAHNSYYGYMGYPKARWYSKECAESVTAWGRHYIEMTIREIEEKFGFKVLYADSVSGESEIIIRQNGKIRFVKIKDLFSKVDYSIGEKEYCILEGVEALTLDDDGKLVWKPVPYVMRHRANKRMFRIWLTNSWYIDVTEDHSLIGYLNTSKTKTAKKIGERLKEVKPFELGKAVKSLICPNAPLKDENTKTSEIAVKFWELVGLIVGDGNWGGDSRWAEYYLGLSTGKDAEEIKQKLLEPLKTYGVISNYYPKNEKGDFNILAKSLVKFMKRHFKDEKGRRKIPEFMYELPVTYIEAFLRGLFSADGTVTIRKGVPEIRLTNIDADFLREVRKLLWIVGISNSIFAETTPNRYNGVSTGTYSKHLRIKNKWRFAERIGFLIERKQKRLLEHLKSARVKRNTIDFGFDLVHVKKVEEIPYEGYVYDIEVEETHRFFANNILVHNTDGFYATIPGEKPELIKKKAKEFLNYINSKLPGLLELEYEGFYLRGFFVTKKRYAVIDEEGRITTRGLEVVRRDWSEIAKETQAKVLEAILKEGSVEKAVEVVRDVVEKIAKYRVPLEKLVIHEQITRDLKDYKAIGPHVAIAKRLAARGIKVKPGTIISYIVLKGSGKISDRVILLTEYDPRKHKYDPDYYIENQVLPAVLRILEAFGYRKEDLRYQSSKQTGLDAWLKR

SEQ ID NO: 652 - protein, 1702 aa, Thermococcus litoralis; identical to SEQ ID NO: 651
  Tli Pol-2 precursor

SEQ ID NO: 653 - protein, 546 aa, Torulaspora pretoriensis, strain CBS 5080
  Tpr VMA precursor
ISQSLSKYSNSDAIIYVGCFAKGTKVLLHDGSLRAIESIEVGEDVMGVDGERRKVVGLPRGREVMYKVSQKTTNRAHETAETRSEPLGLFEYTCNATHKLVVRTPRSCRLLTRNENGADYYDVAFFDLVKTKLKDGREIEIVKEMSNSYLATEGPEKAAQMVKEYQEASEGKEFFEWTIEARDVAVLGADVREATYQVYSPVLYESDFFSQYVKDSKFGLTSEAPLALAYLLGLWAGDVSSEETVFSVNSEDGSLYERITQFADILGLSAEFKDREAPKQGKTVYLHPKAIGGNDIQENSNNDNPLRNAIVDLGYLTDGVKNVPTYLLSDAIPHREIFLAGLIDSDGFVRSEDGCSATIKTTLKTVMAGTVAVARSLGLNVSVNTEEAKVDNGVDQRLSYAISISVSDALLSVLAKCAGAEMFRELPASEVVRKMNKVYFEMEELEEDDYYGLTLANGTDHQFMLANQLVVHNCGERGNEMAEVLMEFPELHTEKNGKMEPIMKRTTLVANTSNMPVAAREASIYTGITLAEYFRDQGRDVAMIAD

SEQ ID NO: 654 - protein, 1699 aa, Thermococcus species GE8
  Tsp-GE8 Pol-1 precursor
MILDTDYITEDGKPVIRVFKKENGEFKIEYDRNFEPYFYALLKDDSAIEEVKKITAKRHGTVVKVKRAEKVKKKFLGRPIEVWKLYFTHPQDVPAIRDKIREHPAVIDIYEYDIPFAKRYLIDKGLIPMEGDEKLKMLAFDIETLYHEGEEFAEGPILMISYADEEGARVITWKKVDLPYVDVVSTEKEMIKRFLRVVKEKDPDVLITYNGDNFDFAYLKRRSEKLGVKFILGRDGSEPKIQRMGDRFAVEVKGRIHFDLYPVIRRTINLPTYTLEAVYEAIFGKPKEKVYAEEIATAWETGEGLERVARYSMEDAKVTFELGKEFFPMEAQLSRLIGQSLWDVSRSSTGNLVEWFLLRKAYERNELAPNKPDERELARRRQSYAGGYVKEPERGLWNNIVYLDFRSLYPSIIITHNVSPDTLNREGCKEYDVAPQVGHKFCKDFPGFIPSLLGDLLEERQKIKRKMRATIDPVEKKLLDYRQRAIKILANSILPDEWLPLLVNGRLKLVRIGDFVDNTMKKGQPLENDGTEVLEVSGIEAISFNRKTKIAEIKPVKALIRHRYRGKVYDIKLSSGRNIKVTEGHSLFAFRDGELVEVTGGEIKPGDFIAVPRRVNLPERHERINLIEILLGLPPEETSDIVLTIPVKGRKNFFKGMLRTLRWIFEEEQRPRTARRYLEHLQKLGYVKLMKRAYEIVNKEALRNYRKLYEVLAERVKYNGNKREYLVHFNDLRNEIKFMPDEELEEWKVGTLNGFRMEPFIEVGEDFAKLLGYYVSEGYARKQRNQKNGWSYSVKIYNNDQRVLDDMEKLASKFFGRVRRGKNYVEISRKMAYVLFESLCGTLAENKRVPEVIFTSPESVRWAFFEGYFIGDGDLHPSKRVRLSTKSEELVNGLVVLLNSLGISAIKIRFDSGVYRVLVNEELPFLGNRKRKNAYYSHVIPKEILEETFGKQFQKNMSPAKLNEKVEKGELDAGKARRIAWLLEGDIVLDRVEKVTVEDYEGYVYDLSVEENENFLAGFGMLYAHNSYYGYYGYAKARWYCRECAESVTAWGRSYIETTIREIEEKFGFKVLYADSVAGNTEVIIRRNGKVEFVPIEKLFQRVDYRIGEKEYCALEGVEALTLDNRGRLVWRKVPYIMRHKTNKKIYRVWFTNSWYLDVTEDHSLIGYLNTSKVKSEKPLKERLVEVKPRELGEKVKSLITLNRAIARSIKANPIAVRLWELIGLLVGDGNWGGHSKWAKYYVGLSCGLDKAEIEEKVLRPLKEAGIISNYYGKSKKGDVSILSKWLAGFMVKYFKDENGNKRIPSFMFNLPREYIEAFLRGLFSADGTVSLRRGIPEIRLTSVNRELSNEVRKLLWLVGVSNSMFTETTPNKYLGNESGTRSIHVRIKNKHRFAKRIGFLLDRKATKLSDNLREHTNKKMAYRYDFDLVYPKKIEEINYDRYVYDIEVEGTHRFFANGILVHNTDGFFATIPGADAETVKKKAMEFLKYINAKLPGLLELEYEGFYVRGFFVTKKKYAVIDEEGKITTRGLEIVRRDWSEIAKETQARVLEAILKHGDVEEAVRIVKEVTEKLSKYEVPPEKLVIHEQITRDLKDYKATGPHVAVAKRLAARGIKIRPGTVISYIVLKGSGRIGDRAIPFDEFDPAKHKYDAEYYIENQVLPAVERILRAFGYRKEDLRYQKTKQVGLGAWLKVKGKK

SEQ ID NO: 655 - protein, 1699 aa, Thermococcus species GE8; identical to SEQ ID NO: 654
  Tsp-GE8 Pol-2 precursor

SEQ ID NO: 656 - protein, 1701 aa, Thermococcus species GT
  Tsp-GT Pol-1 precursor
MILDTDYITEDGKPVIRIFKKENGEFKIEYDREFEPYIYALLKDDSAIEDVKKITAGRHGRVVKVKRAEKVKKKFLGRPIEVWKLYFTHPQDVPAIRDEIRKHPAVIDIYEYDIPFAKRYLIDRGLIPMEGDEELKMMSFDIETLYHEGEEFGTGPILMISYADEGEARVITWKKIDLPYVEVVSTEKEMIKRFLKVVKEKDPDVLITYNGDNFDFAYLKKRCEKLGIKFTLGRDGSEPKIQRMGDRFAVEVKGRIHFDLYPVIRRTINLPTYTLEAVYEAVFGTPKEKVYPEEITTAWETGEGLERVARYSMEDAKVTYELGREFFPMEAQLSRLIGQSLWDVSRSSTGNLVEWFLLRKAYERNEIAPNKPDERELARRRGGYAGGYVKEPERGLWDNIVYLDFMSLYPSIIITHNVSPDTLNREGCKEYDTAPQVGHKFCKDVQGFIPSLLGALLDERQKIKKRMKASIDPLEKKLLDYRQKAIKILANSLLPEEWIPLVENGKVRLHRIGEFVDKLMETDSELVKRNGDTEVLEVRGIRALSFDRKSKKARVMPVKAVIRHRYSGDVYEIVLGSGRRITVTEGHSLFAYGDGELREVTGGEIKAGDLLAVPRRVNLPEKKERLNLVELLRRLPEEETGDIILTIPVKGRKNFFKGMLRTLRWISGEEKRPRTARRYLEHLEGLGYVRLKKIGYEVTDREGLERYRKLYERLVEAVRYNGNKREYLVEFNAVRDVIALMPEEELRDWLVGTRNGFRMRPFVEIEEDFAKLLGYYVSEGNARKWRNQKNGWSYTVKLYNENQRVLDDMESLAERFFGRVKRGKNYIEIPRKMAYIIFENLCGTLAENKRVPEAIFTSPESVRWAFIEGYFIGDGDVHPSKRVRLSTKSELLVNGLVLLLNSLGVSAIKIRHDSGVYRVYVNEELPFTDYRKKKNAYYSHVIPKEILEETFGKVFQRNVSYEKFRELVKSEKLDGEKAKRIEWLLNGDVVLDKVLEVKKRPYEGYVYDLSVEEDENFLAGFGLLYAHNSYYGYYGYARARWYCKECAESVTAWGRDYIETTIHEIEERFGFKVLYADSVTGETEIIIKRNGKVEFVAIEELFQRVDYRIGEKEYCVLEGVEALTLDNRGRLVWKSVPYVMRHRTNKRIYRVWFTNSWYLDVTEDHSLIGYMNTSKVKPGKPLKERLVEVKPGELGESVKSLITPNRAIAHGIRVNPIAVKLWELIGLLVGDGNWGGQSNWAKYYVGLSLGLDKEEIEEKILKPLKNTGIISNYYDRSKKGDVSILSKWLARFMVRYFKDESGSKRIPEFMFNLPREYIEAFLRGLFSADGTVSLRKGVPEVRLTSVNPELSSSVRKLLWLVGVSNSMFVETNPNRYLGKESGTHSVHVRIKDKHRFAERIGFLLDRKATKLSENLGGHTSKKRAYKYDFDLVYPKKVEEIAYDGYVYDIEVEGTHRFFANGILVHNTDGFFATIPGADAETVKKKAKEFLKYINAKLPGLLELEYEGFYVRGFFVTKKKYAVIDEEGKITTRGLEIVRRDWSEIAKETQARVLEAILRHGDVEEAVRIVKDVTEKLSKYEVPPEKLVIHEQITRELKDYKATGPHVAIAKRLAARGIKIRPGTVISYIVLKGSGRIGDRAIPFDEFDPTKHRYDAEYYIENQVLPAVERILKAFGYKNEDLRYQKTRQVGLGAWLKPKGKK

SEQ ID NO: 657 - protein, 1701 aa, Thermococcus species GT; identical to SEQ ID NO: 656
  Tsp-GT Pol-2 precursor

SEQ ID NO: 658 - protein, 2067 aa, Thermus thermophilus HB27
  Tth-HB27 DnaE-1 precursor
MGRKLRFAHLHQHTQFSLLDGAAKLSDLLKWVKETTPEDPALAMTDHGNLFGAVEFYKKATEMGIKPILGYEAYVAAESRFDRKRGKGLDGGYFHLTLLAKDFTGYQNLVRLASRAYLEGFYEKPRIDREILREHAEGLIALSGCLGAEIPQFILQDRLDLAEARLNEYLSIFKDRFFIEIQNHGLPEQKKVNEVLKEFARKYGLGMVATNDGHYVRKEDARAHEVLLAIQSKSTLDDPGRWRFPCDEFYVKTPEEMRAMFPEEEWGDEPFDNTVEIARMCNVELPIGDKMVYRIPRFPLPEGRTEAQYLMELTFKGLLRRYPDRITEGFYREVFRLLGKLPPHGDGEALAEALAQVEREAWERLMKSLPPLAGVKEWTAEAIFHRALYELSVIERMGFPGYFLIVQDYINWARRNGVSVGPGRGSAAGSLVAYAVGITNIDPLRFGLLFERFLNPERVSMPDIDTDFSDRERDRVIQYVRERYGEDKVAQIGTLGSLASKAALKDVARVYGIPHKKAEELAKLIPVQFGKPKPLQEAIQVVPELRAEMEKDPKVREVLEVAMRLEGLNRHASVHAAGVVIAAEPLTDLVPLMRDQEGRPVTQYDMGAVEALGLLKMDFLGLRTLTFLDEVKRIVKASQGVELDYDALPLDDPKTFALLSRGETKGVFQLESGGMTATLRGLKPRRFEDLIAILSLYRPGPMEHIPTYIRRHHGLEPVSYSEFPHAEKYLKPILDETYGIPVYQEQIMQIASAVAGYSLGEADLLRRCLAEGSLVLDAATGQRVPIEKVRPGMEVFSLGPDYRLYRVPVLEVLESGVREVVRLRTRSGRTLVLTPDHPLLTPEGWKPLCDLPLGTPIAVPAELPVAGHLAPPEERVTLLALLLGDGNTKLSGRRGTRPNAFFYSKDPELLAAYRRCAEALGAKVKAYVHPTTGVVTLATLAPRPGAQDPVKRLVVEAGMVAKAEEKRVPEEVFRYRREALALFLGRLFSTDGSVEKKRISYSSASLGLAQDVAHLLLRLGITSQLRSRGPRAHEVLISGREDILRFAELIGPYLLGAKRERLAALEAEARRRLPGQGWHLRLVLPAVAYRVSEAKRRSGFSWSEAGRRVAVAGSCLSSGLNLKLPRRYLSRHRLSLLGEAFADPGLEALAEGQVLWDPIVAVEPAGKARTFDLRVPPFANFVSEDLVVHNSMGKKKVEEMKSHRERFVQGAKERGVPEEEANRLFDMLEAFANYGFNKCLPARARVVDWCTGRVVRVGEIVRGEAKGVWVVSLDEARLRLVPRPVVAAFPSGKAQVYALRTATGRVLEATANHPVYTPEGWRPLGTLAPGDYVALPRHLSYRPSLHLEGHELDLLGFALAEGHLRHPSGVYLYTSSEEELAAMEEALRAFPNTRIRVVWRRGVAHVYVGRVDRRQEAGAVAFLRRMGLLGLDAKTKRLPEAVFGLPPEEVARFLGRLWTGDGGVDPKGRLIHYATASKELAWGVQHLLLRLGLQSRLVEKRFSGGYKGYAVYLLGGLEAARRFAETVGPYLVGKRRQDLEALLASWEKAGRSTGDVLPLAFLEEVRAAVAEVAQGQVADLLREAGLAEGLLCLGRGRRGLSRATVGRLAALTGSLALLRLAEAEVYWDRVEAVEPLGEEEVFDLTVEGTHTFVAEDVIVHNSHAAAYSLLSYQTAYVKAHYPVEFMAALLSVERHDSDKVAEYIRDARAMGIEVLPPDVNRSGFDFLVQGRQILFGLSAVKNVGEAAAEAILRERERGGPYRSLGDFLKRLDEKVLNKRTLEFLIKAGALDGFGERARLLASLEGLLKWAAENREKARSGMMGLFSEVEEPPLAEAAPLDEITRLRYEKEALGIYVSGHPILRYPGLRETATCTLEELPHLARDLPPRSRVLLAGMVEEVVRKPTKSGGMMARFVLSDETGALEAVAFGRAYDQVSPRLKEDTPVLVLAEVEREEGGVRVLAQAVWTYEELEQVPRALEVEVEASLLDDRGVAHLKSLLDEHAGTLPLYVRVQGAFGEALLALREVRVGEEALGALEAAGFRAYLLPDREVLLQGGQAGEAQEAVPF

SEQ ID NO: 659 - protein, 2067 aa, Thermus thermophilus HB27; identical to SEQ ID NO: 658
  Tth-HB27 DnaE-2 precursor

SEQ ID NO: 660 - protein, 1800 aa, Thermus thermophilus HB27
  Tth-HB27 RIR1-1 precursor
MRDGYFFDEHAQAIARRQYLQPGDGDILGMFRRVAREIAKAEREEERSKWEEEFFRLMAEKRFSPGGRILAGAGTVHGNLLNCFVQGATENPPESFAGIMEVAKKLALVTKVGGGNGVNLDPYRSKGKRARRAVEGVAYLSAEHPDVEDFIRGLMRPPINPDGAKEEISLKNFARVVYGALSPELKALAERYGVRTVKEPPEGRILVPDDMGGIIDAAREAADLARKGQKPHVDFSLLRPEGAPIRGSGGTSSGPVSFLFEIFDNFLEWVAWGAEEAGPVATLRYVYAPVLRVVRQGGCLHPDTLVHTDRGTLRLRELVDPFRRGWQPHTLSVATDEGWRPSPEGYNNGVAPTLRVVLENGLEVQGTLNHKLKVLREDGTREWVELQDLRPGDWVIWVLDEHTGTPVQLAPLDEPLHPNTTPIRTPEVLTEDLAFLLGFFFGEGFVSGDRIGFSVHEEEPMREEAKRLFRELFGLELREERKPGDRSVTLVVRSRPLVTWLRKNGLLKGKARELEVPRAIRQSPRPVLAAFLRGLFEADGTITAGYPMLTTASKRLAQDVMVLLGGLGIPSKLLRYNPLPGRFSKAEHYGVRVVTAKGLERYLERIGVPKGSRLEALHGIKPDVRRESSWPLPHAEGLLKPLLTVTEKGRKGYASPYTPLRKDLLRYLRGERQLTATGYAMVLEKAQDLGLEAEPFPFNEYYVRVASVEPGGEILTLDLSVEGNHTYLANGLVSHNTRRGAGMATLSIEHPDLLDFLTAKDLDREKAEGDISTFNISVLATDRFLEAVEKDELWPVTPIEVPGKYYPYPVEGPYTGKLPSLPEREDGAKAIPLYGGKVPARWLWHEIAWHAWATGEPGLIFVDRVNALSALKGLGERYQIRSTNPCFVGSTRIPTERGLVPIEELAREGGSFYLVTDNRAPFGGRGAPLPGHGTAVRKAVRAFFTGVKPVVRLRTREGLEVTLTPDHLLLTPEGYREAGKLRPGEKILVQSGEGLFPKEESLPAQALAVVHERVATAGGRGGRGRADVRAQYRNLPTRWSRELGVALGWLLGDGYLREDGVGFYFSRKDFADLAWLPDLLRDWFGPGTLQETRSNTFHLHFNRIPAEFFQALGVKAARATEKRVPESLFRAPREAVVGFLQGLFSADGSVQINENKQDATVRLASSSLALLQDVQLLLLNLGILGKIHKRREAARKALPDGKGGLREYPVAPQYELILGGENRDRFAEVVGFLQEEKQSKLLAFLRHRPRGSYRKPFLATVASVEPAGEAPVYDLTEPVTHSLIANGLVAHNCGEIPLTVGEPCDLGAMNLAAYVKDGEFQMEEFRRDVRTAIRFLDNVLDVNKFALPDNEMAAKSLRRLGLGLMGLADALIKMGLPYDSEEARRKVYEIVSVMREEAIRASEALAEERGPFPLYEEHREYFQSLGIRPRRNVALLTVAPTGTTSMLMGVSSGIEPVFSPFVWRRIGGEYKPLLHPLFVELMEAYPPAPGYAKDGKWDWEKIIEEIQKDGHGSVQNLPFVPEAIRKVFLCAHDVHPLDHVRMQGAVQRAFDAEGYAANSISKTINLPNHAAVEDVEAAYTEAYRTGCKGITVYRDGSREFQVLTVKKEAKEEKAGKTPEEAKPQEARAHEPGRPVYERPGRLMGFTDMVKLFAPDGSKRSFLVTVNTLEGRPIEVILTSGKAGDEANADSEALGRVVSIALQYGVPPEAIVRTLRGINGGLYGTYQGRLVSSKADLIAVALETVPQMAPGAPEDLSSAPVLSGGGIALAGAAPCPSCGEKALVREEGCWKCQACGYAKCG

SEQ ID NO: 661 - protein, 1800 aa, Thermus thermophilus HB27; identical to SEQ ID NO: 660
  Tth-HB27 RIR1-2 precursor

SEQ ID NO: 662 - protein, 2067 aa, Thermus thermophilus HB8
  Tth-HB8 DnaE-1 precursor
MGRKLRFAHLHQHTQFSLLDGAAKLSDLLKWVKETTPEDPALAMTDHGNLFGAVEFYKKATEMGIKPILGYEAYVAAESRFDRKRGKGLDGGYFHLTLLAKDFTGYQNLVRLASRAYLEGFYEKPRIDREILREHAEGLIALSGCLGAEIPQFILQDRLDLAEARLNEYLSIFKDRFFIEIQNHGLPEQKKVNEVLKEFARKYGLGMVATNDGHYVRKEDARAHEVLLAIQSKSTLDDPGRWRFPCDEFYVKTPEEMRAMFPEEEWGDEPFDNTVEIARMCNVELPIGDKMVYRIPRFPLPEGRTEAQYLMELTFKGLLRRYPDRITEGFYREVFRLLGKLPPHGDGEALAEALAQVEREAWERLMKSLPPLAGVKEWTAEAIFHRALYELSVIERMGFPGYFLIVQDYINWARRNGVSVGPGRGSAAGSLVAYAVGITNIDPLRFGLLFERFLNPERVSMPDIDTDFSDRERDRVIQYVRERYGEDKVAQIGTLGSLASKAALKDVARVYGIPHKKAEELAKLIPVQFGKPKPLQEAIQVVPELRAEMEKDPKVREVLEVAMRLEGLNRHASVHAAGVVIAAEPLTDLVPLMRDQEGRPVTQYDMGAVEALGLLKMDFLGLRTLTFLDEVKRIVKASQGVELDYDALPLDDPKTFALLSRGETKGVFQLESGGMTATLRGLKPRRFEDLIAILSLYRPGPMEHIPTYIRRHHGLEPVSYSEFPHAEKYLKPILDETYGIPVYQEQIMQIASAVAGYSLGEADLLRRCLAEGSLVLDAATGQRVPIEKVRPGMEVFSLGPDYRLYRVPVLEVLESGVREVVRLRTRSGRTLVLTPDHPLLTPEGWKPLCDLPLGTPIAVPAELPVAGHLAPPEERVTLLALLLGDGNTKLSGRRGTRPNAFFYSKDPELLAAYRRCAEALGAKVKAYVHPTTGVVTLATLAPRPGAQDPVKRLVVEAGMVAKAEEKRVPEEVFRYRREALALFLGRLFSTDGSVEKKRISYSSASLGLAQDVAHLLLRLGITSQLRSRGPRAHEVLISGREDILRFAELIGPYLLGAKRERLAALEAEARRRLPGQGWHLRLVPPAVAYRISEAKRRSGLSWSEAGRRVAVAGSCLSSGLNLKRPRRYLFRHRLFLLGEAFADPGLEALAEGQVLWDPIVAVEPAGKARTFDLRVPPFANFVSEDLVVHNSMGKKKVEEMKSHRERFVQGAKERGVPEEEANRLFDMLEAFANYGFNKCLPARARVVDWCTGRVVRVGEIVRGEAKGVWVVSLDEARLRLVPRPVVAAFPSGKAQVYALRTATGRVLEATANHPVYTPEGWRPLGTLAPGDYVALPRHLSYRPSLHLEGHELDLLGFALAEGHLRHPSGVYLYTSSEEELAAMEEALRAFPNTRIRVVWRRGVAHVYVGRVDRRQEAGAVAFLRRMGLLGLDAKTKRLPEAVFGLPPEEVARFLGRLWTGDGGVDPKGRLIHYATASKELAWGVQHLLLRLGLQSRLVEKRFSGGYKGYAVYLLGGLEAARRFAETVGPYLVGKRRQDLEALLASWEKAGRSTRDVLPLAFLEEVRAAVAEVAQGQVADLLREAGLAEGLLCLGRGRRGLSRATVGRLAALTGSLALLRLAEAEVYWDRVEAVEPLGEEEVFDLTVEGTHTFVAEDVIVHNSHAAAYSLLSYQTAYVKAHYPVEFMAALLSVERHDSDKVAEYIRDARAMGIEVLPPDVNRSGFDFLVQGRQILFGLSAVKNVGEAAAEAILRERERGGPYRSLGDFLKRLDEKVLNKRTLESLIKAGALDGFGERARLLASLEGLLKWAAENREKARSGMMGLFSEVEEPPLAEAAPLDEITRLRYEKEALGIYVSGHPILRYPGLRETATCTLEELPHLARDLPPRSRVLLAGMVEEVVRKPTKSGGMMARFVLSDETGALEAVAFGRAYDQVSPRLKEDTPVLVLAEVEREEGGVRVLAQAVWTYEELEQVPRALEVEVEASLLDDRGVAHLKSLLDEHAGTLPLYVRVQGAFGEALLALREVRVGEEALGALEAAGFRAYLLPDREVLLQGGQAGEAQEAVPF

SEQ ID NO: 663 - protein, 2067 aa, Thermus thermophilus HB8; identical to SEQ ID NO: 662
  Tth-HB8 DnaE-2 precursor

SEQ ID NO: 664 - protein, 2202 aa, Thermus thermophilus HB8
  Tth-HB8 RIR1-2 precursor
MDMRDGYFFDEHAQAIARRQYLQPGDGDILGMFRRVAREIAKAEREEERSKWEEEFFRLMAEKRFSPGGRILAGAGTVHGNLLNCFVQGATENPPESFAGIMEVAKKLALVTKVGGGNGVNLDPYRSKGKRARRAVEGVAYLSAEHPDVEDFIRGLMRPPINPDGAKEEISLKNFARVVYGALSPELKALAERYGVRTVKEPPEGRILVPDDMGGIIDAAREAADLARKGQKPHVDFSLLRPEGAPIRGSGGTSSGPVSFLFEIFDNFLEWVAWGAEEAGPVATLRYVYAPVLRVVRQGGCLHPDTLVHTDRGTLRLRELVDPFRRGWQPHTLSVATDEGWRPSPEGYNNGVAPTLRVVLENGLEVQGTLNHKLKVLREDGTREWVELQDLRPGDWVIWVLDEHTGTPVQLAPLDEPLHPNTTPIRTPEVLTEDLAFLLGFFFGEGFVSGDRIGFSVHEEEPMREEAKRLFRELFGLELREERKPGDRSVTLVVRSRPLVTWLRKNGLLKGKARELEVPRAIRQSPRPVLAAFLRGLFEADGTITAGYPMLTTASKRLAQDVMVLLGGLGIPSKLLRYNPLPGRFSKAEHYRVRVVTAKGLERYLERIGVPKGSRLEALHGIKPDIRRESSWPLPHAEGLLKPLLTVTEKGRKGYASPYTPLRKDLLRYLRGERQLTATGYAMVLEKAQDLGLEAEPFPFNEYYVRVASVEPGGEILTLDLSVEGNHTYLANGLVSHNTRRGAGMATLSIEHPDLLDFLTAKDLDREKAEGDISTFNISVLATDRFLEAVEKDELWPVTPIEVPGKYYPYPVEGPYTGKLPPLPEREDGAKAIPLYGGKVPARWLWHEIAWHAWATGEPGLIFVDRVNALSALKGLGERYQIRSTNPCFVGSTRIPTERGLVPIEELAREGGSFYLVTDNRAPFGGRGAPLPGHGTAVRKAVRAFFTGVKPVVRLRTREGLEVTLTPDHLLLTPEGYREAGKLRPGEKILVQSGEGLFPKEESLPAQALAVVHERVATAGGRGGRGRADVRAQYRNLPTRWSRELGVALGWLLGDGYLREDGVGFYFSRKDFADLAWLPDLLRDWFGQGTLQETRSDTFHLHFNRIPAEFFQALGLKAARATEKRVPESLFRAPREAVVGFLQGLFSADGSVQINEKKQDATIRLASSSLALLQDVQLLLLNLGILGKIHKRREAARKALPDGKGALREYPVAPQYELILGGENRDRFAEVVGFLQEEKQSKLLAFLRHRPRGSYRKPFLATVASVEPAGEAPVYDLTEPVTHSLIANGLVAHNCGEIPLTVGEPCDLGAMNLAAYVKDGEFQMEEFRRDVRTAIRFLDNVLDVNKFALPDNEMAAKKLRRLGLGLMGLADALIKMGLPYDSEEARRKVYEIVSAMREEAIRASEALAEERGPFPLYEEHREYFQSLGIKPRRNVALLTVAPTGTTSMLMGVSSGIEPVFSPFVWRRIGGEYKPLLHPLFVELMEAYPPAPGFAKEGKWDWEKIVEEIQKDGHGSVQNLPFVPEAIRRVFLSAHDIHPLDHVRMQGAVQRAFDAEGYAANSISKCIAKGTLIPTSKGLIPIEEIAPPHPEDTFVPVEGLYTAEGYRITAHYYAGKKRGVRIRLDNGAELVGAWESHRLLTPEGWRLMRELKPGDVVLGKLVPSHGEGGLPIPEAKGLSLRTNARNLPLPERMSEDLALFLGMLAADGSTVEATGFVGIATKDPDVERVFQEVAGRLFGVEPKCTVDKRTGVRNLYLTSRRLVRFVEALIGKGAAQKRVPSQILQGSPGEKLAFLRGLTLDGYVHANMGLVVYEGRSQRLAYEAAELARSFGLPKVYQGRKKVLAPKETYYVHSVAVSGPLQELLEPLEAHKRAKVEARYKVFVPQEVLAATRVGTHHPGYVSLKSVRQREAQAVYNTTAERLGWPTEILAHRVVEVEEVGEVEMYDIEVEEVHRYVVNGLISHNTINLPNHATVEDVEAAYTEAYRTGCKGITVYRDGSREFQVLTVKKEAKEEKAGKTPEEAKPQEARAHEPGRPVYERPGRLMGFTDMVKLFAPDGSKRSFLVTVNTLEGRPIEVILTSGKAGDEANADSEALGRVVSIALQYGVPPEAIVRTLRGINGGLYGTYQGRLVSSKADLIAVALETVPQMAPGAPEDLSSAPVLSGGGIALAGAAPCPSCGEKALVREEGCWKCQACGYAKCG

SEQ ID NO: 665 - protein, 1467 aa, Thermococcus zilligii
  Tzi Pol precursor
MILDADYITEDGKPVIRVFKKEKGEFKIDYDRDFEPYIYALLKDDSAIEDIKKITAERHGTTVRVTRAERVKKKFLGRPVEVWKLYFTHPQDVPAIRDKIREHPAVVDIYEYDIPFAKRYLIDRGLIPMEGDEELRMLAFDIETLYHEGEEFGEGPILMISYADEEGARVITWKNIDLPYVESVSTEKEMIKRFLKVIQEKDPDVLITYNGDNFDFAYLKKRSETLGVKFILGRDGSEPKIQRMGDRFAVEVKGRIHFDLYPVIRRTINLPTYTLETVYEAIFGQPKEKVYAEEIARAWESGEGLERVARYSMEDAKATYELGKEFFPMEAQLSRLVGQSLWDVSRSSTGNLVEWFLLRKAYERNELAPNKPDERELARRAESYAGGYVKEPEKGLWENIVYLDYKSLYPSIIITHNVSPDTLNREGCREYDVAPQVGHRFCKDFPGFIPSLLGDLLEERQKVKKKMKATVDPIERKLLDYRQRAIKILANSILPDEWIPLLINGRLKLVRIGDFVDSAMKELKPMKRDETEVLEVSGIGAISFNRKTKRSETMPVRALLRHRYSGKVYGIKLSSGRKIKVTAGHSLFTFRDGELVEIKGEEIKPGDFIAVPGRINLPERQERINLVEVLLGLPEEETADIVLTIPVKGRRNFFKGMLRTLRWIFGEEKRPGTARRYLEHLQTLGYVRLGKIGYEIVNEEALRDYRGLYETLTGKVKYNGNKREYLVHFNDLRDIIRLMPEKELKEWKVGTLNGFRMETSIEVKEDFAKLLSYYVSEGYAGKQRSQKNGWNYSVKLYNNDQNVLDDMETLASKFFGKVRRGKNYVEIPRKMAYVLFESLCGTLAENKRVPEIIFTSPESVRWAFLEGCFIGDGDLHPGKGVRLSTKSEELVNGLVILLNSLGVSALRIWLDSGVYRVLVNEELPFLDKGKKKTPYVTSKEIPEEAFGKRFQRNISLEKLREKVEKGEPDAEKVKRVVWLLEGDIVLDRVEEVAVDDYEGYVYDLSVEENENFLAGFGMLYAHNSYYGYYGYANARWYCRECAESVTAWGRQYIETTMREIEEKFGFKVLYADSVTGDTEVIIRRNGRIEFVPIERLFEHVDYRVGEKEYCVLSGVEALTLDNRGRLVWKKVPYVMRHKTDKRIYRVWVTNSRYLNVTEDHSLIGYLDGKYLEIRPADIPKDPDIKLITLASPGLQEVALKTPSRLEEITYEGYVYDIEVEGTHRFFANGILVHNTDGFFATIPGADAETVKKKAKEFLNYINPRLPGLLELEYEGFYRRGFFVTKKKYAVIDEEDKITTRGLEIVRRDWSEIAKETQARVLEAILKHGDVEEAVRIVKEVTEKLSRYEVPPEKLVIYEQITRDLRDYRATGPHVAVAKRLAARGIKIRPGTVISYIVLKGPGRVGDRAIPFDEFDPAKHRYDAEYYIENQVLPAVERILRAFGYRKEDLRYQKTKQAGLGAWLKPKT

SEQ ID NO: 666 - protein, 666 aa, uncultured archaeon GZfos13E1
  Unc-ERS PFL precursor
MNIGGFQRFSLIDYPGKICAIVFTQGCNFRCPYCFTGNTEISTDRGLFKIKDIVEKHIECRVYDYAGNFSPIKKYYKRETSSLLEIRPFLHSDAISCTLNHEFFVYNSKANEFIKKEAQYINVKEDYLVITIPQKEIFNYKLDVNNAIEDLYQELTFKQRFSNEEVIREVKELRKRGFSWRKIFKRFNLTDHLRRVIERKEALDSKILPIVKERDGKVAVKGSNFFIDKFIEVTPKFTRLLGYYLSEGCSSKDIGRKNSYYVSFTFNSKEKEYIRDTKEIFSETFKTELKEVESKKCKTLSLVSYKGIIGLFFKYYFGEDVYNKKLPTEFIYLDKDLQKQLIIGLFRGDGLTSPDFIKKYKKQRIQITSKLLRYQISLILLRLGIKYSIFRKEIIISDKRIFDLLGQSHLITKKVINTSNRYGFLDDKHLYLKINSVKKLNKKTKVYNLEIDNPTHSYNVNLISVSNCHNPELVDPKQFSNLISEKKIFSFLEERRGKLDAVEITGGEPTLQPDLIDFMCDLKKLDYLVKLDSNGSKPEILSEAIEHEIVDYIAMDVKAPLERYQEITNSRVDPVKIEHSIELIMSSGLDYEFRTTVVKSQLGKRDILEIGRLIRGSKRYILQKFVPVKVLDKKFLDEVFFYTDDELESLRNAVKRKGYVAECKVR

SEQ ID NO: 667 - protein, 914 aa, uncultured archaeon GZfos9C4
  Unc-ERS RIR1 precursor
MKTTVSKIRKKNFIGAKDDLKLSLNAVEVLKRRYLLKNELGGVIETPSQMFKRVAKAIARAELNYGKSKEEVKEIERRFYLLMRNLEFLPNSPTLMNAGTELGQLAACFVLPVEDSIGGIFGAVKKMAKIHQSGGGTGFSFSRLRPKGDVVKSTGGVASGPVSFMRVFDVATDVIKQGGKRRGANMGILNAEHPDILEFIRAKERGEFANFNTSVAVTDEFMRAVERNDEYGLVNPRTKGEVKRIKAREVFNEIVTYAWKTGDPGIVFMDEINRRNTIPAVGKIEATNPCVTADTWVTTAEGPRQVEELIGKKFTAIVNGEEWESSEEGFFETDVKPVYTLKTAEGFELRLTADHPVMKVERMTRYKVETQWSNAGDLKPGDKIIINNHRDFGNWSVKGKYTEGEGYLIGLLLGDGTIKKLNPWMKAISKKMEKASADFCEGILRGLFDADGSVQGNQSKGVSIRLAQSDVEILKAVQRILLRFGIFSKVYMNRRGERKVKMPDGKGGVKEYITKPQHELVISNDNILYFAERVGFSDAEKMEKLEKAIWNYKRKMNRERFVASVEEVVPDGVEKVYDVKIPGINAFNANGFVVHNCGEQPLLPYDSCNLGSINVSKFVKSGDGEIDWERLREVICISVKFLDDVIDVNRYPLPEIEKMTKANRKIGLGIMGFAELLIKLGIAYDSKDALSTGEKLMQFITNEARRCSTELGLERGSFSNFELSVWNSKYEAMRNATVTTIAPTGTISIIAGCSSGIEPIFAVAFVRNVMGGMLEINKLFEEIAKERGFYSKELITEIAKCGSVQDIDGVPGDIKRVFVTALDISPEWHVRMQAAFQKYTDNATSKTVNLPSDATWGDVKKVFLLAYKLKCKGITIYRYGSKEQVLSLDIPKLMLEEYVCADSEYTGECRICSV

SEQ ID NO: 668 - protein, 862 aa, uncultured archaeon (Rice Cluster I)
  Unc-MetRFS MCM2 precursor
MAASVISSVARWKEFLTRYYKNQIQQLAVSDVKNKALAIEFPNITKFDVRLAEELLNNPDLVLSHAEDALTLVDLPVKTQVSAKIRVIKVPRKTQVRELRSSDVNKLVSLEGTVRKITDVRPRILEAAFECARCKNIIYIPQEGSGKFIEPSYCQCNEEKKGIFRLMYKESRFEDYQRIKIQESPENLKGGEQPQTLDINVSDDLAGIVTPGEFITVTGILRSAQRVNKDGKTAYFDIYLDGVAVELEEQEFDEVEISLEDEEEILRMSRDPEIYQKVIGSIAPSIYGYDEVKEAVAHQLFSGVVKELPDGSRIRGDIHVLLVGDPGIAKSQILRYVVKLAPRGVYASGKSASSAGLTAAAVKDEFDGQWTLEAGALVLADKGIAAIDEMDKMKNEDRSSLHEGMEQQSYHPLTEILLADGRKIRIGDLFDQTYAKADEIIEGIDCEIVPCEGVSVLSTDMNHITEQRVDRVSRHKAPDHFIKIRYSNDREIIVTPEHPVFIVKDGISCIPASAVTIGDPVPAPVEEQTGSKICSLYVTAVEVIPNEGQYRTDYVYDVTVEPYHCFVSQGVILHNSISIAKAGILATLKCRCAILGAANPKLGRFDPYESIPDQINMPPSLMSRFDLIFILQDKPEEKRDTNIAGHILKSHFAGELHEHRKNNPASHVTDDMVRTAMSTIKPQIDPKLFRKYVAYAKRKVFPIMTEDAKAQIINFYLGLRKQGEGDNAPIPVTARQLEGLVRLAEASARMRLSDKVTADDVARTIRITMTSLKQVGMDTETGRLDIDVLQVGVAKSQRDRIKNLKHLIEDLSREYEGSVPVDVLIDRAVESGMPKDKVEKELKKLREIGEIFEPKSGHLSLS

SEQ ID NO: 669 - protein, 519 aa, Vanderwaltozyma polyspora, formerly Kluyveromyces polysporus, strain CBS 2163
  Vpo VMA precursor
ISQSLSKYSNSDAIIYVGCFAKGTEVMMADSSIKNIEDIEIGDLVMGQDGQPREVTQLPRGSDKMYKVNEINENSTSELFSFVCNATHQLIVRTPRNIKVQTRIIDGIECNEIVYTDLFKEITEDARIIELIKEVSKIYPVSEGMDDVQEFVSQYNKSLEDYFQWTVEPRDINRLTESIREATYQVYAPVLYECENLLQYLKNTKYNLNEKSPTALAYLLGLWTGSGMTRRAGLSVSTTDESLMNNIVAAADLLNLKSEFKQERTTTRVGNVNFYGNSTSTNQNVDNLLWDAIQELGFIQDGNKTVPSFLSSDLIEIRETFLAGLIDSNGSVDNNKQDISCTIELEDNKVMSGIVSLIRSLGLKADVTQSSGKLNDVCYNVTVKGGELLKSVLSRCSAINYTKCESRDLLREPVEFYFELQELEEAEYYGITLPEYSDHQFMLSNQVVVHNCGERGNEMAEVLMEFPELFTEMNGKKEPIMKRTTLVANTSNMPVAAREASIYTGITLAEYFRDQGKHV

SEQ ID NO: 670 - protein, 330 aa, Wiseana iridescent virus
  WIV RIR1 precursor
QTRRGSYAAYLDITHPEIISFLNTRRVSGVGGDYNFKLMNIHNAVNIPDEFMRKIWFISTVTPLLRENKYLKIEETIKEIKNSNKWVEFSELKIEDFTPQNSQKFIKEMDKWNLFDPHTKKVKETISATELWERILITRAETGEPYLHFIDASNRNLPSFQKKLGLRVKQSNLCVVGETLILTENGEYPIKSLVDREVSVWNGDEWSDVTVVQTGTDQELLRIDFSNGIFIVCTEYHRFLVLDRSRPIKDLKRKYAKDLPLNFQVMYTHSDLSTTLIKVTKVSKLQRRANTYCFTEQLNNAGVFNGILTSNCSEIILPTDENRTAVCCLA

SEQ ID NO: 671 - protein, 547 aa, Zygosaccharomyces bailii, strain CBS 685
  Zba VMA precursor
ISQSLSKYSNSDAIIYVGCFAKGTEVMMHDGSVKAIETIEAGEAVMGTDGQPRKVVGLPRGREVMYKVSQKTAHRVHKTDETRAAPVALFEYNCNATHKLVVRTPRSCRSITRKMQGVDYNEVIFFDLKKKKLEDGREIEIVKEVSRSYPAAEGAEKAAQMVKDYYDAARGKEFFEWTIEARDVAELGAHVRKATHQVYAPVLYESDFFFHYVKNSKFALRSEASTALAYLLGLWVGDGLSDRAVLSVDSEDSSLLERITGYADILDLSAEYKDREIPKRAKTVCLYPKTIRGNDIRRNLNTDNPVWNAIVDLGYLKDGVKNVPSYLFSDSICHREVFLAGLIDSDGHVRGDDGLSVTIKTIHKTVMEGTVAVARSLGLIVSVNTEEAKIDKNDVNHRFVYAIYISGGDALLSVLAHCAAAKKFRAPPSNEVVRGLKKVFFEMEELKEDDYYGITLAKESDHQFLLANQLVVHNCGERGNEMAEVLMEFPELFTEKNGRKEPIMKRTTLVANTSNMPVAAREASIYTGITLAEYFRDQGKNISMIAD

SEQ ID NO: 672 - protein, 541 aa, Zygosaccharomyces rouxii, strain CBS 688
  Zro VMA precursor
ISQSLSKFSNSDAIVYVGCFAKGTEVMMSDGSIKEVEGIEVGQEVMGKDGKPREVVGTPSGREKMYKVSHKTAHRAHKSDSTSERFGLFEYTCNATHKLVVRTSRSCRPLVRNIQGTDYVEVCLFNMTKKTLEDGRVIDIVEETSDFYPAVEGPEKALRILKEYAEADGGKEYFEWTIEARDVALLSAQVRKATYQLSAPVLLENNHFSHYLKDSNSAVGNDTVRALSYFLGLWIGDGMLNNAATFSVDSQNASLLNRINEFAEVLGLSAEYKDSQEPKRAKTVNLYAKAIRDEGVRKNLDTHNLLWDAIVDLGYLKDDSKNVPGYICSDSFQHREVFLAGIIDSTGYVSDETATVKTIDQSVMTGTVAVARSLGINVSVDVEVDEDGVDRSFVYAIYMDRSDALLAVLANCASNNKQIEAPPHGVIREFNKAYFEMEELEEDEYYGLTLSNESDHQFLLANQLVVHNCGERGNEMAEVLMEFPELFTEVNGHKEPIMKRTTLVANTSNMPVAAREASIYTGITLAEYFRDQGKNISMIAD

SEQ ID NO: 673 - protein, 229 aa, Aquifex aeolicus strain VF5
  Aae RIR2 N-extein
MEKTEKNELVRKLIFNPQGDREASKRKIIKGNPTNIFELNEIKYSWAFDLYKLMGFTNFWIPEEIQMLEDRKQYETVLSDYEKRAYELVLSFLIALDSFQVDMLKEFGRMITAPEVEMAITAQEFQESVHAYSYQFILESVVDPVKADEIYNYWREDERLLERNKVIAELYNEFIRKPNEENFIKATIGNYILESLYFYSGFAFFYTLGRQGKMRNTVQQIKYINRDEL

SEQ ID NO: 674 - protein, 2211 aa, Acidovorax avenae subsp. citrulli AAC00-1
  Aave Hyp-1721 N-extein
MEDQNLKPFDGVLDAPSSGTLQPFSGALDGEEPKRGLKGWGQDIAATAVKGAIAIPEAAVGLADILTGGRVGKFLENEGGAVGFRPKQTREIVNDWHSDATKEAQRKFQEADGIVDKAVTAVQNPSLVVASVGESIPTMIGGGAIGRGLLAATRLGQMGAKGAALAGAAGEGLTMAGSQAEQIRQETPDGLLTPSQAGLAAATGAVGGAVGAVGGRIAQRLGIGDAETMLAQGRSGMARQFADEAAGAAVNPLQQQAVKSIPRHVIEGAIAEGLLEELPQSVAEQIFQNVALDKPWYDQVDSAIVLGALSGGAMGAGAAGYHAAARPRAAAVGEGDPAAARPAGDEPAAEAPARNPGLERVSEAFAEQLRMLQEQEQGEVLGPQSAPPDGAAALAEQRAAAAAQRQADMEASRAVESPDDEIYQSTGAQVPRSVRMGINPADGPLSTGAAMAVDTGVSDQMQQAAALAQAAEAGEKSGKAQKQEQPARSPLGADPETGEIPGSDDVANWSDAQLSEVFRGAQGRDVRIKLAQELSRRKAARAAEQSTPVKGTTDGPQAQPASTQPPAAAQAPAVAAAGAPAQGTLINGGTTTADAGAQAKTAAGAQAAPESKDQRAQRIDAAGQTWTRLPTVQRQVVAEQLKGLKPVLQKNLAGAKWENLNSDLKRKIADLIAPVQEAAAAPAPAPAAPVAMARGTTFPPLDAQPVPAAAEARVPPKAAGTSARAARAAAAPVSAPTVAQAAAQEAATSLSNDLPEPTEAQKLAGNYRKGHARINGHDISIENPAGTRRRPEWPPLQNHYGYIKGTKGADKDHVDVFMTDRAEDSALPVFVVDQVNKDGSFDEHKVVMGAADEAEARSTYLGNYEKGWTGLGGITQMTQDEFKDWVRDPAKTVKPAAAPAAGDALPTAAAEEAGPAPDKDAETAPAPAPALPASESASAAPPAPPAAAETVPQRMKRAKAEKAAAPATPAAAGEASPAAKPKTVPEKMKDAKAKRESKAVREAREAEERRAAYFAPGNVVRGYGGGFDRVVSYQPADADGRWSVTVREVQKDGSGAWADKAGAVERTHGTEPSKVNYATGPAGRMEVDPAPAPAAASHEPSAPARNRDNARKRGPAESEPLFRRYAQDDLGAGMAAELLRIMGKGDGFSPEARLQAVESIRATVSPIVAAWQNAPEVVVAYDLNDPIIPQRVRDADTRQRSGGAHGAPEGFYFGGKAYLMASRLTTPEDAARVLYHEVAGHHGLRGLFGPELDKILNQVATMRRADVDAKMAEYGMRGVDRISRARAAEEVLAEMAEKNPQLSFVQRAVAAIRNFLREHVPGFGSLRLRDADIIQAYILPARNWVERAAAARERGMGSAAMQYSLAQDEARSGFAAEVRAAITAGLNNDERALRAQVPLGIETPAALEALGVVRKPVVTNRNLLAKMHFEHGVPRADLERLGELLSNPVMVFKSDTQPGRMVVVTSLVVRGNPVVVAVDPNGASNRAEVVYVPSAYPKDNADRTFTRWIRDGLLQFANKKESRQLATTARLQLPGVVQRVSGFRANYKTEADLPQTGAGPDVMFSRERIAALKDSALDQITQTMSHPGKVSLWDKTIGTMRHLAERAPAFKPVFESAQRFIDDVSMLGNDAADMAPRLLPRVDSWRDLTKKPITAADNKAVARPLFEGTLMWARDIDGTPVLLDDLTAKYQNLPADQKAQLLLRGGRLDPKILTAWQGLPVGMYEANVNTSFNSRVLKAGVVWSQKELETMFGLDANQVSLYQEGRAAIDRSIDMTARADMLRSLGDEYAGMRDAVLAQETLDDAVELLTRTLMDDARDRPEWSERLMKLNNAVVKAQERAQQLMDEGYAPLSRFGRYTVDVVDAAGDRQYFGMFETKADSNRMKAEMEKQFPGATVTQGTMSQDAFKLFAGVTPESLEMFGSMLGLDGKGDDPKDKAFQAYLQLAKNNHSALKRLIHRKGVAGYSEDVGRVLASFVYSNARLGAGGLNAGTMESAINAIPKEQGELKDLAMGLRDYIANPQEEGQAVRGMLFAQYLGGSVASAAVNMMQPFQITMPWLSQFGGMRKAGAQMARALKDMSRKGFQYEPDLAAAMQSAEEDGVVSPQEIHQLMSQARGTGSLRTGDGTKVGDARAAVANNWERVKVAWGQPFALAEQFNRRSTFIAAYRMAKEQGMAEPSNFARKAVLETQFVYSKANKPRFARGAVGGALF

SEQ ID NO: 675 - protein, 301 aa, Acidovorax avenae subsp. citrulli AAC00-1
  Aave RIR N-extein
MQRDPIDSLAPDAAPRLPEQPISLDVLREKYLKPGEADAETLYRRVARALASVEAPEVREAIEARFLANLRAGAIGAGRIMSAAGTAIQATLINCFVQPVGDCIQGMDEGGYPGIYEALREAAETMRRGGGVGYDFSRIRPRGAEVKGTASMASGPCSYINVFDQSCATVESAGARRGAQMGVLRIDHPDVLDFITAKRTPGRWNNFNVSVGVPDAFVQAVLDDAPWELVHPARPGAALREEGARQRADGQWVYRTLPARELWDTIMRSAYDFAEPGILFLDRVNTDNNLAYCESIAATNP

SEQ ID NO: 676 - protein, 54 aa, Aspergillus brevipes FRR2439
  Abr PRP8 N-extein
FWWTSQRHDGKLWNLNAYRTDVIQALGGVETILEHTLFKATAFPSWEGLFWERA

SEQ ID NO: 677 - protein, 156 aa, Acidothermus cellulolyticus 11B
  Ace RIR1 N-extein
MTEPTSGARAQMDGSGRRGLTMQRIYTTPGVHPYDEVNWVRRDVVMTNWRDGSVNFEQRGVEFPDFWSQNAVNIVTTKYFRGALGTPQREWSLKQLVDRVVKAYAKAGLENGYFATPDDATIFEHELAHALVHQVFSFNSPVWFNVGTPAKQQVSA

SEQ ID NO: 678 - protein, 226 aa, Alkalilimnicola ehrlichei MLHE-1
  Aeh DnaB-1 N-extein
MAQTESSSAATDALKVPPHSIEAEQAVLGGLMLDNNAWDQVADRVTEEDFYRRDHRLIWRAIATLADEGQPVDAVTISEWLKNHELLEAAGGMGYLGALASDTPSAANIKAYADIVRERSVMRQLIRVGTDVVDSAFQPEGRDSKTLLDEAERRIFQIAEQTGRHKQGFRGLKELLPGVVERIDQLYRQDGEVTGLATGFDDFDRMTSGLQNGDLVIVAGRPSMGK

SEQ ID NO: 679 - protein, 892 aa, Alkalilimnicola ehrlichei MLHE-1
  Aeh DnaB-2 N-extein
MAQTESSSAATDALKVPPHSIEAEQAVLGGLMLDNNAWDQVADRVTEEDFYRRDHRLIWRAIATLADEGQPVDAVTISEWLKNHELLEAAGGMGYLGALASDTPSAANIKAYADIVRERSVMRQLIRVGTDVVDSAFQPEGRDSKTLLDEAERRIFQIAEQTGRHKQGFRGLKELLPGVVERIDQLYRQDGEVTGLATGFDDFDRMTSGLQNGDLVIVAGRPSMGKCIMAGSRLVDPRTGGRVTIDELVARQEAEVLTLGDDFRLGMARPAAFVDDGIKPVYRVRTASGREIATTLTHPFLTGDGWRPLSEIGVGEHVAVPRRIPVFGRERLPEHQVKLLAYFLGDGGTTQTSPLFTNADERVRGDFTDAVTAMGGVRCVPVGSPGRTPSLRVSRCRTALQSGRDVFAKALKGAMQQLQLTGEALADALGVSKAAVSGWINARTVPAPATYQRLCATLASSGQALPGTDYADIGKNSPNPVAAFLDRHRLWGRLATEKAVPEVVFRLKRGQLALFLSRLFACDGSAFVQGNGQARISYATSSRALARDVQHLLLRFGILSKLREKRNRYPGLQHAPWELEVMDQASLRAFCEEIGIFSKEEQVRGVREALAGKRRHNNVGGLPWSVSRYVLAAKGERSWGDIYQAAGRVLPEGFNAHLTGRSARRLSRHRASELADLLQDDYLARLATSDLHWDEIVEIEYIGAHQVYDLTVDGTHNFVAEDVCVHNTTWAMNIVEHAAMKQEAPTAVFSMEMPGDSLAMRMLSSLGRVELQRIRSGRLEDDDWPRLTSTLSLLSQAKLFIDDTPGLSPSEMRARARRLKREHGLGLIVIDYLQLMQLPGAKENRAQELSEISRSLKGLAKELDVPVIALSQLNRSLEQRPNKRPVMSDLRE

SEQ ID NO: 680 - protein, 325 aa, Alkalilimnicola ehrlichei MLHE-1
  Aeh Rir1 N-extein
MTTAAKVRALPNATADIPLQSASADIWDKKYRLKSKDGQVIDETVDHTWQRVARALAEVEKTKKLREHWYERFLWALRRGAIPAGRITSNAGAWAHKPATSTINCTVSGTIQDSMDDILQKVHEAGLTLKAGCGIGYEFSTLRPRGAYVSGAGAYTSGSLSFMDIYDRMCFTVSSAGGRRGAQMATFDVGHPDVLDFIRAKREDGRLRQFNLSLLITEEFMQAVEDDAQWPLAFPLTKHEAETDNIDLTDSEQVIWREWPTTEPYISDEQGLVACRIYRTVKARRLWDMIMTSTYDFAEPGFILIDRVNEMNNNWFCEDIRATNP

SEQ ID NO: 681 - protein, 608 aa, Acyrthosiphon pisum secondary endosymbiot phage 1
  AP-APSE1 dpol N-extein
MQNLLFCDLETYSDIPINCGTHRYAENAEILLFAYAYNHAPVKVWDVTQDKTMPADLKAYLDDSEILTVWHNGGMFDTVILKRVLNIDLPLSRVHDTLVQALAHGLPGALGLLCDIFNVNSDKAKDKEGKALISLLCKPRPKNSKIQRATALTHAEEWQRFKDYAGSDILAMREIYQHLPNWNMNVHETELWQLDQKINRRGMCMDVELAKSALTAVENEQKRLSTVTQQLTDNAVQNATQRDALLQHIASAFGITLPDMQASTLQRRINDPDIPPALRELLSVRLQSCTTSTSKYKALLKSVSADGRLRGTKQFCGASRTGRWAGRVFQPDNLPRPTLDPNTIDNGIEALKAGCAELICDDIMQLTSSALRGCIIAPPGKKLVISDLSNIEGRMLAWLAGENWKVNAFSEFDNGKGDDLYKLAYARAFNLLPEDVTKEQRQIGKVMELGLGYGGGVAAFLTFALAYGLDLDELAEAALPNIPPGVKREAMRWYQKSVETDKTYGLSEKIFVTCDSLKRMWRNAHPQTVSFWYDIEDAVKQAIQSPGIAFKCRKLSVRRDKSWLRICLPSGRSLCYPSARIENGQITYMGTNPYSRKWERLKTYGGKS

SEQ ID NO: 682 - protein, 175 aa, Aeropyrum pernix K1
  Ape APE0745 N-extein
MVRVERLRTGVEGFDPLVAGGIPRGFFVAVVGEPGTGKTVFSIHFAYQGVREGDKVIYVTTEESRESVLKQAAMFGMDLGRAVDEGRAIVIDALLKSRSDEWSLEDVSVESLVNKVLEAKRALGYGRARLVVDSMSAFWLDKPAMARKYSYMVKRVLYRWDFTTLLVSQYAITTQ

SEQ ID NO: 683 - protein, 1052 aa, Acanthomoeba polyphaga Mimivirus
  APMV Pol N-extein
MPSETIDSTKQFEFQISDWNSYHELDQEEEEKYVIQLFGRTEDDHDVCLKVTGYTPFFYVEIPKQWKQRQVDKFVEILKNKVQYHCKKNLDEDFDLSKSLIKYAMVKKHKFYNFRNKQLYNFLLLVFKSHTAMKEFSSILARPLEAKGLTNKPMLYQRYESNIEPHIRFMHINNLSSCGWASIDKDKLKKIPEYSNCDYSFSVNWKDVKPSNNDDRMAPFKIMGYDIECVSCDQNFPQAERPSDKIIQIGITMYRYGSMKCYEQHILTLKKCAPIEGVNVECYKKEKGLLRGFAKKIAELRPDFKTGYNNFGFDDKYIYDRILRIDKREGKKQGVNINALKNKFMDEILRTIGKVNNNYLIENEGLDRIPIYTTVKDKKISSKASRFIQIRGGTYVENGNNLKYVQSPGITYFEVKNLSSSALGDNELKFIQIPGVLSIDMMKVIQRDHRLIGYKLDNVSANFITEKADKIIEMPHNQEDSDSEKEDEDTDDKTYDVNIYTKSTKALEKDSYIQIMVNDGYSSSPLSEGAKYKVYDIQTITEKKLNEKTNKEEIFVYQAIKTKICQKDIQQLRETIKNPLLGISWTFAKDDMHHTKINEYFEEGDPKKIRQIAKYCLKDCKLVNLLLAKLEIIVNSVGMAKVCHVPLSYLFLRGQGVKIFSLVSKKCREKNFLIPVLRRKSKDNEGDEDETYEGATVITPKPNVYLSPIGVLDYSSLYPNSMRERNLSQECYVDDSKYDNLPGYIYHDVEIILKDKKGKILRNIDGTPQKEYHRFAQEIITDEQINRELKDIFDKINTVFENNVAIIQNQKYFTEKNISELIDKHKNISDSKIEDIEFDESLSDKRKNKLVDAEKDSLDKNIGFYQKIKSQIDKIKLDSKIEIDNLSKNLNEEEKSKQINKMELNTKNLISKVFSKYLITEQQREELIVLEKERAKRSVNAEKAKVYNTVDGITVRYGILPEILTELLNKRKETNGKLANEKDPFVKAILNALQLAFKVTANSLYGQTGAPTSPLYFIAIAACTTAIGRERLHYAKKTVEDNFPGSEVIYGD

SEQ ID NO: 684 - protein, 226 aa, Burkholderia cenocepacia
  Bce DnaB N-extein
MNAPQDPQIESLKVPPHSVEAEQSVLGGLLLDNAAWDRIADFLSQGDFYRYDHRIIYEHIGRLIASTRPADVVTVYEALTTSGKADDVGGLAYLNALAQNTPSAANIRRYAEIVRDRAVLRRLVSVADEISADAFNPQGKEVRQLLDEAESKVFSIAEEGARGNQGFLEIGPLLTQVVERIDTLYHTANPSDVTGTPTGFVDLDRMTSGMHGGELIIVAGRPSMGK

SEQ ID NO: 685 - protein, 120 aa, Batrachochytrium dendrobatidis JEL197
  Bde-JEL197 RPB2 N-extein
KKRLDLAGPLLGGLFRMLFRKLTKDVSRYLQITMESGREFNLSLAVKSSTITNGPKYSLATGNWGDQKKFMQARAGVSQVLNRYTFASTLSHLRRLNTPIGRDGKLAKPRQLHNTHWGMV

SEQ ID NO: 686 - protein, 30 aa, B.subtilis M1918 (prophage)
  BsuP-M1918 RIR1 N-extein
ESGYPYIMFADNVNKVHPNEHISKVKFSNL

SEQ ID NO: 687 - protein, 380 aa, B.subtilis strain 168 Sp beta c2 prophage
  BsuP-SPBc2 RIR1 N-extein
MTNTIPNWIKLNNEIMIQKDGKYQFEKDKEAVHSYFVDYINQNTVFFHDLKEKLDYLIKNDYYEEEFLSKYTFEQIKSIYKIAYSYKFRFPSFMSAFKFYNDYALKTNDKTKILERYEDRVSIVALYCADGDYEKAVEEVHTMMKQEYQPATPTFLNAGRKRRGEMVSCFLLEVGDSLNDISRAIDISMQLSKLGGGVALNLNKLRAKGEAIKDVENATKGVVGVMKLLDNAFRYADQMGQRQGSGAVYLSVFHPDITDFLDTKKISADEDVRVKTLSIGVVVPDKFIELAREDKDYYMFYPHSVYKEYGQYLDELDINEMYDELVENPRVRKAKGNARKLLEQLAILRSESGYPYIMFADNVNKVHPNEHISKVKFSNL

SEQ ID NO: 688 - protein, 333 aa, Clostridium botulinum phage C-St
  CbP-C-St RNR N-extein
MNIEITLNKGFETKLEELRAKYGEDMFEIEGLGKKQLNTTLFFDKFMNSNNVANASIDDNSNVSDKNITIMLSESKKPLNKLLSRNKLYIEMKENFGKQVADEWLELQINGALYEHDAHDSSLKPYCYAYSLKPVVDKGLYFINDMKAKPAEHLDTYDSHVLEFIAYATNLQSGAVGIPDYLIYAFYFWKKDIENGVVTKEQANKYREQHWQKMLFSLNQPYLKGGEQSAYTNFSILDREHILGFFGMEKFPDNTLIIDYIDEIIQYQKDFLDYEKKLRYEKFFTFPVISASLLYKNDKFVDEDMARFINKHNMTWQDVNIYKATSIDALASC

SEQ ID NO: 689 - protein, 333 aa, Clostridium botulinum phage D
  CbP-D RNR N-extein
MNIEITLNKGFETKLEELRAKYGEDMFEIEGLGKKQLNTTLFFDKFMNSNNVANASIDDNSNVSDKNMTIMINESRKPLNKLLSRNKLYIEMKENFGKQVADEWLELQINGALYEHDAHDSSLKPYCYAYSLKNVVDKGLYFIKDMKAKPAEHLDTYDSHVLEFIAYTTNLQSGAVGIPDYLIYAFYFWKKDIENGVVTKEQANKYREQHWQKMLFSLNQPYLKGGEQSAYTNFSILDREHILGFFGMEKFPDNTLIIDYIDEIIQYQKDFLDYERKLRYEKFFTYPVMSASLLYKNDKFVDEDMARFINKHNMTWQDVNIYKATSIDALASC

SEQ ID NO: 690 - protein, 389 aa, Coxiella burnetii
  Cbu DnaB N-extein
MPPRQKVKTSVPKVPPHSQEAEQSVLGALMLDNRAWDRIADRISIQDFYRSDHQLIFETMSRLVDQHKPLDVLTIAEALKAREQLSAAGGEPYLYELAKNTPSAANIVAYADIVRERAILRQLIEAGTDITHDGFNPDGRDIKELLDTAEQRVFHIAESRVRGSGPIAIGPLLTKATDRIDKLFHSKQAITGLSSGFTDLDKLTSGLQDGDLIVVAGRPSMGKTVFAINIAEVAAIKGNIPVLVFSMEMPAESLVMRMLSSLGSIDQHKVRTGQLKDDDWPRITHAIEMLSETKLFIDDTPALTPSEIRSRARRLAREHGGLGLIVIDYLQLMHVPGTKENRSTEISEISRSLKALAKELNVPVVALSQLNRSLEARVDKRPVMSDLRE

SEQ ID NO: 691 - protein, 453 aa, Chlorobium chlorochromatii CaD3
  Cch RIR1 N-extein
MKIERLFTQAGNNVFDAFEYSLRSSVLRNTDGSVVFEMNDIEVPVQWSQVATDILAQKYFRKTGVQQRDAEGNVLLDSEGNPLLGSERSLKQVVHRLAGCWREWGEKHGYFDTPDDAQAFYDEVAFMILAQMGAPNSPQWFNTGLNFAYGTTGPAQGHFYVDPATGEVTESGDAYSRPQAHACFIQSVNDDLVNDGGIFDLAIREARVFKFGSGSGTNYSSLRSSGEKLSGGGSSSGLMSFLKIFDSAAGAIKSGGTTRRAAKMVIVDIDHPDVEKFIEWKAKEEDKVASLVAGSRICSRFLQAIVEEALANGADRKTNPRLQQLIQNALSRGVPMSYVIRVLALVEQGYTSLDFNEYDTHYESEAYQTVGGQNSNNTVRVTNAFMLAVANDEVWELRQRTTGKVSRVVKARELWEKILLSAWKCADPGLQFDTTINEWHTCPQSGRINASNP

SEQ ID NO: 692 - protein, 447 aa, Chlamydomonas eugametos (chloroplast)
  Ceu ClpP N-extein
MPIGVPRIIYCWGEELPAQWTDIYNFIFRRRMVFLMQYLDDELCNQICGLLINIHMEDRSKELEKKEIERSGLFKGGPKTQKGGTGAGETGASSIQNKKSNSSSFEDLLAADEDLGIDENNTLEQYTLQKITMEWLNWNAQFFDYSDEPYLFYLAEMLSKDFNKGDARMLFSNNNKFSMPFSQMLNTGSMSDPRRPQSTNGANWNSSEQNNSLDIYSPFRMLANFEAQDYDFKQINPSLASKEEVFKLFNNTILKNGGQRNNNMSKLLTELAQRNWENKTNSQENLYKSTEKALSQRNLRKEYIKDRTLNNYSSDPFNTKGYVNAQGASTGPSPRTRGMHADGSLNYLDFYSYNDSYNDFKTAPRGKQAERAFQEEESKKVFVIINSFGGSVGNGITVHDALQFIKAGSLTLALGVAASAASLALAGGTIGERYVTEGCHVMIHQPE

SEQ ID NO: 693 - protein, 276 aa, Candida glabrata
  Cgl VMA N-extein
RKELKRLSLDDEAGESQYGAIYSVSGPVIVAENMIGCAMYELVKVGHDNLVGEVIRIDGDKATIQVYEETAGVTVGDPVLRTGKPLSVELGPGLMETIYDGIQRPLKAIKESSQSIYIPRGIDTPALSRDIKWQFTPGTFKTGDHISGGDIFGTVFENSLVESHKILLPPRARGTITWIAPAGEYTVDEKILEVEFDGDKYDYTMFHTWPVRVPRPVAEKLSADYPLLTGQRVLDSLFPCVQGGTTCIPGAFGCGKTVISQSLSKYSNSDTIIYVG

SEQ ID NO: 694 - protein, 271 aa, Chilo iridescent virus
  CIV RIR1 N-extein
MSDIIIDLSRDSKFDELGLKRLRESYMMREETSPQERFAYVCKQVGTDRDHSQRLYEYTSKHWLSLSTPILSFGKANHGLPISCYLSWIEDTKEGLIDTLSEVNQLSMLGGGVGVGVGIRTSDNKSTGVMSHLNTYDACSLAYKQDGVRRGSYAMYLNNNHPDVLQFIEMRKPTGDHNIRCLNLHHGLNISDEFMELIEKCDGGGNIDDTWNLIDPHTKKITTVGARDLWQRILETRMKTGEPYICFIDTCNKHMYDFQKKKGLTIKQSNL

SEQ ID NO: 695 - protein, 59 aa, Cryptococcus laurentii strain CBS139
  Cla PRP8 N-extein
MKSNPFWWTNQRHDGKLWALNNYRVDVIAALGGVEGILEHSLFKGTAFPTWEGLFWEKS

SEQ ID NO: 696 - protein, 34 aa, Filobasidiella neoformans (Cryptococcus neoformans) Serotype A, PHLS_8104
  Cne-A PRP8 (Fne-A PRP8) N-extein
DVISALGGVEGILEHSLFKGTAFPTWEGLFWEKA

SEQ ID NO: 697 - protein, 47 aa, Cryptococcus neoformans (Filobasidiella neoformans), Serotype AD, CBS132).
  Cne-AD PRP8 (Fne-AD PRP8) N-extein
HDGKLWQLNNYRVDVISALGGVEGILEHSLFKGTAFPTWEGLFWEKA

SEQ ID NO: 698 - protein, 1530 aa, Cryptococcus neoformans var. neoformans JEC21
  Cne-JEC21 PRP8 N-extein
MSTVPPGFGAPPPGFTPQPNGNGDGMEGDFFGQLSQEEIDKKARKWRQSQKRRFNSKRRQGGGGGVDFGKADLPPEHIRKIIKDHGDMSNRKFRNDKRVHLGALKYVPHAVMKLLENIPMPWEQVREVPVLYHISGAITFVNEVPRVIEPVYHAQWASMWLAMRREKRDRRHFKRMRFPPFDDEEPPMDYGDNVLDVEPLEAIQLELDEEDDEAILEWFYDPKPLVDTPQVNGSSYKYFQLALPQMANLYRIGRQLLSDYSDNNAFYLFDKKSFFTAKALNIALPGGPKFEPLYRDMDAFDEDWNEFNDINKIIIRNVIRSEYKVAFPHLYNSLPRSVYIGVYHEPKNVYIKTDDPDLPAFYFDPLINPISQRVVQEAHTPLVSHEDQVFGFGNDEDVEFELPEEVEPFLGERDLENENTSDAIALYWAPYPYNLRSGKMKRAQDVPLIKNLYLEHCPDGQPVKIRVSYQKLLKVYVLNALHNKPPKAMVKRNLFRSLKNTKFFQATTLDWVEAGLQVCRQGYNMLNLLIHRKNLNYLHLDYNLNLKPIKTLTTKERKKSRFGNAFHLCREILRLTKLIVDAHVQFRLGNVDAFQLADGLQYMFAHVGQLTGMYRYKYKLMKQIRMCKDLKHVIYSRFNTGPVGKGPGVGFWAPGWRVWLFFMRGIVPLLERWLGNLLARQFEGRNSKGIAKTVTKQRVESHFDLELRAAVMHDILDMMPEGVKQNKAKTILQHLSEAWRCWKANIPWKVPGMPAAIENIILRYVKSKADWWTSVAHYNRERIRRGATVDKAVVRKNLGRLTRLYLKAEQERQNGYLKDGPYITSEEGTAILISTAHWFESRKFAPIPFPPLSYKHDTKLLVLALEKLKEAYSVHGRLNQSQREELALVEQAYDNPHECLSRIKRLLLTQRAFKEAGIEFFDTYDKLIPCYDVEPLEKLSDAYLDQFLWYEADKRRLFPSWVKPSDSEPPPLLVYKWCQGINNLTDIWDTSEGESVVMMETVLARVYEKVDLTLLSRLLRLIMDHNLADYITSKNNTTLTFKDMSHINTYGMIRGLQFSSFVFQYYGLVLDLLILGLERASEIAGLPEAPNGFLQFKNREIETKHPIRFYSRYVDRIHMLFRFTAEESRDLIQRYLSVQPDPNNENVIGYNNKRCWPRDCRMRLIKHDVNLGRAVFWNVKNSLPRSLTTIEWEDTFVSVYSKDNPQLLFSMCGFEVRILPRVRTQHGEAYSLKDGVWNLTQESTKERTAQAFLRVSDQGIQDFNNRIRQILMSSGSATFAKIINKWNTCLIGLMTYYREAVVHTNELLDSLVKAENKVQTRVKIGLNSKMPSRFPPCVFYSPKELGGLGMLSMGFVLIPQSDLRWSKQTDSGGITHFRSGMTHEEDQLIPNLYRYLQPWEAEFLDSARVWSEYALKRKEATASNRRLTLEDLEDSWDRGIPRINTLFQKDRHTLAYDKGWRVRQYFSQFFRLRNQPFIWTNQRHDGKLWQLNNYRVDVISALGGVEGILEHSLFKGTAFPTWEGLFWEKA

SEQ ID NO: 699 - protein, 67 aa, Clostridium thermocellum
  Cth TerA N-extein
MYDEAKAQHAVNFINCLKHTKGQWRGVPFDLLPWQDKIIRDIFGTVKENGYRQYNTAYVEIPKKNGK

SEQ ID NO: 700 - protein, 283 aa, Candida tropicalis (nucleus)
  Ctr VMA N-extein
MAGALENARKEIKRLSLDDTNESQYGQIYSVSGPVVIAENMIGCAMYELVKVGHDNLVGEVIRINGDKATIQVYEETAGVTVGDPVLRTGKPLSVELGPGLMETIYDGIQRPLKAIKDESQSIYIPRGIDVPALSRTVQYDFTPGQLKVGDHITGGDIFGSIYENSLLDDHKILLPPRARGTITSIAEAGSYNVEEPVLEVEFDGKKHKYSMMHTWPVRVPRPVAEKLTADHPLLTGQRVLDSLFPCVQGGTTCIPGAFGCGKTVISQSLSKFSNSDVIIYVG

SEQ ID NO: 701 - protein, 436 aa, Chlorella virus NY2A infects Chlorella NC64A, which infects Paramecium bursaria
  CV-NY2A RIR1 N-extein
MVGRPMNRLMVVLKRDGSKENISFDKILQRIQRLCWPINSKPVYKGSRAMTGLSVDVSKIVASVCASIVDGISTVQLDELTADKSASMTTEHPDYGILAARISVSNLQKQTHDKITDAYAEIAHLLSNDFKENIEKHADEYQSFIDYDRDYDFDYFGFKTMERLYLTKVNNKIVERPQHVYLRVAIGLWGSDIARVKETYDALSCRKFTHASPTLFNAGFKKAQLASCFLVTVEDSLGDIYKVLGDCAQLSKHGGGLGINISEIRGRGSRINGTNGESDGIVPMLKVFDTTSAYANQGGRRKGSFAIYLEPHHSDVMDFLLMKRNQGEESLRARNLFYAVWLNDLFMKRVETDAQWSLFDPSECPGLTDAFGDEYAELYERYEAEGKAKNVVKARDVWNTMVTTIIETGQPYVSNKDAVNKKNMQMNAGTIRGSNL

SEQ ID NO: 702 - protein, 453 aa, Crocosphaera watsonii WH 8501 (Synechocystis sp. WH 8501)
  Cwa PEP N-extein
MITTTYEITPTVKRETAFILWFEEVGSKDVDLVGGKNSSLGEMIQQLQPKGVNVPTGFATTAHAYRYYIESAGLESRLRDLFTDLDVNDVTNLQERGQLSRSLILNTPFPKELEAAIIEAYKMLCDRYSHECSKLQEKYREECKIETQNLDVAVRSSATAEDLPEASFAGQQETYLNIHSVKGVLEACHKCFASLFTDRAISYRHHNGFDHFAVALSVGVQKMVRSDLASAGVMFSIDTETGFKNAALITAAYGLGENVVQGAVNPDEYYVFKPTLQDGYRPILEKRVGTKAIKMIYDTGGSKLTKNVDVLPEEQEQFCLNDEEILKLANWACIIEDHYSRVRETYTPMDIEWAKDGRTGELYIVQARPETVQSQKAANVLKTYKLQDHSTVVAVGRSVGASIGQGEARVILEASKIDQFKPGEVLVTNRTDPDWEPIMKKASAIVTNQGGRT

SEQ ID NO: 703 - protein, 462 aa, Crocosphaera watsonii WH 8501 (Synechocystis sp. WH 8501)
  Cwa RIR1 N-extein
MQPTVLTSPKQTSHGDTQTSSLYHSQLGESKIRVRRRDGSWTALNIVKIRAVVDWACADREVNSIALEAGLTTRLRDGITTREIQDNLINCALEMCSPDEPDWRYIAGRLHIWSLWKDTLVSRGYQYGNYEIVAKTKIDAKQYDNRLLTYSTAELQEAGSWINPDWDTDYDYAGAVLLTSRYLLDDELPQEAFLTCALLLATVESPENRLPWAKRFYEAIAKGKVSLATPILANLRVPGGSLTSCFILSIDDNLESIFEEITNTARISKNGGGVGVNVSRIRATGSWVMGKNNASGGVIPWIKLLNDTAIAVNQGGRRAGAVTVGLDIWHLDVPEFLEIQTENGDQRRKAYDVFPQLILTDEFMRRVENKEEWTLVDPYQVKEKLGIELAELWGEKFEEAYGLIEAELDREITLYKRVNARELFKTIMRSQVETGMPYLAFKDTINKANPNKHVGYIPGVNL

SEQ ID NO: 704 - protein, 161 aa, Costelytra zealandica iridescent virus
  CZIV RIR1 N-extein
PEIISFLNTRRVSGFGGDYNYKLMNIHNGVNIPDNFMRKIWFISTVAPILKQENGKRMKMLEEAIKTFQNSDKWVDENNLDLNKLTIENAQTYIKEMDKFDLTDPHNKEVKETISATELWERILVTRAECGEPYCHFIDTSNRKLPEFQKKLGLNIKQSNL

SEQ ID NO: 705 - protein, 505 aa, Dictyostelium discoideum strain AX4 (nucleus)
  Ddi RPC2 N-extein
MDPESVGYCNNPDFLHKGSMDELYNISKLTDDIKPVEEKWKLVPAFMKCRGLVKQHIDSFNFFINVEMKKIVKANERLTAENDPSYFVRFTDINVGSPTSTEDNLDSVQLTPQRCRLRDMTYSAPIFVNIEYTRNKQIISKRDVHIGNIPIMLRSSNCVLSKKTPEQMAALGECPMDPGGYFIVRGQEKVILNHEQLSKNRIIIEMDSKGLPSASVTSSTHERKSRTGVTLKNEKLYLKHNTFGEDIPVAIVLKGMGVETDQEMAQLVGSDDVFLNAITPSLEECQKCGVHTAAQALDYLGSRIKVFRRPYGVQNKKTKSEEARDILAGVVLNHVPVRRYNFRLKVIYLSLMIRRIIMASKDKSCLDDKDYYGNKRIELSGQLISLLFEDCFKKFQSELKKSVDQAIAKANRAENLDLPKLIRTDTITNGFTHAISSGQWNLKRFRMERSGVSQVLSRLSYISCMGMMTRIQSQFEKTRKVAGPRSLQPSQWGMLCPSDTPEGEA

SEQ ID NO: 706 - protein, 215 aa, Deinococcus geothermalis DSM11300
  Dge DnaB N-extein
MELTPRVPPHSNEAEISVLGSILLDNDTLIGLGDTLTPEMFYREGHRKIFAAMRALQERGEPVDLVTLSEHLRVQGQLDEVGGLTYLIGLSEQVPTAAYAEHYARIVQEKHTLRQLISASGKAMQLAYEGQLPLEDLLDRAEKMIFEVAEQKKKSEAFQAMGEVVHETFEYITLLHQNRGIPDGVSSGFRDLDEQISGFQKGSLNVLAARPSMGK

SEQ ID NO: 707 - protein, 241 aa, Desulfitobacterium hafniense DCB-2
  Dha-DCB2 RIR1 N-extein
MLYRVASIIAQVEETFGKTKKEVKELAKSFYEMMAKLEFMPNSPTLMNAGRDLGQLSACFVLPVEDSMEEIFDAIKSAAIIHKSGGGTGFSFSRLRPKNSTVRSTGGVASGPVSFMKVFNAATEAVKQGGTRRGANMGILRVDHPDIREFITCKEDNKEITNFNISVGITEEFMKAVQEKRHYNLIDPHTKEADGQLYAPEVFQLIVDHAWRNGEPGIIFLDRLNRDNPTPQLGEIEATNP

SEQ ID NO: 708 - protein, 283 aa, Desulfitobacterium hafniense Y51
  Dha-Y51 RIR1 N-extein
MSFQESAPKAWLKANLTPNARVILEKRYLKQENGEVAESPEDMLYRVASIIAQVEETFGKTKKEVKELAKSFYEMMAKLEFMPNSPTLMNAGRDLGQLSACFVLPVEDSMEEIFDAIKSAAIIHKSGGGTGFSFSRLRPKNSTVRSTGGVASGPVSFMKVFNAATEAVKQGGTRRGANMGILRVDHPDIREFITCKEDNKEITNFNISVGITEEFMKAVQEKRHYNLIDPHTKEADGQLYAPEVFQLIVDHAWRNGEPGIIFLDRLNRDNPTPQLGEIEATNP

SEQ ID NO: 709 - protein, 1183 aa, Debaryomyces hansenii CBS767
  Dhan GLT1 N-extein
MASYLPQEEFETNVYKYDETPENKSWASTLPTAKGLYNPEYEKDACGVGFTCHIKGEASHKIVSDCRNLLCNMTHRGGELNPKDGDGAGLLSSLPHKFFLREFKYYCNIDLPKLGQYGTGNIFFKKDDIVFEKSRKTFESIANTLGLKVLGWRKVPHDSSILGPASLSREPLILQPAIVLSELFDGQHKEISEEEFEKNYQMDFEKKLFILRKQSTHTIGLHNWFYICSLSSKTIVYKGQLAPNQVYAYYHDLANAEYEAHFALVHSRFSTNTFPSWDRAQPLRWAAHNGEINTLRGNKNWMRAKEGVMESELFGDELDKLYPIIEEGGSDSAAFDNVLELLVINGVLSLPEAVMMLIPEAWQNDIHIDSKKKAFYEWAACLMEPWDGPALFTFADGRYCGANLDRNGLRPCRYYVTDDDRMICASEVGVIEIEPEKILQKGRLQPGRMLLVDTKEGRIVDDRELKNKVASRFDFKSWVLANMISMDDLFSKLESRNVNLIENPESQDITVQTDPRLVAFGYSHEQISMVLAPMAEAKEALGSMGNDNALACISEQPKLLYDYFRQLFAQVTNPPIDPIREEIVMSLECYVGPQGNLLEMKPDQCNRLLLKSPVLSSLELNAIKNIEKVYPKWSVTNIDITFDKAEGIQGYINKIDNICQASSKAIADDHQIIILSDKLTSFNRIPISALIATGAVHHHLVRQKQRSKVAIIIETAEAREVHHACCLVGYGADGINPYLALETLVRMNIENLLKASLTDDQIIKNYKIAVDSGILKVMSKMGISTLASYKGAQIFEALGVDNSVIDRCFAGTASRIKGITFEYIAQDAFSLHDVGYPSRETIKPVALPETGEYHWRDGGDSHINEPAAIASMQDAVKNKNEIAYEAYSKKEYEAIKKCTLRGLLDFDYENSQSIPIDQVEPWTEIVRRFFTGAMSYGSISMEAHSTLAVAMNRLGGKSNTGEGGEDSARSLVHSNGDTMRSSIKQIASGRFGVTSHHLSDADELQIKMAQGAKPGEGGELPGHKVSEQIGKTRHSTPGVGLISPPPHHDIYSIEDLKQLLYDLKCSNPRARTSVKLVSEVGVGIVAAGVAKAGSENILISGGDGGTGAAKLTSIKYAGLPWELGLAESHQTLVLNDIRGRVILQTDGQLRTGRDIAVAALLGAEEWGFATTPLIALGCIMMRR

SEQ ID NO: 710 - protein, 271 aa, Debaryomyces hansenii CBS767
  Dhan VMA N-extein
MNRLSLDAGESEYGQIYSVSGPVIIAENMIGCAMYELVKVGHENLVGEVIRIAGDKATIQVYEETAGVTVGDPVLRTGKPLSVELGPGMMETIYDGIQRPLKAIKEKSQSIYIPRGIDAPSLSRTAQYDFTPGQLKVGDHITGGDIFGSVFENSLLDDHKILLPPRARGTITSIAEKGAYTVEDPVLELEFDGKKHSYSMMHTWPVRVPRPVAEKLAANHPLLTGQRVLDSLFPCVQGGTTCIPGAFGCGKTVISQAISKFSNSDLMVYIG

SEQ ID NO: 711 - protein, 286 aa, Desulfovibrio vulgaris subsp. vulgaris DP4
  Dvul ParB N-extein
MLQTETWPIDRLIPYVRNPRKNDEQVDRMVSAIKEFGFRIPVVAKSDGTVVDGHLRLKAAQRLGMTEVPVALADELTEAQVKAFRLLANRSANWAAWDNDLLALEMEELQAMAYDTSLTGFDIAEVDALLAKPAKDGLTDPDEVPETPTEPASAIGDVWILGKHRLMCGDSTNAEHVARLLAGVQPHLMVTDPPYGVAYDPAWRNEALAGQKTRRTGTVLNDDRADWREAWALFPGDVAYIWHGALHAATVAESLAACGFSIRSQIIWSKERLVLSRGHYHWMHEP

SEQ ID NO: 712 - protein, 1525 aa, Emericella nidulans (anamorph: Aspergillus nidulans) FGSC A4
  Eni-FGSCA4 PRP8 N-extein
MASLPPPPPPGWGASAPPSMPLAPPPPGYQPPADPNVAKYAQKKTEWLRTQRNRFGEKRKGGFVETQKADMPPEHLRKIVKDIGDVSQKKFTNEKRSYLGALKFMPHAVLKLLENMPMPWESTREVKVLYHVNGCLTLVNETPRVIEPVFHAQWATMWVCMRREKSDRRHFKRMRFPPFDDEEPPLSWSENIEDVEPLEPIQMELDESEDSPVYEWFYDHRPLLDTPHVNGPSYRKWNLDLPQMATLYRLSHQLLSDVVDQNYFHMFDLNSFLTAKALNVAIPGGPRFEPLYKDIDPNDEDFSEFNAIDRIIFRAPIRTEYRVAFPFLYNTLPRSVKVSWYSHPQVVYVRTDNHPNLPAFYFDPVINPISSRSVAPKNITVSHEDEIFGPGGYEDDFELPAEVEPFFADEDLYTPETASAIALWWAPHPFNKRSGKMVRAQDVPLVKHWYLEHCPQGQPVKVRVSYQKLLKTYVLNELHRKKPKAQNKQDLLKTLKSTKFFQQTTIDWVEAGLQVCRQGFNMLNLLIHRKNLTYLHLDYNFNLKPVKTLTTKERKKSRFGNAFHLMREILRLTKLIVDAQVQYRLGNIDAFQLADGILYAFNHVGQLTGMYRYKYKLMHQIRSCKDLKHLIYYRFNSGPVGKGPGCGFWAPAWRVWLFFMRGIIPLLERWLGNLLSRQFEGRHSKGVAKTVTKQRVESHFDLELRASVMADLMDMMPEGIKQNKVNTVLQHLSEAWRCWKSNIPWKVPGLPAPIENIILRYVKSKADWWISVAHYNRERIRRGATVDKTVAKKNLGRLTRLWLKAEQERQHNYLKDGPYVSSEEAVAIYTTMVHWLESRKFSPIPFPSVSYKHDTKILILALERLRESYSVKGRLNQSQREELALIEQAYDSPGTTLARIKRFLLTQRAFKEVGIDMNDNYSNINPVYDVEPIEKITDAYLDQYLWYQAEQRHLFPAWIKPSDSEVPPLLTYKWAQGINNLSNVWETADGETNVMIETELSKVYEKIDLTLLNRLLRLIMDHNLADYITSKNNVQLSYKDMNHTNSYGLIRGLQFSGFVFQFYGLMIDLLLLGLQRASEMAGPPQSPNDFLQFRDRATETRHPIRLYTRYIDKIWVFFRFNADESRDLIQRFLTENPDPNFENVIGYKNKKCWPRDCRMRLMRHDVNLGRAVFWDLKNRLPRSITTIEWDDTFASVYSKDNPNLLFSMSGFEVRILPKCRNLNEEFSVKDSVWSLVDNSTKERTAHAFLQVTEEDIQKFNNRIRQILMSSGSTTFTKIANKWNTALIALFTYYREAAVSTVNLLDTIVKCETKIQTRVKIGLNSKMPSRFPPAVFYTPKELGGLGMISGSHILIPASDKRWSKQTDTGITHFRAGMSHDEETLIPNIFRYIIPWEAEFIDSQRVWMEYSQKRMEAQQQNRRLTLEDLEDSWDRGLPRINTLFQKDRSTLSFDKGFRLRAEFKQYQLMKSNPFWWTSQRHDGKLWNLNAYRTDVIQALGGVETILQHTLFKATAFPSWEGLFWEKA

SEQ ID NO: 713 - protein, 437 aa, Ferroplasma acidarmanus, taxon:97393 and taxon 261390
  Fac-Fer1 RIR1 N-extein
MNKVLNTVIKRDGSSVPFDKKKIAMAIFKAMLSVKIGSMEEANKLADYVAQELETSSEVPTVELIQDTVEKVLMTRRINDVSYIAAAKAYILYREKRNTIRQEKEFIGVKDDLKLSLNAVKVLEARYLFKDSEGKIIETPKQMFHRVAVHLGIIQGLYDYISYRKTGKLNEKGTVYSGITKTQNEELERAFNELKKEKAIDGTYTEFIDFIKTKKNMINYWIEKFENMMIKLEYVPNSPTLMNAGGPLGQLSACFVLPVDDSIDSIFDTLKATAEIHKSGGGTGFSFSRLRASDDIVASTKGVASGPVSFMRIFDVTTDVIKQGGKRRGANMGILNYNHPNIMDFINSKDAENKILSNFNISVGVNDEFFEKLDNDENVDLINPRDGKVTGRVKATTLWNSIIDHAWLTADPGMIFLDEINKKNPVKNIGYIESTNP

SEQ ID NO: 714 - protein, 245 aa, Ferroplasma acidarmanus
  Fac-Fer1 SufB (Fac Pps1) N-extein
MIKMEDYNKDEEIEKLTESLKHNKKSDFEFHDTINPVYSTGTGLNRKTVEEISDIKHEPDWMRRSRLKALDIFLSKPMPTWGPDLSGINFDELTYYSKPGETKAKNWDDVPDKIKETFNKLGIPQMEQKYLAGSVAQYDSEGVYGSLRKEWEDKGVIFTDLDTAVQEHPDLVKDYYCRAIPPSDNKFAALNGAVWSGGSFLYVPKNVTIDMPLQTYFRMNGEQSGQFEHTIVVADEGAKVHYIEG

SEQ ID NO: 715 - protein, 256 aa, Frankia alni ACN14a
  Fal DnaB N-extein
MAWPVDRSPDVYEHVFESGSAGERGGCVVSVTEISRGGAGGGAEFERTPPHDLPAEQSVLGGMLLSKDAIADVVEVLRMADFYRPAHGLVYEVIGDLYGRGEPADVISVAAELSRRDLLERVGGPGYMHTLISSVPTAANAGYYARIVAEKAVLRRLAEAGTRIVQLAFGAAPDVSDVVDRAQAAVYEVTERRANDDYLPLGELLNPALEEIESIQGRGEGALTGVPTGFVDLDELTNGLHGGQLWIVAARPAVGK

SEQ ID NO: 716 - protein, 376 aa, Guillardia theta (plastid)
  Gth DnaB N-extein
MKVTKFYNLKAEKHLIIQILVEKDFFLQIYTKIDTQVFYFQSHQILYRSINILHTKKVLINLPNLLSLLHSELVSETVINYLITLFNDRDNFRILNINDSLKVLLDNFIRRELQNSCAKIVSLTFNFNLSVETLLQKSNLLISNINTYNKKVSLKSISQLLLETILEIDKKTNRSTHVLTGFFDLDHILVGLQKSDLIIIAGRPSMGKTAFMLSLVRNVADIQSFPIVIFSLEMSSKQLIYRLISNETNIATSRLREGNISISEWEILNRAMTILSNLNIYLDDENNLDVLDIQSKLASLQQIYGDIGLIVIDYLQLLQYKEKSSQRHIELSYITRYLKLIAKDFNLPLVVLSQLSRNVEFRLNKRPILSDLKESG

SEQ ID NO: 717 - protein, 221 aa, Gloeobacter violaceus, PCC 7421
  Gvi DnaB N-extein
MTSSELDLRIEERLPPQNIDAEETILGGLMMDPEALTRVVEHLRPEAFYVESHQIIYRAALALHAQGRPTDLLTLSAWLEDNKLTEKIGGRTYLRRLTDAAINTINIDGYGRLVSDKYALRMLIRAGQEIAALGFDSATEIPKLLDRAEQTLFAVTQERVQRSLVPASEVLMNIFEQLETRYQDGSNVFGIPTHFYDLDNYTQGLQPSDLIIVAGRPGMGK

SEQ ID NO: 718 - protein, 755 aa, Gloeobacter violaceus, PCC 7421
  Gvi RIR1-2 N-extein
MFVIAQLHLAPLDAELVIRLFAGASTMGMDGVGSLEQGMALSESQRAVLQKYLIGEERTWEDVCRRVARFVAGAEKTPALQREWQERFFSILAPMKMLPGGSILANSDHGTHGLLNCFVLSAEDNIQEIAKLVTDAVLTTKFRGGVGINIGAHGQKGYIRPKGTPFADGKALGPCAVLDMVSETSKKITTGNKCFAAGTLLHTEQGYVPVEQVVAGVGTRVCTHQGFRNISERFDNGEAEVFRVTTRKGYSVEVTANHKMARLDENGDLLLDELSHLQVGDNLLLLLGSNPVTEKVRLQCIPAGYRSSIEIAQPPELDEQLAYLLGYAYGDGCVGRGATYNYLSLAVSHTYPNVRDQLAAIIREKFGLTTKIYSGSGAVWNLLVHSANLLDWLKANGLLKQKAADLAMPEAILRSPSSVVGAFLSGYFDADGCVRGGKGGYGFDCTSKAFVGAVQLLLLAEGIVSNLHTTDRSRQGWRTIYRLNVCGTEFKRRFQTLCCRSAKVVHSPMVLGRDGTGGYPPALVRGASYQRVVAVGGKHLLYTALLKVIEKTRTAGKQALAESLCQHVNYFPDPIVAIESVGTQRVYDIEVEGMHLLSGNGIYTSNSRRGAFMFSMHWKHPDVWEFIQAKTQSVMDARVARDLIERTADLAVDKGLSDVEKNARLDQLKQELTDTWTETHLSPKGTRDRRWHNANISVLVDDEFFDKLDEGNPGVVDLWNQIAQYAHDTADPGLLLSDNARRRSPIKNFITTTNP

SEQ ID NO: 719 - protein, 646 aa, Heterosigma akashiwo virus 01
  HaV01 Pol N-extein
MEIIECQVFSFYPTDFLNNRNFTVFAFGRKEDGSSVGIEIVDFKPFMYLHVPERQQKFWTMNNTEDLRKTLVTEHEIKELRNINTVMKKRLFPYTNKDRELFLMLEFNTEWGIRKCSMSLRENYIYKNFDVYESNISPMLRLMHMREILPSGWVRIKNYDQNNTTKCDTNIRINFMDIIGFERDDIAPCKISSFDIECMSFDAYTQNQSIFPSYERENDTISQIGMATWSYGNNEEVLKRLYTLGNAAEPTDQTIDIIQCDNEGELIIRWFHYIAEIDPDIITGYNIFGFDWEYIKGRVDFLGIEDEILSVASRIDKLKSRFMTKELNSSAFGDNEFKFLEMPGRIEFDFFSYIKREHKLESYKLDNVAYHFTKQKKHDVKPMDIFIKLMGTPEDVREVAEYCVQDTFLIIELMKKLCVIPNLIEMSKVTRVPFEYLILRGQQIKVFSQIFYEAMKENIVIPTNILKLQGKKDRNEEHEKYTGATVLTANSGCYFDCVSGLDFASLYPSIMIAYNMCYTTLVLNERELPREAKIETIEWENNRHRFVQNKEGLLPKILKKLWITRKSTKRLMNETENKEMKTILNGKQLAIKVSMNSVYGFCGVMRGILPCVAIASSVTTKGRQMIEHTQNMVKQLYPDAKVIYGD

SEQ ID NO: 720 - protein, 225 aa, Halorhodospira halophila SL1
  Hhal DnaB-1 N-extein
MQGDGSASDSEALKVPPHDLEAEQAVLGGLMLDNAAWDQVADRLHEEDFYRREHRLVYRAMGELAEGNHPMDVVTLSGWLRQQGKLEEAGGLSYLGGIARETPSAANIRAYADIVRERSVLRQLIRAGSDVAEAAFRPQGRNSEDLLDYAEQTIFQIAEQTGRNRQGFVGMRQLMPQVIDRIDTLYHTQEAVTGLATGFDDLDHMTSGLQDGDLVIVAGRPSMGK

SEQ ID NO: 721 - protein, 331 aa, Haloarcula marismortui ATCC 43049
  Hma CDC21 N-extein
MATAENTELIDRFEEFYRNYYRNEIGELAQKYPNDQKSLYIDWDDLYRFDPDLADDYRTKPEQIQEYAEEALRLYDLPVDVSLGQAHVRVRNLPESEDIRDLRHEHHGNLVAVRGIIRKATDVRPKVIEAAFECQRCGTLTRIPQTAGDFQEPHDCQGCERQGPFRLNTDQSQFIDAQKLRVQESPEGLRGGETPQSIDINIEDDITGHVTAGDHVRVTGILKLDQRGNDNEKSPMFDIYMEGVSVEIEDEQFEDMEITDADKTEIVELSSEPDIYDKMVGAIAPSIYGYEKEKLAMMLQLFSGVTKELPDGSRIRGDLHMLLIGDPGTGK

SEQ ID NO: 722 - protein, 965 aa, Haloarcula marismortui ATCC 43049
  Hma Pol-II N-extein
MREADEQYFETLETQLEAAFDVAERAKERGGDPKPEVEIPTARDMADRVENILGIDGVAERVRELEGQMSREEAALELVEDFVEGTVGDYDSREGKVEGAVRTAVALLTEGVVAAPIEGIDRVELLENDDGTEFINVYYAGPIRSAGGTAQALSVLVADYARALLGIDQYKAREEEIGRYAEEIDLYDKDTGLQYSPKEKETKFIAEHMPIMLDGEATGDEEVSGYRDLERVDSNSPRGGMCLVLAEGIALKAPKIQRYTRNLDEVDWPWLQDLIDGTIGKDEADEGDSAEDANGDDAGEGADDDGGDEADEQAGPPRVEPADKYLRDLIAGRPVFSHPSKSGGFRLRYGRSRNHGFATAGVHPATMHLVDDFLATGTQIKTERPGKAAGVVPVDTIEGPTVRLANGDVRRIDDAEEALAVRNGVEKILDLGEYLVNYGEFVENNHPLAPASYTVEWWEQDLAAAGADVQAMQDSPHIDLADPSAEEAIEWATEYDAPLHPKYTYLWHDVSIEQVCALADAVEDAQVAQADGAYADPEMDGTAGDAHSDDGALVLPRSDAVQQTLEHLLIGHTQDEETITVTDWVPLVRTLGFSRSLERDWTREDLSEHARTYGESESLDAIGVAEDAEREDGQNAIKAINEVAPFQVRERAPTRIGNRMGRPEKSERRDLSPAVHTLSPIGEAGGAQRDVAKATKHADDMSDTPGQVEVEVARRRCPDCGTETHQANCAECSGTTEPVYVCPDCEAEVERDESGRAECGRCETLASPTQYKVLDLQEAYRDALQNVGERETAFEQLKAVKGLTSEEKVPEPMEKGILRAKHDVSAFKDGTVRYDMTDLPVTAVRASELDVSAERLRGLGYTEDIHGDPLTHEDQLVELKVQDIVLSDGAAEHMLQTARFVDDLLEQYYGLERFYEFDDREDLVGELVFGMAPHTSAATVGRVVGFTSAAVGYAHPYFHAAKRRN

SEQ ID NO: 723 - protein, 630 aa, Haloarcula marismortui ATCC 43049
  Hma PolB N-extein
MRGATLAVKLGYVTRWHILSACGNTPSTAGVFMRHLETRPRMSDGTQGTLGDFGQDADAGTDDRPVADEAAAIAGNGGSDDGDTSVVDLDERQFPPVEETVEFVVTQVDYTIEGQGDDESPVVHVFGRTDDNESVHARVFDFQPYFYAPTDSVTEDGLRQYDSIAGWEEADADGDPYESIRGERLTKIFGQTPRDVGQIRDDFDHYEADILFPNRLLIDKDITSGVRVPARELDDGSLKVHHEEITPVEAHADPRVNTFDIEVDDRQGFPEDGEEPIICLTSHDSYRDEYVVWLYESPDGIDGPEALAGYDPIREDFEADVRVFDEEEAMLEAFVDYIVDTDPDVLTGWNFDDFDAPYFLDRLEELQSYNHDFDLQIDRLSRVDEVWRSGWGGPDIKGRVVFDLLYAYKRTQFTELESYRLDAVGEQELGVGKERYTGDIGDLWEQDPEQLLEYNLRDVELCVELDREQDIIDFWDEVRTFVGCKLEDATTPGDAVDMYVLHKLHGEFALPSKGQQESEDYEGGAVFDPITGVRENVTVLDLKSLYPMCMVTTNASPETKVDPETYDGDTYRAPNGTHFRKEPDGVIREMVDELLSEREEKKAERNSFDPDNPEYERFDRQQAAVKVIMN

SEQ ID NO: 724 - protein, 492 aa, Haloarcula marismortui ATCC 43049
  Hma TopA N-extein
MRLIITEKDNAARRIAEILSEGGASANRRNGVNVYRWGNTRVVGLSGHVVGVDFPEEYNDWRDVEPVELIDADVTKEPTQENIVTTLKQLAREADEATIATDYDREGELIGKEAYELIREETDAPVDRVRFSSITEREVRDAFANPDDIDFDLAAAGEARQIIDLVWGAALTRFLSLSARQLGDDFISVGRVQSPTLKLIVDREREIQAFDPEDYWEIFADLQKNGSGFEAQYFYDDDGKEAERVWVEDDADDAYADLTNVDAATVTSVRRRTRTDSPPTPFNTTAFISAASSLGYSAQQAMSIAEELYTTGYITYPRTDNTVYPDDLEEDALLDEFVGAGHFGEDAEALLEQDDITATEGDEETTDHPPIHPTGEIPPKADLSDDEWEIYELVVRRFFATVAEAATWEHLRVVADAGGRSLKANGKRLVEPGYHEVYPYSSASENHVPDVEEGEELAISEVRMEAKQTQPPRRYGQSRLIQTMEDKGLGTK

SEQ ID NO: 725 - protein, 282 aa, Halobacterium salinarum NRC-1
  Hsa-NRC1 CDC21 N-extein
MDPDLADDYISHPDQLQEAAEEALRVYDLPVDVSLGQAHVRVHGLAEHTDIRAIRAEHLNTMVSIQGMVRKATDVMPKIQRAVFVCQRCGTDTEVPQGDAGFQEPYQCESCERQGPFKLDPDRSEFVDSQKLRIQESPEGLGGGETPQSIDVHVEDDATGNVTPGDHVTVTGVLRLDQSEEATDSPVFEHYMEGSSVVIEDAEFDELNISEADKEEIVALSDHEEIHEEMVDSMAPAIYGHREAKLAMMLQLFSGVTKHLPDKSRIRGDLHMLLIGDPGTGK

SEQ ID NO: 726 - protein, 925 aa, Halobacterium salinarum NRC-1
  Hsa-NRC1 Pol-II N-extein
MRPTDETYFETLETGLDDAFEVAEAARERGEDPTPNVEIPVAKDMADRVENILGIDGVAERVRDLDGEMSREEAALELVADFVDGRVGDYDTDAGKIEGAVRTAVALLTEGVVAAPIEGIDRVEVNDNDDGTQYVAVYYAGPIRSAGGTAQALSVLVADYARAMLGIDAFKPRDDEIERYAEEVDLYDSETGLQYSPKDAETTFITEHCPVMLDGEATGNEEVDGFRDLERIDTNSPRGGMCLVLAEGIALKAPKIQRYTRNLDEVAWPWLQDLIDGTIGADDADEDTPDAGSDSDATDEGDAPSASTDAEEPPRAAPSDKFLRDLIAGRPVFGHPSKNGGFRLRYGRARNHGNATAGVHPATMHLLDDFLATGTQIKTERPGKAAGIVPVDSIEGPTVKLANGDVRHINDPADALDVRNGVAEILDVGEYLVNYGEFVENNHELAPASYAPEWWIQDLDAAGADVQALRDSPYVDLTAPTADQAMAWATDYDAPLHPAYTYLWHDIDVEQFRALADAVADAHTDASDDDDRGVLVLDHTTTVRETLEALLVTHHQGDDTIRVDDWLPLARSLGVTESLDREWETLSEAAAEWPNAVRAVNEVAPFSVQERAPTRIGNRMGRPEKSESRDLSPAVHTLFPIGDAGGSQRDVADAARYAPDMSDTPGEIPVRVGDRVCPSCDEHTYESRCPDCGDWTDPHYECRDCGAVATPDESGRVECPNCGRDLDNVTTQVIDINDEYHGALRAVGERENAFDQLKGVKGLLSAEKTPEPMAKGVLRAKHDVTAFKDGTVRYDMTDLPVTAVTPAELDVTAGQFRELGYNQDIHGDPLEHDDQLVELRVQDVVLSDGAADHMLKTADFVDDLLTQYYGLDAFYDLDDRDDLVGELVFGMAPHTSAAVVGRVAGFTSASVGYAHPYFHAAKRRN

SEQ ID NO: 727 - protein, 655 aa, Haloferax volcanii DS70
  Hvo PolB N-extein
MTYIDKCLSVVPGAVRGNAGVFSRAAEAIAMTQTGLTDFGGNDTDGAGDARPDEEAAIVAGDAGQHVSDVVDTDEVRFPDPDGTVELAVTQVDYTIEGAGRDEYPVIHIFGRTADDETEHVRVLGFRPYFYAPTDSLDDGDLDKDVITGTEDGYESIRGEELTKIFGRTPRDQGQIRDEFDHYEADILFPNRLLIDKDIKGGVSVPERRLDDGTIQIPHQEVAPAEVDANLRVNTFDIEVNDRNGFPEEGEEPIICLTSHDSYRDEYVVWHAVADEGLGKRPDTLPNYDFLGEDGDVEVRTFDEEAAMLDAFLTYIEETDPDILTGWNFEDFDAPYFLDRLEEVDERTDLNLDYNRISRLGEVWRGGWGGPDIKGRVVFDLLYAYKRTQFTELESYRLDAVGELELDAGKERYSGDIGDLWEEDPERLLEYNLRDVELCVEIDRKQDIIAFWDEVRTFVGCKLEDAPTPGDTVDIYVLHKVHGEFALPSKGKQESEDYEGGAVFDPITGVKENVTVLDLKSLYPMCMVTINASPETKVDPERYDGEMFRAPNGTHFQQEPDGMIREMVDELLTEREEKKSLRNSHDPGSSEYEQFDRQQAAVKVIMNSLYGVLGWDRFRLYDKEMGAAVTATGRKVIEFTEQAANQIGYDVAYGD

SEQ ID NO: 728 - protein, 433 aa, Haloquadratum walsbyi DSM 16790
  Hwa GyrB N-extein
MSHETEYGAGDIQVLEGLEAVRKRPAMYIGSTDSRGLHHLVYEVVDNAIDEALAGHCDQIDVTLHEDGSVSVADNGRGIPVDTHEQHDIPAVEVIMTVLHAGGKFDNKSYQVSGGLHGVGVSVVNALSRWLEVEIKRDGALWRDRFEYGEPQPGAFERVRDLDPDEETGTTIRFWPSDDIFETTEFEFSTLENRLRELAFLNSGVEICINGETDDINSKFCFNGGIREFVKYLDETKTVLHDSVVHYQNEQDGIEVEVALQATEELQGSIHAFANNINTREGGTHLTGFKTALTRVINDYGREHNLLDGFDSLQGEDVREGLTAVVSIKHPDPQFEGQTKTKLGNSDVRGIVESTTHERLGTYLEENPDVAKVIVRKAVEAAKARKAAKQAEELTRRKSALESTSLPGKLADCQSRDPAESELFIVEGDSAGG

SEQ ID NO: 729 - protein, 571 aa, Haloquadratum walsbyi DSM 16790
  Hwa MCM-2 N-extein
MAQAPQDPQDLTDRFIQFYRKYYRDDIGTLAQQFPHEKRSLYIDYHDLYAFDVELAEDYRREPDQLREYAEEALRLYDLPADVKLGRAHVRMRSLPDTVDIRNIRVHDDHIGHLIAVQGIVRKATDVRPKITEAAFECQRCGTMTYIPQSDSGFQEPHECQGCERQGPFDVDFDQSEFIDAQKVRVQESPEGLRGGETPQSIDVDLEDDATGAVTAGDHVTTTGVLHIEQQTSGNEKTPIFDIYMDGRSVEIEDEEFDDMDITDEDVAEIVELSNDPDIYEKMVESVAPSIYGYDEEKLAMILQLFSGVTKHLPDGSRIRGDLHMLLIGDPGTGKCVSGETDIALVEGKTATIGELVESALTDPKPVDDGVWDTADFTVTSAIETGELIERDVTRVWKRQSPETMRQIQIAGGRSVTVTPSHPVFVEHNGSYTARRADSLSAGESVAIADDVADSHPISVDNTANTLNPRSMSTPGITTDGGLYRTGSDGGIVHAEVGKEDVTDCLTTDRITAVKTVTPTAEWVYDLEVEGTHAYLTNGVLSHNSAMLQYIRNIAPRSVYTSGKGSSSAGL

SEQ ID NO: 730 - protein, 1131 aa, Haloquadratum walsbyi DSM 16790
  Hwa MCM-3 N-extein
MAQAPQDPQDLTDRFIQFYRKYYRDDIGTLAQQFPHEKRSLYIDYHDLYAFDVELAEDYRREPDQLREYAEEALRLYDLPADVKLGRAHVRMRSLPDTVDIRNIRVHDDHIGHLIAVQGIVRKATDVRPKITEAAFECQRCGTMTYIPQSDSGFQEPHECQGCERQGPFDVDFDQSEFIDAQKVRVQESPEGLRGGETPQSIDVDLEDDATGAVTAGDHVTTTGVLHIEQQTSGNEKTPIFDIYMDGRSVEIEDEEFDDMDITDEDVAEIVELSNDPDIYEKMVESVAPSIYGYDEEKLAMILQLFSGVTKHLPDGSRIRGDLHMLLIGDPGTGKCVSGETDIALVEGKTATIGELVESALTDPKPVDDGVWDTADFTVTSAIETGELIERDVTRVWKRQSPETMRQIQIAGGRSVTVTPSHPVFVEHNGSYTARRADSLSAGESVAIADDVADSHPISVDNTANTLNPRSMSTPGITTDGGLYRTGSDGGIVHAEVGKEDVTDCLTTDRITAVKTVTPTAEWVYDLEVEGTHAYLTNGVLSHNSAMLQYIRNIAPRSVYTSGKGSSSAGLCVTGETRIHTTDGFVPLKQLATQHHPKKVTTETAAAYERELYTVDPTTQSAEVTQSKSSHVWRMPEKHCRRIRTASGKQLEASVNTPVLTVDDAEIKWKPISAIESNDSVVIPQYNNVERSSVSITDIFEFTQEQLKLTEKSITILRTEIVSQYQNIAAAADALNIDVNSVEALITGQPVVSDVIDRVCDAISVSSEDITIHHVIGPTGTAIELPEVLNDDLLYLLGAAFACGNIMTGETCEERWIQFHAPEESIRSHIIDAAVATFGSESIQTDTEQANTVQVISATVTRLFETLGLEQITDAAPREIHPRLTAVSGADAFIRGLFDTGGRIDNKNTPQIAIGTASEPLAEQIQLLLETYGIGSCRDTGDQSHTGTSTTQGQYLTLTGSDAQAYRTTIGTRTDSGSSWDRQVSSSHADSEPSVRSTTTDTRKRTDMHEHEIISAGDVSTVSSVESDGGTPQMPRSNIEPQSIGYDYESSRVNEIQTETVVEAVNTGKKEVFDLTVPNTQNFIGGGIVTHNTAAAVRDDFGDGQQWTLEAGALVLADKGIAAVDELDKMR

SEQ ID NO: 731 - protein, 1356 aa, Haloquadratum walsbyi DSM 16790
  Hwa MCM-4 N-extein
MAQAPQDPQDLTDRFIQFYRKYYRDDIGTLAQQFPHEKRSLYIDYHDLYAFDVELAEDYRREPDQLREYAEEALRLYDLPADVKLGRAHVRMRSLPDTVDIRNIRVHDDHIGHLIAVQGIVRKATDVRPKITEAAFECQRCGTMTYIPQSDSGFQEPHECQGCERQGPFDVDFDQSEFIDAQKVRVQESPEGLRGGETPQSIDVDLEDDATGAVTAGDHVTTTGVLHIEQQTSGNEKTPIFDIYMDGRSVEIEDEEFDDMDITDEDVAEIVELSNDPDIYEKMVESVAPSIYGYDEEKLAMILQLFSGVTKHLPDGSRIRGDLHMLLIGDPGTGKCVSGETDIALVEGKTATIGELVESALTDPKPVDDGVWDTADFTVTSAIETGELIERDVTRVWKRQSPETMRQIQIAGGRSVTVTPSHPVFVEHNGSYTARRADSLSAGESVAIADDVADSHPISVDNTANTLNPRSMSTPGITTDGGLYRTGSDGGIVHAEVGKEDVTDCLTTDRITAVKTVTPTAEWVYDLEVEGTHAYLTNGVLSHNSAMLQYIRNIAPRSVYTSGKGSSSAGLCVTGETRIHTTDGFVPLKQLATQHHPKKVTTETAAAYERELYTVDPTTQSAEVTQSKSSHVWRMPEKHCRRIRTASGKQLEASVNTPVLTVDDAEIKWKPISAIESNDSVVIPQYNNVERSSVSITDIFEFTQEQLKLTEKSITILRTEIVSQYQNIAAAADALNIDVNSVEALITGQPVVSDVIDRVCDAISVSSEDITIHHVIGPTGTAIELPEVLNDDLLYLLGAAFACGNIMTGETCEERWIQFHAPEESIRSHIIDAAVATFGSESIQTDTEQANTVQVISATVTRLFETLGLEQITDAAPREIHPRLTAVSGADAFIRGLFDTGGRIDNKNTPQIAIGTASEPLAEQIQLLLETYGIGSCRDTGDQSHTGTSTTQGQYLTLTGSDAQAYRTTIGTRTDSGSSWDRQVSSSHADSEPSVRSTTTDTRKRTDMHEHEIISAGDVSTVSSVESDGGTPQMPRSNIEPQSIGYDYESSRVNEIQTETVVEAVNTGKKEVFDLTVPNTQNFIGGGIVTHNTAAAVRDDFGDGQQWTLEAGALVLADKGIAAVDELDKMRCVTGETLVSLADGRHVPIASLATDASKTGTIESKPDGVGRTIRGIDDLTVWTMTENKQLTGRPVTAIHQYDSPDTLWQITLSDGSEVTTTADHPFIIINRDGVHECPAKHLSENDEVYTPADGYTASTSDITPDSETSSDSLPDGGITQTRTNQYSSHRCDADLSDDELLDITTKTIKSIETVHPSDGTDVYDLTVSGTHNFVANGMIVHNSEDRSAMHEALEQQ

SEQ ID NO: 732 - protein, 335 aa, Haloquadratum walsbyi DSM 16790
  Hwa MCM-1 N-extein
MAQAPQDPQDLTDRFIQFYRKYYRDDIGTLAQQFPHEKRSLYIDYHDLYAFDVELAEDYRREPDQLREYAEEALRLYDLPADVKLGRAHVRMRSLPDTVDIRNIRVHDDHIGHLIAVQGIVRKATDVRPKITEAAFECQRCGTMTYIPQSDSGFQEPHECQGCERQGPFDVDFDQSEFIDAQKVRVQESPEGLRGGETPQSIDVDLEDDATGAVTAGDHVTTTGVLHIEQQTSGNEKTPIFDIYMDGRSVEIEDEEFDDMDITDEDVAEIVELSNDPDIYEKMVESVAPSIYGYDEEKLAMILQLFSGVTKHLPDGSRIRGDLHMLLIGDPGTGK

SEQ ID NO: 733 - protein, 966 aa, Haloquadratum walsbyi DSM 16790
  Hwa Pol-II-1 N-extein
MRDADKQYFETLESHLEQAFARARQAKGQGYDPKPEVEIPVARDMADRVENILAIPDVAERIRELDDERSREEVALELVTDFVEGTVGDYDTREGKIEGAVRTAVALLTEGVVAAPIEGIDRVEILSDDDGSEFVNVYYAGPIRSAGGTAQALSVLVADYARSLLDIDEYSARTDETERYAEEVSLYDRETGLQYSPKDKETKFITKHMPIMLDGEATGNEEVSGYRDLERVDTNAARGGMCLVLAEGIALKAPKIQRYTRQLAEVEWPWLQDLIDDTIGSDEHSNNSVKNGEADIVKTDKDTNESETEDGIDNDDYNDSGLEPANSPRADATNKYLRDLIAGRPVFGHPSAAGAFRLRYGRARNHGFATAGVHPATMHIVDDFIATGTQLKTERPGKAGGVVPVDSIKGPTVRLANGDVRCINDPEEAEKLQNGVEKILDLGEYLVNFGEFIENNHPLAPAAYVFEWWIQEFEASNADVQALRDDPTVDLESPTFENAMRWAKKHDIPLHPAYTYLWHDISVTEFDHLADAVAAGEITMNEVSDTNSASGNTSLRANTNTDDTLTIDTTPAIRETMERLLIEHHQDSDSIHIPAWRALALSLGIKIESDNDTGIGDRMWSLTDLSKHARKQDDGKSAIAAVNEVAPFQVRERAPTRIGSRMGRPEKSEDRDLSPAVHTLFPIGEAGGNQRNLSDAAQSFGDNTERGQISVQLGKRRCPYCETVGFELQCAECGRHTEPQFVCRECESVLSPDESGRVHCDRCERDVTSAEWQDIDLHQRYRDALDRVDERESSFEILKGVKGLTSSNKTPEPLEKGILRAKHGVSSFKDGTVRYDMTDLPVTAVRPKELDVTAAHFRELGYQTDINGNPLQFDDQLVELKVQDIVLPDGAAEHMMKTADFVDDLLEQFYELNQFYQIDERDDLIGELVFGMAPHTSAAVVGRIVGFTSAAVGYAHPYFHAAKRRN

SEQ ID NO: 734 - protein, 1524 aa, Haloquadratum walsbyi DSM 16790
  Hwa Pol-II-2 N-extein
MRDADKQYFETLESHLEQAFARARQAKGQGYDPKPEVEIPVARDMADRVENILAIPDVAERIRELDDERSREEVALELVTDFVEGTVGDYDTREGKIEGAVRTAVALLTEGVVAAPIEGIDRVEILSDDDGSEFVNVYYAGPIRSAGGTAQALSVLVADYARSLLDIDEYSARTDETERYAEEVSLYDRETGLQYSPKDKETKFITKHMPIMLDGEATGNEEVSGYRDLERVDTNAARGGMCLVLAEGIALKAPKIQRYTRQLAEVEWPWLQDLIDDTIGSDEHSNNSVKNGEADIVKTDKDTNESETEDGIDNDDYNDSGLEPANSPRADATNKYLRDLIAGRPVFGHPSAAGAFRLRYGRARNHGFATAGVHPATMHIVDDFIATGTQLKTERPGKAGGVVPVDSIKGPTVRLANGDVRCINDPEEAEKLQNGVEKILDLGEYLVNFGEFIENNHPLAPAAYVFEWWIQEFEASNADVQALRDDPTVDLESPTFENAMRWAKKHDIPLHPAYTYLWHDISVTEFDHLADAVAAGEITMNEVSDTNSASGNTSLRANTNTDDTLTIDTTPAIRETMERLLIEHHQDSDSIHIPAWRALALSLGIKIESDNDTGIGDRMWSLTDLSKHARKQDDGKSAIAAVNEVAPFQVRERAPTRIGSRMGRPEKSEDRDLSPAVHTLFPIGEAGGNQRNLSDAAQSFGDNTERGQISVQLGKRRCPYCETVGFELQCAECGRHTEPQFVCRECESVLSPDESGRVHCDRCERDVTSAEWQDIDLHQRYRDALDRVDERESSFEILKGVKGLTSSNKTPEPLEKGILRAKHGVSSFKDGTVRYDMTDLPVTAVRPKELDVTAAHFRELGYQTDINGNPLQFDDQLVELKVQDIVLPDGAAEHMMKTADFVDDLLEQFYELNQFYQIDERDDLIGELVFGMAPHTSAAVVGRIVGFTSAAVGYAHPYFHAAKRRNCFHPETKIWFRDTDNEWHHETIQTFVEDRLDDPEIDAVGTLVQEVDDNTDREISVPSIDDNGNERLQSVTAVSKHRAPNHLVQIETISGREITITPDHEMHIFEQGNLVSKQASKITSGEYAVIPKRLQTISPSSHTPQHDLLREFLTRDELTADRLIIHTSDPVRLCNRVFPEEVTSCKDAVEIMQNTACHLDKNKETLIGWLGEGRIPVALLRGFVETDEALLMSIPDDVQIGLRGEKVRIDRHIGFTEELTSLLGYYAAAGIVHTQTNPISYESAQQEQSRITFYNIDTQTQTDLLNALNSVFEIEPIQYNLDGEILGVPGELIRRVFDTVFDVGTQPSHKRIPQALFDASESHITSYLRCFFSTHDSLTTDTRDISATTVSREFKEDIIAALRRLGITAEVTTQQSRSVPEVLPDWYAIDDITHHDADNSLNLTRSYVISIASSDAVTLQRDRQAQEQIKYDAQGLIANNNAIHQSRQVTDGGRKDYITEPITDIEYVDADIDYTYCLTVSETHSLIVNDLSQKQCDGDEDCVMLLMDGLLNFSREYLPDKRGG

SEQ ID NO: 735 - protein, 318 aa, Haloquadratum walsbyi DSM 16790
  Hwa PolB-1 N-extein
MPKFLANSAKTVDMKQAGLSDNWSDAADSGAGTSNARPDAEALAVAGKDTQHVSAIVDADEVRFPDADGSVELLVTQVNYSVERAGHEEYPVVHIFGRTADDTAHHVRVLGFEPYFYAPTESLNDDLLDNDAITRTESGYESIRGEELTKICTRTPRDVGQIRDDFDHYEADILFPNRLLIDKDIKSGIRVPARRLADKPQTIQIPHTEIEPVDVEANLRVNTFDIEVDDRSGFPEDGEEPIVCLTSHDSERDEYITWLYNAPNAAEDTDPPDSLDRDDSIRSDTTADVRTFNREDAMLDAFVSYIEQTDPDILTGWN

SEQ ID NO: 736 - protein, 1437 aa, Haloquadratum walsbyi DSM 16790
  Hwa PolB-3 N-extein
MPKFLANSAKTVDMKQAGLSDNWSDAADSGAGTSNARPDAEALAVAGKDTQHVSAIVDADEVRFPDADGSVELLVTQVNYSVERAGHEEYPVVHIFGRTADDTAHHVRVLGFEPYFYAPTESLNDDLLDNDAITRTESGYESIRGEELTKICTRTPRDVGQIRDDFDHYEADILFPNRLLIDKDIKSGIRVPARRLADKPQTIQIPHTEIEPVDVEANLRVNTFDIEVDDRSGFPEDGEEPIVCLTSHDSERDEYITWLYNAPNAAEDTDPPDSLDRDDSIRSDTTADVRTFNREDAMLDAFVSYIEQTDPDILTGWNCLPSDARIQMADGTETEIHAVEIGDNVIGTTDQRSVTATVTNKWKSEREIYEFSLADGTSLRSSGDHRIMISDSNTVDWKSGSDIEQGEYVLKPRQLPVDDPTIPIINNLLSSESANIIDTLEVDALDSTGRSMNIHSSNPRESIAHTATLSMADGGDQKQRNETTNNTLDLNRTVTKQDLYAIGRVLHNRITPRQDGITPVSQATLIDNSVLSSPSPANTQHQSDSILTEVISSLRGLVSPGAHAIDFSAIYEMPKSHIAQFLAGTLDGSETGETTSSNLTVTTESASIARWYAQLYRRLGIYAQYQADAVHIANNACDLQRLSDAILPRLRCSDTIDYVKTQIDTVCDSSLKHSRASSTGLSGDEANIRQFSDDGPQNKSYAAQPDSSDYDDDWNAYVFVEIEAITLNGTETTYDIETTTHNFVADDCLVHNCDDFDVPYFLDRMEVINPQSEYTLTSERFSRIDEVWRSGWGGPNIKGRVVFDLLYAYKRTQFTELESYRLDAVGELELDVGKERYPGDIGDLWEQDPQQLLEYNLRDVELCVEIDRKQDIIAFWDEVRSFVGCKLEDATTPGDTVDIYILHEAHDRFALPSKGRTDAEDYEGGAVFDPATGVKEMVGVLDLKSLYPMAMTTINASPETKVDPKNYDGDTFRAPNGTHFRRSPDGIIREMIDDLLAEREEKKSLRNEYDPGESVYEQYDRQQTAVKVIMNCFTPDTNVLTPNGVRNIRDLTVGDSVYSLNPETMQMEIKPVTQTHEYPDYQGDLIDIQTNEIDFRVTPNHRMLVEATGTDTTSTNDYDFIEAGNLDISSRYELPHGWSVDHTDSLGAYIDLITLLREQSDTYNVLSDGGMTTAATADINHNNVTRRVDSDTFVSLIGWYVATGRVSRTQNGSDRVYLQLSQTNTKARTQLTMLLDELGVDWQADNEKIHFVSHVWTELFDTTCGRTEKNKHIPELIFDASASQKRAFFDAIINGSGVKNDDSYQYHTSSEDLRDDILRLCVHIGIVARYDYINDESWRIECTETANPDFTLTHSGRQSTAEDGVYCVTVADNQTLLAGRNGTFQWTGNSLYGVLGWDRFRLYDKEMGAAVTATGRDVIEHTADAASDLDKSVIYGD

SEQ ID NO: 737 - protein, 201 aa, Haloquadratum walsbyi DSM 16790
  Hwa RIR1-1 N-extein
MDTHDVDADELELPIKRTTGETIEQRLTDNAYHNILPARYLRKDAKGDLAESQEEIFERVAQNVALAEAVFEADKQDTEITVTPDQLKPDHPRRDELAEEVFGAGADAADTVTTTLSVYNVNKFAYETIVPELPDEVQHHVKSVADEFEDLMSRLSFMPNSPTLMNAGDELQQLSACFVDSPSDDISDIHQTAKEAAEVFQ

SEQ ID NO: 738 - protein, 1036 aa, Haloquadratum walsbyi DSM 16790
  Hwa RIR1-2 N-extein
MDTHDVDADELELPIKRTTGETIEQRLTDNAYHNILPARYLRKDAKGDLAESQEEIFERVAQNVALAEAVFEADKQDTEITVTPDQLKPDHPRRDELAEEVFGAGADAADTVTTTLSVYNVNKFAYETIVPELPDEVQHHVKSVADEFEDLMSRLSFMPNSPTLMNAGDELQQLSACFVDSPSDDISDIHQTAKEAAEVFQCLTADSTVMLKEKGMVSVSEVETGDQIAQRSDTGFQYKPVEETHAYENAETLTVTLTNGCSIRGTPNHRLMVDDEWTRIDEIQPDQEVHYTLGWLRETNQSPPKLHSQSHTTVNQTADSISPDSSEPIELSESENADTGNRHNSAVAVKQSRTQTQLISDEVVSRPEHTRRPDQLSEELAELLGLWIDTGLWHQSGVQFNVERENIAEYIDQLSQQLFDTPAAISDTDGTYTVDITDHKLKEWWKANFGGKPDGTQSSYVPQMIKEAPTNVIEAFLRGCFTAEGGLRKDMRPRLCTSSEDSIDDIAVLMMGLGYPVEKSVIRNADGEPYYSVMPATDDGLSAFLHDVGFIDERREIGLSNIESSDSRALNNTHKIEVESIVESPPATVYDITVADNHEYVTDGIISHNSGGGMGYAFWKLRPYGDSVGSTGGIASGPITFMRTYDQMCETIAQGGARRGAQMGVMRISHPDVIQFIHAKNKDVSLAHSLRLNDPDDFTHTSFADALEEARELIDEEGRVPEHLRNAVEGHLSNFNISVGVTDEFMEALFADEEFTFTNPRTEDPHIATPETKELYELHDLGEHVEVGEELSVPAEELWDHIVSGAHENGEPGVIYLERVNKEHSFDVEKHSEHEILATNPCGEQPLEEYEACNLGHINLSTLADKDAPDWRVWYDNNGDAYNNLDDAAEAFIYEAIDMNAFNRRIESGTRFLENVVTMSDFPVDEIEATVRDMRKIGLGIMGLAQLYIQIGVRYGSQEANAIAEQLMTHINHESKWASHELAKERGTFNDWTESKYANPTEYREWFEHHTGLDASEWEDGFLIRNHNTTTIAPTG

SEQ ID NO: 739 - protein, 87 aa, Haloquadratum walsbyi DSM 16790
  Hwa rPol A'' N-extein
MTETITDASEYEHITDDIAAIVDDYNLPESLQHRIYETIEERGEVPIEKVDDIAQAIASRYEDSRVDAHDPVGTVSAQSIGEPGTQM

SEQ ID NO: 740 - protein, 116 aa, Haloquadratum walsbyi DSM 16790
  Hwa Top6B N-extein
MTSFQSTLGEEGEIADELAESQRAISIAEFFEKNKHMLGFDSGARGLVTAVKEAVDNALDATEEAGIKPDISIEIRESGDYYTLIVEDNGPGITREQVPKVFGKLLYGSRFHAREQ

SEQ ID NO: 741 - protein, 271 aa, Invertebrate iridescent virus 6; identical to SEQ ID NO: 694
  IIV6 RIR1 N-extein

SEQ ID NO: 742 - protein, 18 aa, Kazachstania exigua, formerly Saccharomyces exiguus, strain CBS379
  Kex-CBS379 VMA N-extein
ISQSLSKYSNSDAIIYVG

SEQ ID NO: 743 - protein, 276 aa, Kluyveromyces lactis IFO1267
  Kla-IFO1267 VMA N-extein
ARKELKRVTLEDHEESEYGAIYSVSGPVVIAENMIGCAMYELVKVGHDNLVGEVIRIDGEKATIQVYEETTGVTVGDPVLRTGKPLSVELGPGLMETIYDGIQRPLKAIKDISQSIYIPRGIDAPALSRTIKWQFTPGKFKVGDHISGGDIFGSIFENSLLDDHKILLPPRARGTVTWIASAGEYTVDEKILELEFDGVKYDYSMYHTWPVRVPRPVTEKLSADYPLLTGQRVLDSLFPCVQGGTTCIPGAFGCGKTVISQSLSKYSNSDAIIYVG

SEQ ID NO: 744 - protein, 283 aa, Kluyveromyces lactis NRRL Y-1140
  Kla-NRRLY1140 VMA N-extein
MAGALENARKELKRVTLEDHEESEYGAIYSVSGPVVIAENMIGCAMYELVKVGHDNLVGEVIRIDGEKATIQVYEETTGVTVGDPVLRTGKPLSVELGPGLMETIYDGIQRPLKAIKDISQSIYIPRGIDAPALSRTIKWQFTPGKFKVGDHISGGDIFGSIFENSLLDDHKILLPPRARGTVTWIASAGEYTVDEKILELEFDGVKYDYSMYHTWPVRVPRPVTEKLSADYPLLTGQRVLDSLFPCVQGGTTCIPGAFGCGKTVISQSLSKYSNSDAIIYVG

SEQ ID NO: 745 - protein, 416 aa, Kineococcus radiotolerans SRS30216
  Kra DnaB N-extein
MTAYDEPPADFDAPDDGPSRGRRGGRKDRGADGGGASFDRMPPQDIAAEQGVLGGMMLSKDAIADVVEVLKGNDFYRPAHELVYEAILDLYSRGEPADPVTVSAELTNKGELTRIGGTPYLHDLISTVPTAANAAFYARIVRERAVLRRLVEAGTRIVQMGYGADGMDVDAIVNSAQAEVYAVTETRTKEDYAVLGDVIEGTIDEIEASSHRGEGMVGVPTGFADLDSLTNGLHPGQMIVIAARPAVGKSTLGLDIARAASIKHGLASVIFSLEMGRNEIAMRLLSAEARVPLQKMRKGNMDDADWTRFARTMGAINEAPLYIDDSPNMSLMEIRSKCRRLKQRADLKLVIVDYLQLMTSGKRVESRQQEVSEFSRALKLLAKEIEVPVIALSQLNRGPEQRTDKRPMVSDLRESG

SEQ ID NO: 746 - protein, 34 aa, Listonella pelagia phage phiHSIC
  LP-phiHSIC helicase N-extein
MAFELRPYQKEAVKKVIEHVKICLDPCVVDAATG

SEQ ID NO: 747 - protein, 232 aa, Mycobacterium avium
  Mav DnaB N-extein
MAVVDDLTSGMDSSSPSEDFGRQPPQDLAAEQAVLGGMLLSKDAIADVLERLRPGDFYRPAHQNVYDAILDLYGRGEPADAVTVAAELDRRNLLRRIGGAPYLHTLISTVPTAANAGYYATIVAEKALLRRLVEAGTRVVQYGYAGAEGADVAEVVDRAQAEIYEVAERRTTEDFVPLEDLLQPTMDEIDAIASNGGVARGVPTGFTELDEVTNGLHAGQMIIVAARPGVGK

SEQ ID NO: 748 - protein, 232 aa, Mycobacterium avium 104; identical to SEQ ID NO: 747
  Mav-104 DnaB N-extein

SEQ ID NO: 749 - protein, 232 aa, Mycobacterium avium subsp. paratuberculosis str. k10; identical to SEQ ID NO: 747
  Mav-PT DnaB N-extein

SEQ ID NO: 750 - protein, 399 aa, Mycobacterium bovis subsp. bovis AF2122/97
  Mbo-AF2122 DnaB N-extein
MAVVDDLAPGMDSSPPSEDYGRQPPQDLAAEQSVLGGMLLSKDAIADVLERLRPGDFYRPAHQNVYDAILDLYGRGEPADAVTVAAELDRRGLLRRIGGAPYLHTLISTVPTAANAGYYASIVAEKALLRRLVEAGTRVVQYGYAGAEGADVAEVVDRAQAEIYDVADRRLSEDFVALEDLLQPTMDEIDAIASSGGLARGVATGFTELDEVTNGLHPGQMVIVAARPGVGKSTLGLDFMRSCSIRHRMASVIFSLEMSKSEIVMRLLSAEAKIKLSDMRSGRMSDDDWTRLARRMSEISEAPLFIDDSPNLTMMEIRAKARRLRQKANLKLIVVDYLQLMTSGKKYESRQVEVSEFSRHLKLLAKELEVPVVAISQLNRGPEQRTDKKPMLADLRESG

SEQ ID NO: 751 - protein, 252 aa, Mycobacterium bovis subsp. bovis AF2122/97
  Mbo Pps1 N-extein
MTLTPEASKSVAQPPTQAPLTQEEAIASLGRYGYGWADSDVAGANAQRGLSEAVVRDISAKKNEPDWMLQSRLKALRIFDRKPIPKWGSNLDGIDFDNIKYFVRSTEKQAASWDDLPEDIRNTYDRLGIPEAEKQRLVAGVAAQYESEVVYHQIREDLEAQGVIFLDTDTGLREHPDIFKEYFGTVIPAGDNKFSALNTAVWSGGSFIYVPPGVHVDIPLQAYFRINTENMGQFERTLIIADEGSYVHYVEG

SEQ ID NO: 752 - protein, 251 aa, Mycobacterium bovis subsp. bovis AF2122/97
  Mbo RecA N-extein
MTQTPDREKALELAVAQIEKSYGKGSVMRLGDEARQPISVIPTGSIALDVALGIGGLPRGRVIEIYGPESSGKTTVALHAVANAQAAGGVAAFIDAEHALDPDYAKKLGVDTDSLLVSQPDTGEQALEIADMLIRSGALDIVVIDSVAALVPRAELEGEMGDSHVGLQARLMSQALRKMTGALNNSGTTAIFINQLRDKIGVMFGSPETTTGGKALKFYASVRMDVRRVETLKDGTNAVGNRTRVKVVKNK

SEQ ID NO: 753 - protein, 183 aa, Methylococcus capsulatus Bath, prophage MuMc02
  Mca MupF N-extein
MTLPAADLKAIFNLEPKAAIAYLQHKGYKLTWNWQEMLDDAHARAFTIAKAARLDVVQDIRNALDVALRHGQTLKDFQKNLKPTLQAKGWWGKQIIVDGAGNAEVARLGSPWRLATIYRTNLQSAFMAANYQEMAEATDSHPYWQYVAVLDGRTRPSHRAMNGRVFRHDDPIWNTIWPPNGFN

SEQ ID NO: 754 - protein, 282 aa, Methylococcus capsulatus Bath
  Mca RIR1 N-extein
MEPQAISLEVLREKYARHGETCAEEIFARVADALAAAEESPDEWRPLFFSALESGFIPAGRIMSAAGTGMQATLINCFVQPVGDSVSEETDGKPGIYTALAEAAETMRRGGGVGYDFSAIRPRGARVHTTESRASGPVSYMRVFDRSCETVESAGSRRGAQMGILRCEHPDIFEFVRAKDRPGELTNFNLSVALNEDFMRAVETDGPWELTHRAEPSPEQQCEGAYLREDGLWVYRSVPARELWELIMRSTYDHAEPGVLFIDRMNRENNLSYCERIEATNP

SEQ ID NO: 755 - protein, 9 aa, Mycobacterium chitae
  Mch RecA N-extein
REKIGVMFG

SEQ ID NO: 756 - protein, 414 aa, Methanoculleus marisnigri JR1
  Memar MCM2 N-extein
MTEEITVEVTDNVGEWTKFLKKQYKRELAELSREYPHNHSLLIDYRKILNNKLAFELLRSPGKVLGDIRDAIVQNKLLKLKDGQDPDLVNIRFTNLPQKTNVRDIRADQINTFVSLEGILRKTTEVRPRIVSAVFRCRTCNKNTDPVPQGYGRFDEPDFCPNCERKTRLDLVMNRCRFVDAQKLRIQESPEGLRGGEQPQTLDIDVTDDLTGMVSPGDRVVVNGILRSVQRVNYGQKSTLFDIYLECNSIEVAEKEFEEVSISEEDEANIMALARDPMVYKKIARSIAPTIYGTDDVKEAIALQLFGGIAKDMPDGSRLRGDVHVLLVGDPGIAKSQILRYVVKLSPRGIYTSGKSSTSAGLTATAVKDEFGDGRWTLEAGALVLADMGIAAVDEMDKMQKEDRSALHEAMEQQ

SEQ ID NO: 757 - protein, 870 aa, Methanoculleus marisnigri JR1
  Memar Pol-II N-extein
MEVSPAIARYFEELEGELDAAIRLAAAARARGLDPRTEIEIPVASDLADRVEALLGYKGIAARIRELEAEMSREEAALRIGDDFAARKFGETTPEEILDHAIRAAMALLTEGVVAAPTEGIGKVSLGKNDDGTDYLKIYYAGPIRSAGGTAQALSVLVGDYVRQALGINRYIPRPEEVERYIEEIRQYNNIMSLQYLPSEKELRMIIENCPVCIDGEPTEQQEVSGYRNLERVETNTVRGGMALVVAEGLALKAPKVLKNVRKMKMEGWDWIEEMIGGGPKSDDDDASAAIKPKDKYIRDLIGGRPVFSYPMRKGGFRLRLGRARNTGFAAAGFNPATLHILGDFLAVGTQMKVERPGKAAGVVPVDSIQGPTVKLRSGEVRRVDDAAEARRLAGQVDEILDVGEMLVSFGEFMENNHPLMPPAYCEEWWMLEGGPRHPENELEAIEFALDGVPLHPDYTYMWDDVAPADIARLAEAVGTGGTVEDGVLMIRNTPETKAILEELLIPHHLSGDRLAIREHLAFLACLGLTLQLTKRPAWQDAPMENSLDLVMHLSGFTVRSRAGTRIGGRMGRPGKSKPREMRPPPHSLFPIGDEGGARRSFQAACSSKPRSNTDGGVIEAEVGERQCPACGAFTYKNLCECGAHTNPVFRCPRCGKDVGQDVCPRCNAETVCLQKVTINVKAEYLAAMESLGVRESSVALLKGVKGLISRERPVEPIEKGILRALQNLYVFKDGTVRYDMIDLPLTHFRPDEVGVPIERLRELGYTHDTYGRELVSDDQVLELRHQDILVSEGCGEWLVRVAKFVDDLLVRLYGLEPFYKAEKPLDLVGHLLMGLAPHTSAGVLVRLIGFSKAPVGYGHPFFHAAKRRN

SEQ ID NO: 758 - protein, 9 aa, Mycobacterium fallax
  Mfa RecA N-extein
REKIGVMFG

SEQ ID NO: 759 - protein, 69 aa, Mycobacterium flavescens Fla0
  Mfl GyrA N-extein
RGIFRPDRSHAKSARSVAETMGNYHPHGDASIYDTLVRMAQPWSLRYPLVDGQGNFGSPGNDPPAAMRY

SEQ ID NO: 760 - protein, 9 aa, Mycobacterium flavescens, ATCC14474
  Mfl-ATCC14474 RecA N-extein
REKIGVMFG

SEQ ID NO: 761 - protein, 63 aa, Mycobacterium gastri
  Mga GyrA N-extein
DRSHAKSARSVAETMGNYHPHGDASIYDTLVRMAQPWSLRYPLVDGQGNFGSPGNDPPAAMRY

SEQ ID NO: 762 - protein, 9 aa, Mycobacterium gastri
  Mga RecA N-extein
RDKIGVMFG

SEQ ID NO: 763 - protein, 15 aa, Mycobacterium gastri
  Mga SufB (Mga Pps1) N-extein
AEKQRLVAGVAAQYE

SEQ ID NO: 764 - protein, 872 aa, Methanospirillum hungateii JF-1
  Mhu Pol-II N-extein
MADISPRMQEYYDRLNAGLAQAMEVAKTARKTGLDPETVVEIPIANDLADRVEAQVGIPGVAQMIRELEAVMSREEASLHIGDYFAEKKFGETTKEEILDHAIRTAMALLTEGVVSAPIEGIAKVAVKKNDDGSEYLAIYYAGPIRSAGGTAQALSVLVGDYVRRILGMSRYMPREEEIERYIEEIRQYNSIMSLQYLPSEREIRLIISNCPVCIDGEPTEKEEVSGHRNLERVETNTVRGGMALVIAEGLALKAPKVLKNVRKMKMDGWDWLEEMIQATAGSSSSEEKEVGIHPKDKFLRDLIGGRPVFSYPMREGGFRLVYGRSRNTGLAAAGLNPATLHILGDFLAVGTQMKIERPGKAAGISPVDSIQGPTVRLINGDVVRIHDAKRARELSSQVSHIIDVGEILISYGEFMENNHVLVPSAYCESWWRLEGGTTRPADEDEAILQCESGLYLHPDYLYLWDDLKPAEIRSLAEFIHKHGTLADKTLILPLDPTIKEYLERVLCEHQVREGMIRITPCRIVLKCLGLDSSLALSDSWEKELPESALDLVQFLSGMKMRSKAGTRIGGRMGRPGKSKPREMKPAPHVLFPVGEAGGSRRSVQEASKFSYQANTEGGNLQLEMGVRRCPACGTESYKNRCSCGTHTEPVLSCSRCGIEVQGPVCPQCGMEPTSVRQYTVNVRQMLQQAFADLGMRDRDVELVKGVKGLVSRNKPVELIEKGVIRAANKLFVFKDGTVRFDIIDMPLTHFRPREIGVSVERLRELGYLQDIYGVPLQNPDQVLELPPQDILVPEGCGDYLFSCTRFIDTLLEKVYGLPPFYNLETRSDLVGHLVIGLAPHTSAGVLARIIGFSKANVGYGHPFFHAAKRRN

SEQ ID NO: 765 - protein, 74 aa, Methanococcus jannaschii (Methanocaldococcus jannaschii DSM 2661)
  Mja GF-6P N-extein
MKFMCGIIGYIGNDKAPKILLNGLRRLEYRGYDSCGIGVVDNNKLIIKKNVGKVEEVAKKERFLDIDGNIGIGH

SEQ ID NO: 766 - protein, 337 aa, Methanococcus jannaschii (Methanocaldococcus jannaschii DSM 2661)
  Mja Helicase N-extein
MDKILEILKDFGIVELRPPQKKALERGLLDKNKNFLISIPTASGKTLIGEMALINHLLDGNKNPTNKKGIFIVPLKALASEKYEEFKSKYERYGLRIALSIGDYDEDEDLSKYHLIITTAEKLDSLWRHKIDWINDVSVVVVDEIHLINDETRGGTLEILLTKLKEFNVQIIGLSATIGNPDELAEWLNAELIVDDWRPVELKKGIYKNEAIEFINGEIREIKAVDNNDIYNLVVDCVKEGGCCLVFCNTKRNAVNEAKKLNLKKFLTEEEKIRLKEIAEEILSILEPPTEMCKTLAECILNGSAFHHAGLTYQHRKIVEDAFRKRLIKVICCTPTL

SEQ ID NO: 767 - protein, 128 aa, Methanococcus jannaschii (Methanocaldococcus jannaschii DSM 2661)
  Mja Hyp-1 N-extein
MIANVDLHIHSRFSGGTSKDMNVENILKYGKLKGLNIIGTGDCTHPDYLEEIKQYKDRELILTTEIEDKNRVHHLILLPSISKVEELREILKKYSKDIDKEGRPRVSIGGAELLEIVRDVGGLIGPAH

SEQ ID NO: 768 - protein, 30 aa, Methanococcus jannaschii (Methanocaldococcus jannaschii DSM 2661)
  Mja IF2 N-extein
MAKKNTKKDNKNQNLRCPIVCVLGHVDHGK

SEQ ID NO: 769 - protein, 404 aa, Methanococcus jannaschii (Methanocaldococcus jannaschii DSM 2661)
  Mja Klba N-extein
MIIKNQLIFVNFYVILIIWWFVMGILDKIQKKSEKIEKEKKSETVIPSDTKLKPIEPHPTINKKATVGNDETILDTYSIKIDEIEMEVVIKREEGYIYYLVPEIDKINMSLSKLTKDHLNHIKSQISDLGLIEYDQIREYLTNFSMRYNLAIPYIDSLAKFFYLVIGRLGLLEVPLNDDRLEEVMVNGYNVPVFVFHRKHQMCETNIVLDRNEVDRIIESIANLVNRPIDSRVPMLDAFLPDGSRVNATTADITMNGATLTIRKFSKNPLTVIDLINFGTLDIDTAAFLWQAVEGYFGAKPANTLIAGGTGSGKTTLLNVLSLFSMYNERIITIEDTPELQIPHKHVIKMVTRPARPGMPEYEVTMDDLIKNALRMRPDRIFVGEVRGKEAHSLLVAMNTGHDG

SEQ ID NO: 770 - protein, 410 aa, Methanococcus jannaschii (Methanocaldococcus jannaschii DSM 2661)
  Mja PEP N-extein
MLIIQNTKGDSMKFIAWLDELSNKDVDIAGGKGASLGEMWNAGLPVPPAFVVTADAYRHFIKETGLMDKIREILSGLDVNDTDALTNASKKIRKLIEEAEMPEDLRLAIIEAYNKLCEMCGEDEVTVAVRSSATAEDLPEASFAGQQDTYLNIKGAENVVKYVQKCFSSLFTPRAIFYREQQGFDHFKVALAAVVQKLVNAEKAGVMFTVNPISENYDELVIEAAWGLGEGVVSGSVSPDTYIVNKKTLEIVDKHIARKETMFVKDEKGETKVVEVPDDMKEKQVLSDDEIKELAKIGLNIEKHYGKPMDVEWAYEKGKFYMLQARPITTLKKGKKEKKAKEEDIEAKILLKGIGASPGIATGVVKIIHDVSEIDKVKEGDILVTEMTTPDMVPAMKKAAAIVTDEGGLT

SEQ ID NO: 771 - protein, 425 aa, Methanococcus jannaschii (Methanocaldococcus jannaschii DSM 2661)
  Mja Pol-1 N-extein
MGMSMGKIKIDALIDNTYKTIEDKAVIYLYLINSILKDRDFKPYFYVELHKEKVENEDIEKIKEFLLKNDLLKFVENIEVVKKIILRKEKEVIKIIATHPQKVPKLRKIKECEIVKEIYEHDIPFAKRYLIDNEIIPMTYWDFENKKPVSIEIPKLKSVAFDMEVYNRDTEPNPERDPILMASFWDENGGKVITYKEFNHPNIEVVKNEKELIKKIIETLKEYDVIYTYNGDNFDFPYLKARAKIYGIDINLGKDGEELKIKRGGMEYRSYIPGRVHIDLYPISRRLLKLTKYTLEDVVYNLFGIEKLKIPHTKIVDYWANNDKTLIEYSLQDAKYTYKIGKYFFPLEVMFSRIVNQTPFEITRMSSGQMVEYLLMKRAFKENMIVPNKPDEEEYRRRVLTTYEGGYVKEPEKGMFEDIISMDFR

SEQ ID NO: 772 - protein, 882 aa, Methanococcus jannaschii (Methanocaldococcus jannaschii DSM 2661)
  Mja Pol-2 N-extein
MGMSMGKIKIDALIDNTYKTIEDKAVIYLYLINSILKDRDFKPYFYVELHKEKVENEDIEKIKEFLLKNDLLKFVENIEVVKKIILRKEKEVIKIIATHPQKVPKLRKIKECEIVKEIYEHDIPFAKRYLIDNEIIPMTYWDFENKKPVSIEIPKLKSVAFDMEVYNRDTEPNPERDPILMASFWDENGGKVITYKEFNHPNIEVVKNEKELIKKIIETLKEYDVIYTYNGDNFDFPYLKARAKIYGIDINLGKDGEELKIKRGGMEYRSYIPGRVHIDLYPISRRLLKLTKYTLEDVVYNLFGIEKLKIPHTKIVDYWANNDKTLIEYSLQDAKYTYKIGKYFFPLEVMFSRIVNQTPFEITRMSSGQMVEYLLMKRAFKANMIVPNKPDEEEYRRRVLTTYEGGYVKEPEKGMFEDIISMDFRCHPKGTKVVVKGKGIVNIEDVKEGNYVLGIDGWQKVKKVWKYEYEGELINVNGLKCTPNHKIPLRYKIKHKKINKNDYLVRDIYAKSLLTKFKGEGKLILCKDFETIGNYEKYINDMDEDFILKSELIGILLAEGHLLRRDIEYFDSSRGKKRISHQYRVEITVNEDEKDFIEKIKYIFKKLFNYELYVRRKKGTKAITLGCAKKDIYLKIEEILKNKEKYLPNAILRGFFEGDGYVNTVRRAVVVNQGTNNYDKIKFIASLLDRLGIKYSFYTYSYEERGKKLKRYVIEIFSKGDLIKFSILISFISRRKNNLLNEIIRQKTLYKIGDYGFYDLDDVCVSLESYKGEVYDLTLEGRPYYFANGILTHNSLYPSIIISYNISPDTLDCECCKDVSEKILGHWFCKKKEGLIPKTLRNLIERRINIKRRMKKMAEIGEINEEYNLLDYEQKSLKILAN

SEQ ID NO: 773 - protein, 866 aa, Methanococcus jannaschii (Methanocaldococcus jannaschii DSM 2661)
  Mja r-Gyr N-extein
MIPMIYKEMCPNCNGEITSERLAIGVCEKCLKEENVFEKLKLCEKLREEKTLKNLKDYCIIWNEFKEFEEFVKDLGFELLSIQKMWAKRVLKNKSFSIVVPTGVGKSFFGILMSLFLAKKGKRCYIILPTTLLVKQTYEKISSLTEKNNLNIRVVAYHSELSTKEKKEVKERIENNDYDVLITTSNYLTKNMPKCKFDFVFVDDVDALLKASKNIDRTLKLLGFDEEIINEAYKIIYLIKIGKIEDAMKKREILKKKISKIKHGCLIIASATGKSYGDRVKLYRELLDFEIGFGMNKLRDVVDIYDEEFSKEKILEYIKLFGSGGIVFVSIDYGVEKAQEIEKYLLENNIKAKLIHSKDKKGFDDFREGKIDVLIGVASYYGVLVRGLDMPERVRYAIFYGIPKFKIRLKEYINSLKEKGELKEDINIEGKTEEEIRQIITEKLKIKNFSLRKEDDEYLLLIPDVKTYIQASGRTSRMTEFGLTKGASIVLVDEKEIFEALKKYMLFMYESEFKRIDEVNLEELIKKIDEDREKIKVGRAKGKVPDLLKSVLMVVESPNKARTIANFFGKPSVRKINNRNVYEVCIGDLNLIITASGGHVFDLVTKEGFYGVKIENNLYIPIYTSIKKVNGEQFTDQKDLEELIKQLMEKGERVNAMDAKENIEIIREIADEVDAIFIATDIDTEGEKIGYDIAINALPFNRNIYRVGFNEITKRAILKAVESFKKGEELSLDENKVKGQVVRRIEDRWIGFRLSQKLWEVFNKNYLSAGRVQTPVLGWIIERYNEHKIKVPYLSLKLENDIYIGKIWEDEFDKDEVEVEVKVYEKEIPPLPPFTTDTLLEEATKRFGLSTDEIMSIAQELFELGL

SEQ ID NO: 774 - protein, 53 aa, Methanococcus jannaschii (Methanocaldococcus jannaschii DSM 2661)
  Mja RFC-1 N-extein
MVIIMEKPWVEKYRPKTLDDIVGQDEIVKRLKKYVEKKSMPHLLFSGPPGVGK

SEQ ID NO: 775 - protein, 626 aa, Methanococcus jannaschii (Methanocaldococcus jannaschii DSM 2661)
  Mja RFC-2 N-extein
MVIIMEKPWVEKYRPKTLDDIVGQDEIVKRLKKYVEKKSMPHLLFSGPPGVGKCLTGDTKVIVNGEIREIGEVIEEISNGKFGVTLTNNLKVLGIDEDGKIREFDVQYVYKDKTNTLIKIKTKMGRELKVTTYHPLLINHKNGEIKWEKAENLKVGDKLATPRYILFNESDYNEELAEWLGYFIGDGHADKESNKITFTNGDEKLRKRFAELTEKLFKDAKIKERIHKDRTPDIYVNSKEAVEFIDKLGLRGKKADKVRIPKEIMRSDALRAFLRAYFDCDGGIEKHSIVLSTASKEMAEDLVYALLRFGIIAKLREKVNKNNNKVYYHIVISNSSNLRTFLDNIGFSQERKLKKLLEIIKDENPNLDVITIDKEKIRYIRDRLKVKLTRDIEKDNWSYNKCRKITQELLKEIYYRLEELKEIEKALEENILIDWDEVAERRKEIAEKTGIRSDRILEYIRGKRKPSLKNYIKIANTLGKNIEKIIDAMRIFAKKYSSYAEIGKMLNMWNSSIKIYLESNTQEIEKLEEIRKTELKLVKEILNDEKLIDSIGYVLFLASNEIYWDEIVEIEQLNGEFTIYDLHVPRYHNFIGGNLPTILHNTTAALCLARDLFGENWRDNFLELNA

SEQ ID NO: 776 - protein, 1124 aa, Methanococcus jannaschii (Methanocaldococcus jannaschii DSM 2661)
  Mja RFC-3 N-extein
MVIIMEKPWVEKYRPKTLDDIVGQDEIVKRLKKYVEKKSMPHLLFSGPPGVGKCLTGDTKVIVNGEIREIGEVIEEISNGKFGVTLTNNLKVLGIDEDGKIREFDVQYVYKDKTNTLIKIKTKMGRELKVTTYHPLLINHKNGEIKWEKAENLKVGDKLATPRYILFNESDYNEELAEWLGYFIGDGHADKESNKITFTNGDEKLRKRFAELTEKLFKDAKIKERIHKDRTPDIYVNSKEAVEFIDKLGLRGKKADKVRIPKEIMRSDALRAFLRAYFDCDGGIEKHSIVLSTASKEMAEDLVYALLRFGIIAKLREKVNKNNNKVYYHIVISNSSNLRTFLDNIGFSQERKLKKLLEIIKDENPNLDVITIDKEKIRYIRDRLKVKLTRDIEKDNWSYNKCRKITQELLKEIYYRLEELKEIEKALEENILIDWDEVAERRKEIAEKTGIRSDRILEYIRGKRKPSLKNYIKIANTLGKNIEKIIDAMRIFAKKYSSYAEIGKMLNMWNSSIKIYLESNTQEIEKLEEIRKTELKLVKEILNDEKLIDSIGYVLFLASNEIYWDEIVEIEQLNGEFTIYDLHVPRYHNFIGGNLPTILHNTTAALCLARDLFGENWRDNFLELNASVSKDTPILVKIDGKVKRTTFEELDKIYFETNDENEMYKKVDNLEVLTVDENFRVRWRKVSTIIRHKVDKILRIKFEGGYIELTGNHSIMMLDENGLVAKKASDIKVGDCFLSFVANIEGEKDRLDLKEFEPKDITSRVKIINDFDIDEDTAWMLGLYVAEGAVGFKGKTSGQVIYTLGSHEHDLINKLNDIVDKKGFSKYENFTGSGFDRKRLSAKQIRILNTQLARFVEENFYDGNGRRARNKRIPDIIFELKENLRVEFLKGLADGDSSGNWREVVRISSKSDNLLIDTVWLARISGIESSIFENEARLIWKGGMKWKKSNLLPAEPIIKMIKKLENKINGNWRYILRHQLYEGKKRVSKDKIKQILEMVNVEKLSDKEKEVYDLLKKLSKTELYALVVKEIEIIDYNDFVYDVSVPNNEMFFAGNVPILLHNSDERGIDVIRTKVKDFARTKPIGDVPFKIIFLDESDALTADAQNALRRTMEKYSDVCRFILS

SEQ ID NO: 777 - protein, 337 aa, Methanococcus jannaschii (Methanocaldococcus jannaschii DSM 2661)
  Mja RNR-1 N-extein
MISAKDFAEKVMEFYVIKRDKRKEKFNVNKLAKSLINSGVNYGDLDTIISEVCAKVYNGITTDELKDIVYNVLKKIDKDVAENYRNGIILKVRTSEKEFESFDKEKIAKALIRETGADEETARKIADEVERELKKLKVKYLTAPMIREIVNYKLIEYGFEELRHKHTRLGMPVYDITKLIKSGSRENANLMYNPESIHKWVADETMKQYALLAIFPKHIADAHIKGDIHLHDLEYAATRPVCLQHDLRPFFKYGLKVDGTGLHTSVSKPAKHPEVAIQHAAKVMMAAQTNMSGGQSIDEFNVWLAPYVRGLSYEKIKQLMQMFIYELNQMYVARGGQ

SEQ ID NO: 778 - protein, 1058 aa, Methanococcus jannaschii (Methanocaldococcus jannaschii DSM 2661)
  Mja RNR-2 N-extein
MISAKDFAEKVMEFYVIKRDKRKEKFNVNKLAKSLINSGVNYGDLDTIISEVCAKVYNGITTDELKDIVYNVLKKIDKDVAENYRNGIILKVRTSEKEFESFDKEKIAKALIRETGADEETARKIADEVERELKKLKVKYLTAPMIREIVNYKLIEYGFEELRHKHTRLGMPVYDITKLIKSGSRENANLMYNPESIHKWVADETMKQYALLAIFPKHIADAHIKGDIHLHDLEYAATRPVCLQHDLRPFFKYGLKVDGTGLHTSVSKPAKHPEVAIQHAAKVMMAAQTNMSGGQSIDEFNVWLAPYVRGLSYEKIKQLMQMFIYELNQMYVARGGQSLGRDELIFIKEGDKLKVCKIGEAIDEFMEKYKDKIIVDGDTEILYLDGIAEVYTISVNVKTGKAEFKRVYAISRHKPRGKVYKVIGKDGTSIIVTEDHSLFNYDENGNLVCVKPRQMKHIIRNFNNPYDVEYRIGDYIETNYQRTDSKYNSRQNDIPEKLKITKELCQFLGLFVAEGSYITNGISITTKDDDIAKFIERFVKEQINENIAVKRYEDSVRFVNKGFYRFLKEHINGKAINKNSPEFILKGDKEMKLAFLGGLISGDGYVSKDGRVQIYTTSEQLLGQLHLLLSDLGMIYSITKIKEEGEKIEIKRNEIVRNYKLYVIEIAKNCTEDLKPYVIPKYKKERIKPANYDQLPYDYRIIKEHLRKITDKKPYNDYAWKSNNRKLKLNTLEKIEQLNPHLREEINKFKLNIPFEIKEIKEIDYNGYVYDLSVEDNENFITATGILCHNTIFSSINLELEIPEFLKDKPAVIAGTTRGTYGDYEEEAKLILEALVDVMMEGDAMGKPFLFPNFIIKLRENAFKDENKELMYKIHQLSAKFGIPYFINMLPDWQVTNTNAMGCRTRLSGNWTGDAEIDTLRTGNMQWYSLNLPRIAYEANGDDTKLFEILHERLEILKEALLIKHEVTKERLYVDNLMPFLTQEFDGESYYRYENTTKTFGFVGLNEMLKYHLGEELHESKDAVKFGEKVIEYIREYADKLKEETGLRWTVTQTPAES

SEQ ID NO: 779 - protein, 463 aa, Methanococcus jannaschii (Methanocaldococcus jannaschii DSM 2661)
  Mja rPol A' N-extein
MVILMERYEIPKEIGEIMFGLLSPDYIRQMSVAKIVTPDTYDEDGYPIDGGLMDTRLGVIDPGLVCKTCGGRIGECPGHFGHIELAKPVIHIGFAKTIYKILKAVCPHCGRVAISETKRKEILEKMEKLERDGGNKWEVCEEVYKEASKVTICPHCGEIKYDIKFEKPTTYYRIDGNEEKTLTPSDVREILEKIPDEDCILLGLNPEVARPEWMVLTVLPVPPVTVRPSITLETGERSEDDLTHKLVDIIRINNRLEENIEGGAPNLIIEDLWNLLQYHVNTYFDNEAPGIPPAKHRSGRPLKTLAQRLKGKEGRFRYNLAGKRVNFSSRTVISPDPCLSINEVGVPEVVAKELTVPEKVTKYNIERIRQLLRNGSEKHPGVNYVIRKMIGRDGTEQEYKVKITESNKDFWAENIREGDIVERHLMDGDIVLYNRQPSLHRMSIMAHRVRVLPYRTFRHNLCV

SEQ ID NO: 780 - protein, 97 aa, Methanococcus jannaschii (Methanocaldococcus jannaschii DSM 2661)
  Mja RtcB (Mja Hyp-2) N-extein
MKDVLKRVSDVVWELPKDYKDCMRVPGRIYLNEILLDELEPEVLEQIANVACLPGIYKYSIAMPDVHYGYGFAIGGVAAFDQREGVISPGGVGFDIN

SEQ ID NO: 781 - protein, 99 aa, Methanococcus jannaschii (Methanocaldococcus jannaschii DSM 2661)
  Mja TFIIB N-extein
MVWLMEALKTKENETTKEKKLTTKVEKSEKKEENVREEEIVCPICGSKEVVKDYERAEIVCAKCGCVIKEKLFDIGPEWRAFDHEQKIKRCRVGAPMTY

SEQ ID NO: 782 - protein, 260 aa, Methanococcus jannaschii (Methanocaldococcus jannaschii DSM 2661)
  Mja UDP GD N-extein
MNISVIGTGYVGLIQAVGLAEFGFDVVGIDIDESKVKALNRGECPLYEEGLEGLLKKHVNKNLTFTTSYKPIKDSDVIFLCVGTPQDKDGNADLRFLFSAVEKIKETIDKEDYKVIVIKSTVPVGTNRRVKELLKDYNVDVVSNPEFLREGIAVYDFFNPERVILGFENLNNKKPIEIMEEVYKYFKDKNIPFVITNWETAELIKYASNAFLATKISFINELAKLSDKVKADIKTISYAMGLDPRIGNKFLNAGIGYGGS

SEQ ID NO: 783 - protein, 634 aa, Methanopyrus kandleri AV19
  Mka CDC48 N-extein
MPGLPIKLRVEKAYPEDVGKRAVRMDKASRDRIGVSEGDLVKITGSKTTVARVLPAKKEDVGKGIVRMDKYERQNAGASVGEPVEVDRAEEKVAKRVELMPTERVVVPVQAGLKEEVEEELTREHEQDILEQIKRYLRSRAQQTPIPATHRDVIPLEVQGKTIAGHVLIKFPDSLLVVGIEPEDATVIGPETEIEVKPYSEDLAKAAEIPDVTYDDIGGLDREIELIREYVELPLKRPELLKELGIKPPKGVLLYGPPGTGKTLLAKAVANECGAKFYSINGPEIMSKYYGESEARIREVFEEARKNAPAIIYIDEIDAIAPKRGETGEVERRVVAQLLTLMDGLSEDERVVVLASTNRPDDIDPALRRPGRFDKEIEIGVPDKEGRKEILQIHTRDMPLADDVDLDKLAELTHGFTGADLEALCKSAGLKALRRAIRKIGAKLAEKGEKEEREVAVKVSELSDEELMEVLEKGLDRARIPEEKKRALRRVLREAEEEEKEEVAYTDALDKVLEAEELPEIREELKVTMRDFMEALKEIEPSALREVIVEVPDVSWDDVGGLEDVKQELKEAVEYPLKYPEVYEKLGTRPPKGILLYGPPGTGKTLLAKAVANESDANFIAVRGPEVLSKWVGE

SEQ ID NO: 784 - protein, 82 aa, Methanopyrus kandleri AV19
  Mka RFC N-extein
MAEHELRVLEIPWVEKYRPKRLDDIVDQEHVVERLKAYVNRGDMPNLLFAGPPGTGKTTAALCLARELFGEHWRDNFLELNA

SEQ ID NO: 785 - protein, 100 aa, Methanopyrus kandleri AV19
  Mka RtcB N-extein
MAPKSMLKHIRNNVVWELPEDYKGCMKVPGRIYATEKLIDGMEKGVFDQVANVACLPGIYGYSIALPDAHYGYGFPIGGVAAFDVEEGVVSPGGVGYDIN

SEQ ID NO: 786 - protein, 260 aa, Methanopyrus kandleri AV19
  Mka VatB N-extein
MAEAERPAGKEYTTISEVSGPLMVVEGVEGAKYGEVVEVETPTGEVRRGQVLEARRDAAVVQVFEGTSGLDTTSTKVRFTGETLRIPVSTDLLGRILNGRGEPIDGGPEIVPEDELDIHGAPINPAARKYPSDFIQTGISAIDGMNTLVRGQKLPIFSGSGLPHNELAAQIARQATVPGEEEEFAVVFAAMGITHEEAAFFRREFEETGALDRAVLILNLADDPSMERIITPRIALTVAEYLAFENDMHVLVILTDMTNY

SEQ ID NO: 787 - protein, 65 aa, Mycobacterium kansasii
  Mkas GyrA N-extein
RPARSHAKSARSVAETMGNYHPHGDASIYDTLVRMAQPWSLRYPLVDGQGNFGSPGNVPPAAMRY

SEQ ID NO: 788 - protein, 233 aa, Mycobacterium leprae, strain TN
  Mle DnaB N-extein
MAVVDDLAHSGMDAVPPSEDFGRQPPQDLAAEQSVLGGMLLSKDAIADVLERLRSGDFYRPAHQNVYDAILDLYGRGEPADAVTVAAELDRRGLLRRIGGAPYLHTLISTVPTAANAGYYAGIVAEKALLRRLVEAGTRVVQYGYAGAEGADVAEVVDRAQAEIYDVAECRLSENYVPLEDLLQPTMDDLDAIASNGGISRGAPTGFTELDEVTNGLHPGQMIIVAARPGVGK

SEQ ID NO: 789 - protein, 205 aa, Mycobacterium leprae, strain TN
  Mle RecA N-extein
MAQVPDREKALELAMAQIEKNYGKGSVMRLGDEMCQPISVIPTGSIALDVALGIGGLPRGRIVEIYGPESSGKTTVALHAVANAQAVGGVAAFIDAEHALEPEYAKKLGVDTDSLLVSQPDTGEQALEIADMLIRSGALDIVVIDSVAALVPRAELEGEMGDSYVGLQARLMSQALRKMTGALSNSGTTAIFINQLREKIGVMFG

SEQ ID NO: 790 - protein, 256 aa, Bacteriophage Aaphi23
  MP-Aaphi23 MupF N-extein
MLMNLPEILKSQKKWKARKFRTVKTSKRTELWYRQQLKQFVKTMTDDIERALQQPQGSFFMDDAEGFKAISAKALLAYLEKYEKTDRTSQAENIAQGFVSRGDAQNQAEVSTNLKNQTGVDLAGYLRNSPNIAEKVNALTIDNVQLITNISSQYLDKVKSAVTRAMVSGSLNKDLAAQIKAIGQKTEKRAAFIARDQSSKLNAALTQARHEDLGVKKYMWSTAGDERVRDSHEELDGKVFSYDKPPEVGNPGHDFN

SEQ ID NO: 791 - protein, 140 aa, Mycobacteriophage Bethlehem
  MP-Be DnaB N-extein
MAVHYPESLLPAPSHIQGPTWRQYEDGSWFLPEKTLGWQIISWLFEYVNSPAGDGPFVPTLEQARFIAWWYAVDDQGKYAYREGTLRRMKGWGKDPMIGALALAELCGPVAFSHFDDNGNPVGKTRHAAWVTIAAVSQDQ

SEQ ID NO: 792 - protein, 94 aa, Mycobacteriophage Bethlehem
  MP-Be gp51 N-extein
MTQRIVFLPDTQLPYEARKEMQAVIRFIGDVQPYGVVHIGDILDLPQPSRWNKGTKGEFEGSVYRDADYAKKHLLEPLRKVYDGWIGAHEGNHD

SEQ ID NO: 793 - protein, 149 aa, Mycobacteriophage Catera
  MP-Catera gp206 N-extein
MGKEGRKSIFRSLAERDLLIPYFRNALLSQEWPDEYTIKVDSSPYYGKGDGYFHPSTHALMPARQLYYHFHPETRDKIVQEDRTITQEMTLTMGSAIHAVVQTQFQMAGLIKGPDDCEVEYVDRTHHVRGRVDFIVHHPNGQVIPVELK

SEQ ID NO: 794 - protein, 92 aa, Mycobacteriophage CJW1
  MP-Mcjw1 DnaB N-extein
MEVCGYTLDDIECTEVGAHFCVPRANKAQAFFEEILVHTKGQYTRKKFILEDWQRDDIVRPLFGRVEYSDEFGCYKRRYEIAWIELARKNGK

SEQ ID NO: 795 - protein, 106 aa, Mycobacteriophage Omega
  MP-Omega DnaB N-extein
MGVQEPRIWLSPEAKSSAGQEAIDLAAACGLILDPWQELCLHEALKESEELVQLESGAWVKKWAASSFGLVVSRQNGKGSILEALELAGLILFGERLIIHSAHEFK

SEQ ID NO: 796 - protein, 94 aa, Mycobacteriophage U2; identical to SEQ ID NO: 792
  MP-U2 gp50 N-extein

SEQ ID NO: 797 - protein, 9 aa, Mycobacterium shimodei
  Msh RecA N-extein
REKIGVMFG

SEQ ID NO: 798 - protein, 233 aa, Mycobacterium species KMS
  Msp-KMS DnaB N-extein
MAVVDDRGHPDMDAPPPSEDFGRQPPHDAAAEQAVLGGMLLSKDAIADVLERLRPGDFYRPAHQNVYDAVLDLYGRGEPADAVTVAAELDRRGLLRRIGGAPYLHTLISTVPTAANAGFYAGIVAEKALLRRLVEAGTRVVQYGYAGADGADVADVVDRAQAEVYDVVDRRSSEDFAVLESLLQPTMDEIDAIASQGGIARGVPTGFTELDELTNGLHSGQMVVIAARPGMGK

SEQ ID NO: 799 - protein, 130 aa, Mycobacterium species KMS
  Msp-KMS GyrA N-extein
MTDTTLPPGDEAGDRIEPVDIQQEMQRSYIDYAMSVIVGRALPEVRDGLKPVHRRVLYAMFDSGFRPDRGHAKSARSVAETMGNYHPHGDSSIYDTLVRMAQPWSLRYPLVDGQGNFGSPGNDPPAAMRY

SEQ ID NO: 800 - protein, 233 aa, Mycobacterium species MCS; identical to SEQ ID NO: 798
  Msp-MCS DnaB N-extein

SEQ ID NO: 801 - protein, 130 aa, Mycobacterium species MCS; identical to SEQ ID NO: 799
  Msp-MCS GyrA N-extein

SEQ ID NO: 802 - protein, 265 aa, Methanothermobacter thermautotrophicus (Methanobacterium thermoautotrophicum)
  Mth RIR1 N-extein
MISLSTTALKVLEERYLLRGEGGEVVETPEEMFRRVARAVASADEAYGDDPAVAEEAFYSVMGNLEFLPNSPTLMNAGTPINQLSACFVLPVEDSIDSIFSSLRDMAIIHKSGGGVGFSFSRLRPRGDIVASTMGVASGPVSFMRIFDVAVDVIKQGGRRRGANMGVLHVSHPDIFSFIDAKSREGPLRNFNLSVAVPDEFMDDRPVDLINPRNGEVVDSVESRVILKRIVEAAWRSGDPGILFEDRINRYNPTPQLGRIEATNP

SEQ ID NO: 803 - protein, 9 aa, Mycobacterium thermoresistibile
  Mthe RecA N-extein
REKIGVMFG

SEQ ID NO: 804 - protein, 252 aa, Mycobacterium tuberculosis strains H37Rv & CDC1551; identical to SEQ ID NO: 751
  Mtu SufB (Mtu Pps1) N-extein

SEQ ID NO: 805 - protein, 399 aa, Mycobacterium tuberculosis, CDC1551; identical to SEQ ID NO: 750
  Mtu-CDC1551 DnaB N-extein

SEQ ID NO: 806 - protein, 399 aa, Mycobacterium tuberculosis H37Rv; identical to SEQ ID NO: 750
  Mtu-H37Rv DnaB N-extein

SEQ ID NO: 807 - protein, 251 aa, Mycobacterium tuberculosis H37Rv,Also CDC1551; identical to SEQ ID NO: 752
  Mtu-H37Rv RecA N-extein

SEQ ID NO: 808 - protein, 251 aa, Mycobacterium tuberculosis So93/sub_species="Canetti"; identical to SEQ ID NO: 752
  Mtu-So93 RecA N-extein

SEQ ID NO: 809 - protein, 221 aa, Mycobacterium vanbaalenii PYR-1
  Mvan DnaB N-extein
MEPPPSEDFGRQPPQDAAAEQAVLGGMLLSKDAVADVLEKLRPGDFYKPANQLVYDAILDLYGRGEPADAVTVAAELDRRGLLRRVGGAPYLHTLISTVPTAANAGYYAEIVAEKSLLRRLVEAGTRVVQYGYAGADGADVNEIVDRAQAEIYDVTERKSSEDFVILEEILQPAMDEIDAIASEGGVSKGVPTGFTDLDELTNGLHPGQMIVVAARPGMGK

SEQ ID NO: 810 - protein, 400 aa, Nocardia farcinica IFM 10152
  Nfa DnaB N-extein
MTTTDDRGHTDFPPEPPGEDFGRQPPHDMAAEQSVLGGMLLSKDAIADVVEVIRPGDFYRPAHQAIYDTILDLYGRGEPADPVTVAAGLDRRGELKRIGGAPYLVTLTQTVPTAANAGYYAEIVAEKAILRRLVEAGTRIVQYGYAGADGQDIAEVVDRAQAEVYEVTERRTTEDFLPLEELLQPTMDEIDSIASRGGISLGVPTGFSELDELTNGLHPGQMIIVAARPGVGKSTLGMDFMRSCSIKHGLASVIFSLEMSRTEIVMRLLSAEAKIKLADMRSGRMSDDDWTKLARRMSEISEAPLFVDDSPNLTMMEIRAKARRLKQRHDLKLVVVDYLQLMTSGKKVESRQQEVSDFSRNLKLLAKELEVPVVAISQLNRGPEQRTDKRPMVSDLRESG

SEQ ID NO: 811 - protein, 156 aa, Nocardia farcinica IFM 10152
  Nfa RIR1 N-extein
MLNLYGPDGKIQFDKDREAARQYFLQHVNQNTVFFHNLDEKLDYLVEENYYEPEVLDRYSRAFVKSLFQQAYDKKFRFPTFLGAFKYYTSYTLKTFDGKRYLERFEDRVCMVALTLAAGDEELARKLVDEIIDGRFQPATPTFLNSGKKQRGEPVS

SEQ ID NO: 812 - protein, 14 aa, Neosartorya fischeri
  Nfi PRP8 N-extein
TAFPSWEGLFWERA

SEQ ID NO: 813 - protein, 54 aa, Neosartorya glabra FRR2163; identical to SEQ ID NO: 676
  Ngl-FR2163 PRP8 N-extein

SEQ ID NO: 814 - protein, 54 aa, Neosartorya glabra FRR1833; identical to SEQ ID NO: 676
  Ngl-FRR1833 PRP8 N-extein

SEQ ID NO: 815 - protein, 331 aa, Natronomonas pharaonis DSM 2160
  Nph CDC21 N-extein
MARAEDTEIIDKFEQFYRDYYRDEIGQLAQKYPEDQRSLYIDWDDLYRFDADLADDLVAQPDQIRDYAEEALRLYDLPVDVQLGRAHVRVHNLQQTTGIRDIRARHRGNLVEVTGIVRKATDVRPKITEAAFECQRCGTLTRIPQTAGDFHDPHECQGCERQGPFDINFDQSEFVDAQKIRVQESPEGLRGGETPQSIDVHIEDDITGKVTAGDHVRVAGVLHLDQQGSEQEKSPVFDVYMDGMSVEIEDEQFEDMDITDEDKQRIIELSNDDGIYQQMVESMAPSIYGYEQQKLAIIMQLFSGVTKDLPDGSRIRGDLHMLLIGDPGTGK

SEQ ID NO: 816 - protein, 518 aa, Natronomonas pharaonis DSM 2160
  Nph PolB-1 N-extein
MEQGTLGDFDTGASDDADAGRPAAEAAAVAGSDDGDASVVDVADYEFPDADGQIECAVTQVDYTVEGGGDDEHPVLHVFGRRPNDGDDEPLHIRVYGFKPYFYTPLSELDIADSAEAPLTEADIVDSRLDHDRLTGVETEADDGDGPNELVVYESIRGEKLVKVFGQTPRDVGQLRDRFEHYEADILFPNRLLIDKDITSGVRAPNRELDDGSLKVHHSELTATAVDAESRLHILDIEVDDRHGFPEDGEEEIVCLTSYDSYRDEYVIWLSESDDGVGGPEALGGYDPIGDGPLDVDVRRFDEEATMLVDYLDYIEDTDPDVLSGWNFDDFDAPYLIDRIDRIASRHDRLYSDRLSRVREVWDSGWGGPNIKGRVVFDLLYAYQRTQFSELDSYRLDAVGEEELGVGKERYPGDIGDLWEDDPERLLEYNLRDVELCVELNRKQNIVEFWEEVASFVGCKLEDATTPGDAVDMYVLHKIHGEFALPSKGHQEGEEYEGGAVFDPISGVKEMVSVLDLK

SEQ ID NO: 817 - protein, 1006 aa, Natronomonas pharaonis DSM 2160
  Nph PolB-2 N-extein
MEQGTLGDFDTGASDDADAGRPAAEAAAVAGSDDGDASVVDVADYEFPDADGQIECAVTQVDYTVEGGGDDEHPVLHVFGRRPNDGDDEPLHIRVYGFKPYFYTPLSELDIADSAEAPLTEADIVDSRLDHDRLTGVETEADDGDGPNELVVYESIRGEKLVKVFGQTPRDVGQLRDRFEHYEADILFPNRLLIDKDITSGVRAPNRELDDGSLKVHHSELTATAVDAESRLHILDIEVDDRHGFPEDGEEEIVCLTSYDSYRDEYVIWLSESDDGVGGPEALGGYDPIGDGPLDVDVRRFDEEATMLVDYLDYIEDTDPDVLSGWNFDDFDAPYLIDRIDRIASRHDRLYSDRLSRVREVWDSGWGGPNIKGRVVFDLLYAYQRTQFSELDSYRLDAVGEEELGVGKERYPGDIGDLWEDDPERLLEYNLRDVELCVELNRKQNIVEFWEEVASFVGCKLEDATTPGDAVDMYVLHKIHGEFALPSKGHQEGEEYEGGAVFDPISGVKEMVSVLDLKCFSGDTDVATPDGIKNIQEVAVGDPVYTLNPETFECEIKPVVDTQSYRNKYGELHHVAGRTHDFKVTENHRFLLSETVDLDSPGPDDYALSEYRELPEYERLAFPNHEPMAGATREEFDLAGAVDDGHAVVCAHDGRSAFRTAMPAGVEAALDRADGTSQLAATEEKTGTYRIPIDTYRERRDVIDEHADEVLLKYEREDNQIPTGFGMDDWLELVGWFVTAGRFAHEAKRIVLRRQDEEGRSAIRSLLERMELPYDADGTRVTVSNRVLYDWFVKNCGDGATETRLPEWVFELDAAHLRTLLETLVDGDGSRTDSGLGEFWTQSDRLKDDVVRLAVRCGEKPTVSENQDGTWYVSVGTRGSMKKSNATVEDHDGDVHCITAEDNHVVLAGRNGHLQWVGQSLYPMCMVTINASPETKVDPDNYGAETYAAPNGTHFRKEPDGVIREMVDELLEEREEKKSLRNEHEPSTDAYETYDRQQSAVKVIMN

SEQ ID NO: 818 - protein, 77 aa, Natronomonas pharaonis DSM 2160
  Nph rPol A'' N-extein
MTEITDDVEAIVEDTDLPRRLKDEVYETLESRSGVAPEDVEDIVQAVESQYLETRVDPLDPVGTVSAQSIGEPGTQM

SEQ ID NO: 819 - protein, 77 aa, Nostoc punctiforme
  Npu GyrB N-extein
MPYEKLEITTPAPVLSWANHSLGPEETKMAKNVASLPFVFKHVALMPDVHLGKGALVGSVIATKEAIIPAAVGVDIG

SEQ ID NO: 820 - protein, 38 aa, Neosartorya quadricincta, strain NRRL 4175
  Nqu PRP8 N-extein
AYRTDVIQALGGVETILEHTLFKATAFPSWEGLFWERA

SEQ ID NO: 821 - protein, 246 aa, Nocardioides species JS614
  Nsp-JS614 DnaB N-extein
MSVTEQGPRGLPEPPIDDWGDGPAAYAPGERPTSPGDRTPPQDMAAEQSVLGSMLISKDAIADVAEVLRGVDFYRPSHETIHDAIIDLYGRGEPVDMVTVAAELQRRGELQRIGGAPYLHTLSANVPIAANAGYYAEIVREKAILRRLVDAGTKIVQIGYAGEGQVDDIVDTAQAEVYKITDRRAAEDYAPLSDIMDGVLDEIEAIGNREAGLYGVPTGFADLDDLTNGLHSGQMIIVAARPAMGK

SEQ ID NO: 822 - protein, 61 aa, Nocardioides species JS614
  Nsp-JS614 TOPRIM N-extein
MAGRIRDEDIAEVREKARIDDVVSQYVTLRPAGGGSLKGLCPFHDEKSPSFNVNPSRGFFH

SEQ ID NO: 823 - protein, 275 aa, Nostoc species PCC7120, (Anabaena sp. PCC7120)
  Nsp-PCC7120 RIR1 N-extein
MVRELERKRQSARFPESAPAANPVFFRTYSRRTEAGLRETWDEVCDRTLKDLIELGKLSPEEVAILDKTQRNLTALPSGRWLWVGGTDWINKSKNFSGAYNCTSTNLQDWKAFGLMMNLAMMGCGTGAVIEPEYINQLPPIRNHLNIIVKGEIGTTPKHLRREYTQTHIEGNSATIYVGDSREGWVESYQALLELSTDERFTDEVQVFVDVSDVRQSGETLNGFGGVANPVKLPGLYQRCAAILNKALGRKLNSVECCLLIDEGAVTIVAGNIRR

SEQ ID NO: 824 - protein, 334 aa, Pyrococcus abyssi
  Pab CDC21-1 N-extein
MDREEIIERFLRFLREYAEEGEEPLYIGKIKDLLAITPKRSIAINWMHLNSFDPELAEEVLENPEECILAAEDAIQIILKEDIMREDVPRIHARFYNLPKTLMVKEIGAEHINKLIQVEGVVTRVTEIKPFVSSAVFVCKDCGHEMVVQQKPYEGFVAVKKCEKCGSKNVQLDVEKSKFVNFQMFRIQDRPETLKGGQMPRFIDGILLDDIVDTAMPGDRVVVVGILRVVQEKREKVPTFKKVIEVNYIEPVSKEIEELEITPEEEQKIRELAKRKDIVDAIVDSIAPAIYGYREVKKGIALALFGGVPRTLPDGTRLRGDIHVLLVGDPGVAK

SEQ ID NO: 825 - protein, 525 aa, Pyrococcus abyssi
  Pab CDC21-2 N-extein
MDREEIIERFLRFLREYAEEGEEPLYIGKIKDLLAITPKRSIAINWMHLNSFDPELAEEVLENPEECILAAEDAIQIILKEDIMREDVPRIHARFYNLPKTLMVKEIGAEHINKLIQVEGVVTRVTEIKPFVSSAVFVCKDCGHEMVVQQKPYEGFVAVKKCEKCGSKNVQLDVEKSKFVNFQMFRIQDRPETLKGGQMPRFIDGILLDDIVDTAMPGDRVVVVGILRVVQEKREKVPTFKKVIEVNYIEPVSKEIEELEITPEEEQKIRELAKRKDIVDAIVDSIAPAIYGYREVKKGIALALFGGVPRTLPDGTRLRGDIHVLLVGDPGVAKCVDYETEVVLGNGERKKIGEIVERAIEEAEKNGKLGRVDDGFYAPIDIEVYSLDLETLKVRKARANIAWKRTAPKKMMLVKTRGGKRIRVTPTHPFFVLEEGKVAMRKARDLEEGNKIATIEGLSVSWDEVAEILEYEPKDPWVYDLQVPGYHNFLANGIFVHNSQLLRYIANLAPRAIYTSGKSSSAAGL

SEQ ID NO: 826 - protein, 20 aa, Pyrococcus abyssi
  Pab IF2 N-extein
MTKRIRQPIIAVLGHVDHGK

SEQ ID NO: 827 - protein, 453 aa, Pyrococcus abyssi
  Pab KlbA N-extein
MSEEKKKVRSWIDEILSGDNLTLEAILKKSESERKEEKKEETPLPKTESLSLASILAGVQKKEETEKETETLPFAVLEKTGGAPRLEDILKRSRPQERKEEGVGIQGILVPSSKYAGQVVRVLDVYGNVRIVRVKGEAVPIYEISVPELSREEEKLLKLVRDRAIVEIQIDPESIPNLEERRKVFLREVRKMVKEMAPTLSEGRVELLSELIVQNMIGYGKLDPLVRDDNLEEIMVIGIDRPVYVWHRRFGMCKTNIVFKTERELLTIIERIAREVGRRIDQQNPLLDARLPDGSRVNATLPPISLDGPTLTIRKFKKDPLTIIDLIKFRTLSSDVAAFLWLLVDGLGVKPANILVAGGTGSGKTTTLNSLAMFIPPSERVISIEDTAELQLPIEHWVRLETRPPNVEGKGEITMDDLVKNTLRMRPDRIIVGEVRGPEARTMFTAMNTGHDG

SEQ ID NO: 828 - protein, 220 aa, Pyrococcus abyssi
  Pab Lon N-extein
MLKFYKMGIKRLSGEMTMGEERMDLGIEFETTEEIPVPERLIDQVIGQDHAVEVIKTAAKQRRHVLLIGEPGTGKSMLGQAMAELLPTEDLEDILVFPNPEDENMPRIKTVPAGQGRRIVEEYKRKAKEQENIRFYLLFFVFFIVAMAVFMSRGDPNTLLLGVFVILIALMVTANMRFRTQAMVPKLLVDNSGRKRAPFVDATGAHAGALLGDVRHDPFQ

SEQ ID NO: 829 - protein, 155 aa, Pyrococcus abyssi
  Pab Moaa N-extein
MAETVGEIPSGEKEFEASTKRLREIIEFPELSEDEFHELLKSASRGYGSPLPHRTYSLCPETRRVVPAVVWEKDGKVWITKKCPEGMITDLYYEDVELYYRFSRWKFEEKKLFSVNVENTGVNCPFDCGLCARHRSHTSLLNIVLTNRCNLNCWY

SEQ ID NO: 830 - protein, 954 aa, Pyrococcus abyssi
  Pab Pol-II N-extein
MELPKEMEEYFEMLQREIDKAYEIAKKARAQGKDPSLDVEIPQATDMAGRVESLVGPPGVAKRIRELVKEYGKEIAALKIVDEIIEGKFGDLGSREKYAEQAVRTALAILTEGIVSAPIEGIANVKIKRNTWADNSEYLALYYAGPIRSSGGTAQALSVLVGDYVRRKLGLDRFKPSEKHIERMVEEVDLYHRAVTRLQYHPSPEEVRLAMRNIPIEITGEATDDVEVSHRDVPGVETNQLRGGAILVLAEGVLQKAKKLVKYIDKMGIEGWEWLKEFVEAKEKGEPKEEGKEESLAESTLEETKVEVDMGFYYSLYQKFKEEIAPSDKYAKEVIGGRPLFSDPSKPGGFRLRYGRSRASGFATWGINPATMILVDEFLAIGTQLKTERPGKGAVVTPVTTIEGPIVKLKDGSVLRVDDYNLALKVREDVEEILYLGDAVIAFGDFVENNQTLLPANYCEEWWILEFVKALKEIYEVHLEPFTENEEESIEEASDYLEIDPEFLKEMLRDPLRVKPPVELAIHFSEVLGIPLHPYYTLYWNSVEPKDVEKLWRLLKNYAEIEWSNFRGIKFAKKIVISQEKLGDSKRTLELLGLPHTVRDGNVIVDYPWAAALLTPLGNLNWEFMAKPLYATIDIINENNEIKLRDRGISWIGARMGRPEKAKERKMKPPVQVLFPIGLAGGSSRDIKKAAEEGKVAEVEIAFFKCPKCGHVGPEHLCPNCGTRKELLWVCPRCNAEYPESQAEGYNYTCPKCNVKLRPYAKRKIRPSELLNRAMENVKVYGVDKLKGVMGMTSGWKMPEPLEKGLLRAKNDVYVFKDGTIRFDATDAPITHFRPREIGVSVEKLRELGYTHDFEGKPLVSEDQIVELKPQDIILSKEAGRYLLKVAKFVDDLLEKFYGLPRFYNAEKMEDLIGHLVIGLAPHTSAGIVGRIIGFVDALVGYAHPYFHAAKRRN

SEQ ID NO: 831 - protein, 61 aa, Pyrococcus abyssi
  Pab RFC-1 N-extein
MRDMEEVREVKVLEKPWVEKYRPQKLEEIVGQEHIVKRLKHYVKTGSMPHLLFAGPPGVGK

SEQ ID NO: 832 - protein, 647 aa, Pyrococcus abyssi
  Pab RFC-2 N-extein
MRDMEEVREVKVLEKPWVEKYRPQKLEEIVGQEHIVKRLKHYVKTGSMPHLLFAGPPGVGKCLTGDAKVIANGELTTIGELVERISNGKLGPTPVRGLTVLGIDEDGKLVELPVEYVYKDKTSELVKIRTRLGRELKVTPYHPLLVNRRNGKIEWVKAEELKPGDRLAIPSFLPAMLNDNPLAEWLGYFFGNGYTDSEERVVFESKSKELRKRFMELTRKLFQDAEIKEDSGKVYVSSSEVKRLVKSLNKDSIPEQAWKGLRSFLRAYFDCNAEIKDKIIVSTAGKEIAEQISYALAGLGIVAEVDDKGSVIISDPENVSRFLDEIGFSVEEKKEEAKALIKKSTLNLGIYVDKELISYVREKLKLSFYENETMWSPEKAREIAWKLMKEIYYRLDELERFKKALSKSVIIDWSEVEKKKEEISEKTGISVNEILEYAKGKRKPSLEEYVKIAKALGVELKETLEAIFTFGKKYLGYVISDEIETLEEVRKEELKRLKELLNDEKLKKGVAYLIFLAQNELLWDEIIEVEKLKGDFVIYDLHVPKYHNFIGGNLPTVLHNTTAALALARELFGENWRHNFLELNASDERGINVIREKVKEFARTKPIGGASFKIIFLDEADALTQDAQQALRRTMEMFSSNVRFILS

SEQ ID NO: 833 - protein, 301 aa, Pyrococcus abyssi
  Pab RIR1-1 N-extein
MPVEKVMKRDGRIVPFDESRIRWAVQRAMWEVGVRDERKLDEVVKNIVKRINELYDGKIPHIENIQDIVELELMRAGLFEVAKAYILYRKKKAEIREEKKRILNKKELDEIDKRFSINALRVLASRYLKRDENGNIIESPRELFERVSILAVIPDLLYDERVFDKDGNYKQDLKRVEYYLENFEKFDGKYSIGKYKLNKYHFERMVNLYRELAEKGKMKVSIDEFLSMLERGEFDKYEKEIEEYFKLMTNQVFMPNTPALINSGRPLGMLSACFVVPIEDDMESIMKAAHDVAMIQKMGGG

SEQ ID NO: 834 - protein, 722 aa, Pyrococcus abyssi
  Pab RIR1-2 N-extein
MPVEKVMKRDGRIVPFDESRIRWAVQRAMWEVGVRDERKLDEVVKNIVKRINELYDGKIPHIENIQDIVELELMRAGLFEVAKAYILYRKKKAEIREEKKRILNKKELDEIDKRFSINALRVLASRYLKRDENGNIIESPRELFERVSILAVIPDLLYDERVFDKDGNYKQDLKRVEYYLENFEKFDGKYSIGKYKLNKYHFERMVNLYRELAEKGKMKVSIDEFLSMLERGEFDKYEKEIEEYFKLMTNQVFMPNTPALINSGRPLGMLSACFVVPIEDDMESIMKAAHDVAMIQKMGGGCIDGNAKIIFENEGEEHLTTMAEMYERYRHLGEFYDENYNRWGIDVSSVPIYVKSFDPETRRVVKGRVRAIWKYELGEEIPKYEIRTHKGTKILTSPWHPFFVLTPDFEVIEKRADELKVGDILIGGMPDGEDHELIFDYWLAGFIAGNGNLDDSEREYKARELLDGIENGIPPKILRKGKNAVLSFITGLFDAEGHVNDKSGIELGMVNKKLIEAVTHYLNSLGIKARMREKRRKNGIDYIMHVEEYSSLLRFYELIGKHLQNNEKKEKLEILLHKHNGGAFDLSLNFNAFKEWASRYGVEFKTNGNQILAIIGNEKVSLGQWHARGHVSKAVLVKMLRKLYEVTKNDEVKEMLHLIESLEVVKEITITNEPKTFYDLTVDKYQNYLAGENGMIFVHNTGLNFSKLRPEGDIVGTTTGAA

SEQ ID NO: 835 - protein, 1297 aa, Pyrococcus abyssi
  Pab RIR1-3 N-extein
MPVEKVMKRDGRIVPFDESRIRWAVQRAMWEVGVRDERKLDEVVKNIVKRINELYDGKIPHIENIQDIVELELMRAGLFEVAKAYILYRKKKAEIREEKKRILNKKELDEIDKRFSINALRVLASRYLKRDENGNIIESPRELFERVSILAVIPDLLYDERVFDKDGNYKQDLKRVEYYLENFEKFDGKYSIGKYKLNKYHFERMVNLYRELAEKGKMKVSIDEFLSMLERGEFDKYEKEIEEYFKLMTNQVFMPNTPALINSGRPLGMLSACFVVPIEDDMESIMKAAHDVAMIQKMGGGCIDGNAKIIFENEGEEHLTTMAEMYERYRHLGEFYDENYNRWGIDVSSVPIYVKSFDPETRRVVKGRVRAIWKYELGEEIPKYEIRTHKGTKILTSPWHPFFVLTPDFEVIEKRADELKVGDILIGGMPDGEDHELIFDYWLAGFIAGNGNLDDSEREYKARELLDGIENGIPPKILRKGKNAVLSFITGLFDAEGHVNDKSGIELGMVNKKLIEAVTHYLNSLGIKARMREKRRKNGIDYIMHVEEYSSLLRFYELIGKHLQNNEKKEKLEILLHKHNGGAFDLSLNFNAFKEWASRYGVEFKTNGNQILAIIGNEKVSLGQWHARGHVSKAVLVKMLRKLYEVTKNDEVKEMLHLIESLEVVKEITITNEPKTFYDLTVDKYQNYLAGENGMIFVHNTGLNFSKLRPEGDIVGTTTGAACFTGDTRILTEKGLIPIEEIVHETGKKPKVVTHAGLKDIIETYDNGEMEVFRVTTEDGYELKVTGDHKFLVFDENGNPTLKPLKELKVGDYVYILAPEWKGGEYVELDTNIELKGKGYNVNLPSKLDEKLAYLLGIIYADGHIRHYFENGKRKNSKIEIYLHQDETEIKEKVKRYFKEIFGIEPKEFLKEEQHKVILVIPSTKIVKFLEINGLLKDKSENIRVPEAIFRSRPSVIAAFLAGFFDGDGSIDQNYRIAFKSISREFIKEAQLLFLALGIVTSIQEYNPPNPNNKTVYTLRVQTRDMKIKAFNVLKESVKLSKIMKEAISKLEENGKNKKFSFPFNAIYHIKDPKIRAKIQRDYKILSYNSKVTHRAFINNILKLKEELGLDDEEVKYFEMLSKLYPTKITKIEPLGKAHVYDLQVEDVHLLTGNGIYTSNSGPVSFMHLIDAVSDVIKQGGVRRGANMGILEIWHPDIEKFIHAKEKNIGTNVLSNFNISVGIWEDFWEALKEGKKYPLINPRTGEVVKEIDPKTLFEELAYMAWAKADPGVIFFDIINRRNVLKEAKGGPIRATNP

SEQ ID NO: 836 - protein, 97 aa, Pyrococcus abyssi
  Pab RtcB (Pab Hyp-2) N-extein
MTVPLKRIDKIRWEIPKFDKRMRVPGRVYADDVLLEKMKSDRTLEQAANVAMLPGIYKYSIVMPDGHQGYGFPIGGVAAFDVNEGVISPGGIGYDIN

SEQ ID NO: 837 - protein, 240 aa, Pyrococcus abyssi
  Pab VMA N-extein
MVAKGRIIRVTGPLVVADGMKGAKMYEVVRVGELGLIGEIIRLEGDKAVIQVYEETAGVRPGEPVIGTGSSLSVELGPGLLTSIYDGIQRPLEVIREKTGDFIARGVTAPALPRDKKWHFIPKVKVGDKVVGGDIIGEVPETSIITHKIMVPPGIEGEIVEIAEEGEYTIEEVIAKVKTPSGEIKELKMYQRWPVRVKRPYKEKLPPEVPLITGQRVIDTFFPQAKGGTAAIPGPFGSGK

SEQ ID NO: 838 - protein, 463 aa, Pyrococcus furiosus
  Pfu KlbA N-extein
MGVYEVRKNMEEDKKKKKSWIDEILSSDNLSLESILKKSEEEKPKKVSVESKSLSLGDILSGRVKEEEKKREASPLQSLLGGGPPKLEEILKKEEPKREEKKPKIERGALGLQEILAGTTPRTTSYAGEVRVLDVYGNIRILKVKGEPVPIYEINMPKLSKEEERLVKMVRDRAIVEIQIDPESIPNPEERRKVFLREVRRMVKEMAPTLSEGRVELISELIVQNMIGYGKIDPLVRDDNLEEIMVIGINKPVYVWHRRFNMCKTNIVFTDERELLTIIERIAREVGRRIDQQNPLLDARLPDGSRVNATLPPISLDGPTLTIRKFKKDPLTIIDLIRFGTLNSEVAAFLWLLVDGLGVKPANILVAGGTGSGKTTTLNSLAMFIPPSERVISIEDTAELQLPIEHWVRLETRPPNVEGKGEITMDDLVKNTLRMRPDRIIVGEVRGPEARTMFTAMNTGHDG

SEQ ID NO: 839 - protein, 301 aa, Pyrococcus furiosus
  Pfu RIR1-1 N-extein
MAVEKVMKRDGRIVPFDESRIRWAVQRAMWEVGIRDEKKLDEVVKSIVQRINELYDGKIPHIENIQDIVELELMRAGLFEVAKAYILYRKKKAEIREEKKRILNKKELDEIDKRFSINALRVLASRYLKKDENGNIVESPRELFERVAILAVIPDLLYDERVFDKNGNYSQDLKRVEYYLEHFEEFDRKYSIGKYKLNKYHFERMVNLYKELAEQGKMKVSIDEFLAMLEKGEFNEYEKEINEYFRLMTNQIFMPNTPALINSGRPLGMLSACFVVPIEDDMESIMKAAHDVAMIQKMGGG

SEQ ID NO: 840 - protein, 914 aa, Pyrococcus furiosus
  Pfu RIR1-2 N-extein
MAVEKVMKRDGRIVPFDESRIRWAVQRAMWEVGIRDEKKLDEVVKSIVQRINELYDGKIPHIENIQDIVELELMRAGLFEVAKAYILYRKKKAEIREEKKRILNKKELDEIDKRFSINALRVLASRYLKKDENGNIVESPRELFERVAILAVIPDLLYDERVFDKNGNYSQDLKRVEYYLEHFEEFDRKYSIGKYKLNKYHFERMVNLYKELAEQGKMKVSIDEFLAMLEKGEFNEYEKEINEYFRLMTNQIFMPNTPALINSGRPLGMLSACFVVPIEDDMESIMKAAHDVAMIQKMGGGCIDGKAKIIFENEGEEHLTTMEEMYERYKHLGEFYDEEYNRWGIDVSNVPIYVKSFDPESKRVVKGKVNVIWKYELGKDVTKYEIITNKGTKILTSPWHPFFVLTPDFKIVEKRADELKEGDILIGGMPDGEDYKFIFDYWLAGFIAGDGCFDKYHSHVKGHEYIYDRLRIYDYRIETFEIINDYLEKTFGRKYSIQKDRNIYYIDIKARNITSHYLKLLEGIDNGIPPQILKEGKNAVLSFIAGLFDAEGHVSNKPGIELGMVNKRLIEDVTHYLNALGIKARIREKLRKDGIDYVLHVEEYSSLLRFYELIGKNLQNEEKREKLEKVLSNHKGGNFGLPLNFNAFKEWASEYGVEFKTNGSQTIAIINDERISLGQWHTRNRVSKAVLVKMLRKLYEATKDEEVKRMLHLIEGLEVVRHITTTNEPRTFYDLTVENYQNYLAGENGMIFVHNTGLNFSKLRPEGDIVGTTTGAASGPVSFMHLIDAVSDVIKQGGVRRGANMGILEIWHPDIEKFIHAKEKNIGTNVLSNFNISVGIWEDFWEALKEGKKYPLINPRTGEVVKEVDPKTLFEELAYMAWAKADPGVIFFDVINRRNVLKKAKGGPIRATNP

SEQ ID NO: 841 - protein, 240 aa, Pyrococcus furiosus
  Pfu VMA N-extein
MPAKGRIIRVTGPLVIADGMKGAKMYEVVRVGELGLIGEIIRLEGDKAVIQVYEETAGLKPGEPVEGTGSSLSVELGPGLLTSIYDGIQRPLEVLREKSGHFIARGISAPALPRDKKWHFTPKVKVGDKVVGGDIIGEVPETSIIVHKIMVPPGIEGEIVEIADEGEYTIEEVIAKVKTPSGEIKELKMYQRWPVRVKRPYKEKLPPEVPLVTGQRVIDTFFPQAKGGTAAIPGPFGSGK

SEQ ID NO: 842 - protein, 334 aa, Pyrococcus horikoshii OT3
  Pho CDC21-1 N-extein
MEREEIIERFLKFFREYAEEGEEPLYMGKIKDLLTITPKRSIVINWMHLNSYDPELAEEVIENPEECILAAEDAIQIILKEDFLREDVPKIHARFHNLPKTLMVKEVGAEHINKLIQVEGVVTRVTEIKPFVSVAVFVCKDCGHEMVVPQKPYEGFVAVKKCEQCGSKNVQLDVEKSKFVNFQMFRIQDRPESLRGGQMPRFIDGILLDDIVDTAMPGDRVIVVGILRVIQEKREKVPTFKKVIEVNHIEPISKELEELEISPEDEQKIRELAKRKDIVSAIVDSIAPAIYGYKEVKKGIALALFGGVSRTLPDGTRLRGDIHVLLVGDPGVAK

SEQ ID NO: 843 - protein, 529 aa, Pyrococcus horikoshii OT3
  Pho CDC21-2 N-extein
MEREEIIERFLKFFREYAEEGEEPLYMGKIKDLLTITPKRSIVINWMHLNSYDPELAEEVIENPEECILAAEDAIQIILKEDFLREDVPKIHARFHNLPKTLMVKEVGAEHINKLIQVEGVVTRVTEIKPFVSVAVFVCKDCGHEMVVPQKPYEGFVAVKKCEQCGSKNVQLDVEKSKFVNFQMFRIQDRPESLRGGQMPRFIDGILLDDIVDTAMPGDRVIVVGILRVIQEKREKVPTFKKVIEVNHIEPISKELEELEISPEDEQKIRELAKRKDIVSAIVDSIAPAIYGYKEVKKGIALALFGGVSRTLPDGTRLRGDIHVLLVGDPGVAKCVDYDTEVLLGDGRKRKIGEIVEEAIKKAEKEGKLGRVDDGFYAPINLELYALDVRTLKVRKVKADIAWKRTTPEKMLRIRTKRGREIRVTPTHPFFTLEEGRIKTKKAYELKVGEKIATPREEAPEAEIFWDEVVEIEEYKPNNSWVYDLQVPEHHNFIANGIFVHNSQLLRYVANLAPRAIYTSGKSSSAAGL

SEQ ID NO: 844 - protein, 22 aa, Pyrococcus horikoshii OT3
  Pho IF2 N-extein
MSYVKRIRQPIIAVLGHVDHGK

SEQ ID NO: 845 - protein, 451 aa, Pyrococcus horikoshii OT3
  Pho KlbA N-extein
MSEKEEKKRARSWIDEILSSDNLTLEAILKKSSGEGKSTPEKPKTESLSRGNILPTPSPQKQEAGEGLPLAFLEKTGALRLEDILKKPEEERKEEEVPIRIQEILTPPTSKKYTGQILKVLDVYGNVRIIRVKGEAVPIYELSIPELSKDEEKLLKLVRDRAIVEIQIDPESIPNLEERRRIFLREVRKMVKEMAPTLSEGRVELLSELIVQNMIGYGKLDPLVRDDNLEEIMVIGTNRPVYVWHRRFGMCKTNITFTSEREILTIIERIAREVGRRIDQQNPLLDARLPDGSRVNATLPPISLDGPTITIRKFKKDPLTIIDLIKFRTLNSEVAAFLWLLVDGLGVKPANILVAGGTGSGKTTTLNSLAMFIPPSERVISIEDTAELQLPIEHWVRLETRPPNVEGKGEITMDDLVKNTLRMRPDRIIVGEVRGPEARTMFTAMNTGHDG

SEQ ID NO: 846 - protein, 346 aa, Pyrococcus horikoshii OT3
  Pho LHR N-extein
MMGNVRWAKRKYTDDEIYSILDPLVREWFKRKFNSFTPPQRYAIVEIHKGENVLISSPTGSGKTLSAFLAIISELISLGRKGKLEDKIYCVYISPLRALNNDIRRNLEEPLREIKELAQELGEEIPEIRIAVRTSDTSSYEKSKMVKKPPHILITTPESLAIALNAPKFRERLRDVRWVIVDEVHALAENKRGSHLALTLERLRELVGRDFVRIGLSATIHPLEEVAKFVFGFNDDGTPRSGLIVDVSFAKQTEIKVESVVEDLIYTDAETLSNALYNRLAELIRKHKTTLIFTNTRSGAERVAFNLKKRFPEFKGLIETHHSSLSREVRLDVEEKLKRGELRAVV

SEQ ID NO: 847 - protein, 210 aa, Pyrococcus horikoshii OT3
  Pho Lon N-extein
MLSGESEMDEERMDLGIEFETTEEIPVPERLIDQVIGQDHAVEVIKTAAKQRRHVLLIGEPGTGKSMLGQAMAELLPTEELEDILVFPNPEDENMPRIKTVPAGQGRKIVEEYRRKAKEQEGVRFYLLFFVFFIVAMAVFLSHGDPNTLLLGVFVILVALMVTANMRFKTQAMVPKLLVDNSGRKRAPFVDATGAHAGALLGDVRHDPFQ

SEQ ID NO: 848 - protein, 492 aa, Pyrococcus horikoshii OT3
  Pho Pol I N-extein
MILDADYITEDGKPIIRIFKKENGEFKVEYDRNFRPYIYALLRDDSAIDEIKKITAQRHGKVVRIVETEKIQRKFLGRPIEVWKLYLEHPQDVPAIRDKIREHPAVVDIFEYDIPFAKRYLIDKGLTPMEGNEKLTFLAVDIETLYHEGEEFGKGPVIMISYADEEGAKVITWKKIDLPYVEVVSSEREMIKRLIRVIKEKDPDVIITYNGDNFDFPYLLKRAEKLGIKLLLGRDNSEPKMQKMGDSLAVEIKGRIHFDLFPVIRRTINLPTYTLEAVYEAIFGKPKEKVYADEIAKAWETGEGLERVAKYSMEDAKVTYELGREFFPMEAQLARLVGQPVWDVSRSSTGNLVEWFLLRKAYERNELAPNKPDEKEYERRLRESYEGGYVKEPEKGLWEGIVSLDFRSLYPSIIITHNVSPDTLNREGCEEYDVAPKVGHRFCKDFPGFIPSLLGQLLEERQKIKKRMKESKDPVEKKLLDYRQRAIKILAN

SEQ ID NO: 849 - protein, 954 aa, Pyrococcus horikoshii OT3
  Pho Pol-II N-extein
MVLMELPKEMEEYFSMLQREIDKAYEIAKKARAQGKDPSLDVEIPQASDMAGRVESLVGPPGVAERIRELVKEYGKEIAALKIVDEIIDGKFGDLGSKEKYAEQAVRTALAILTEGVVSAPIEGIASVKIKRNTWSDNSEYLALYYAGPIRSSGGTAQALSVLVGDYVRRKLGLDRFKPSEKHIERMVEEVDLYHRTVSRLQYHPSPEEVRLAMRNIPIEITGEATDEVEVSHRDIPGVETNQLRGGAILVLAEGVLQKAKKLVKYIDKMGIEGWEWLKEFVEAKEKGEEIEEEGSAESTVEETKVEVDMGFYYSLYQKFKSEIAPNDKYAKEIIGGRPLFSDPSRNGGFRLRYGRSRVSGFATWGINPATMILVDEFLAIGTQLKTERPGKGAVVTPVTTIEGPIVKLKDGSVVKVDDYKLALKIRDEVEEILYLGDAVIAFGDFVENNQTLLPANYCEEWWILEFTKALNEIYEVELKPFEVNSSEDLEEAADYLEVDIEFLKELLKDPLRTKPPVELAIHFSEILGIPLHPYYTLYWNSVKPEQVEKLWRVLKEHAHIDWDNFRGIKFARRIVIPLEKLRDSKRALELLGLPHKVEGKNVIVDYPWAAALLTPLGNLEWEFRAKPLHTTIDIINENNEIKLRDRGISWIGARMGRPEKAKERKMKPPVQVLFPIGLAGGSSRDIKKAAEEGKVAEVEIALFKCPKCGHVGPEHICPNCGTRKELIWVCPRCNAEYPESQASGYNYTCPKCNVKLKPYAKRKIKPSELLKRAMDNVKVYGIDKLKGVMGMTSGWKMPEPLEKGLLRAKNDVYVFKDGTIRFDATDAPITHFRPREIGVSVEKLRELGYTHDFEGNPLVSEDQIVELKPQDIILSKEAGKYLLKVAKFVDDLLEKFYGLPRFYNAEKMEDLIGHLVIGLAPHTSAGIVGRIIGFVDALVGYAHPYFHAAKRRN

SEQ ID NO: 850 - protein, 953 aa, Pyrococcus horikoshii OT3
  Pho r-Gyr N-extein
MKAIYRGMCPNCRGAITDERLSNKNPCEGCLSEPILSEDYNELIVAVRNALKLRGTLKDWEELYRLNKEVSEIEELFEKSTGFKFWSAQRTWVKRIIRGKSFSIIAPTGMGKSTFGAFISIYFATKGKKSYIVVPTTPLVIQTVKKIESMLEKANVSVRLVYYHGNLRKKEKEEALEKIRNGDFDILITSSQFLATRFKELLKDKKFDLIFVDDVDAFLKASKNIDRSLIMLGFSEEIIGRAWEVIKLKKQLAKLLQNEKKNEEEIEKLNKEIEKIEDEIEEYKRRNKIGILIVASATGSAKGDRIKLYRELLGFEVGSGRSVLRNIVDTYLLPEKPIEEHVVELLRKLGKGGLIFVPIDKGIEYAEELTDYLKSQGFKVELVSAKNKKGLELFEKGEIDYLVGVATYYGTLVRGLDLPHLIRFAIFTGVPKFRFSMDLEQPTIYRVLGLMSEILEFLPEEKKSEGEKLYARLRRLIRNIPQYELMKIEEALAEGLELEGFHNHVLEVFKQSVEFLREVLKDEEVIKKIAENPFLSLKEIEGKLYIEIPDVRTYIQASGRTSRLFAGGITKGLSVIIVDDQKVFNGLIRQMRWRFVEFDIKKFEEVNLKEVLKEIDRDREKVKLVIEGKISEQVKDLVKSALMIVESPNKARTIASFFGQPSKRKIGDLTAYEVSIGDKMLTILASGGHMFDLVTNEGYHGVLILKNNGKPYFVPVYDTIKRCRDCGHQFVDWEQKGVCPRCGSRNVHDALENVKAMRELALEVDEILIGTDPDTEGEKIAWDIRNVLAPYAPNIKRIEFHEVTRPAILRAIREARDINEDRVNAQLVRRIEDRWIGFELSQKLWEVFENRNLSAGRVQTPVLGWIVQRYKEFTESETDFLGIILENGINVTIENAKGEVREVEVKDVIIEEKDVNPLPPYTTDTMLQDASRFLGFSATKTMQLAQDLFEAGL

SEQ ID NO: 851 - protein, 152 aa, Pyrococcus horikoshii OT3
  Pho RadA N-extein
MMIMVKKGSDPEVVEIDEIEGLGLELEEESTTSKKKKKEKEIKSIEDLPGVGPATAEKLREAGFDTLEAIAVASPIELKEVAGISEGAALKIIQAARKAANLGTFMRADEYLKKRESIGRISTGSKSLDKLLGGGIETQAITEVFGEFGSGK

SEQ ID NO: 852 - protein, 61 aa, Pyrococcus horikoshii OT3
  Pho RFC N-extein
MHNMEEVREVKVLEKPWVEKYRPQRLDEIVGQEHIVKRLKHYVKTGSMPHLLFAGPPGVGK

SEQ ID NO: 853 - protein, 467 aa, Pyrococcus horikoshii OT3
  Pho RIR1 N-extein
MKCRGVIMVVEKVMKRDGRIVPFDESRIRWAVQRAMWEVGVRDEKKLDEVVKAIVQRINELYDGKIPHIENIQDIVELELMRAGLFEVAKAYILYRKKKAEIREEKKRILNKKELDEIDKRFSINALRVLASRYLKRDENGNIIESPRELFERVAILAVIPDLLYDERVFDKDGNYSQDLKRVEYYLEHFEEFDGKYSIGKYKLNKYHFERMVNLYKELAEKGKMKVSIDEFLGMLERGEFNKYEKEIDEYFRLMTNQIFMPNTPALINSGRPLGMLSACFVVPIEDDMESIMKAAHDVALIQKAGGGTGINFSKLRPEGDIVGTTTGAASGPVSFMHLIDAVSDVIKQGGVRRGANMGILEIWHPDIEKFIHAKEKNIGTNVLSNFNISVGIWEDFLEALKEGKKYPLINPRTGEVVREVDPKSLFEELAYMAWAKADPGVIFFDIINRRNVLKEAKGGPIRATNP

SEQ ID NO: 854 - protein, 240 aa, Pyrococcus horikoshii OT3
  Pho VMA N-extein
MVAKGRIIRVTGPLVVADGMKGAKMYEVVRVGELGLIGEIIRLEGDKAVIQVYEETAGVRPGEPVVGTGASLSVELGPGLLTSIYDGIQRPLEVIREKTGDFIARGVTAPALPRDKKWHFIPKAKVGDKVVGGDIIGEVPETSIIVHKIMVPPGIEGEIVEIAEEGDYTIEEVIAKVKTPSGEIKELKMYQRWPVRVKRPYKEKLPPEVPLITGQRVIDTFFPQAKGGTAAIPGPFGSGK

SEQ ID NO: 855 - protein, 453 aa, Pelodictyon luteolum DSM 273
  Plut RIR1 N-extein
MKISRLFTSPGENVYDRFEYTQKSSVLRNTDGSKVFEMNELEVPKHWSQMAADILAQKYFRKTGVPQVDGDGNPLLDEEGRPVTGSEHSIRQVVHRLAGCWRQWGEKHGYFDSPEDAEAFYDEVAYMLIAQQGAPNSPQWFNTGLNFAYGITGPAQGHYHVDPATKKVVESEDAYTRPQAHACFIQSVNDDLVNEGGIFDLAVREARVFKFGSGSGTNYSNLRSSGEKLSGGGSSSGLMSFLKIFDSAAGAIKSGGTTRRAAKMVIIDIDHPDVEKFIEWKAREEDKVASLVAGSRICSRFLQAIVEEAILNGADRLENPKLQRLIENALHRAVPMSYIIRVLALVEQGYTTLDFEEYDTHYESEAYQTVGGQNSNNTVRVTNAFMKAVENNELWMLKERTTGKTARAVNARELWEKILLSAWKCADPGLQFDTTINEWHTCPAAGRINASNP

SEQ ID NO: 856 - protein, 297 aa, Polaromonas naphthalenivorans CJ2
  Pna RIR1 N-extein
MKREHFGRPQDLTATQPISHDVLKEKYLKPGESGVEDVYRRVARALASVELPAEREKHEALFLENLHAGAIGAGRIMSAAGTAIQATLINCFVQPVGDCIQGVDDGGYPGIYEALREAAETMRRGGGVGYDFSRIRPRGAEVKATASMASGPCSYINVFDQSCSTVESAGARRGAQMGVLRIDHPDVHEFITAKRTPGRWNNFNVSVGMSDGFMQALNDDQPWELVHKAKPGAALMAKGAFQRADGLWVYQTVAAREMWDTVMRSAYDFAEPGILFLDNINTDNNLRYCEAIAATNP

SEQ ID NO: 857 - protein, 297 aa, Polaromonas species JS666
  Posp-JS666 RIR1 N-extein
MKREHFGQPHDVTATQPISHDVLKEKYLKPGENGVEDLYRRVARALASVEPEAARAEHEALFLENLHAGAIGAGRIMSAAGTSIQATLINCFVQPVGDCIQGMDDGGYPGIYEALREAAETMRRGGGVGYDFSRIRPRGAEVKATASMASGPCSYINVFDQSCSTVESAGARRGAQMGVLRIDHPDVFEFITAKRTPGRWNNFNVSVGVSDAFMQALGDDQPWELVHRAKPGARLIAQGAFQRADGLWVYQTLAASELWDTVMRSAYDFAEPGILFLDHINQDNNLRYCESIEATNP

SEQ ID NO: 858 - protein, 151 aa, Pseudomonas aeruginosa phage phiEL
  PP-PhiEL Helicase N-extein
MLGLFSVKIKQTGDYVHITGVSYYDLAKDIEKFYSTSLLTKHQIRRESWDTIKVHNFFLVELHHIVGELLKIRNLRTRRRALSELKELIETETWIKDTVNPGGKPFDLKKLNQFNTVPFPQQLDFLQQYPIIVNSYHLKGMLLDAKPGSGK

SEQ ID NO: 859 - protein, 181 aa, Pseudomonas aeruginosa phage phiEL
  PP-PhiEL ORF11 N-extein
MTDEQDTSLSYAKWLVKYLRCNNLPKELIDDKRLRIDWEARTDDETLLAHFNEDSLSGIKTVRFLKDFFNYQAGYDRETRNTSFLRTTEVFRQQGINNFYFILQLNNPLLKGVDPFDPNLTPEQQVWVLEECRSNFWYFLREVCRLKPNQPFLANRGNISFIWSYLNHITTYMIMPRQQGK

SEQ ID NO: 860 - protein, 246 aa, Pseudomonas aeruginosa phage phiEL
  PP-PhiEL ORF39 N-extein
MVMKIKLREWANLPEETVLRWLNTRRWVEVTDDLDQVALTDTYALIITWHGMIIHRHYNDVPYSIKEMVPSNKVEGGEDTVYNDGTNATPINQFLKVILPTIIDPVEVDGIKRLIHIWQNKLNNLLVVMSERYVISATAESVAEFMEDEGISGIRDRVLSKEISIDEGEREFADYVRTAHSIANNTLTLLSRTGGVAINQAYQKTIIRGKVFDLNNSIMPNAITVPYAHGITNLADMLGERNAAGK

SEQ ID NO: 861 - protein, 144 aa, Pseudomonas aeruginosa phage phiEL
  PP-PhiEL ORF40 N-extein
MRATATISKANHYFRINGFYEEFAVRVILPFCKLNLCKMAKKPIPGTRKQAWFVQHVFARSNYDKSEYRLPIETLKEFVEFAGYRGYKESRLKIQDEPEIEGKDVVFEFNPGFDQFREGQGEWIEYMLSDGHLKVNNASTGFGK

SEQ ID NO: 862 - protein, 361 aa, Porphyra purpurea (chloroplast)
  Ppu DnaB N-extein
MLTQESEDLLKQIEKLSPDFFYFKSNSLVYRAILETVNPIDKIALVSLLTALNTNNLIRQLGRLETIMKLIENSPASNIIYEYSKVILDNYVKRLLLKSGDSLCLISCSKKQITQSVITSVASQLTIAYEILEDEGTYTLAEIFASLLVSLDTKKKISINSGIFSGFWQLDLITNGFQKSDLIIIAGRPSMGKTAFAINITRHIIKTSQYYVILFSLEMSTEQLLRRILAQECHLNSQKIQSGQLTNVEWQRIVEESKILANLNFYIDDSAEISCDIIKVKVKLLRLQGKKIKLIIIDYLQLLQESKKSENRSQELSLITRSLKILARELNLPILVLSQLNRNLESRHNKRPLLSDLRESG

SEQ ID NO: 863 - protein, 492 aa, Pyrococcus species GB-D
  Psp-GBD Pol N-extein
MILDADYITEDGKPIIRIFKKENGEFKVEYDRNFRPYIYALLKDDSQIDEVRKITAERHGKIVRIIDAEKVRKKFLGRPIEVWRLYFEHPQDVPAIRDKIREHSAVIDIFEYDIPFAKRYLIDKGLIPMEGDEELKLLAFDIETLYHEGEEFAKGPIIMISYADEEEAKVITWKKIDLPYVEVVSSEREMIKRFLKVIREKDPDVIITYNGDSFDLPYLVKRAEKLGIKLPLGRDGSEPKMQRLGDMTAVEIKGRIHFDLYHVIRRTINLPTYTLEAVYEAIFGKPKEKVYAHEIAEAWETGKGLERVAKYSMEDAKVTYELGREFFPMEAQLSRLVGQPLWDVSRSSTGNLVEWYLLRKAYERNELAPNKPDEREYERRLRESYAGGYVKEPEKGLWEGLVSLDFRSLYPSIIITHNVSPDTLNREGCREYDVAPEVGHKFCKDFPGFIPSLLKRLLDERQEIKRKMKASKDPIEKKMLDYRQRAIKILAN

SEQ ID NO: 864 - protein, 282 aa, Pichia stipitis CBS 6054, taxon:322104
  Pst VMA N-extein
MAGALENARKEIKKLSLDADESLYGQIYSVSGPVIIAENMIGCAMYELVKVGHDTLVGEVIRISGDKATIQVYEETAGVTVGDPVLRTGKPLSVELGPGLMETIYDGIQRPLKAIKEQSQSIYIPRGIDAPALSRTVNYDFTPGSLKVGDHITGGDIFGSIYENSLLDDHKILLPPRARGTITSIAEAGSYNVDDNVLEVEFDGKKHSYSMMHTWPVRVPRPVAEKLAADYPLLTGQRVLDSLFPCVQGGTTCIPGAFGCGKTVISQSLSKFSNSDVIIYVG

SEQ ID NO: 865 - protein, 5986 aa, Pseudomonas syringae pv. tomato str. DC3000
  Psy Fha N-extein
MDVHQLALLARQPSAVLTERRSFWGMPKRGLALILANAMFWQPLLVQAEGIVVSGPNTSLSQAGNGVPIVNIATPNASGLSHNQYQQFNVESQGVILNNSTNQTQSTQLGGIIVGNSNLRGTAATTILNEVVGANASQLKGYTEVAGQAARVIVANPYGISCNGCGFINTPQVTLTTGKPVLDANGQLQRFNVQGGSISIDGVGLNADNVDQFDIITRSAKINAELHARRLNIIAGRNDVDAQTLNATALADDGGAKPELAIDSSALGGMYAGTIRLVGTEAGVGVRLAGNLAASGGDIQIDANGHLNVMQTAASAAVTVKANSAEVNGPVYAGASLAVTTAGDLVTRQNVAARDALTLSAGGQLNNSAVIEAGVNADNSRNGSGDVTLSANGLSNSGSITASRALQATVTQVLNNQGATLNGQASTRIAAAAIDNRQSGRILSQSGSVDINASQVLNSQSGLISSSGSLTITAGSLDNSQQGKLSSSSALSARISGQFLNQLGLVSANGYLLLNAATLDNRSAEISSLGNLTSTVGQFNNSEKGRLLANGSLQLTSDTLNNQNGSLAGQQNVQLTLGQLTNTGNGSVYGKNNLNLTLNGALNNDQGALRSDGTLDVRAASLSNNSGSTTSAGAASVTTSGAVVSRGGQILSDAGLTLISGSLDNSQSGRIAGNGVVLSTGAFDNQRSGNLSSTGTLQLTAAQVNNSDAGRIASAMALTAVVTGLNQTNDGRVYSNTDVSLDLSNGLLTNQGGLINAPGQLVLKNLNVVNNQSGKISSANGFTLAATSLDNTDGSLLSDKALVVRVNQLLTNLRGLVSATGLDLTAGSLNNRNGEISSLGGLTANIGQFDNREKGRLLANGALLLTADGLNNLNGIVSGQQGVQLNLGQLDNTGSGSLYAKSSLGLNVSGTLNNDQGVVRSDGTMDLKAAGLANTNGSVTSAGTGVLNFNGAAVNQGGQIVSDAQLTLTSGSLDNSQRGRIAGNGVLLSTGTFNNQQGGSLSSTGALRLTAGQVDNSAAGRIASAMALTAVVTGLNQTNDGRLYSNSDVSLDLSNGLLTNQGGLINAPGQLVLKNLSVVNNQSGKISSANGFTLAATSLDNTDGSILSDKALVVRVNQLLTNLRGLVSATGLDLTAGSLNNRNGEISSLGNLTANIGQFDNREKGRLLANGALLLTADGLNNLNGVVSGQQAVQLNLGQLNNTGAGSLYAKNALNLTLGGVLANDQGVVRSDGTMDLKAAGLANTNGSVTSAGTGVLNFNGAAVNQGGQIVSDAQLTLTSGSLDNSQRGRIAGNGVLLSTGTFNNQQGGSLSSTGALRLTAGQVDNSAAGRIASAMALTAVVIGLNQTNDGRLYSNTDVSLDMSNGLLNNQSGQISAPGQLLLKNLNVVNNQSGKISSANGFTLAATSLDNTDGSLISDKALIVRINQLLNNVRGQISASGVTLSAATLDNRNAELSSLGNLTANIGQFDNREKGRLLANGALLLTADGLNNLNGIVSGQQGVQLNLGQLTNTTGGSIYAKSSLGLTVIGAVNNDQGVLRSDGSLTLRAASLTNNAGSISSAGVASINVDGDVVNRGGQVLSDATLTLTSASLDNSQSGRIASKGLVLTTGVFDNHQDGRLTSTGELQLNAGLVNNSDAGRIASAMALTAVVTGLNQTRDGRLYSNSDVSLDLSNGVLTNQGGLINAPGQLLLKNLTSVSNRKGEISSANGFTLAATSLDNTEGSLLSDKALVVRINQWLTNLRGKISANGVNLSAATLDNRNAELSSLSTLTATLGGFDNTDKGRLLANGALLLTADTLNNQNGIVSGQQDMQLNLGQLSNTGAGSVYAKNRLGLTLTGALNNDQGVLRSDGALDLKAGSLANTGGSVTSAGVSGLATDAAVVNQGGQILSDATLTLTSASLDNSQSGRIASKGLVLTTGAFDNHQDGRLISTGTLQLNAGQVNNSEAGRIASAMALTAVVTGLDQTSDGRLYGNGDVSLDLSNGVLTNQGGQLSAPGQLLLKNLSSVNNRSGKISSANGFTLAATTLDNTAGSVISDKALIVRIDQLLTNLRGLISATGVELNAATLDNRNAELSSLGKLTATVGQFDNSGKGRLLANGALLLTADNLNNQGAGAVSGQQEVQLTLGQLTNIGSGSVYAKNTLGLTVSGALNNNQGVVRSDGTLDVSGASLANTAGSITSTGVSVLKVDGAVVNRGGQILSDSTLSLSSASVDNSQNGRIAGKGVTLATGAFDNQQGGRLTSTGTLKIDAGQVNNSDAGRIASAMALTAVVTGLDQSNDGRLYGNGDVSLDLSKGVLNNQGGLITAPGQLLLKNLTSVNNQNGEISSAKGFTLAATSLDNTAGSVLSDSALIVRVDQLLTNLRGLVSGNGIDLTANELNNQSGSVSSDADLLLTIAGTLSNQKGELTSAGNTTLNALSLANANGQVMADRFLKLVITDAIDNQAGTLGAGKGADIRAVSLDNRQAGALVTDGQLDLTLTDALDNRASGSLQAKGLMNLTSQTLDNRGGRITAQNMLMVRSASVDNRGGAIRAEKGLQLFVDALDNSQSGLSTAQKGLINSNAGLELVGTRLDNQNGLLNAAGLMQLQADSVLNGSGRIASQADLVAHIGGLTQQGGELVAQGNLTLTGNILDNQSGGLVGSTKALKIDVADIDNKAGELSSQIGVEIIAQTLDTSNGGKVLAGTALGLTVARLINLNKGLLFGNTLRLEGTRLDNAGGTLASQQDLNIGLSGALDNTGGLLSSESAMTVSAASLQNAAGSLSSADALSVTTTGALSNQAGSITTDAALTLTSASLDNSKAGKLSGKGATQVTTGTFDNSQNGRLTSSDTLRLTAGKVINQSAGRIASALALTASVTSLDQQAGELFSNTSLSLDLNNGQLNNQGGLINASGVLLLKNLNGIANQNGEISSAQAFSLNASSFDNSGGKLLSSQALTLVVNKALSNLKGNISGASLNINSDSLDNTQGMISSRAGLDVTVNTALTNAQGTLIGDGNVNLSAATADNRQGQMASKQNLDAQIGNLQQQNGQMLAQGTLTLRGDTLDNRQNGFIGATQALAINVTNIDNRGGELSSQDTMTLTGQQLNNSDKGQVLAQKALTLNIAQTTNRANGLLSSQAGLTLIGSTLDNTGGALSALKALGIDLSAALDNSQGLISGEDILTLNAGSLTNTAGSVSSAANLKLDSAGAISNQGGKLVTDGALNLTSTRLDNSQRGTISGKGLLTLKTGNFDNSQNGRVSSNDRLELTSAQLTNSSGGSIGSSQALTASVSRLSQQGGKLFSNTSLSLDLNNGQLDNQNGLINAPGALVLKNVNEVLNQNGEISSAQAFTVNAQQLNNTGGKLLSNQLLTLRIARALNNVKGMIAAAGVDAVVNTLDNTGGTLTSRNDLGLTVAGLLTNRDNGLINATQALKVGAASLDNQNGQVLGGTSLILNATSINNTAKGLINSTGTLNLTAGSLDAGNGGEVSAARDMTLVLNALSLNGGRVMGDAGLSIDMVGNDLNNLGGLITADGQLTFSRLRDLNNQSGEVSSAQSFTLSGRTLDNSSGKLISSNVLTVGATNLLNQNGLISGWQGLNVSGNRLDNRNSGTLSSRSGNLVTTLTGELLNGGNGALVSQNTLSVTADSLDNSGGILSSGTGQTLTVSGLLNNSQNGLIDSGAGLVINANALNNAAGNMTAQQDVSFGGSSLDNSAGNLSSKGAMTLDLLGSLTNTRGKLASGGTLLLRRSTAINNQAGQLISQSLMTLNTSGQLDNSNRGTVAANNTLTVVASGNVLNDADGLIYSQSANAHVQAASLSNVRGTVQSVGALRVDVVGDVNNQNGRIIAQGGDLNVSAANLYSQGGVLSSLQGLFTASVTGVLKNGYDANRQGGVIQAQRLNLTALSSFDNYGGRVSARTGEALINTASFDNRNGGLYAKGLVRVTGGNFDNSGDNDGQIAGGQVELNLSGALNNRFGIIESDSTLAVTAQSLDNQTGQLRALGGGGATNFQIGNLFDNRNGTLESANSDLILNAGSFLNGGGSLLHTGNGTFDISTANLTNAGGSIVTRGGLTLTADSWTNSSVIQAGRLTVNVGTLNQTAGGQLLASSLFSGSGSNWTNDGLIASDGSLSLNLGGTYGGNGRLSSVGTLGLSAAQVNLNAASTIAGGGDTSVSVGGQLSNVGRLTSATNLTVNAGSINNQGTLGSGQALTVTTGSLVNDRGLIFSGSNMSLRVSSLNNSYANIYSLGNLTIDRNGQGALADSIVNSSASIQSDGSMSLAASTIQNIRAILTTSNGGIYSAMIKEGACNREFYNNDCKTSTQTHTWDVTQREKLEVTAASAASGIAAGGSLSMNGGDLLNQSSTIATGGNFTATLNNLTNTGVEASDTETVTVYRSMRTSNASMWTKAAQDFTDKYWLGSSGYDASLTGLQAALADFVRITETDMPEFYKVTRLSNGDQSYAAVIQAAGAVNVNAQNDINNSVVRAGYTYVSGGSRTDTNAPGTQFSTRITVNQQLPPDLAQQQVNPLSLPGFSLPTGQNGLFRLSGQSGTAVAVAQPVGLPQSWTMGSAAVSVAQREQTVSDAQASTIQIGSVSQISNAARQLASVTRQSAGVSANASAFDTSAPGAAPIGGLVLPGHTSDSAGVTSVDSVTGIATGNQGSGVLLPVQNTGSTSGLPTITAISSGNSAAQNAGRVQGTQVSQAGQVVNGTQGSLVSAINQATTGVQSGTTATVTQVVVNAQGGQVIAPVRNPVATQGGPLVTSVGNPAVSQGVSVAAPVRNTVAAQGGPVTAAVLNPVVTQTNPVSATQNTSNQPATVAQASAITPVVSAAAQTVTRVEGLPSSSFVSRPQKYLIETNPVLTELKQFLSSDYLLAGLGYDPEVSAKRLGDGLYEQRLVQQAVVARTGQAFIDGQTSNEAQFKYLMNNAIASKQQLNLAVGVSLSSQQVAALTHDIVWLEEHEVNGEMVLVPVLYLAQADNRLGPTGALIAGNDVSLIAGQNLDNVGTLRAANNLSAAAGNDLVNSGLIEAGNRLDLLAGNDLINKAGGIIAGRDVTLTAIRGDVINERTVTSHQSAADDATWRKDFADSAARIEAANDMSLQAGRDVKNTGGVLQAGRDLSIAAGRDVAIDSAQTENGQTRGANSSNSSITQLGSTVSAGRDLTAQAGRDINVIASSIDAKRDIAMAATENLTLSSAADEQHSYGKSKKVTEQEDHVSQVSADLKAGGSVALQAGQNLAVISSRITAGKEAYLVAGENLDILAAQDSDYSLYDMKKKGSFGAKKTQRDEITDVKNIGSEITTGGDLLLSSGGDQKYQVAKLESGKDLTIESGGAVTFEGVKDLHQESHEKSKSDLAWNSSKGKGNTDETLRQSELVAKGEVAIRAVQGLKIDIKQIDQQSVSQTIDAMVKADPQLAWLKEAELRGDVDWRQVKEVHDSFKYDNSSLGQGAMLAIIIVVTVLTAGAGTFAAAGTAAGSAATGAATAAGVSATTAATIGTAANAAAVASLTSITAQGVVSTINNKGNLGAALKDTFSSDSLKSAAISGLTAGFTAGVIDPQLGGTTKPFNSLTKGFDLSTLGGAGGFALHAGAQGLASGAINTAVNGGSLGDNLVNGLVSQAGTVAAAIGFNQVGSFADQKFTEATLAGDVSGKAMWAEGGIGRTTLHALMGGAVSSATGGDFTTGAVAAGASQAMAGTLNEVFKNNPEYRQAAAQIVGLTAAGLAGGDVEKAAWVSAMADQYNRQLHPNEIPLLEKQSSSLAQEANISPAEAEKRLAQALAYYTDKDWNNALAAKGVVPDALTLKHLGIALSPLADSYAVVGDVPVVAGSKSYTPAETVALITEYRNTHTAEYADPSINNLNMQGAYAGDPKYQYADFYRKNLAVKTDFLSAVSGNLAGIAQGSGGALSDSLGSAWALMSDPVGVSEQAANGLMGLSKSPWGSFKNSVEASQTKEAMATIYDMQGNTAASAAIRAKSDLEFALNFLPANRAKTLAELGAGRKFAMDGPC

SEQ ID NO: 866 - protein, 236 aa, Picrophilus torridus, DSM 9790
  Pto VMA N-extein
MSGSIYSVSGPVVIAQDIENAKMFDVVRVGELGLIGEIIRISGNKATIQVYEDTSGLRPGEKVYSTGKPLSVELGPGLLSSIYDGIQRPLDVIRAKTGDFIAKGVNIPPLNEEKLWDFKPLVNEGQQVKSNFIIGEVDETEIIKNKIMVPYGVEGTVKSIKSGKFKVSDTVAIIETKNGDYEIKLKQIWPVREARRVFHKFPPEIPLITGQRVIDAFFPVAKGGTVAVPGPFGSGK

SEQ ID NO: 867 - protein, 361 aa, Porphyra yezoensis chloroplast, cultivar U-51
  Pye DnaB N-extein
MLTQQSISLLKSVEKISPDFFYFTSTSLLYRAALENVNHAKTKSVRNFFINLKNEKMIQDLNELNEVFSLIEQAPLSDTISEYSAVVIDNYIKRLLLACGDSLCLISCSKQLIEQKNITSIVSQLTKAYEILDEKDTQTLATILANLLVHLDTRKKISINSSILSGFTELDSITQGFKKSDLIILAGRPSMGKTAFAINITRYVINQKRSYVILFSLEMSTEQLLRRILAQECNLNGQKIQSGQLNNDEWQYVIQKSKTLANLNLYIDDSAKISTDTIKTKVKFFKLQGKNIELIIIDYLQLLQESRQSDNRSQELSLITRSLKILAKDLSLPILALSQLNRNLETRSDKRPLLSDLRESG

SEQ ID NO: 868 - protein, 265 aa, Roseovarius species 217
  Rsp Rir1 N-extein
MSRFAAPIAEQIWNMKYRFKTEDGGDASVEDSWRRIARALAVLEAEPEVWEDRFFHALEDFKFLPAGRITAGAGTARKVTLFNCFVMGTVPDDMGGIFDNLREAALTMQQGGGIGYDFSTIRPKGAEVKGVSADASGPLSFMDVWDAMCRTIMSAGSRRGAMMATMRCDHPDIEAFIAAKSDPARLRMFNLSVLITDAFMEAVKADGPWDLVFGGRVYHTVQARDLWNRIMQATYDYAEPGVIFIDRINAANNLSYCETIAATNP

SEQ ID NO: 869 - protein, 447 aa, Salmonella phage SETP12
  SaP-SETP12 dpol N-extein
MNLLYLDTETFSEADLKKVGSYAYAEHPTTEIVICTYAFDEGPVQVWDATDGSDMPRDLRRAMLKLQKPDSNLKLVGQNFLMFDRLVIKHCWGFELLVENIIDTMIVAFRHALPGSLASLCEVLNIDASMAKDKRGKALIQRFSKPTPKNYKIRRYTAATHPKEWAEFIAYAKSDITSMREVYKKMPKWGNSEFEDRVLWLDQVINDRGFKVDVALAEAAIEAVTRHKEELQEEAQRKYGGSLTGKDFLPILQELAPAHRIHNAQKSTLNDLLADEDLPDDARTIIEMRLGAASTASTKYAPLLLGRSSDDRRRGCLQYGGAKRTLRWAGKGFQPQNLARGYYHDDELDRGIAALLKGRAHRRFDVAKLTASTVRSCIIPEAGRKFVVADYSNVEGRGLAWLAGEETALDTFRAGLDIYCVTAGKMFGMDPDDIKKERKDLRQIGKA

SEQ ID NO: 870 - protein, 447 aa, Salmonella phage SETP3; identical to SEQ ID NO: 869
  SaP-SETP3 dpol N-extein

SEQ ID NO: 871 - protein, 33 aa, Salmonella phage SETP3
  SaP-SETP3 Helicase N-extein
MSKFTRRPYQKLMTSFMLRHPRCNIWASMGSGK

SEQ ID NO: 872 - protein, 447 aa, Salmonella phage SETP5; identical to SEQ ID NO: 869
  SaP-SETP5 dpol N-extein

SEQ ID NO: 873 - protein, 310 aa, Streptomyces avermitilis MA-4680
  Sav Helicase N-extein
MDLVPALEEPLKKVLGPATAKVMAEHLGLHTVGDLLHHYPRRYEERGQLTHLADLPMDEHVTVVAQVADARLHTFASAKAPRGKGQRLEVTITDGSGRLQLVFFGNGVHKPHKDLLPGTRAMFSGKVSVFNRRLQLAHPAYELLRGADDEAAESVDSWAGALIPIYPATAKLESWKIAKSVQTVLPSVQEALDPLPDSLRDGRGLISLPEALLKIHRPHTKADIEDARARLKWDEAFVLQVALARRRHADAQLPAAARKPKPDGLLTAFDAKLPFTLTEGQQKVSKEIFDDLATEHPMHRLLQGEVGSGK

SEQ ID NO: 874 - protein, 18 aa, Saccharomyces castellii, strain CBS4309
  Sca-CBS4309 VMA N-extein
ISQSLSKYSNSDSIIYVG

SEQ ID NO: 875 - protein, 18 aa, Saccharomyces cariocanus, strain="UFRJ 50791
  Scar VMA N-extein
ISQSLSKYSNSDAIIYVG

SEQ ID NO: 876 - protein, 283 aa, Saccharomyces cerevisiae (nucleus)
  Sce VMA N-extein
MAGAIENARKEIKRISLEDHAESEYGAIYSVSGPVVIAENMIGCAMYELVKVGHDNLVGEVIRIDGDKATIQVYEETAGLTVGDPVLRTGKPLSVELGPGLMETIYDGIQRPLKAIKEESQSIYIPRGIDTPALDRTIKWQFTPGKFQVGDHISGGDIYGSVFENSLISSHKILLPPRSRGTITWIAPAGEYTLDEKILEVEFDGKKSDFTLYHTWPVRVPRPVTEKLSADYPLLTGQRVLDALFPCVQGGTTCIPGAFGCGKTVISQSLSKYSNSDAIIYVG

SEQ ID NO: 877 - protein, 28 aa, Saccharomyces cerevisiae strain DH1-1A
  Sce-DH1-1A VMA N-extein
PGAFGCGKTVISQSLSKYSNSDAIIYVG

SEQ ID NO: 878 - protein, 258 aa, Saccharomyces cerevisiae OUT7091
  Sce-OUT7091 VMA N-extein
GAIYSVSGPVVIAENMIGCAMYELVKVGHANLVGEVIRIDGDKATIQVYEETAGLTVGDPVLRTGKPLSVELGPGLMETIYDGIQRPLKAIKEESQSIYIPRGIDTPALDRTIKWQFTPGKFQVGDHISGGDIYGSVFENSLISSHKILLPPRSRGTITWIAPAGEYTLDEKILEVEFDGKKSDFTLYHTWPVRVPRPVTEKLSADYPLLTGQRVLDALFPCVQGGTTCIPGAFGCGKTVISQSLSKYSNSDAIIYVG

SEQ ID NO: 879 - protein, 258 aa, Saccharomyces cerevisiae OUT7112
  Sce-OUT7112 VMA N-extein
GAIYSVSGPVVIAENMIGCAMYELVKVGHDNLVGEVIRIDGDKATIQVYEETAGLTVGDPVLRTGKPLSVELGPGLMETIYDGIQRPLKAIKEESQSIYIPRGIDTPALDRTIKWQFTPGKFQVGDHISGGDIYGSVFENSLISSHKILLPPRSRGTITWIAPAGEYTLDEKILEVEFDGKKSDFTLYHTWPVRVPRPVTEKLSADYPLLTGQRVLDALFPCVQGGTTCIPGAFGCGKTVISQSLSKYSNSDAIIYVG

SEQ ID NO: 880 - protein, 18 aa, Saccharomyces dairenensis, strain CBS 421
  Sda VMA N-extein
ISQSLSKYSNSDTIIYVG

SEQ ID NO: 881 - protein, 377 aa, Staphylococcus epidermidis RP62A
  Sep RIR1 N-extein
MSKWIEKNNEIMRRDELGQLSLSKDKEAIKLYLEHIKSKTKQFSNQIARLRYLVEEDYYIDVFKDYSEETLLELLDYAYSFGFEFQSFMAASKFYDTYALKTRDKSQWLEDFEQHNVIVSLYLAGGDVDLAKRYIKAHTLQTVQTATPTYLNAGRKQRGELASCYLFTMDDTLNSINFIRSQVSQASKIAGGVAVNLTRLRGRGATLKGVKNVGKGIVPVAKLIEGEVSYADQLGQRAGAGAAYLNIFHSDVIELLNTKKVNADEDTRLATLSIGLIVPSLFFDLAKEDKDLYMFEPYSIQEEFGKDVILDDININDWYDKFVENENVIKHKINAREMLNLIAQIQLQSGYPYIMYKDNANKNHALNELGEIKMSNL

SEQ ID NO: 882 - protein, 267 aa, Saccharomyces exiguus, strain="IFO1128"
  Sex-IFO1128 VMA N-extein
LEDHDESEYGSIYSVSGPVIVAENMIGCAMYELVKVGHDNLVGEVIRIDGDKATIQVYEETAGATVGDPVLRTGKPLSVELGPGLMETIYDGIQRPLKTIKDISQSIYIPRGIDAPALSRDIKWNFTPGKYVVGDHISGGDIFGSIFENSLLDNHKILLPPRARGTITWIAPAGEYTVDEKVLEVEFDGVKSDYSMYHTWPVRVPRPVAEKLSADYPLLTGQRVLDALFPCVQGGTTCIPGAFGCGKTVISQSLSKYSNSDAIIYVG

SEQ ID NO: 883 - protein, 578 aa, Stigeoclonium helveticum, strain UTEX 441
  She RPB2 (RpoB) N-extein
MSTSQSLNIIPIEYSLQTYQRSNQDTSMLHRPVVKEGEWVQAGDLLSDCASSIGGEFSIGQNILIAYLPWEGYNYEDAILISERLVYDDLYTSIHIERYDISTEKNPYGIEKITKDIVLLKDTTELNHLDKNGIAQLGAWLKEGDILVGKITPTESKKEVARYVQLYNDILGKKINYAIRDSSLRVPRGLEAKVIRVKTFPERKNETKNWENKIGLKSKALAFSVQHFLSKNQSNKKRTLSLKSKWEKETSLSSFSSLAWQKKSPLFFVFKNGIFEKLKNFPKKKKKNERVFALKKKSSKKFRFFELQKKFRFFFRNFFFFKAPKKKSPLFFFFKSETFDKERNFQKMSPNQSKQNWVKISIKKEWQKVGSFGKKKASKGKISFFPSFPQASLVGKASFFSPSRFEKKRDASNFLKSSCISSVHIYLAEKRKVQVGDKMAGRHGNKGIISQILPRQDMPYLPDGTPIDMALNPLGVPSRMNVGQIYECLLGLAGKHLGEQYRIQPFDEAFGPEASRSFVFSKLYSAKTKTGQSWLFQPTNPGKLKLFDGRTGNCFDQAITTGYSYMIKLVHLVDEKIH

SEQ ID NO: 884 - protein, 371 aa, Shigella flexneri 5 str. 8401
  ShP-Sfv-5 Primase N-extein
MRPSELSDLLWAQVDRVAPHLLPNGKIEGHEWVAGNVNGDKGNSLKVNLIGKKKWADFAEGDGGDMLDLWMACRGINLHQAMQEAKAFLGIKDDDHHFDARREKKFSRPDRKKIARYVTRTESHLEYLQSRGISPEVVKRYEVVSGKVWNGERELDALVLPYKRDGELLQVKRISTERPDGKKVIMAEGDCEPCLFGWQALDAGVRAVVLCEGEIDCMSYAQYGISALSVPFGGGKGAKQQWIEFEYHNLDRFEEIFISMDVDDVGREAAREIVSRLGEHRCRLVTLPYKDINECLMNGVTEDEIWQYIGTASYFDPEELYSAREFYQDTINAFYGKQQYLFNPPWESLADKFQFREAELTLVNGVNGHGK

SEQ ID NO: 885 - protein, 377 aa, Staphylothermus marinus F1
  Smar 1471 N-extein
MFSRRERKERLTKLPGEEEVSEAVKSIIVPAEPIQVAKRDPSWRIIESYYVYKPFVKIVIAETPQGPMYFVEEYGLTPSDKEVLEKLTDILMDEIRPPTRPEDIKDLKGYVFKETERIADKYREKLGLVGARKIKLLYYIERNLLGYGPIDPLMKDPNIEDISCNGVNIPIYVWHKKYESIPTNITFIDEDYLNEFVMKMAHMAGKHISIAFPILDAMLPEKHRLAATFGREVSVKGPTFTIRKFRERPFSVTEIIQSGVINSLVAAYLWTLIEHGKTAMIAGGTGVGKTTMLNVISMFIRPGMKIVTIEDTPEINLPHPNWVQLTSRETYLVGTSSLGTNIRLFDLVKLSLRYRPDYIIVGEVRGEEAFVLFQAMA

SEQ ID NO: 886 - protein, 429 aa, Staphylothermus marinus F1
  Smar MCM2 N-extein
MTYTLEKEKTEPDLVTRFKRFLWDFRDRRTGMFKYRERISHMALMGQRSLLIDFNDITLFDRGLAHIIENNPDTAIEAASIAIKELMRRENPEYAESVDKFYPRFRNPSKVLRIRELTSEYIGKFVAVEGILTRLTRVEARLVKAVFKHAECGAEFEWPEEGEMGERIEKPSYCPICGKTGKFQLLLNKSRFIDWQKIVVQEKPEEIPPGQIPRSIEVVLTGDLVDSARPGDRVLVTGILRVMPTSSVQRGIGKSVFGFYLEANYVDVQQKVLEEIEITREDEDKIKELARDPWIREKIIASIAPAIYGHWNIKEAIALLLFGGVPKLLPDGTRIRGDIHILLVGDPGTAKSQMLQYTAKIAPRGIYTSGKGSTAAGLTASVLRDKATGEYYLEAGALVLADGGVACIDEIDKMREEDRSAIHEALEQQ

SEQ ID NO: 887 - protein, 269 aa, Saccharomyces pastorianus IFO11023
  Spa VMA N-extein
ISLEDHAESEYGAIYSVSGPVVIAENMIGCAMYELVKVGHDNLVGEVIRIDGDKATIQVYEETAGLTVGDPVLRTGKPLSVELGPGLMETIYDGIQRPLKAIKEESQSIYIPRGIDTPALDRTIKWQFTPGKFQVGDHISGGDIYGSVFENSLISSHKILLPPRSRGTITWIAPAGEYTLDEKILEVEFDGKKSDFTLYHTWPGRVPRPVTEKLSADYPLLTGQRVLDALFPCVQGGTTCIPGAFGCGKTVISQSLSKYSNSDAIIYVG

SEQ ID NO: 888 - protein, 129 aa, Spirulina platensis, strain C1
  Spl DnaX N-extein
MTYEPLHHKYRPQTFADLVGQEAIAQTLTNAIRSRRIAPAYLFTGPRGTGKTSSARILAKSLNCLQTSNPTETPCGICEVCRGITTGATLDFVEIDAASNTGVDHIRDLIERTQFSPVQCRYKVYVIDE

SEQ ID NO: 889 - protein, 230 aa, Salinibacter ruber DSM 13855
  Sru DnaB N-extein
MRGGTGEQQREQAQAVHEQSGRVPPQAVDVEKSVLGAMLIEREAIPQAIEILPSDAFYESKHQSIYGCIQDLFERGNPVDLVTLTEELRRRDKLEEIGGAYYLTELTTQVASAANVEYHARIIAEKSLLRRMIETMTTVVQKAYDPGADAFELLDEAESKIFQISDNQLRKAAAPMNEVVKDTLERLETIHGQDGGITGVPSGFPKLDDLTSGWQDSDLIIIAARPSMGK

SEQ ID NO: 890 - protein, 498 aa, Salinibacter ruber DSM 13855
  Sru PolBc N-extein
MSSPPAVNTPAPADATQSAADTALFGKDPMPRLVDVHPMMDRPSNEPARVRVYQRSEDFASIHEQEDTFFPFFFLSDFSLLADRYRNGDVHTATPLNGDNFYQYLLTFETWSDYWDALRQVEHRSDSDQQAPDELYRVGSPAQQYLMQTGRSCLLGMTLDDLHRLQLDIEVYSEGSFPNADRPDDKVIIVALSDNRGWDEVLHLRDGIGEEQLLQELVYVLQERDPDVIEGHNIFEFDLAYLLDRCALHGVDFAIGRDGSVPRTYDSSMRFAERTVDYPAVDIVGRHVIDTYFQVMSFDVFSRDLPDYSLKTAARYFDLAPEERTYIEGTEIAKAWRTDRATLLEYALDDVIETKRLAGHLSGSTFYLAQMLPMTYGSSARRGPAGKIESLFVREYLRRRHALPRSEWGSQSMGGYTDIFITGVLGPIVYADVESLYPSIMLNYDVQPSGDTLDLFPQLLERLTDLRLKTKQDMKDAEEEEVRSELDARQSSYKVLIN

SEQ ID NO: 891 - protein, 129 aa, Synechocystis species, strain PCC6803
  Ssp DnaX N-extein
MAYEPLHHKYRPQTFADLVGQTAIAATLSNAIEQERIVPAYLFTGPRGTGKTSSARILAKSLNCIAGDRPTATPCGQCATCRAITNGSALDVIEIDAASNTGVDNIREIIERAQFAPVQCRYKVYVIDE

SEQ ID NO: 892 - protein, 436 aa, Synechocystis species, strain PCC6803
  Ssp GyrB N-extein
MTMTTTNYGADQIQVLEGLEPVRKRPGMYIGSTGPKGLHHLVYEVVDNAIDEALAGYCTHIEIDINADGSVTVVDNGRGIPTDIHPTTGRSALETVLTVLHAGGKFGGGGYKVSGGLHGVGVSVVNALSEWVEVKVWRQGKEHFQRFERGNPIGTLEATPNEGHSTGTQVSFLPDTQIFKDGIEFDYHTLASRLKELAYLNAGVRITFGDRRADSLKEEQFYYEGGIREYVTYMTTDKTPLHEEIIYTSGEKNDVQVEVALQWCVDAYSDTLLGFANNIRTIDGGTHLEGLKAVLTRTLNSVARKRNKLKDGDSNLGGENIREGLTGVISVKVPDPEFEGQTKTKLGNTEVRGIVDTLVGEALTEFLEFNPGVADAIIEKAVQAFKAAEAARRARELVRRKSVLESSTLPGKLADCSSKDPSESEIFIVEGDSAGG

SEQ ID NO: 893 - protein, 388 aa, Synechococcus species JA-2-3B'a(2-13)
  Ssp-JA2 DnaB N-extein
MISDYDLTGGDRLPPQNIEAEEEILGGILLDPDALVRVAEFLRPEMFYISAHQEIYRAALQLHSQGQPTDLMTVSAWLADHHLLERVGGTGAIRRLLEQTVSSVNIDQYARLVMDKYMRRQLIQVSNTLARLAYDTSQPLSQVMDQAEQQVFGLTQERVQRSLIPASEVLVNIFSDLEEKFQSGAQLPGIPTKFIDLDNLTQGLQRSDLLILAGRPSMGKTSLALNIAQNVAAYAKQPVAIFSLEMSREQLVQRLLASEARIDSSRLRSGRISEHEWQRLGQAIGFLSQLPLFIDDTPDCTVTEIRSKARRLQAEQGGTLGMVLIDYLQLMQGSAADNRVQELSRITRGLKAMAKELMVPVLVLSQLSRAVESRSDKRPQLADLRESG

SEQ ID NO: 894 - protein, 410 aa, Synechococcus species JA-2-3B'a(2-13)
  Ssp-JA2 RIR1 N-extein
MQGLDPAETTGSLPLGEFPATAPAASPVFYRTYSRRRPDGSRETWSEVCDRTLADIARLGRFTPQERQLVERLQRQLKALISGRALWVMGTDWIQKPENFSGAYNCTSLAVVDWRAFGLMMDLAMMGCGTGAVLEPQFIRQLPPIVNRLRVHVKGSIGATPPEERQEHTRIHRQGSQVHIQVGDSRRGWVESYQALLELASDPSFGGQVEVTVDLSDVRPAGERLKGFGGVANPIKLPGLYERCAAILNRAVGRQLNSVECCLLIDEAAVVVVAGNIRRSAGIRQFAADDQLGSTAKDNLWQQDENGNWRIDPERDALRMANHTRVFHRKPTREECVEAVRKQFYSGEGAIQWAGEAVARANCDLIPPDLKPDFLKAYEAGTAREWLKGRDPSLGEEELQDRLWRYGLNP

SEQ ID NO: 895 - protein, 388 aa, Synechococcus species JA-3-3Ab
  Ssp-JA3 DnaB N-extein
MISDYDLTGGDRLPPQNIEAEEEILGGILLDPEAMARVAELLRPEMFYLSAHQEIYRAALQLYSQGQPTDLTTVSAWLADHQLLERVGGTAAIRRLVEQTVSSVNIDQYARLVVDKYMRRRLIQVSNTLARLAYDTSQPLPQLLDRAEQEVFSLTQERVQRSLVPASEVLVNIFSELEERFQSGAQIPGIPTKFIDLDNLTQGLQRSDLVILAGRPSMGKTSLALNIAQNVAAYVKQPVAIFSLEMSREQLVQRLLASEARIDSSRLRSGRISENEWQRLGQAIGFLSQLPLFIDDTPNCTVTEIRSKARRLQVEQGGTLGLVLIDYLQLIQGSESDNRVQELSRITRGLKALAKELMVPVLVLSQLSRAVESRSDKRPQLADLRESG

SEQ ID NO: 896 - protein, 423 aa, Synechococcus species JA-3-3Ab
  Ssp-JA3 RIR1 N-extein
MVQSKEAHSPAIQGLGMGSLGEFPATAPAAAPVFYRTYSRRRPDSSRETWSDVCDRTLADIARLGRFTPQERELVERLQRQLKALISGRALWVMGTDWIQKPENYSGAYNCTSLTVVDWRSFGLMMDLAMMGCGTGAVLEPQFINRLPPILNRLQVQVVGSIGATPRHSRQEHTPIQRQGSRVHIQVGDSRRGWVESYQALLELAADPSFGGQVEVTVDLSHVRPAGERLKGFGGVANPIKLPGLYQRCAAILNKAVGRQLNSVECCLLIDEAAATVVAGNIRRSAGMRQFAADDELGSSAKDNLWQQDEQGNWRIDPERDALRMANHTRVFHRKPTREECIAAVRKQFYSGEGAIQWAGEAVARANADLINTPELKREFLNVYASEGPEGARRWIEERQAASSSPSVQPPTWHRVQRYGLNP

SEQ ID NO: 897 - protein, 147 aa, Staphylococcus phage Twort
  StP-Twort ORF6 N-extein
MKLRIKNLFTYVEFEEDDKYLKDIFLKRVHKTIGARQQGFQFSPAYKRGSWDGYIDFYVYEEDKFPTGLLHRVELLLGELQSRYNFQYSKIDERSESFLAPEDIDKEIKLLDNKIGQITLREYQYQAVYESLVNFNGVLKIATNGGK

SEQ ID NO: 898 - protein, 18 aa, Saccharomyces unisporus, strain CBS 398
  Sun VMA N-extein
ISQSLSKYSNSDTIIYVG

SEQ ID NO: 899 - protein, 235 aa, Thermoplasma acidophilum, ATCC 25905
  Tac-ATCC25905 VMA N-extein
MGKIIRISGPVVVAEDVEDAKMYDVVKVGEMGLIGEIIKIEGNRSTIQVYEDTAGIRPDEKVENTRRPLSVELGPGILKSIYDGIQRPLDVIKITSGDFIARGLNPPALDRQKKWEFVPAVKKGETVFPGQILGTVQETSLITHRIMVPEGISGKVTMIADGEHRVEDVIATVSGNGKSYDIQMMTTWPVRKARRVQRKLLSRDPLVTAQSGNRCAFPVAEAANCRVPGPFGSGK

SEQ ID NO: 900 - protein, 235 aa, Thermoplasma acidophilum, DSM1728
  Tac-DSM1728 VMA N-extein
MGKIIRISGPVVVAEDVEDAKMYDVVKVGEMGLIGEIIKIEGNRSTIQVYEDTAGIRPDEKVENTRRPLSVELGPGILKSIYDGIQRPLDVIKITSGDFIARGLNPPALDRQKKWEFVPAVKKGETVFPGQILGTVQETSLITHRIMVPEGISGKVTMIADGEHRVEDVIATVSGNGKSYDIQMMTTWPVRKARRVQRKLPPEIPLVTGQRVIDALFPVAKGGTAAVPGPFGSGK

SEQ ID NO: 901 - protein, 409 aa, Thermococcus aggregans
  Tag Pol-1 (Tsp-TY Pol-1) N-extein
MILDTDYITKDGKPIIRIFKKENGEFKIELDPHFQPYIYALLKDDSAIDEIKAIKGERHGKIVRVVDAVKVKKKFLGRDVEVWKLIFEHPQDVPALRGKIREHPAVIDIYEYDIPFAKRYLIDKGLIPMEGDEELKLMAFDIETFYHEGDEFGKGEIIMISYADEEEARVITWKNIDLPYVDVVSNEREMIKRFVQIVREKDPDVLITYNGDNFDLPYLIKRAEKLGVTLLLGRDKEHPEPKIHRMGDSFAVEIKGRIHFDLFPVVRRTINLPTYTLEAVYEAVLGKTKSKLGAEEIAAIWETEESMKKLAQYSMEDARATYELGKEFFPMEAELAKLIGQSVWDVSRSSTGNLVEWYLLRVAYERNELAPNKPDEEEYRRRLRTTYLGGYVKEPERGLWENIAYLDFR

SEQ ID NO: 902 - protein, 854 aa, Thermococcus aggregans
  Tag Pol-2 (Tsp-TY Pol-2) N-extein
MILDTDYITKDGKPIIRIFKKENGEFKIELDPHFQPYIYALLKDDSAIDEIKAIKGERHGKIVRVVDAVKVKKKFLGRDVEVWKLIFEHPQDVPALRGKIREHPAVIDIYEYDIPFAKRYLIDKGLIPMEGDEELKLMAFDIETFYHEGDEFGKGEIIMISYADEEEARVITWKNIDLPYVDVVSNEREMIKRFVQIVREKDPDVLITYNGDNFDLPYLIKRAEKLGVTLLLGRDKEHPEPKIHRMGDSFAVEIKGRIHFDLFPVVRRTINLPTYTLEAVYEAVLGKTKSKLGAEEIAAIWETEESMKKLAQYSMEDARATYELGKEFFPMEAELAKLIGQSVWDVSRSSTGNLVEWYLLRVAYERNELAPNKPDEEEYRRRLRTTYLGGYVKEPERGLWENIAYLDFRCHPADTKVIVKGKGIVNISDVKEGDYILGIDGWQRVKKVWKYHYEGKLININGLKCTPNHKVPVVTENDRQTRIRDSLAKSFLSGKVKGKIITTKLFEKIAEFEKNKPSEEEILKGELSGIILAEGTLLRKDIEYFDSSRGKKRISHQYRVEITIGENEKELLERILYIFDKLFGIRPSVKKKGDTNALKITTAKKAVYLQIEELLKNIESLYAPAVLRGFFERDATVNKIRSTIVVTQGTNNKWKIDIVAKLLDSLGIPYSRYEYKYIENGKELTKHILEITGRDGLILFQTLVGFISSEKNEALEKAIEVREMNRLKNNSFYNLSTFEVSSEYYKGEVYDLTLEGNPYYFANGILTHNSLYPSIIVTHNVSPDTLEREGCKNYDVAPIVGYKFCKDFPGFIPSILGELITMRQEIKKKMKATIDPIEKKMLDYRQRAVKLLAN

SEQ ID NO: 903 - protein, 212 aa, Trichodesmium erythraeum IMS101
  Ter DnaB-1 N-extein
MQSDRLPPQNIESEEAILGGILLDPEAINRVTELLHPEFFAIQAHQIIYKAMCQLYSQGKPTDLMTVTSWLSDHNQLEKIGGRVKIVQLLERTVSAVNIDQYAALVLDKYIRRKLIQAGNEIFDLGFQTATKLEIILDQAEQKIFALTQDKPQQDLVPISETLINTFQEIEDRNEGVALPGLPCGFYDLDAMTGGFQRSDLIIVAGRPSMGK

SEQ ID NO: 904 - protein, 719 aa, Trichodesmium erythraeum IMS101
  Ter DnaE-1 N-extein
MSFVGLHIHSDYSLLDGASQLPQLIDRAVELGMPAIALTDHGVMYGAIQLIKLCRNKNIKPIIGNEMYVIKGDIEKQQRGKKFHQVVLAKNTQGYKNLVKLTTLSHLHGFQGKGIFARPCINKELLEKYHEGLIVTSGCLAGEVPQNIMRGELEEAKKIAKWYKDLFGEDYYLEIQDHGFQEDRVVNTGIVTIAKKLKIKIVATNDSHFISCRDVEAHDALLCINTQKLIAEEKRMRYSGTEYLKSAEEMKQLFRDHLENEVIEEAIANTLEVANKVKAYEGILGEPRIPDYPIPPDHNADTYLEKLAWSGLLERLKLKQKSEISPIYKERMETELKVLQDKGFSTYFLVVWDYIKYARDNNIPVGPGRGSAAGSLVAYSLRITNIDPVHHGLLFERFLNPERKSMPDIDTDFCIENRDVMIKYVTQRYGEERVAQIITFNRMTSKAVLKDVGRVLGISFGEANKMAKLIPVARGKPAKLKVMISDETPSPEFKKAYDNQETPIEDNKAGKISTISVRQWIDMAIRIEGTNKTFGVHAAGVVISKEPLDEIVPLQRNNDGSVITQYHMEDIESLGLLKMDFLGLKNLTIIQNTAELIKKNHHLPLVPDDLPANERKAIEILAKGNTKKMPEDVKKTYDLIKSGDLEGVFQLESSGMVDVVKKLKPTSIEDISSILALYRPGPLDAGLIPKFIDRKHGSEKIEYQHPKLEPILKETYGVL

SEQ ID NO: 905 - protein, 439 aa, Trichodesmium erythraeum IMS101
  Ter GyrB N-extein
MASNNYGAEQIQVLEGLEAVRKRPGMYIGTTGPRGLHHLVYEVVDNSIDEALAGYCTHIEVDLNKDGSVKVTDDGRGIPVDTHSKTGKSALETVMTVLHAGGKFGGGGYKVSGGLHGVGVSVVNALSEWVEVTVWRDKKTHIQGYERGQPTGDLKSKPNKEKRTGTSVQFLPDQEIFTTGIQFDYNTIIGRLRELAYLNAGVKITITDNRLELVKSDEPKVESYCYEGGIKEYVTYMNREKQSLHEEVIFVRGEKNDVQVEVALQWCIDAFSDNVLGFANNIRTIDGGTHLEGLKTVLTRTMNGIARKRNKLKDSDPNLGGENVREGLTAVISVKVPEPEFEGQTKTKLGNTEVRGIVDSLVGEVLSEYLDFNPQVADAVLDKAIQAFKAAEAARRARDLVRRKSVLESSPLPGKLADCSTKNPEESEIYLVEGDSASG

SEQ ID NO: 906 - protein, 141 aa, Trichodesmium erythraeum IMS101
  Ter Ndse-1 N-extein
MRILVTGGAGFLGSHLIDRLIEQGHEVLCLDNFYTGNKHNIYNWLNNPSFELIRHDITEPIRLEVDQIYHLACPASPIHYQYNPVKTIKTNVMGTLNMLGLAKRVKAKFFLASTSEVYGDPDVHPQTEEYRGNVNCIGIRS

SEQ ID NO: 907 - protein, 508 aa, Trichodesmium erythraeum IMS101
  Ter Ndse-2 N-extein
MRILVTGGAGFLGSHLIDRLIEQGHEVLCLDNFYTGNKHNIYNWLNNPSFELIRHDITEPIRLEVDQIYHLACPASPIHYQYNPVKTIKTNVMGTLNMLGLAKRVKAKFFLASTSEVYGDPDVHPQTEEYRGNVNCIGIRSCFDSKTEILTEAGWVAFPNLQSEVKVATLNSEGKVEYHIPEEYIVQSYIGEMYRFANTNFDFCVTPNHWMYVRNKTGNLEFIRADEAKLWQSLEVLTGGDFEGEKEEWLELRKSPINSHRKVEKIFMDDWLEFLGYYISEGRVDVKKSLRVVGGNDAYVADYNILIGQENSELALKIASCLRRLGFNFSEILFDSDKHQFRVCSKQLAEMLLPLGKSGEKYIPRELLKLSKRQLLILFKALIMGDNSEQKNHYTYYSKSKRLADDIQELALRCGYAATVVSHAVGRDLYQVNIRPAEDANLVVPERFHYVGKVYCVNVTNHVVFVRRNGRAAWCGQCYDEGKRVAETLAFDYHRQNNVDIRVARIFN

SEQ ID NO: 908 - protein, 610 aa, Trichodesmium erythraeum IMS101
  Ter Snf2 N-extein
MAILHSFWVTEHEQPSFLFIWGEAWHRVTEEDAGEVEKITNNPYSITLDELLKLSEANIYLSLEKHKKSTNQTLGIPTKLSESNQKLYPIHSAISLSEIPENLYIYPWKIEGICLEPDEAIKFLQSIPLGQTTESFIGSDLKFWSHLARWSLDLLARCKFLPSIEQRSITQEFITTWQPLIDSSIDQTRLKNFAQQMPLVCRTYNLDWQLHPSLESLQIITKNNSYSNLPRLQSSQEIIQDFLKNTIDKQIRQLSAEISLTETTSLNSSIRQWLKSLSGKLSLKLPAPQETKKIQKILDNWKSPLQEYQAIENKFVACFCLHSPSNNSQQWKLEYCLQGLDNPDFLVDAKTIWENPVASLNYQGKTIKLPQETLLKGLGLASRIYPIIEPSLQEATPQYCLLTSQQAYDFIKSGSGRFIDSGLGVILPPSLANREGWASRLGLSIQATAPKMKKTEKLGLKSLLNFKWQLSIGGHKLTKAEFEKLVSQDSPLVEVNGEWVELQGQDVRAAKNFFASRKDQMSLSLEDALRLATGDTQTVEKLPVVNFEAGGQFQELLDTLTNNRSLEEVSTPENFRGELRNYQARGVSWLSFLERWGLGACLADDMGLGK

SEQ ID NO: 909 - protein, 11 aa, Trichodesmium erythraeum IMS101
  Ter ThyX N-extein
MQQARTHRIGC

SEQ ID NO: 910 - protein, 406 aa, Thermococcus fumicolans
  Tfu Pol-1 N-extein
MILDTDYITEDGRPVIRVFKKENGEFKIEYDRDFEPYIYALLKDDSAIEDVKKITASRHGTTVRVVRAGKVKKKFLGRPIEVWKLYFTHPQDVPAIRDKIREHPAVVDIYEYDIPFAKRYLIDKGLIPMEGDEELKMLAFDIETLYHEGEEFAEGPILMISYADEEGARVITWKKIDLPYVDVVSTEKEMIKRFLKVVKEKDPDVLITYNGDNFDFAYLKKRSEKLGVKFILGRDGSEPKIQRMGDRFAVEVKGRIHFDLYPVIRHTINLPTYTLEAVYEAIFGQPKEKVYAEEIAQAWETGEGLERVARYSMEDAKVTYELGREFFPMEAQLSRLVGQSFWDVSRSSTGNLVEWYLLRKAYERNELAPNKPSGRELERRRGGYAGGYVKEPERGLWENIAYLDFR

SEQ ID NO: 911 - protein, 900 aa, Thermococcus fumicolans
  Tfu Pol-2 N-extein
MILDTDYITEDGRPVIRVFKKENGEFKIEYDRDFEPYIYALLKDDSAIEDVKKITASRHGTTVRVVRAGKVKKKFLGRPIEVWKLYFTHPQDVPAIRDKIREHPAVVDIYEYDIPFAKRYLIDKGLIPMEGDEELKMLAFDIETLYHEGEEFAEGPILMISYADEEGARVITWKKIDLPYVDVVSTEKEMIKRFLKVVKEKDPDVLITYNGDNFDFAYLKKRSEKLGVKFILGRDGSEPKIQRMGDRFAVEVKGRIHFDLYPVIRHTINLPTYTLEAVYEAIFGQPKEKVYAEEIAQAWETGEGLERVARYSMEDAKVTYELGREFFPMEAQLSRLVGQSFWDVSRSSTGNLVEWYLLRKAYERNELAPNKPSGRELERRRGGYAGGYVKEPERGLWENIAYLDFRCHPADTKVIVKGKGVVNISEVREGDYVLGIDGWQKVQRVWEYDYEGELVNINGLKCTPNHKLPVVRRTERQTAIRDSLAKSFLTKKVKGKLITTPLFEKIGKIEREDVPEEEILKGELAGIILAEGTLLRKDVEYFDSSRGKKRVSHQYRVEITVGAQEEDFQRRIVYIFERLFGVTPSVYRKKNTNAITFKVAKKEVYLRVREIMDGIENLHAPSVLRGFFEGDGSVNKVRKTVVVNQGTNNEWKIEVVSKLLNKLGIPHRRYTYDYTEREKTMTTHILEIAGRDGLILFQTIVGFISTEKNMALEEAIRNREVNRLENNAFYTLADFTAKTEYYKGKVYDLTLEGTPYYFANGILTHNSLYPSIIISHNVSPDTLNREGCGEYDEAPQVGHRFCKDFPGFIPSLLGDLLDERQKVKKHMKATVDPIEKKLLDYRQRAIKILANSFYGYYGYAKARWYCKECAESVTAWGRQYIETTMREIEEKFGFKVLYAD

SEQ ID NO: 912 - protein, 71 aa, Thermobifida fusca YX
  Tfus Hyp-2914 N-extein
MPKPERFVSRSDLGWGPSNASYANPKLGLVIHYDGSNQNLAAKDHSACINYWKNTRSFHTGPARGWADIGY

SEQ ID NO: 913 - protein, 95 aa, Thermobifida fusca YX
  Tfus RecA-1 N-extein
MSLARRSVTPIMKKKASTQQGFPVAASDRDKALETALAQIERQFGKGTIMRLGDDNRPPIESIPTGSISLDVALGIGGIPRGRIVEIYGPESSGK

SEQ ID NO: 914 - protein, 649 aa, Thermobifida fusca YX
  Tfus RecA-2 N-extein
MSLARRSVTPIMKKKASTQQGFPVAASDRDKALETALAQIERQFGKGTIMRLGDDNRPPIESIPTGSISLDVALGIGGIPRGRIVEIYGPESSGKCLTADTYVWTDRGLETVAEVFGRAGLPLSSTSRVTDVRDRDIRVVNEKGELEQVAALTHNGRQPVVRITVASGRQVTVTRNHPLRVMNDDGFIVWREAGQLREGDVLVSAAFGAVQAASGGGLSEDEAVLLGYLTAAGSLDPAGHVCFTTTDIETGAEFAALAEWLLDTTVTAVPGDGQVAYVLSDPAARHTLAERYGVDYAAAARIPQCVRTAGDKMQRAFLAALYTAAGWTDTSAAVGLRTASAPLAREVQYLLYGLGIPADLDRSHGNGQHPWAVTISPAAAPRFHTEVGFRTAQQSPQTGLHEPTPQVEAIPNLTGLIHALRDSIGDRAESTDDPFPAASGGAYDRDQVRRVIDWAKRRTDEAPATANAILGYLTQLTDARYTYEPITAVEDAGQQPTFDLMVPRTHSFLANGILSHNTTVALHAVANAQRAGGIAAFIDAEHALDPSYAEKIGVNIDDLLLSQPDTGEQALEIVDMLVRSGAISIIVIDSVAALVPRAEIEGEMGDSHVGLQARLMSQALRKIAGALNQTKTTAIFINQLREKVGVMFG

SEQ ID NO: 915 - protein, 18 aa, Torulaspora globosa, strain CBS 764
  Tgl VMA N-extein
ISQSLSKYSNSDVIIYVG

SEQ ID NO: 916 - protein, 458 aa, Thermococcus hydrothermalis
  Thy Pol-1 N-extein
FEPYIYALLKDDSAIEEVKKITAGRHGRVVKVKRAEKVKKKFLGRPIEVWKLYFTHPQDVPAIRDEIRRHSAVVDIYEYDIPFAKRYLIDKGLIPMEGDEELKMMSFDIETLYHEGEEFGTGPILMISYADEGEARVITWKKIDLPYVEVVSTEKEMIKRFLKVVKEKDPDVLITYNGDNFDFAYLKKRCEKIGIKFTLRRDGSEPKIQRMGDRFAVEVKGRIHFDLYPVIRRTINLPTYTLEAVYEAVFGTPKEKVYPEEITTAWETGEGLERVARYSMEDAKVTYELGREFFPMEAQLSRLIGQSLWDVSRSSTGNLVEWFLLRKAYERNEIAPNKPDERELARRRGGYAGGYVKEPERGLWDNIVYLDFMSLYPSIIITHNVSPDTFNREGCKEYDTAPQVGHKFCKDVQGFIPSLLGALLDERQKIKKRMKASIDPLEKKLLDYRQKAIKILAN

SEQ ID NO: 917 - protein, 1044 aa, Thermococcus hydrothermalis
  Thy Pol-2 N-extein
FEPYIYALLKDDSAIEEVKKITAGRHGRVVKVKRAEKVKKKFLGRPIEVWKLYFTHPQDVPAIRDEIRRHSAVVDIYEYDIPFAKRYLIDKGLIPMEGDEELKMMSFDIETLYHEGEEFGTGPILMISYADEGEARVITWKKIDLPYVEVVSTEKEMIKRFLKVVKEKDPDVLITYNGDNFDFAYLKKRCEKIGIKFTLRRDGSEPKIQRMGDRFAVEVKGRIHFDLYPVIRRTINLPTYTLEAVYEAVFGTPKEKVYPEEITTAWETGEGLERVARYSMEDAKVTYELGREFFPMEAQLSRLIGQSLWDVSRSSTGNLVEWFLLRKAYERNEIAPNKPDERELARRRGGYAGGYVKEPERGLWDNIVYLDFMSLYPSIIITHNVSPDTFNREGCKEYDTAPQVGHKFCKDVQGFIPSLLGALLDERQKIKKRMKASIDPLEKKLLDYRQKAIKILANSLLPEEWIPLVENGKVRLHRIGEFVDKLMETDSELVKRNGDTEVLEVRGIRALSFDRKSKKARVMPVKAVIRHRYSGDVYEIVLGSGRRITVTEGHSLFAYGDGELREVTGGEIKAGDLLAVPRRVNLPEKKERLNLVELLRRLPEEETGDIILTIPVKGRKNFFKGMLRTLRWISGEEKRPRTARRYLEHLEGLGYVRLKKIGYEVTDREGLERYRKLYERLVEAVRYNGNKREYLVEFNAVRDVIALMPEEELRDWLVGTRNGFRMRPFVEIEEDFAKLLGYYVSEGNARKWRNQKNGWSYTVKLYNENQRVLDDMESLAERFFGRVKRGKNYIEIPRKMAYIIFENLCGTLAENKRVPEAIFTSPESVRWAFIEGYFIGDGDVHPSKRVRLSTKSELLVNGLVLLLNSLGVSAIKIRHDSGVYRVYVNEELPFTDYRKKKNAYYSHVIPKEILEETFGKVFQRSVSYEKFRELVKSEKLDGEKAKRIEWLLNGDVVLDKVLEVKKRPYEGYVYDLSVEEDENFLAGFGLLYAHNSYYGYYGYARARWYCKECAESVTAWGRDYIETTIHEIEERFGFKVLYAD

SEQ ID NO: 918 - protein, 362 aa, Thermococcus kodakaraensis KOD1
  Tko CDC21-1 N-extein
MDREEMIARFAKFLREYVDDEGNEVYINRLKDLLTVTPKRSLAIDWAHLNSFDPELADELLNNPEEAIASAEDAIQIVLREPPLLVEREFKVHARFYNLPKTLLVKELGSEHINKLIQVEGIITRVSEVKPFVEKAVFVCRDCGNEMVRLQRPYENLVKPAKCDACGSRNIELDVDKSRFLNFQSFRLQDRPESLKGGQMPRFVDAILLDDLVDAALPGDRVLVTGVLRVILEQREKRPIFKKILEVNHIEQLSKEIEELEISPEDEQKIRELAKRKDIVDAIVDSIAPAIWGHRIVKKGIALALFGGVQRTLPDGTKLRGESHVLLVGDPGVAKSQLLRYVANLAPRAIYTSGKSSSAAGL

SEQ ID NO: 919 - protein, 553 aa, Thermococcus kodakaraensis KOD1
  Tko CDC21-2 N-extein
MDREEMIARFAKFLREYVDDEGNEVYINRLKDLLTVTPKRSLAIDWAHLNSFDPELADELLNNPEEAIASAEDAIQIVLREPPLLVEREFKVHARFYNLPKTLLVKELGSEHINKLIQVEGIITRVSEVKPFVEKAVFVCRDCGNEMVRLQRPYENLVKPAKCDACGSRNIELDVDKSRFLNFQSFRLQDRPESLKGGQMPRFVDAILLDDLVDAALPGDRVLVTGVLRVILEQREKRPIFKKILEVNHIEQLSKEIEELEISPEDEQKIRELAKRKDIVDAIVDSIAPAIWGHRIVKKGIALALFGGVQRTLPDGTKLRGESHVLLVGDPGVAKSQLLRYVANLAPRAIYTSGKSSSAAGLCVAPDSIIKTNLGQFKIGELVEKAIPEKVQDYKSVNAEKLGLYIKTLDGDMRVLRLWKLRAPEKLIRIEGDGLSITVTPETKLLTPNGWVEARNVDGEVVTENGPVKVSKQEIESPHDYVYDLTVEGSHSFIANGFVVHNTAAAVRDEFTGSWVLEAGVLVLADGGFALIDEFDKMSDRDRSAIHEALEQQ

SEQ ID NO: 920 - protein, 20 aa, Thermococcus kodakaraensis KOD1
  Tko IF2 N-extein
MTKRIRQPIIAVLGHVDHGK

SEQ ID NO: 921 - protein, 511 aa, Thermococcus kodakaraensis KOD1
  Tko KlbA N-extein
MFQDEKKKKESLSWIDEILSGEEDPLAGILKKDDKKEQPSKNKVSEELPVPSSGVGSLEDILSGSTSEKRESRPTSETGADLLSQLLGGEEKPQKSMKEKTAEREKREPLPQSKPEPASTIPSATGATGADFLSELLGGSSGSATSQPVQTSPSKPVSNARSIFSESLREESSYAGRAQVLDAYGNVRILKVKGEPVPIYEIRLPKLSREEEQLFRRIKDRAITEIQIDPTAIPDPEERRKVFMNAVKRMIKEEAPHYSEGRIEVLADMIVQQMIGYGKLDPLVRDDNLEEIMVIGTNRPVYVWHRRFNMCKTNVIFDSDRDILNIIERIAREVGRRIDQQSPLLDARLPDGSRVNATIPPISLDGPTITIRKFKRDPLTIIDLIKYGTMSSEVAAFLWVLVDGLGVKPANVLVAGGTGSGKTTTLNSLGMFIPPSERVISIEDTAELQLPVEHWVRLETRPPNLEGKGEVTMDDLVRNTLRMRPDRIIVGEVRGPEARTMFTAMNTGHNG

SEQ ID NO: 922 - protein, 345 aa, Thermococcus kodakaraensis KOD1
  Tko LHR N-extein
MSGIRWAEREYTDEEIYSILSEPVREWFKRKFGTFTPPQRYAVLEIHKGENVLISSPTGSGKTLSAFLSAINELILLGKESKLEDKIYVLYVSPLRALNNDIKRNLEGPLAEIKEVAKELGYELPEIRVGIRTSDTSSYEKSKMVKKPPHILITTPESLAIALNAPKFSERLKTVKYVIIDEVHALAENKRGSHLALSIERLQEMAENEFVRIGLSATIHPLEEVAKFVFGFNDDGTPRPGLIVDVSFAKQTEIKVESVVEDLIYTDAGTLSDALYNRLAELIREHRTTLIFTNTRSGAERVAFNLKKRFPEFEGLIEAHHSSLSREVRLDVEEKLKRGELKAVV

SEQ ID NO: 923 - protein, 406 aa, Pyrococcus/ Thermococcus kodakaraensis KOD1
  Tko Pol-1 (Pko Pol-1) N-extein
MILDTDYITEDGKPVIRIFKKENGEFKIEYDRTFEPYFYALLKDDSAIEEVKKITAERHGTVVTVKRVEKVQKKFLGRPVEVWKLYFTHPQDVPAIRDKIREHGAVIDIYEYDIPFAKRYLIDKGLVPMEGDEELKMLAFDIQTLYHEGEEFAEGPILMISYADEEGARVITWKNVDLPYVDVVSTEREMIKRFLRVVKEKDPDVLITYNGDNFDFAYLKKRCEKLGINFALGRDGSEPKIQRMGDRFAVEVKGRIHFDLYPVIRRTINLPTYTLEAVYEAVFGQPKEKVYAEEITPAWETGENLERVARYSMEDAKVTYELGKEFLPMEAQLSRLIGQSLWDVSRSSTGNLVEWFLLRKAYERNELAPNKPDEKELARRRQSYEGGYVKEPERGLWENIVYLDFR

SEQ ID NO: 924 - protein, 851 aa, Pyrococcus/Thermococcus kodakaraensis KOD1
  Tko Pol-2 (Pko Pol-2) N-extein
MILDTDYITEDGKPVIRIFKKENGEFKIEYDRTFEPYFYALLKDDSAIEEVKKITAERHGTVVTVKRVEKVQKKFLGRPVEVWKLYFTHPQDVPAIRDKIREHGAVIDIYEYDIPFAKRYLIDKGLVPMEGDEELKMLAFDIQTLYHEGEEFAEGPILMISYADEEGARVITWKNVDLPYVDVVSTEREMIKRFLRVVKEKDPDVLITYNGDNFDFAYLKKRCEKLGINFALGRDGSEPKIQRMGDRFAVEVKGRIHFDLYPVIRRTINLPTYTLEAVYEAVFGQPKEKVYAEEITPAWETGENLERVARYSMEDAKVTYELGKEFLPMEAQLSRLIGQSLWDVSRSSTGNLVEWFLLRKAYERNELAPNKPDEKELARRRQSYEGGYVKEPERGLWENIVYLDFRCHPADTKVVVKGKGIINISEVQEGDYVLGIDGWQRVRKVWEYDYKGELVNINGLKCTPNHKLPVVTKNERQTRIRDSLAKSFLTKKVKGKIITTPLFYEIGRATSENIPEEEVLKGELAGILLAEGTLLRKDVEYFDSSRKKRRISHQYRVEITIGKDEEEFRDRITYIFERLFGITPSISEKKGTNAVTLKVAKKNVYLKVKEIMDNIESLHAPSVLRGFFEGDGSVNRVRRSIVATQGTKNEWKIKLVSKLLSQLGIPHQTYTYQYQENGKDRSRYILEITGKDGLILFQTLIGFISERKNALLNKAISQREMNNLENNGFYRLSEFNVSTEYYEGKVYDLTLEGTPYYFANGILTHNSLYPSIIITHNVSPDTLNREGCKEYDVAPQVGHRFCKDFPGFIPSLLGDLLEERQKIKKKMKATIDPIERKLLDYRQRAIKILAN

SEQ ID NO: 925 - protein, 963 aa, Thermococcus kodakaraensis KOD1
  Tko Pol-II N-extein
MSEEIYSPEMKAYFESLQREIDRAYAIARKARAQGKDPSFDVEVPQATDMAGRVESLVGPPGVAERIRELVKEYGKEIAALKVVDEIIEGKFGDLGSKEKYAEQAVRTALAILTEGIVSAPLEGIADVKIKRNEWADGSEYLALYYAGPIRSSGGTAQALSVLVGDYVRRKLGLDRFKPSDEHIERMVEEVDLYHRAVTRLQYHPEADEVRLAMRNIPIEITGEETDKVEVSHRNVPGVETNHLRGGAILVLAEGVLQKAKKLVKYIDKMGIEGWDWIKEFVEAKEKGKSSEENKDESKAEDTGTESVAEKKENVEKGFYYELYEKFRANIAPNKKYTKEIIGGRPLFAEPSTNGGFRLRYGRSRVSGFATWSVNPATMLILDEFIAIGTQMKTERPGKGCIVTPATTVEGPIVRLKNGSVVRVDDYETALKVRNEVDEILYVGDALVNFGDFVENNQTLLPANYVEEWWVQELVQAIKDLYEVELQPFAENDREAVEEAAEYLEVDPDFLWNLLKDPLRVKPDVETAIHLSTVLDIPFHPYYTLYWNTLQPEEVEELQKALLGAQIEWAEFRKNRFAKKVVLENDKNIKRYLELLGLPHRLERVEKKRKVIVVEYPWSAALLTPLGNLEWEFKAKPFYTVIDIINENNRIKLRDRGISWIGARMGRPEKAKERKMKPPVQVLFPIGLAGGQSRDIKKAAEEGKTARVEIAFFKCPKCGHVGPEHLCPVCGTRKELLWHCPKCGADYPESDAKDFNYRCPKCDVELKPYAEREIKPADLLRQAMDNVKVYGIDRLKGVKGMTSGYKMAEPLEKGLLRVKNDVYVFKDGTIRFDATDAPITHFKPKEIGTSVEKLRELGYTHDFEGKPLERDDQILELKVQDVILPYEAGRYLLKVARFIDDLLEKFYGLPRFYNAEKMEDLVGHLVIGLAPHTSAGIIGRIIGFSDVLVGYAHPYYHAAKRRN

SEQ ID NO: 926 - protein, 960 aa, Thermococcus kodakaraensis KOD1
  Tko r-Gyr N-extein
MKAVYREMCPNCWGRISDERLVMRNPCEECLDEPVHADSYFQLVSAVRNALKLRGTLKEWEKIYQLENQTREIEEFFKKATGFTFWSAQRTWVKRLLKGRSFSIIAPTGMGKSTFGAFMAVWHALKGKKSYIVVPTTPLVIQTVRKIEGIMENANADVRLAYYHGNLRKKEKEEMLERIKNEDYDILVTSAQWLARNYEEVLKGRHFDFIFVDDVDAFLKASKNIDRSLYLLGFTDEIIQKAWEIIRLKKQMSRYLNGNSEDRNEKLNGLNREIEKLQREIEKFKRKNKIGIMIIASATGSARGDRIKLYRELLGFEVGSGRSALRNVVDSYLKPTKDIKEHVEELLTRLGKGGLIFVPVDQGLGYAEELANYLSEKGFKIELVSSKNKKALEKFENGEADYLIGSATYYGSLVRGIDLPHLIRYAVFTGVPKFRFSIDLERPTIYRALGLLSEIMDFLSEEDRRQAEKLHARLRRLIRNIPQFELLKIEEALAEGLPIENEFHNHVLGVFRELVEFLRRVLRDEEVLRKLAEDPFISLVKEEGKWYIEIPDVRTYIQATGRTSRLFAGGITKGLSVLIVDNEKVFNGLVRQMRWRFQEFKMVPFEELDLDEILRQIDEDREKVRLVMEGKISAKVKDLVRSALMIVESPNKARTIANFFGQPSKTRIGDLVAYEISVGDRMLTILASGGHMFDLVTNEGYHGVLIQNEGDMLKFIPVYDTLKRCRDCGHQFVDWEKKGVCPRCGSTNVRDALENVIAMREIAQEVDEILIATDPDTEGEKIAWDIRNVLAPYTPNIKRIEFHEVTRPAIMKAIQEARDVNENRVNAQIVRRIEDRWIGFELSQELQRVFESYNLSAGRVQTPVLGWIIERYKEFTESEVYFLGLTLENGLQVTIELGKDGKDVEPPEYVTVEEVQLEERELNPAPPYTTDAMLKDASTFLKLSAPETMRLAQDLFEAGL

SEQ ID NO: 927 - protein, 149 aa, Thermococcus kodakaraensis KOD1
  Tko RadA N-extein
MARKKKVEDEVKELEEFEELDVEESLSSSDKQSKPEKKISALEDLPGVGPATAEKLREAGYDTIEAIAVASPLELKEIAGISEGAALKIIQAAREAANIGTFMRADEYMKRRTTIGKISTGSKALDKLLGGGIETQAITEVFGEFGSGK

SEQ ID NO: 928 - protein, 301 aa, Thermococcus kodakaraensis KOD1
  Tko RIR1-1 N-extein
MPVEKVMKRDGRIVPFDKERIRWAIQRAMLEVGVRDEKLLNRVVRRVVRRVNELYDGQIPNIENIQDIVELELMRAGLFDVAKAYILYRKKKAEIREEKKKILNKDKLDEIDKRFSLNALRVLASRYLIKNEKGEIIESPRELFERVAILAVIPDILYDERVFDKNGGHEQDVSAIERYRENLDEYDGKFSIGRFRLNKWHFERLLNLYRELAEKGQMKLPIDEVLKMLENGAFDNYEDEIEEYFRLMTGQYFMPNTPALINSGRPLGMLSACFVVPIEDDMESIMKAAHDVAMIQKAGGG

SEQ ID NO: 929 - protein, 914 aa, Thermococcus kodakaraensis KOD1
  Tko RIR1-2 N-extein
MPVEKVMKRDGRIVPFDKERIRWAIQRAMLEVGVRDEKLLNRVVRRVVRRVNELYDGQIPNIENIQDIVELELMRAGLFDVAKAYILYRKKKAEIREEKKKILNKDKLDEIDKRFSLNALRVLASRYLIKNEKGEIIESPRELFERVAILAVIPDILYDERVFDKNGGHEQDVSAIERYRENLDEYDGKFSIGRFRLNKWHFERLLNLYRELAEKGQMKLPIDEVLKMLENGAFDNYEDEIEEYFRLMTGQYFMPNTPALINSGRPLGMLSACFVVPIEDDMESIMKAAHDVAMIQKAGGGCIDGNAKIIFENDGEEHIMTMAEMYERYKDLGEFYDPEYNRWGINVEEVPVYVKSFDPSTKEITKGKVKVIWKYELGEDVPKYEIKTNKGTRVLTSPWHPFFVITQDLKIVEKRADELREGDMLVGGMPSDDDYEFLLDYWLAGFIAGDGSIDKYRSHVKGHEYVYDRLRIYDYTTETLGIINDHLEKTFGKRYSLQRDRNIHYIDIKAKGITSHYIELLRGITNGIPQPILKEGRNAVLSFITGLFDAEGHVNSKPGVELGMVNRKLIEDITYYLNSLGIKARMRKKPRKDGVDYVMHVEEYSSLLRFYELIGKNLQNSEKRIKLEELLSKHNGGSFGLTLSFEDFKAWSSKYGVEFKTNGSQTLAIIKNEKVSLGQWHRRGRVSKAVLVKMLRKLYDTTKSEDVKRMLHLIEGLEVVKEINVTNEPKTFYDLTVERYQNYLAGENGMVFVHNTGLNFSKLRPEGDLVGTTTGAASGPVSFMHLIDAVSDVIKQGGVRRGANMGILEVWHPDIEKFIHAKEKNTGTNVLSNFNISVGLWEDFWEALKEGKRYPLINPRTGEKVKEIDPKSLFEELAYMAWAKADPGVVFFDVINRRNVLEPAKGEKIRATNP

SEQ ID NO: 930 - protein, 315 aa, Thermococcus kodakaraensis KOD1
  Tko TopA N-extein
MVTLIIAEKPNVARKIAYALAEGKPVRKTIGKVSYYEFTRDGKKVIVAPAVGHLFSLAPKTKTYGYPVFDIEWVPVYVAEKGKSYAKDYIKALATLAKQADEFVVACDYDTEGEVIGYTALKYACGVDPSKAKRMKFSALTKKDLLKAWYNMEPTINFGMADAGIARHVLDWYWGVNLSRALTSAIKRASGKWMVLSTGRVQGPTLKFLVEREKEIQNFEPKPYWVIKMLLEKNGGQYTAVYEKEKVWDEEEAKKIVEEAKKGPAFVEKVEVKQQNRNPPVPFDLGTLQREAYSAFGYSPKKTLDIAQKLYEKGY

SEQ ID NO: 931 - protein, 494 aa, Thermococcus litoralis
  Tli Pol-1 N-extein
MILDTDYITKDGKPIIRIFKKENGEFKIELDPHFQPYIYALLKDDSAIEEIKAIKGERHGKTVRVLDAVKVRKKFLGREVEVWKLIFEHPQDVPAMRGKIREHPAVVDIYEYDIPFAKRYLIDKGLIPMEGDEELKLLAFDIETFYHEGDEFGKGEIIMISYADEEEARVITWKNIDLPYVDVVSNEREMIKRFVQVVKEKDPDVIITYNGDNFDLPYLIKRAEKLGVRLVLGRDKEHPEPKIQRMGDSFAVEIKGRIHFDLFPVVRRTINLPTYTLEAVYEAVLGKTKSKLGAEEIAAIWETEESMKKLAQYSMEDARATYELGKEFFPMEAELAKLIGQSVWDVSRSSTGNLVEWYLLRVAYARNELAPNKPDEEEYKRRLRTTYLGGYVKEPEKGLWENIIYLDFRSLYPSIIVTHNVSPDTLEKEGCKNYDVAPIVGYRFCKDFPGFIPSILGDLIAMRQDIKKKMKSTIDPIEKKMLDYRQRAIKLLAN

SEQ ID NO: 932 - protein, 1081 aa, Thermococcus litoralis
  Tli Pol-2 N-extein
MILDTDYITKDGKPIIRIFKKENGEFKIELDPHFQPYIYALLKDDSAIEEIKAIKGERHGKTVRVLDAVKVRKKFLGREVEVWKLIFEHPQDVPAMRGKIREHPAVVDIYEYDIPFAKRYLIDKGLIPMEGDEELKLLAFDIETFYHEGDEFGKGEIIMISYADEEEARVITWKNIDLPYVDVVSNEREMIKRFVQVVKEKDPDVIITYNGDNFDLPYLIKRAEKLGVRLVLGRDKEHPEPKIQRMGDSFAVEIKGRIHFDLFPVVRRTINLPTYTLEAVYEAVLGKTKSKLGAEEIAAIWETEESMKKLAQYSMEDARATYELGKEFFPMEAELAKLIGQSVWDVSRSSTGNLVEWYLLRVAYARNELAPNKPDEEEYKRRLRTTYLGGYVKEPEKGLWENIIYLDFRSLYPSIIVTHNVSPDTLEKEGCKNYDVAPIVGYRFCKDFPGFIPSILGDLIAMRQDIKKKMKSTIDPIEKKMLDYRQRAIKLLANSILPNEWLPIIENGEIKFVKIGEFINSYMEKQKENVKTVENTEVLEVNNLFAFSFNKKIKESEVKKVKALIRHKYKGKAYEIQLSSGRKINITAGHSLFTVRNGEIKEVSGDGIKEGDLIVAPKKIKLNEKGVSINIPELISDLSEEETADIVMTISAKGRKNFFKGMLRTLRWMFGEENRRIRTFNRYLFHLEKLGLIKLLPRGYEVTDWERLKKYKQLYEKLAGSVKYNGNKREYLVMFNEIKDFISYFPQKELEEWKIGTLNGFRTNCILKVDEDFGKLLGYYVSEGYAGAQKNKTGGISYSVKLYNEDPNVLESMKNVAEKFFGKVRVDRNCVSISKKMAYLVMKCLCGALAENKRIPSVILTSPEPVRWSFLEAYFTGDGDIHPSKRFRLSTKSELLANQLVFLLNSLGISSVKIGFDSGVYRVYINEDLQFPQTSREKNTYYSNLIPKEILRDVFGKEFQKNMTFKKFKELVDSGKLNREKAKLLEFFINGDIVLDRVKSVKEKDYEGYVYDLSVEDNENFLVGFGLLYAHNSYYGYMGYPKARWYSKECAESVTAWGRHYIEMTIREIEEKFGFKVLYAD

SEQ ID NO: 933 - protein, 18 aa, Torulaspora pretoriensis, strain CBS 5080
  Tpr VMA N-extein
ISQSLSKYSNSDAIIYVG

SEQ ID NO: 934 - protein, 491 aa, Thermococcus species GE8
  Tsp-GE8 Pol-1 N-extein
MILDTDYITEDGKPVIRVFKKENGEFKIEYDRNFEPYFYALLKDDSAIEEVKKITAKRHGTVVKVKRAEKVKKKFLGRPIEVWKLYFTHPQDVPAIRDKIREHPAVIDIYEYDIPFAKRYLIDKGLIPMEGDEKLKMLAFDIETLYHEGEEFAEGPILMISYADEEGARVITWKKVDLPYVDVVSTEKEMIKRFLRVVKEKDPDVLITYNGDNFDFAYLKRRSEKLGVKFILGRDGSEPKIQRMGDRFAVEVKGRIHFDLYPVIRRTINLPTYTLEAVYEAIFGKPKEKVYAEEIATAWETGEGLERVARYSMEDAKVTFELGKEFFPMEAQLSRLIGQSLWDVSRSSTGNLVEWFLLRKAYERNELAPNKPDERELARRRQSYAGGYVKEPERGLWNNIVYLDFRSLYPSIIITHNVSPDTLNREGCKEYDVAPQVGHKFCKDFPGFIPSLLGDLLEERQKIKRKMRATIDPVEKKLLDYRQRAIKILAN

SEQ ID NO: 935 - protein, 1075 aa, Thermococcus species GE8
  Tsp-GE8 Pol-2 N-extein
MILDTDYITEDGKPVIRVFKKENGEFKIEYDRNFEPYFYALLKDDSAIEEVKKITAKRHGTVVKVKRAEKVKKKFLGRPIEVWKLYFTHPQDVPAIRDKIREHPAVIDIYEYDIPFAKRYLIDKGLIPMEGDEKLKMLAFDIETLYHEGEEFAEGPILMISYADEEGARVITWKKVDLPYVDVVSTEKEMIKRFLRVVKEKDPDVLITYNGDNFDFAYLKRRSEKLGVKFILGRDGSEPKIQRMGDRFAVEVKGRIHFDLYPVIRRTINLPTYTLEAVYEAIFGKPKEKVYAEEIATAWETGEGLERVARYSMEDAKVTFELGKEFFPMEAQLSRLIGQSLWDVSRSSTGNLVEWFLLRKAYERNELAPNKPDERELARRRQSYAGGYVKEPERGLWNNIVYLDFRSLYPSIIITHNVSPDTLNREGCKEYDVAPQVGHKFCKDFPGFIPSLLGDLLEERQKIKRKMRATIDPVEKKLLDYRQRAIKILANSILPDEWLPLLVNGRLKLVRIGDFVDNTMKKGQPLENDGTEVLEVSGIEAISFNRKTKIAEIKPVKALIRHRYRGKVYDIKLSSGRNIKVTEGHSLFAFRDGELVEVTGGEIKPGDFIAVPRRVNLPERHERINLIEILLGLPPEETSDIVLTIPVKGRKNFFKGMLRTLRWIFEEEQRPRTARRYLEHLQKLGYVKLMKRAYEIVNKEALRNYRKLYEVLAERVKYNGNKREYLVHFNDLRNEIKFMPDEELEEWKVGTLNGFRMEPFIEVGEDFAKLLGYYVSEGYARKQRNQKNGWSYSVKIYNNDQRVLDDMEKLASKFFGRVRRGKNYVEISRKMAYVLFESLCGTLAENKRVPEVIFTSPESVRWAFFEGYFIGDGDLHPSKRVRLSTKSEELVNGLVVLLNSLGISAIKIRFDSGVYRVLVNEELPFLGNRKRKNAYYSHVIPKEILEETFGKQFQKNMSPAKLNEKVEKGELDAGKARRIAWLLEGDIVLDRVEKVTVEDYEGYVYDLSVEENENFLAGFGMLYAHNSYYGYYGYAKARWYCRECAESVTAWGRSYIETTIREIEEKFGFKVLYAD

SEQ ID NO: 936 - protein, 491 aa, Thermococcus species GT
  Tsp-GT Pol-1 N-extein
MILDTDYITEDGKPVIRIFKKENGEFKIEYDREFEPYIYALLKDDSAIEDVKKITAGRHGRVVKVKRAEKVKKKFLGRPIEVWKLYFTHPQDVPAIRDEIRKHPAVIDIYEYDIPFAKRYLIDRGLIPMEGDEELKMMSFDIETLYHEGEEFGTGPILMISYADEGEARVITWKKIDLPYVEVVSTEKEMIKRFLKVVKEKDPDVLITYNGDNFDFAYLKKRCEKLGIKFTLGRDGSEPKIQRMGDRFAVEVKGRIHFDLYPVIRRTINLPTYTLEAVYEAVFGTPKEKVYPEEITTAWETGEGLERVARYSMEDAKVTYELGREFFPMEAQLSRLIGQSLWDVSRSSTGNLVEWFLLRKAYERNEIAPNKPDERELARRRGGYAGGYVKEPERGLWDNIVYLDFMSLYPSIIITHNVSPDTLNREGCKEYDTAPQVGHKFCKDVQGFIPSLLGALLDERQKIKKRMKASIDPLEKKLLDYRQKAIKILAN

SEQ ID NO: 937 - protein, 1077 aa, Thermococcus species GT
  Tsp-GT Pol-2 N-extein
MILDTDYITEDGKPVIRIFKKENGEFKIEYDREFEPYIYALLKDDSAIEDVKKITAGRHGRVVKVKRAEKVKKKFLGRPIEVWKLYFTHPQDVPAIRDEIRKHPAVIDIYEYDIPFAKRYLIDRGLIPMEGDEELKMMSFDIETLYHEGEEFGTGPILMISYADEGEARVITWKKIDLPYVEVVSTEKEMIKRFLKVVKEKDPDVLITYNGDNFDFAYLKKRCEKLGIKFTLGRDGSEPKIQRMGDRFAVEVKGRIHFDLYPVIRRTINLPTYTLEAVYEAVFGTPKEKVYPEEITTAWETGEGLERVARYSMEDAKVTYELGREFFPMEAQLSRLIGQSLWDVSRSSTGNLVEWFLLRKAYERNEIAPNKPDERELARRRGGYAGGYVKEPERGLWDNIVYLDFMSLYPSIIITHNVSPDTLNREGCKEYDTAPQVGHKFCKDVQGFIPSLLGALLDERQKIKKRMKASIDPLEKKLLDYRQKAIKILANSLLPEEWIPLVENGKVRLHRIGEFVDKLMETDSELVKRNGDTEVLEVRGIRALSFDRKSKKARVMPVKAVIRHRYSGDVYEIVLGSGRRITVTEGHSLFAYGDGELREVTGGEIKAGDLLAVPRRVNLPEKKERLNLVELLRRLPEEETGDIILTIPVKGRKNFFKGMLRTLRWISGEEKRPRTARRYLEHLEGLGYVRLKKIGYEVTDREGLERYRKLYERLVEAVRYNGNKREYLVEFNAVRDVIALMPEEELRDWLVGTRNGFRMRPFVEIEEDFAKLLGYYVSEGNARKWRNQKNGWSYTVKLYNENQRVLDDMESLAERFFGRVKRGKNYIEIPRKMAYIIFENLCGTLAENKRVPEAIFTSPESVRWAFIEGYFIGDGDVHPSKRVRLSTKSELLVNGLVLLLNSLGVSAIKIRHDSGVYRVYVNEELPFTDYRKKKNAYYSHVIPKEILEETFGKVFQRNVSYEKFRELVKSEKLDGEKAKRIEWLLNGDVVLDKVLEVKKRPYEGYVYDLSVEEDENFLAGFGLLYAHNSYYGYYGYARARWYCKECAESVTAWGRDYIETTIHEIEERFGFKVLYAD

SEQ ID NO: 938 - protein, 767 aa, Thermus thermophilus HB27
  Tth-HB27 DnaE-1 N-extein
MGRKLRFAHLHQHTQFSLLDGAAKLSDLLKWVKETTPEDPALAMTDHGNLFGAVEFYKKATEMGIKPILGYEAYVAAESRFDRKRGKGLDGGYFHLTLLAKDFTGYQNLVRLASRAYLEGFYEKPRIDREILREHAEGLIALSGCLGAEIPQFILQDRLDLAEARLNEYLSIFKDRFFIEIQNHGLPEQKKVNEVLKEFARKYGLGMVATNDGHYVRKEDARAHEVLLAIQSKSTLDDPGRWRFPCDEFYVKTPEEMRAMFPEEEWGDEPFDNTVEIARMCNVELPIGDKMVYRIPRFPLPEGRTEAQYLMELTFKGLLRRYPDRITEGFYREVFRLLGKLPPHGDGEALAEALAQVEREAWERLMKSLPPLAGVKEWTAEAIFHRALYELSVIERMGFPGYFLIVQDYINWARRNGVSVGPGRGSAAGSLVAYAVGITNIDPLRFGLLFERFLNPERVSMPDIDTDFSDRERDRVIQYVRERYGEDKVAQIGTLGSLASKAALKDVARVYGIPHKKAEELAKLIPVQFGKPKPLQEAIQVVPELRAEMEKDPKVREVLEVAMRLEGLNRHASVHAAGVVIAAEPLTDLVPLMRDQEGRPVTQYDMGAVEALGLLKMDFLGLRTLTFLDEVKRIVKASQGVELDYDALPLDDPKTFALLSRGETKGVFQLESGGMTATLRGLKPRRFEDLIAILSLYRPGPMEHIPTYIRRHHGLEPVSYSEFPHAEKYLKPILDETYGIPVYQEQIMQIASAVAGYSLGEADLLRR

SEQ ID NO: 939 - protein, 1238 aa, Thermus thermophilus HB27
  Tth-HB27 DnaE-2 N-extein
MGRKLRFAHLHQHTQFSLLDGAAKLSDLLKWVKETTPEDPALAMTDHGNLFGAVEFYKKATEMGIKPILGYEAYVAAESRFDRKRGKGLDGGYFHLTLLAKDFTGYQNLVRLASRAYLEGFYEKPRIDREILREHAEGLIALSGCLGAEIPQFILQDRLDLAEARLNEYLSIFKDRFFIEIQNHGLPEQKKVNEVLKEFARKYGLGMVATNDGHYVRKEDARAHEVLLAIQSKSTLDDPGRWRFPCDEFYVKTPEEMRAMFPEEEWGDEPFDNTVEIARMCNVELPIGDKMVYRIPRFPLPEGRTEAQYLMELTFKGLLRRYPDRITEGFYREVFRLLGKLPPHGDGEALAEALAQVEREAWERLMKSLPPLAGVKEWTAEAIFHRALYELSVIERMGFPGYFLIVQDYINWARRNGVSVGPGRGSAAGSLVAYAVGITNIDPLRFGLLFERFLNPERVSMPDIDTDFSDRERDRVIQYVRERYGEDKVAQIGTLGSLASKAALKDVARVYGIPHKKAEELAKLIPVQFGKPKPLQEAIQVVPELRAEMEKDPKVREVLEVAMRLEGLNRHASVHAAGVVIAAEPLTDLVPLMRDQEGRPVTQYDMGAVEALGLLKMDFLGLRTLTFLDEVKRIVKASQGVELDYDALPLDDPKTFALLSRGETKGVFQLESGGMTATLRGLKPRRFEDLIAILSLYRPGPMEHIPTYIRRHHGLEPVSYSEFPHAEKYLKPILDETYGIPVYQEQIMQIASAVAGYSLGEADLLRRCLAEGSLVLDAATGQRVPIEKVRPGMEVFSLGPDYRLYRVPVLEVLESGVREVVRLRTRSGRTLVLTPDHPLLTPEGWKPLCDLPLGTPIAVPAELPVAGHLAPPEERVTLLALLLGDGNTKLSGRRGTRPNAFFYSKDPELLAAYRRCAEALGAKVKAYVHPTTGVVTLATLAPRPGAQDPVKRLVVEAGMVAKAEEKRVPEEVFRYRREALALFLGRLFSTDGSVEKKRISYSSASLGLAQDVAHLLLRLGITSQLRSRGPRAHEVLISGREDILRFAELIGPYLLGAKRERLAALEAEARRRLPGQGWHLRLVLPAVAYRVSEAKRRSGFSWSEAGRRVAVAGSCLSSGLNLKLPRRYLSRHRLSLLGEAFADPGLEALAEGQVLWDPIVAVEPAGKARTFDLRVPPFANFVSEDLVVHNSMGKKKVEEMKSHRERFVQGAKERGVPEEEANRLFDMLEAFANYGFNK

SEQ ID NO: 940 - protein, 298 aa, Thermus thermophilus HB27
  Tth-HB27 RIR1-1 N-extein
MRDGYFFDEHAQAIARRQYLQPGDGDILGMFRRVAREIAKAEREEERSKWEEEFFRLMAEKRFSPGGRILAGAGTVHGNLLNCFVQGATENPPESFAGIMEVAKKLALVTKVGGGNGVNLDPYRSKGKRARRAVEGVAYLSAEHPDVEDFIRGLMRPPINPDGAKEEISLKNFARVVYGALSPELKALAERYGVRTVKEPPEGRILVPDDMGGIIDAAREAADLARKGQKPHVDFSLLRPEGAPIRGSGGTSSGPVSFLFEIFDNFLEWVAWGAEEAGPVATLRYVYAPVLRVVRQGG

SEQ ID NO: 941 - protein, 885 aa, Thermus thermophilus HB27
  Tth-HB27 RIR1-2 N-extein
MRDGYFFDEHAQAIARRQYLQPGDGDILGMFRRVAREIAKAEREEERSKWEEEFFRLMAEKRFSPGGRILAGAGTVHGNLLNCFVQGATENPPESFAGIMEVAKKLALVTKVGGGNGVNLDPYRSKGKRARRAVEGVAYLSAEHPDVEDFIRGLMRPPINPDGAKEEISLKNFARVVYGALSPELKALAERYGVRTVKEPPEGRILVPDDMGGIIDAAREAADLARKGQKPHVDFSLLRPEGAPIRGSGGTSSGPVSFLFEIFDNFLEWVAWGAEEAGPVATLRYVYAPVLRVVRQGGCLHPDTLVHTDRGTLRLRELVDPFRRGWQPHTLSVATDEGWRPSPEGYNNGVAPTLRVVLENGLEVQGTLNHKLKVLREDGTREWVELQDLRPGDWVIWVLDEHTGTPVQLAPLDEPLHPNTTPIRTPEVLTEDLAFLLGFFFGEGFVSGDRIGFSVHEEEPMREEAKRLFRELFGLELREERKPGDRSVTLVVRSRPLVTWLRKNGLLKGKARELEVPRAIRQSPRPVLAAFLRGLFEADGTITAGYPMLTTASKRLAQDVMVLLGGLGIPSKLLRYNPLPGRFSKAEHYGVRVVTAKGLERYLERIGVPKGSRLEALHGIKPDVRRESSWPLPHAEGLLKPLLTVTEKGRKGYASPYTPLRKDLLRYLRGERQLTATGYAMVLEKAQDLGLEAEPFPFNEYYVRVASVEPGGEILTLDLSVEGNHTYLANGLVSHNTRRGAGMATLSIEHPDLLDFLTAKDLDREKAEGDISTFNISVLATDRFLEAVEKDELWPVTPIEVPGKYYPYPVEGPYTGKLPSLPEREDGAKAIPLYGGKVPARWLWHEIAWHAWATGEPGLIFVDRVNALSALKGLGERYQIRSTNP

SEQ ID NO: 942 - protein, 767 aa, Thermus thermophilus HB8; identical to SEQ ID NO: 938
  Tth-HB8 DnaE-1 N-extein

SEQ ID NO: 943 - protein, 1238 aa, Thermus thermophilus HB8
  Tth-HB8 DnaE-2 N-extein
MGRKLRFAHLHQHTQFSLLDGAAKLSDLLKWVKETTPEDPALAMTDHGNLFGAVEFYKKATEMGIKPILGYEAYVAAESRFDRKRGKGLDGGYFHLTLLAKDFTGYQNLVRLASRAYLEGFYEKPRIDREILREHAEGLIALSGCLGAEIPQFILQDRLDLAEARLNEYLSIFKDRFFIEIQNHGLPEQKKVNEVLKEFARKYGLGMVATNDGHYVRKEDARAHEVLLAIQSKSTLDDPGRWRFPCDEFYVKTPEEMRAMFPEEEWGDEPFDNTVEIARMCNVELPIGDKMVYRIPRFPLPEGRTEAQYLMELTFKGLLRRYPDRITEGFYREVFRLLGKLPPHGDGEALAEALAQVEREAWERLMKSLPPLAGVKEWTAEAIFHRALYELSVIERMGFPGYFLIVQDYINWARRNGVSVGPGRGSAAGSLVAYAVGITNIDPLRFGLLFERFLNPERVSMPDIDTDFSDRERDRVIQYVRERYGEDKVAQIGTLGSLASKAALKDVARVYGIPHKKAEELAKLIPVQFGKPKPLQEAIQVVPELRAEMEKDPKVREVLEVAMRLEGLNRHASVHAAGVVIAAEPLTDLVPLMRDQEGRPVTQYDMGAVEALGLLKMDFLGLRTLTFLDEVKRIVKASQGVELDYDALPLDDPKTFALLSRGETKGVFQLESGGMTATLRGLKPRRFEDLIAILSLYRPGPMEHIPTYIRRHHGLEPVSYSEFPHAEKYLKPILDETYGIPVYQEQIMQIASAVAGYSLGEADLLRRCLAEGSLVLDAATGQRVPIEKVRPGMEVFSLGPDYRLYRVPVLEVLESGVREVVRLRTRSGRTLVLTPDHPLLTPEGWKPLCDLPLGTPIAVPAELPVAGHLAPPEERVTLLALLLGDGNTKLSGRRGTRPNAFFYSKDPELLAAYRRCAEALGAKVKAYVHPTTGVVTLATLAPRPGAQDPVKRLVVEAGMVAKAEEKRVPEEVFRYRREALALFLGRLFSTDGSVEKKRISYSSASLGLAQDVAHLLLRLGITSQLRSRGPRAHEVLISGREDILRFAELIGPYLLGAKRERLAALEAEARRRLPGQGWHLRLVPPAVAYRISEAKRRSGLSWSEAGRRVAVAGSCLSSGLNLKRPRRYLFRHRLFLLGEAFADPGLEALAEGQVLWDPIVAVEPAGKARTFDLRVPPFANFVSEDLVVHNSMGKKKVEEMKSHRERFVQGAKERGVPEEEANRLFDMLEAFANYGFNK

SEQ ID NO: 944 - protein, 887 aa, Thermus thermophilus HB8
  Tth-HB8 RIR1-2 N-extein
MDMRDGYFFDEHAQAIARRQYLQPGDGDILGMFRRVAREIAKAEREEERSKWEEEFFRLMAEKRFSPGGRILAGAGTVHGNLLNCFVQGATENPPESFAGIMEVAKKLALVTKVGGGNGVNLDPYRSKGKRARRAVEGVAYLSAEHPDVEDFIRGLMRPPINPDGAKEEISLKNFARVVYGALSPELKALAERYGVRTVKEPPEGRILVPDDMGGIIDAAREAADLARKGQKPHVDFSLLRPEGAPIRGSGGTSSGPVSFLFEIFDNFLEWVAWGAEEAGPVATLRYVYAPVLRVVRQGGCLHPDTLVHTDRGTLRLRELVDPFRRGWQPHTLSVATDEGWRPSPEGYNNGVAPTLRVVLENGLEVQGTLNHKLKVLREDGTREWVELQDLRPGDWVIWVLDEHTGTPVQLAPLDEPLHPNTTPIRTPEVLTEDLAFLLGFFFGEGFVSGDRIGFSVHEEEPMREEAKRLFRELFGLELREERKPGDRSVTLVVRSRPLVTWLRKNGLLKGKARELEVPRAIRQSPRPVLAAFLRGLFEADGTITAGYPMLTTASKRLAQDVMVLLGGLGIPSKLLRYNPLPGRFSKAEHYRVRVVTAKGLERYLERIGVPKGSRLEALHGIKPDIRRESSWPLPHAEGLLKPLLTVTEKGRKGYASPYTPLRKDLLRYLRGERQLTATGYAMVLEKAQDLGLEAEPFPFNEYYVRVASVEPGGEILTLDLSVEGNHTYLANGLVSHNTRRGAGMATLSIEHPDLLDFLTAKDLDREKAEGDISTFNISVLATDRFLEAVEKDELWPVTPIEVPGKYYPYPVEGPYTGKLPPLPEREDGAKAIPLYGGKVPARWLWHEIAWHAWATGEPGLIFVDRVNALSALKGLGERYQIRSTNP

SEQ ID NO: 945 - protein, 491 aa, Thermococcus zilligii
  Tzi Pol N-extein
MILDADYITEDGKPVIRVFKKEKGEFKIDYDRDFEPYIYALLKDDSAIEDIKKITAERHGTTVRVTRAERVKKKFLGRPVEVWKLYFTHPQDVPAIRDKIREHPAVVDIYEYDIPFAKRYLIDRGLIPMEGDEELRMLAFDIETLYHEGEEFGEGPILMISYADEEGARVITWKNIDLPYVESVSTEKEMIKRFLKVIQEKDPDVLITYNGDNFDFAYLKKRSETLGVKFILGRDGSEPKIQRMGDRFAVEVKGRIHFDLYPVIRRTINLPTYTLETVYEAIFGQPKEKVYAEEIARAWESGEGLERVARYSMEDAKATYELGKEFFPMEAQLSRLVGQSLWDVSRSSTGNLVEWFLLRKAYERNELAPNKPDERELARRAESYAGGYVKEPEKGLWENIVYLDYKSLYPSIIITHNVSPDTLNREGCREYDVAPQVGHRFCKDFPGFIPSLLGDLLEERQKVKKKMKATVDPIERKLLDYRQRAIKILAN

SEQ ID NO: 946 - protein, 33 aa, uncultured archaeon GZfos13E1
  Unc-ERS PFL N-extein
MNIGGFQRFSLIDYPGKICAIVFTQGCNFRCPY

SEQ ID NO: 947 - protein, 289 aa, uncultured archaeon GZfos9C4
  Unc-ERS RIR1 N-extein
MKTTVSKIRKKNFIGAKDDLKLSLNAVEVLKRRYLLKNELGGVIETPSQMFKRVAKAIARAELNYGKSKEEVKEIERRFYLLMRNLEFLPNSPTLMNAGTELGQLAACFVLPVEDSIGGIFGAVKKMAKIHQSGGGTGFSFSRLRPKGDVVKSTGGVASGPVSFMRVFDVATDVIKQGGKRRGANMGILNAEHPDILEFIRAKERGEFANFNTSVAVTDEFMRAVERNDEYGLVNPRTKGEVKRIKAREVFNEIVTYAWKTGDPGIVFMDEINRRNTIPAVGKIEATNP

SEQ ID NO: 948 - protein, 408 aa, uncultured archaeon (Rice Cluster I)
  Unc-MetRFS MCM2 N-extein
MAASVISSVARWKEFLTRYYKNQIQQLAVSDVKNKALAIEFPNITKFDVRLAEELLNNPDLVLSHAEDALTLVDLPVKTQVSAKIRVIKVPRKTQVRELRSSDVNKLVSLEGTVRKITDVRPRILEAAFECARCKNIIYIPQEGSGKFIEPSYCQCNEEKKGIFRLMYKESRFEDYQRIKIQESPENLKGGEQPQTLDINVSDDLAGIVTPGEFITVTGILRSAQRVNKDGKTAYFDIYLDGVAVELEEQEFDEVEISLEDEEEILRMSRDPEIYQKVIGSIAPSIYGYDEVKEAVAHQLFSGVVKELPDGSRIRGDIHVLLVGDPGIAKSQILRYVVKLAPRGVYASGKSASSAGLTAAAVKDEFDGQWTLEAGALVLADKGIAAIDEMDKMKNEDRSSLHEGMEQQ

SEQ ID NO: 949 - protein, 18 aa, Vanderwaltozyma polyspora, formerly Kluyveromyces polysporus, strain CBS 2163
  Vpo VMA N-extein
ISQSLSKYSNSDAIIYVG

SEQ ID NO: 950 - protein, 173 aa, Wiseana iridescent virus
  WIV RIR1 N-extein
QTRRGSYAAYLDITHPEIISFLNTRRVSGVGGDYNFKLMNIHNAVNIPDEFMRKIWFISTVTPLLRENKYLKIEETIKEIKNSNKWVEFSELKIEDFTPQNSQKFIKEMDKWNLFDPHTKKVKETISATELWERILITRAETGEPYLHFIDASNRNLPSFQKKLGLRVKQSNL

SEQ ID NO: 951 - protein, 18 aa, Zygosaccharomyces bailii, strain CBS 685
  Zba VMA N-extein
ISQSLSKYSNSDAIIYVG

SEQ ID NO: 952 - protein, 18 aa, Zygosaccharomyces rouxii, strain CBS 688
  Zro VMA N-extein
ISQSLSKFSNSDAIVYVG

SEQ ID NO: 953 - protein, 121 aa, Aquifex aeolicus strain VF5
  Aae RIR2 C-extein
CHVTLFRNIINTLRKENPELFTPEIEKWIVEYFKYAVNEEIKWGQYVTQNQILGINDVLIERYIKYLGNLRITQIGFDPIYPEVTENPLKWIDEFRKINNTKTDFFQAKPQTYSKANELKW

SEQ ID NO: 954 - protein, 313 aa, Acidovorax avenae subsp. citrulli AAC00-1
  Aave Hyp-1721 C-extein
TFKTYSVSYLELMHRMWTQGGPEGKRAVGWAIAMLLLMSGAGGLPFMEDAEDLIDGAAQMMGYNLSSKQWRKQLLADVMGKEIADFVEQGVSGLPGAPVDVSGRMGLGNLLPGTGLLLSKQNRERDLLEVAGPAGDLIARGFTAGRKLLTGDAGGAALEVAPTAVRNAVKGVDMAATGIYKDKKGYKVIDTTLAEAGAKFLGFQPKSVAEVQEANSFMQRTKTFYTQTSSEIKAQWADALFRKDDAALAEARERLADWNRNNPEQPIVVKMPDVWKRVREMGKDRTQRIADTAPKALRQQMREAAREAGQAPA

SEQ ID NO: 955 - protein, 537 aa, Acidovorax avenae subsp. citrulli AAC00-1
  Aave RIR C-extein
CGEQPLPSYGCCDLGPIILPRFVRHPFGFAGEPAFDFDAFAASVATQVRALDNVLDVTFWPLPQQRAESAAKRRIGVGFTGLGNTLAMLRLRYDTDAGRAMAMRIAECMRDAAYAASVELAKEKGVFPKFDAAGYLAPGTFASRLPAALQEAIRTHGIRNSHLLSIAPTGTVSLAFADNASNGIEPPFSWTYTRRKREADGSTSEYAVEDHAWRLYGALGGDVNALPDYFVSALQMPAAGHIAMMEAVQPFIDTAISKTVNMPADYPYEDFKNLYLHAWRARLKGLATYRPNAILGAVLEAPAAAPEAGTATTSAAHDASESADRPAVQSSAMPPATPADPMRAVIESRPKGALSAVAEKVEYWTQEGRKTLYLIVSFLPVPDGHGGTVDRAIEFFMPVGQSGESQQWITSSMRLLSLAARGGFLERALSDMRKVAWDRGPVRLGTHTRADGARVPLWHDSEVAAIAYAIQNILAQRAAAPAGPMRQQELPLDAPAAPTGLPPAMAGRKCPECGAHAVIRKDGCDYCTQCGNLGSCG

SEQ ID NO: 956 - protein, 8 aa, Aspergillus brevipes FRR2439
  Abr PRP8 C-extein
SGFEESMK

SEQ ID NO: 957 - protein, 789 aa, Acidothermus cellulolyticus 11B
  Ace RIR1 C-extein
CFILSVDDTMESILDWYKEEGLIFKGGSGAGVNLSRIRSSKELLSSGGTASGPVSFMRGADASAGTIKSGGATRRAAKMVILDVDHPDIEEFIETKVREEEKIRVLRDAGFDMDLGGRDLYSVQYQNANNSVRVSDEFMRAVERGESFGLRARTTGEVIETVDARKLFRKMAEAAWACADPGIQYDDTINDWHTCPESGRITASNPCSEYMHLDNSSCNLASLNLMKFLTDDGRFDIDTFIKVVELVITAMDISICFADFPTEKIADTTRRFRQLGIGYANLGALLMATGHAYDSDGGRALAAAITSLMTATAYKRSAELAAIVGPYDGYARNAEAHKRVMRKHAAASDALRTIGEMDRAIAERACQMWRECLTLGEQHGWRNSQASVLAPTGTIGLAMDCDTTGIEPDLALVKFKKLVGGGSMQIVNRTVPRALRTLGYPEEQVEAIVEYISEHGSVVGAPGLRPEHYEVFDCAMGDRAISPMGHVRMMAAVQPFISGAISKTVNMPESATVEDVEEIYFQGWKLGLKALAIYRNNCKVGQPLSDAKEKKVSAAVEGSHEHRPVRRRLPKRRPSQTISFSVGGAEGYLTAGSYPDNGLGEVFLKLGKQGSTLAGVMDAFAIAISIALQYGVPLEAFVSKFVNMRFEPSGMTDDPDIRFASSIMDYIFRRLALDYLPYEKREELGIFSAEERARKQSGELSAASAEPLADETADSVTADDAEARADTAVAGSAPRATTPGLGGHGAAELVDRVFGQAADAPLCMNCGTTMRPAGSCYVCEGCGSTSGCS

SEQ ID NO: 958 - protein, 654 aa, Alkalilimnicola ehrlichei MLHE-1
  Aeh DnaB-1 C-extein
TTWAMNIVEHAAMKQEAPTAVFSMEMPGDSLAMRMLSSLGRVELQRIRSGRLEDDDWPRLTSTLSLLSQAKLFIDDTPGLSPSEMRARARRLKREHGLGLIVIDYLQLMQLPGAKENRAQELSEISRSLKGLAKELDVPVIALSQLNRSLEQRPNKRPVMSDLRECVTGDTRVLLADGQRVPIRDLVGQTPEVISVNAEGRLEPAKTDLVWSVGVRPLLQVRLASGRTIRCTPEHRLRGLWDWKEARDIRVGDRLGIARELPAPKVTKRWAEHELVLLAHLVGDGSYIKGQPLRYTTASEANSEAVSRAAEAMGSTVTRHPGRGQWHQLVISGNGNRWHPQGVGKWLKQLGVFGQRSREKHLPQEVFQLDNDQLALFLRHLWATDGSITQGSAGRPRIYFSTASRHLIQDVAALLLRFGIVGRTKHITHGDGEGWFTLDISGAVQQQRYLEKIGAFGHQAHNARRALQHLRGLVENTNVDTLPEEVFNYIRERMREEGITHRQMAALRGTAYGGSAHFTFSPSRETLLSYADILNDQRLRMLANQHVFWDRVVSVEPAGEEEVFDLTVPGNACWLADGIVSHNSGAIEQDADVIVFIYRDEVYNPDTPEKGVAEIIIGKQRNGPIGTVKLTFLGRFTRFENHIEEYYPGGGLPE

SEQ ID NO: 959 - protein, 71 aa, Alkalilimnicola ehrlichei MLHE-1
  Aeh DnaB-2 C-extein
SGAIEQDADVIVFIYRDEVYNPDTPEKGVAEIIIGKQRNGPIGTVKLTFLGRFTRFENHIEEYYPGGGLPE

SEQ ID NO: 960 - protein, 393 aa, Alkalilimnicola ehrlichei MLHE-1
  Aeh Rir1 C-extein
CGEQPLPPYGACLLGSVNLTKFVRDPFTEKARFDWQEYAEVVSVFTRMLDNVVEINGLPLDEQRREIERKRRHGMGFLGLGSTLTMLRMKYGEAESLAFTEKVSREMALAGWRTGVELAEEKGPAPIMDETYTVDEAMLAKRPEMAVDGYKVGDKVKGRVLLARYSHYMQRVAEVDAELVEAIAEKGARFSHHTSIAPTGTISLSLANNASNGIEPSFAHHYFRNVIREGRKSKEKVDVFSFELLAYRHFIDPEAVPSTDPETRNLPDYFITADSVTPKQHVDIQAAAQKWVDSSISKTANVPTDYPYEDFKDIYRYAYQQGLKGCTTFRFNPEAFQGVLVTEKDLTNTFYKFKLADGTEVELRGDEEVEYDGETHTAANLYDALKEGYYGKF

SEQ ID NO: 961 - protein, 79 aa, Acyrthosiphon pisum secondary endosymbiot phage 1
  AP-APSE1 dpol C-extein
CENICQAAARDVLAYNMPPIEKAGYEIVLTVHDEIISEAPDTPQFSAEGLSKLLSFNSDWAWDLPLSANGFETYRYRKE

SEQ ID NO: 962 - protein, 83 aa, Aeropyrum pernix K1
  Ape APE0745 C-extein
SAFGWGLEHVADGIIRFRRRIVGGALRRYVVVEKMRQTPHDLRVHRVEIEDGRGMRIAGPLEARPEDLRMPEDLRRRLKGGGP

SEQ ID NO: 963 - protein, 337 aa, Acanthomoeba polyphaga Mimivirus
  APMV Pol C-extein
TDSIFINFHIKDENGEEKTDKEALMKTIAKCQRAAKLINQNVPKPQSIVYEKTLHPFILVAKKKYVGLLFEKSPDKYFLKSMGIVLKRRDNAPIVKIVVGGIIDNILKNRDIDKAIEYTKIVLDKLMNGEYPMDKFIISKTLKSRYKKPSTIAHKVLADRMAVRDPGNKPQINDRIPFVYIVKDMGKKKKKDILQGDLIEHPEYVIANNLKIDYLYYLEHQIINPASQILELMMDTKDVQKFFNKYIIDEQNKRKGAQSLTKWMDFSKLPKESGSKTAKKPYQSQKLQKTKSSNKSQIDPKYINLIKNKSRKHECQNMNKWISSTDKCTDDWEPIVE

SEQ ID NO: 964 - protein, 234 aa, Burkholderia cenocepacia
  Bce DnaB C-extein
TAFSMNIGEYVAVEYGLPVAVFSMEMPGTQLVMRMLGSIGRLDQHRMRTGRLTDEDWPKLTHAVQKMSEAQLFIDETGGLNPMELRSRARRLARQCGKLGLIIVDYLQLMSGSSQGENRATEISEISRSLKSLAKELDVPVIALSQLNRGLEQRPNKRPVMSDLRESGAIEQDADVILFIYRDEVYNPDSPDKGTAEIIIGKQRNGPIGPVRLTFLGQYTKFDNFAGAQTFYGE

SEQ ID NO: 965 - protein, 594 aa, Batrachochytrium dendrobatidis JEL197
  Bde-JEL197 RPB2 C-extein
CPAETPEGQACGLVKNLSLMGYITVGSPAPPILEFLEEWTMESLEEISPSTIPTATKIFLNGQWVGIHRDPDQLVSTLRRLRRSVDVSPEVSVVRDVRDRELRLCTDAGRIARSLFVVTPEQSLVLTKEMVQQLHEDQIQWKDLLSYGVVEYIDTEEEETVMICMTPDDLAEARMAAAGQVVERHQVGTGRLKSATVYTRNYTHCEIHPSMILGICASIIPFPDHNQSPRSVYQSAMGKQAMGLFLTNFQLRMDTMSNILFYPQKPLATTRAMEFMHFRDLPAGINAVVAIACYSGYNQEDSLIMNQSSIDRGLFRSLYYRVYMDQEKKVGMISTETLEKPSRDTTLRLKHGTYEKLEDDGLIAPGVRVSGEDIIIGKTVPIAADSTELGQRTTMHTKRDASTPLKSTENGIVDQVLITTNQDGFKFVKVRVRSIRIPHMGDKFASRHGQKGTVGITYRTEDMPFTADGITPDLIINPHAIPSRMTIGHLVECLLSKVSTFTGDEGDATPFTDVTVEAISQALQGYGYQRRGFEVLYNGHTGRKLNAQVYTGPTYYQRLKHMVDDKIHSRARGPLQILTRQPVEGRSRDGGLRF

SEQ ID NO: 966 - protein, 59 aa, B.subtilis M1918 (prophage)
  BsuP-M1918 RIR1 C-extein
CSEVLQSSQVSVYTDYDKEDEIGLDISCNLGSMNIVNVMSNQSIASTVRIAIDSLTTVT

SEQ ID NO: 967 - protein, 319 aa, B.subtilis strain 168 Sp beta c2 prophage
  BsuP-SPBc2 RIR1 C-extein
CSEVLQSSQVSVYTDYDKEDEIGLDISCNLGSMNIVNVMSNQSIASTVRIAIDSLTTVTRKTNIVNAPAVARANTLMRSIGLGQMNLHGFLAQNNIAYESEEAKDFANTYFMMVNFYSLQRSMEIARETGETYYKFDGSTYKSGEYFEKYVTNDYSPQYEKVKKLFGDQHIPNIQDWMKLKEDVMKYGLYHSYRQAIAPTGSISYVQSSTAGVMPIMERIEERTYGNSKTYYPMPGLSAQNWFFYKEAYDMDMFKVVDLIATIQQHVDQGISFTLFLKDTMTTRDLNRIDLYAHHRGIKTLYYARTKDTTQEGCLSCVV

SEQ ID NO: 968 - protein, 315 aa, Clostridium botulinum phage C-St
  CbP-C-St RNR C-extein
CRLTSSSKEISENKEVAELNGHFNSIGGSSLSIGSCKVNTINMVRIALECNGDFNKFKDILKHRVDISHKYLKVQRDVIAKNIKKNLLPVYSHGLMDMNNQFSTIGINGMFEAIKILGGIETTSTGVHYTDRGLSMAKDILETIGEMNKVTRKQYGYNANIEQIPAESASVKLCKKDKILFGDRVNTYIYGNQWIPLNVQADLTERVRVASVLDKACGGGVMLHINLGERFKDEEQSWRMMNYLAKQGVVYFSFIMKINVCENDHSFYGDMCPICHKPVSDSYVKIVGYLVKQSSYKSERAKEMDERKFYSNYNI

SEQ ID NO: 969 - protein, 315 aa, Clostridium botulinum phage D
  CbP-D RNR C-extein
CRLTSSSKEISENKEVAELNGHFNSIGGSSLSIGSCKVNTINMVRIALECNGDFNKFKDILKHRVDISHKYLKVQRDVIAKNIKKNLLPLYSHGLMDMNNQFSTIGINGMFEAIKILGGIETTSTGVHYTDRGLSMAKDILETIGEMNKVTRKQYGYNANIEQIPAESASVKLCKKDKILFGDRVNTYIYGNQWIPLNVQADLTERVRVASVLDKACGGGVMLHINLGERFKDEEQSWRMMNYLAKQGVVYFSFIMKINVCENDHSFYGDMCPICHKPVSDSYVKIVGYLVKQSSYKSERAKEMDERKFYSNYNI

SEQ ID NO: 970 - protein, 75 aa, Coxiella burnetii
  Cbu DnaB C-extein
SGAIEQDADLIAFIYRDEVYHEDSPDKGKAEIIIAKHRNGPIGKVILTFRGQYTRFDNFSHESVPQRMPFGGVPV

SEQ ID NO: 971 - protein, 690 aa, Chlorobium chlorochromatii CaD3
  Cch RIR1 C-extein
CSEYMFLDDTACNLASLNLIHFVDEASGTIKINELRHAASLWTVVLEISVLMAHFPSQTIARLSYDFRTLGLGFANLGTVLMVLGIPYDSAEALAMAGAIASLMTGQAYVTSAEMARDLGTFKRYSDNANDMLRVMRNHRRAAQNAATTDYEGLSVIPHGINAAHCQTALAEAAGAVWNEVLQKGEAHGFRNAQVSVIAPTGTIGLVMDCDTTGIEPEFAIVKFKKLAGGGYFKIVNQSVHKALLRLGYSAEQIEDIERYCKGHGTLEGCPAINGEWLKCKGFTEEKIAAVESQLATVFDIRFAFNKWILGEEFCASLGFSEEQLDNPDFDMLLELGATTAEAAAANDYICGTMMIEGAPHLQPEHLAVFDCASKCGKKGKRYIRHQAHINMMAAVQPFISGAISKTVNMPATATTAEIGNVYRDAWQQMVKAVTIYRDGSKLSQPLNSSSYNDLDEVIMLGTEETLDETKGPQEVQERIIERVYYRSERRMLPKRRKGYIREAYVGGHKVFLRTGEYDDGTLGEIFIDMYKEGASFKGLLNCFAVLASKALQYGMPLEELVDSFTFTRFDPAGTVQGHNVIKNSTSILDYVFRSIGYDYLGRKDFVHVKAVDEVPEGTLVPAEQKKASHHSAANHSTDGAGVVSNKSQIYQAKVQGYTGEQCENCGSMHVKQNGTCKVCEDCGMTTGCS

SEQ ID NO: 972 - protein, 107 aa, Chlamydomonas eugametos (chloroplast)
  Ceu ClpP C-extein
SSIQGQASDIWIDSQEIMKIRLDVAEIYSLATYRPRHKILRDLDRDFYLTATETIHYGLADEIASNEVMQEIIEMTSKVWDYHDTKQQRLLESRDSTTSGADTQSQN

SEQ ID NO: 973 - protein, 301 aa, Candida glabrata
  Cgl VMA C-extein
CGERGNEMAEVLMEFPELYTEMSGRKEPIMKRTTLVANTSNMPVAAREASIYTGITLAEYFRDQGKNVSMIADSSSRWAEALREISGRLGEMPADQGFPAYLGAKLASFYERAGKSVTLGSPNRVGSVSIVAAVSPAGGDFSDPVTTATLGITQVFWGLDKKLGQRKHFPSINTSVSYSKYTNVLNKFYDSNYPEFPTLRDRMKEILSNAEELEQVVQLVGKSALSDSDKITLDVAALIKEEFLQQNGYSTYDAFCPIWKNFDMMRSFIAYHDKAQKAVSNGANWNKLSEAVSDVKHSVSS

SEQ ID NO: 974 - protein, 349 aa, Chilo iridescent virus
  CIV RIR1 C-extein
CSEIILPTDSTRTAVCCLSSLNLEYYDEWKDNDLFIKDVMEMLDNALTIFIEKAPPTISRAVNSAKKERSIGIGVLGFHSFLQQKNISFESDEAAKLNIDIFTKLRSKIDTFNLVLGSLRGSPEDAEGTGRRFCCTMAVAPTATSSIIMGNTSPSVEPFRANAYRQDTLSGSFLNKNRYLSRILSQRLNVKEINEVWSNIVSNGGSVQQLPNNLLSEQEKQVFKTAFEINQKWVIKHAADRQKYIDQSQSINLFLKPDIHKRELHSLHLNAWKSGLKTLYYLRSEKIADADKISSNHMINSINFTNIKESIKDSIKVSILEVRNKEKNYEEKICKLTNGRRLSGCFACE

SEQ ID NO: 975 - protein, 15 aa, Cryptococcus laurentii strain CBS139
  Cla PRP8 C-extein
SGFEESMKFKKLTNA

SEQ ID NO: 976 - protein, 10 aa, Filobasidiella neoformans (Cryptococcus neoformans) Serotype A, PHLS_8104
  Cne-A PRP8 (Fne-A PRP8) C-extein
SGFEESMKNK

SEQ ID NO: 977 - protein, 17 aa, Cryptococcus neoformans (Filobasidiella neoformans), Serotype AD, CBS132).
  Cne-AD PRP8 (Fne-AD PRP8) C-extein
SGFEESMKNKRLTNAQR

SEQ ID NO: 978 - protein, 830 aa, Cryptococcus neoformans var. neoformans JEC21
  Cne-JEC21 PRP8 C-extein
SGFEESMKNKRLTNAQRSGLSQIPNRRFTMWWSPTINRANVYVGFQVQLDLTGVFMHGKIPTLKISLIQIFRAHLWQKIHESVVMDLCQVFDQEMEALQIETVQKETIHPRKSYKMNSSASDILLFSSYKWQISRPSLLTDNRDTMDGTTSNKFWLDIQLRWGDFDSHDIERYARAKYLDYSSDSQSIYPSPTGNLIAIDLAYNLYSAYGCYFPGLKPLLQQAMAKIMKANPALYVLRERIRKGLQLYSSEPTEPYLNSSNYSELFSNQIIWFVDDTNVYRVTVHKTFEGNLTTKPINGAIFIFNPRTGQLFLKIIHTSVWAGQKRLGQLAKWKTAEEVAALVRSLPVEEQPKQVIVTRKGMLDPLEVHLLDFPNIVIKGSELQLPFQATLKMEKFGDLILRATQPQMVLFNLYDDWLKSISSYTAFSRLILILRALHVNNEKSKIILRPDKNTITESYHIWPSLSDDEWMKVEVALKDLILADFGKRNSVNVASLTASEIRDIILGMEIAAPSVQRQQMAEIEKNTEAAAQVTALQTKTTNIHGDEIVVTTTTQYEQQTFASKSDWRVRAISATNLPLRVNHIFVGNDDVKDDAGSYTYVIPKNVLRSFIVNADLRTQVVAYLYGTSPPDNKQVKEIKAVAWIPQRGTNNGVDLPVTLPKHDFLLKDLEPLGWIKTQSQELNHLSPQDVTTQAKIMAAHPEWGPQSICVTCSFTPGSVSLNAWDLTVAGFEWGRKNEDVTGQNPGFNPSMANRVQLLLSDRILGMTLVPEGGIWNYGVGLTQSWSEKIPYTMTLDKPEAFWAPCHRPNAFLNFASMEGDDAADVENSLE

SEQ ID NO: 979 - protein, 449 aa, Clostridium thermocellum
  Cth TerA C-extein
SELAAAVALYMTCGDGEWGAEVYGCAADRQQASIVFDVAVEMVEQCPALKKRIKPVLSVKRLIYKPTNSFYQVLSAEAYSKHGLNVHGVVMDELHAQPNRDLYDVMTKGSGDARLQPLFFLITTAGTDRNSICYEVHQKAVDILEGRKIDPTFYPVIYGIDDNDDWTLEKNWYKANPSLGHTIDIEKVRNAFNSAKENPAEENIFRQLRLNQWVKQSTRWMQMDKWDECAFKVDIDSLKGRECYGGLDLSSTTDITAFVLVFPPRTSDEKYIVLPHFWIPEDNLNLRVRRDHVPYDIWKKQGYLKTTEGNVVHYGYIETFIEELGKKYNIKEIAFDRWGAVQMVQNLEGMGFTVVPFGQGYKDMSPPTKELMKITLEKKIAHGGHPVLRWMMDNIYVKTDPAGNIKPDKEKSTEKIDGAVALIMALDRSIRHENKESVYEKRGMRSFLD

SEQ ID NO: 980 - protein, 334 aa, Candida tropicalis (nucleus)
  Ctr VMA C-extein
CGERGNEMAEVLMEFPELFTEISGRKEPIMKRTTLVANTSNMPVAAREASIYTGITLAEYFRDQGKNVSMIADSSSRWAEALREISGRLGEMPADQGFPAYLGAKLASFYERAGKATALGSPDRVGSVSIVAAVSPAGGDFSDPVTTSTLGITQVFWGLDKKLAQRKHFPSINTSVSYSKYTNVLNKYYDSNYPEFPQLRDKIREILSNAEELEQVVQLVGKSALSDSDKITLDVATLIKEDFLQQNGYSSYDAFCPIWKTFDMMRAFISYYDEAQKAIANGAQWSKLAESTSDVKHAVSSAKFFEPSRGQKEGEKEFGDLLTTISERFAEASE

SEQ ID NO: 981 - protein, 331 aa, Chlorella virus NY2A infects Chlorella NC64A, which infects Paramecium bursaria
  CV-NY2A RIR1 C-extein
CNEIVEYTSKEETAVCVIGSVVLKNYVKNDKFDFDDLRKNVKILAKNLDRSIDVMAYPIKEAETSNKLRRPIGVGVQGLQDVFFKLRFSYDSPEARDLNREIFEHIYYAAVEASVELAEIHGPYPTFEGSPASKGILQYHLWDVTPKSNLDWRGLEERVKKGIRNSLVTALMPTASTAQICGSVEAFEPITSNLYSRRTLAGEFPVINSYLVRELIERGTWNEQMKNQIIANGGSIQKVIGIHPSVKAVYKTAWDLSMKSVIDMASDRGAFVDQTQSMNLFLAQPTLKNVTSMLFYGWKSGLKTLQYYLRSKPASSAIAVTIDNDCLVCSA

SEQ ID NO: 982 - protein, 375 aa, Crocosphaera watsonii WH 8501 (Synechocystis sp. WH 8501)
  Cwa PEP C-extein
CHAAIIAREMGIPAIVGCGDATDKIKTRQEITVCCSEGEKGRVYDGLLPFEVEETPLDNLPVTRTQILMNVGNPEKAFSLANIPAQGVGLARLEFIIANHIKAHPLALMKFDELEDEAVKEQIAELTKRYDNKPQFFVDKLAHGVATIAASFYPKPVIVRMSDFKSNEYANLLGGQGFEPKEDNPMIGWRGASRYYDPMYREAFALECQAMKTVRDDMGLVNVIPMIPFCRTPEEGKKVIAEMAKNGLKQGVNGLQIYVMCELPSNVILADQFADVFDGFSIGSNDLTQLTLGLDRDSALVAQLFDERNEGVKRMVKLAIETAKKKGRKIGICGQAPSDYPEFAKFLVELGIDSMSLNPDSVLKTLLMVAEVEKG

SEQ ID NO: 983 - protein, 306 aa, Crocosphaera watsonii WH 8501 (Synechocystis sp. WH 8501)
  Cwa RIR1 C-extein
CTESFSNVTPGKFAHCCNLVSLNLANIEEEELDYLCNISVRILDNTIDITNPPFNDAKAHNDRYRTVGVGCMGLADWLAKKGLTYENITEISNLFEEVGYWCTHTSMELAKERSPYNAFEGSDWSKGLLIGSKPVDWFVENASKKERWVQLSEDIKTYGIRNSHITAIAPNTSSSLVQGCTASILPVYSRFFYDKWAKGTIPIAPPFIKESFWFYHENKTLEQQKVVKAVATIQQWIDTGISMELLFNLNQGVYFADEPERCLTAKDIFETLLLAWKEGCKAIYYVRTVQKDDFKESDNNCTACAN

SEQ ID NO: 984 - protein, 78 aa, Costelytra zealandica iridescent virus
  CZIV RIR1 C-extein
CSEIILPTDENRTAVCCLASLNLDYYDNWCDNEQFYLDVATYLDNVLQYFIDNAPRSLKRAIYSAESERAIGIGVMGL

SEQ ID NO: 985 - protein, 639 aa, Dictyostelium discoideum strain AX4 (nucleus)
  Ddi RPC2 C-extein
CGLVKNFALMSHVTTDDSEGPLLRLAYNLGVQDILLVTGEELNSRNAYLVLLNGQIIGIHNSPDYFVTTLRKMRRAGRIREFVSICKNKAQQTISVACDGGRLCRPVIIVDDQRPRLTQEHIEDLKDGLRTFDDFIREGIIEYLDVNEENDSFLAWREAAIQPWTTHLEIEPFTMLGCVAGLIPYPHHNQSPRNTYQCAMGKQAIGAIAYNQLTRIDTLLYLLVHTQRPLCQTRTIDLLNWYKLPAGHNATVAVMSYSGYDIEDALVMNKASLDRGFGRCIVLKKQVTSIKKHGNDTSDRIFPPTPNDLRQPKYGLLDSDGIAKPGELAQKGQILVNKYSPLNTIDATPNPELIPDSAYKSSYMGYKYDNPAFIDKVLLTSGDDEQLLIKMLMRSTRRPELGDKFSSRHGQKGVCGIIVKQEDMPFSDLGICPDIIMNPHGFPSRMTIGKMIELLAGKAGVLSGKFGFGTCFGGDRVENISKVLISKGFSYGGKDYVTSGVTGEPLACFIFFGPIFYQKLKHMVMDKMHARARGPTVTLTRQPTEGRARGGGLRLGEMERDCLIGYGASALIMERLMISSDRFTVYACKNCGFLGYEGYCQYCKSSVDISTIQIPYACKLLFQELQAMNIVPRLKLVDS

SEQ ID NO: 986 - protein, 233 aa, Deinococcus geothermalis DSM11300
  Dge DnaB C-extein
TAFALSIAQNVALRGEKTVAVFSLEMPAVQLALRMLCSEARVDMNRIRSGQLNERDFERLAHAAGRLADAPMIIDDEPDLTLNALRSKLRRIAAQHGQLGLVVIDYLQLMSGGKNSGGSDNRQQEISTISRGLKGLAREMEVPIIVLSQLSRAVEQRPNHRPMLSDLRESGAIEQDADIVMFIYRDEYYNKETDQQGIAEIIIGKQRNGPVGTVKLQFHSAHVRFNDLAPEGV

SEQ ID NO: 987 - protein, 504 aa, Desulfitobacterium hafniense DCB-2
  Dha-DCB2 RIR1 C-extein
CGEQPLLPNEACNLGSINLKLMVTEKNGKVVVDWERLGQITRLATRFLDNVIEANTYPLPSIEEMVKGNRKIGLGVMGFADMLILLQTSYASEDAVEYAEKVMNFIQTEARLESQRLAEERGTFPNYQGSIYDGVRPLRNATLTTIAPTGTISMICGASSGVEPLFAVAYTKTVMDGTPLIEVNPIFQSLAEDYGFNSPELMRKIAEKGTVLGFPEVPNWVQEVFVTAQEIEPEWHIRIQAAFQKYTDNAVSKTINFANEATHEDIAKAYELAHELNCKGLTVYRDGSREEQVLSTGITKKAEEKAEEAKTQVSIPKVPFIPEVNTVLPRPRPTTTTGVTEKIRIGCGNLYVSVMADEKGICEIFTNTGRAGGCSSQSEATARLISIALRSGISVDAIIEQVKGIRCPACIRREGVNVTSCPDAIARVIKEYVELGKGKVNSVKVTSQPAVEEKPVQSKSASITNPQKTRATVAEGNACPECGMSINHESGCVVCTHCGYSKCG

SEQ ID NO: 988 - protein, 504 aa, Desulfitobacterium hafniense Y51; identical to SEQ ID NO: 987
  Dha-Y51 RIR1 C-extein

SEQ ID NO: 989 - protein, 948 aa, Debaryomyces hansenii CBS767
  Dhan GLT1 C-extein
CHLNTCPVGIATQDPELRKKFTGTPEHVINFFYYLANELRGIMANLGFRTVNEMIGRTEKLKVREDLRNTKNANMDLSPILTPAHTIRPGVATHCVKKQDHRLHVRIDNKLIDESEITLAKGLPVTIDCDVVNTDRSLGTTLSYRVSKTFGEQGLPHDTIHVNVNGSAGQSFGAFLAPGITLELEGDANDYVGKGLSGGRIIVYPPKESKFNAEDQIIAGNTAFFGATSGAAFIRGIAAERFAVRNSGANIVVEGTGDHGCEYMSGGRVVVLGSTGRNFAAGMCGGIAYVLDMAQDFGDKVNSQNVELSQITEASEIAFVRGLIEDHRHYTSSAVAENILNNFDRILPRFVKVLPYDYEKVLENEKKKQEEAKKNELNTFIKSIKEDPESDATNGEAAKIRKGHIHRPSLATVSAKDCSHEPNVLDLEDTIFDTEVEKKSVAKLDKLKGFMKYKRRNEKYRDAKKRTNDWNEMTSRLTKDELKYETARCMDCGVPFCTSDTGCPISNVIPKWNELVFQDRWYDALQRLLMTNNFPEFTGRICPAPCNGACVLGINSDPVNIKSVECAIIDHGFEQGWIKPEPPQHRTGKSIAVIGSGPAGLATADQLNKAGHSVKVYERSDRPGGLLMYGIPNMKLDKRIVKRRTDLMTAEGVEFICSTTIGEDISIEEIRSSNDAVVFAVGSTIPRDLRIKGRELNNINFAMQLLHKNTKALLDNDLEEIKKTLEGKHVIVIGGGDTGNDCLGTSTRHGAKSVTNFELLPNPPTSRPKDNPWPQWPRVFRVDYGHTEVTEHYGKDPREYSILSKEFVDDGEGNVKGIKTIRVEWKRSDSGAWQMAEVPGSEEFFSADVVLLSMGFVGPDADNLEVTKTKRGTISTVEPNGYKVSNEDNLFTAGDCRRGQSLVVWGIQEGRQCAREVDNYLMGSSRLPGNGSIEQRNFKLLEELAEKV

SEQ ID NO: 990 - protein, 334 aa, Debaryomyces hansenii CBS767
  Dhan VMA C-extein
CGERGNEMAEVLMEFPELYTEINGRQEPIMKRTTLVANTSNMPVAAREASIYTGITLAEYFRDQGKHVSMIADSSSRWAEALRELSGRLGEMPADQGFPAYLGAKLASFYERAGKAVALGSPDRIGSVSIVAAVSPAGGDFSDPVTTATLGITQVFWGLDKKLAQRKHFPSVNTSISYSKYTNILDKYYESNYPEFPALRNKLKEILSTAEELEQVVQLVGKSALSDSDKITLDVANLIKEDFLQQNGYSTYDQFCPIWKTFDMMRAFTSYHDEAQKAVANGAQWGKLSEATSDVKHAVSSSKFVEPSEGEEKGKKAFNELLANISEKFAEASE

SEQ ID NO: 991 - protein, 110 aa, Desulfovibrio vulgaris subsp. vulgaris DP4
  Dvul ParB C-extein
CWYAVKGQAHWSGDRKQVTVWNIASKGQDAETIHGTQKPVECMKRPMENNSSPGQAVYEPFSGSGTTIMAAELTGRCCYAMELNPAYVDVAVTRWENFTGQKAMRELPHV

SEQ ID NO: 992 - protein, 829 aa, Emericella nidulans (anamorph: Aspergillus nidulans) FGSC A4
  Eni-FGSCA4 PRP8 C-extein
SGFEESMKFKKLTNAQRSGLNQIPNRRFTLWWSPTINRANVYVGFQVQLDLTGIFLHGKIPTLKISLIQIFRAHLWQKIHESVVMDLCQVFDQELEQLGIEAVQKETIHPRKSYKMNSSCADILLFATNKWNVTRPSILFDTKDVYEPTTTNKFWLDVQLRYGDYDSHDIERYVRAKYLDYTTDSMSIYPSATGLMIAIDLAYNLYSAYGQYFPGLKTLIQQAMAKIMKANPALYVLRERIRKGLQLYASESNQEFLNSQNYSELFSPQIQLFIDDTNVYRVTIHKTFEGNLTTKPINGAIFIFNPRTGQLFLKIIHTSVWAGQKRLGQLAKWKTAEEVAALIRSLPVEEQPKQLIVTRKGLLDPLEVHLLDFPNISIRASELQLPFQAAMKVEKLADMILRATEPQMVLFNLYDEWLKTISPYTAFSRLILILRALHVNIDKAKIILRPDKSVITLEHHIWPSLSDEDWMKVEVQLRDLILNDYGKKNNVNVQSLTSSEVRDIILGMEISAPSLQRQQAAEIEKQQEEAKQLTAVTTKTQNVRGEDIIVTTTSQYEQQSFASKTEWRTRAIATSNLRTRANNIYVSSDDIRDEGYTYIMPKNILKRFIMIADLRVQVAGFLYGSSPPDNDQVKEIRTIVMVPQVGNTREVQLPQQLPQHDYLNSLEPLGVIHTISGNEPPYMTAQDVTQHSRLMNAHSSWDKKTVTMTVSFTPGSVSLAAWGLTPQGYKWGAENRDTTSDQPQGFSTSMGEKCQLLLSDKIRGYFLVPEDNVWNYSFMGSSYGSVEKRPVYVKIDTPLRFYDDQHRPLHFQNFAELEDIWVDRSDNFA

SEQ ID NO: 993 - protein, 63 aa, Ferroplasma acidarmanus, taxon:97393 and taxon 261390
  Fac-Fer1 RIR1 C-extein
CGEQPLLPYESCNLGSINLAKFVEDGKFTMTGIGKHCVAQILKCVKHNPVDTHIAATGIAGYG

SEQ ID NO: 994 - protein, 237 aa, Ferroplasma acidarmanus
  Fac-Fer1 SufB (Fac Pps1) C-extein
CTAPKYNTSSLHTAIVEIYARKNSDVKYTSVQNWSDSVYNLPVKRAWVDENAHMDWVTGELGSKVTMIYPSSYLRGRGASTSNLQITLATKDTFKDAGGKALHLAPDTTSRIVSKSISLDNGLTAYRGLVRMNEGAKRAKSHVQCDALLINSDSKNYTYPYDEIYEPTAEFSHEATVGKIGTDELTYLRSRGLSEDEASSMIVLGFMDDIMKEIPMEFAVEMNRLVKLEMSKMGAVG

SEQ ID NO: 995 - protein, 226 aa, Frankia alni ACN14a
  Fal DnaB C-extein
STLGLDFARAASIKNGLTSVIFSLEMSRMEITMRLLSAEARVSLQNIRTGRLTDDDWARLARRMGEVAEAPLFIDDSPHLTMMEIRAKARRLKQRNELRLVILDYLQLMSSPKKVESRQQEVSEISRSLKLLAKELDVPVVAISQLNRASEQRADKRPQVSDLRESGSLEQDADAVILLYREDTVEKESARAGEADLIIAKHRNGPTGTVTVAFQGHYSRFVDMAN

SEQ ID NO: 996 - protein, 63 aa, Guillardia theta (plastid)
  Gth DnaB C-extein
SIEQDADVVLFLYRDSYYQHNLKQSNIDMCEVIVAKHRHGTIGMVNLIFNPNTVSFMNLIKES

SEQ ID NO: 997 - protein, 230 aa, Gloeobacter violaceus, PCC 7421
  Gvi DnaB C-extein
TAFSLSIAQRIAQKAGLPAVVFSLEMSKEQLVQRLLCSEAGVESHRLRAARISENEWQRIGQAIGELASIPLYIDDSPNATVTEIRSKARRLQAEQGGRLGLVMIDYLQLMEGAGSDNRVQELSKITRGLKGLARELRVPVMALSQLSRSVEARTNKRPMLSDLRESGSIEQDADIVLMLYRDDYYNPDSPDRNIAEVNIVKHRNGPTGTVKLLFENQFTRFLNLTSGNH

SEQ ID NO: 998 - protein, 444 aa, Gloeobacter violaceus, PCC 7421
  Gvi RIR1-2 C-extein
CGEIWLPPNSACNLGSIVISKFMHRTERGVELDWEDLARTVEISTRFLDNVLDVAEFATPAQKHNVRNVFRQLGLGIMGWADWLKARRIPYDSEAHLREIDKVGRFIAERAYRTSEALAAEKGACGIWEEIKDVRPGNPFERWRDSTGRVLSGDEAAERAEALTQTPRRNSTVLSIAPTGSIAQLASCSWAFEPDFGLTIWKQVYVDASSSQQNWVQIPSPYVEALGLGEADRQIVLQTGSLQGTAFAAAHPEEAAAFKISREISWQWHVLAQSRWQNWVDSSISKTINCSRETTVEEIKEMYRFAQRNGLKGITVYREGTLESEPVKIGAIDQNEPAAAAQPVAPTADGNGNGYVPARPFATGAARPAMLDEEVSQAASLIGIHYDEGPMYLSEEAPVDDWTSSQFKGGCGGGVLHYQVWIRENGRRLLVVRSDSYSMCFVKS

SEQ ID NO: 999 - protein, 266 aa, Heterosigma akashiwo virus 01
  HaV01 Pol C-extein
TDSVYVNFPSTNNDMQKVFDISIEAAEAISKTFPQPIELEFEKVMYPFILFTKKRYASLIWTRVDKPDKIDFKGIQVVRRDNCSYVRESLTTIYNCLLYERNVDKCLGITDKIIDDLLKGRVPIEKLTVSKSLKSNYKSKTMPHFLLAEKMKQRDPMNYPRPGERVPYVFIENTEARLQGEKAENPEYAKENGLIIDTLYYLDHQMKKPLAELFNIVLGEGKYNLYKNHMGFIKMKKNHQERERLREINRKKGQKELNLKWFSKKK

SEQ ID NO: 1000 - protein, 381 aa, Halorhodospira halophila SL1
  Hhal DnaB-1 C-extein
TTVAMNMVEHVAMQLKKPVAVFSMEMPADALAMRMLASLGRVHLQRVRSGKLQDDDWPRLTSTMSLLAEAPLFIDDSPGLTPTEIRARARRLQREHDELGLIVIDYLQLMQIPGFRENRAGELSEISRGLKALAKELNTPVIALSQLNRSLEQRPNKRPIMSDLRECVTGDTLVLLADGQRRPISELVGSAPEVIAIDDRHRLVPAQAERVWRVGRRPVYRVQLASGRLLRATARHRLLTGSGWKRVDELRDEDRIAIARTVPEPGSVMESESDVFWDHLVAVEPDGEEDVYDLTVPGPASWVADSIISHNSGAIEQDADLIAFIYRDEVYNEDTPDKGVAELIIAKQRQGPIGTVKLTFLGEYTRFENYIEDVYGGGIPG

SEQ ID NO: 1001 - protein, 367 aa, Haloarcula marismortui ATCC 43049
  Hma CDC21 C-extein
SQMLSYIENIAPRSVYTSGKGSSSAGLTAAAVRDDFGDGQQWTLEAGALVLADQGIAAIDELDKMSPEDRSAMHEALEQQRISVSKAGINATLKSRCSLLGAANPKYGRFDQYEPIGEQIDLEPALISRFDLIFTVTDKPDEEKDRNLAEHIIQTNYAGELHTHRTENPTSNFSEEEVGTVTEEVAPTIEPDLLRKYVAYAKRNCFPTMTEEAKSRIEDFYVDLRLKGQDEDAPVPVTARKLEALVRLAEASARIRLSDTVDEADADRAVDIAHYCLKEIGVDPETGEFDADVVETGQSKTQRDRIQNIKGIISDIEDEYDEGAPADVVIERAEEVGIDESKAEHEIDKLKQKGEVYEPRTDHLRTT

SEQ ID NO: 1002 - protein, 250 aa, Haloarcula marismortui ATCC 43049
  Hma Pol-II C-extein
CDGDEDCVMLLMDGLLNFSKSYLPNQRGGQMDAPLVMSSRIDPSEIDDEAHNMDIMDAYPREFYEATREMKDPTEVEDVMKIAEETLGTDREYTEFRHTHDTANIAAGPDLSAYKTLGSMEDKMDAQLEISRKLRAVVESDVAERIIEYHFLPDLIGNLRAFSRQEVRCLDCGESFRRAPLTGDCRECGGRVNLTVHEGSVNKYIDTAIRVADEFGARDYTKQRLKILERKIESVFENDHNKQSGIADFM

SEQ ID NO: 1003 - protein, 349 aa, Haloarcula marismortui ATCC 43049
  Hma PolB C-extein
SLYGVLGWDRFRLYDKEMGAAVTATGREVIDYTDEVVANEGYEVVYGDTDSVMLQLGNVGPDDVEGDVEITDEMREKHPEMDDDELELIATTIQKGFELEETINASYDEFAMERLNAQFHRFEIEFEKLYRRFFQAGKKKRYAGNIVWKEGKHVDDIDITGFEYQRSDIAPITKRVQKEVIDRIVRGEDAESIKQYVSDVIEDYQDGNVNYDDVGIPGGIGKKLDNYDTDTAQVRGAKYANMLLGTNFQSGSKPKRLYLDRVHSDFFQRIEEEEGLDPQRDPLYGEFRRDPDVICFEYADQIPEEFEIDWDKMLDKTLKGPIARILEAMDISWEEVKSGQEQTGLGSFM

SEQ ID NO: 1004 - protein, 334 aa, Haloarcula marismortui ATCC 43049
  Hma TopA C-extein
TRHNSIEKLYDRGYIEGDPPRPTTLAMAVVEAAEEFADHVVSDEMTAQLEADMTAIANGEATLDDVADESREMLKRVFDELRDSREEIGEHLQESLKADKTLGPCPKCGEDMLVRRSRQGSYFVGCDGFPECRNTLPLPSTGEPQVLEDHCEEHDMHHVKMLAGRDTFVHGCPRCEAEKADESEDEVIGPCPECGSEHDGDLAIKHLRSGSRLVGCTRYPDCDYSLPLPRNGDISVTEAFCEEHDLPELVIDADSDDPWELGCPICNYEEYQARTAIEDLEDLNGIGSATAEKLGDAGVDSLAALREADPDIVATEVQGVSATQVRDWQDELEA

SEQ ID NO: 1005 - protein, 367 aa, Halobacterium salinarum NRC-1
  Hsa-NRC1 CDC21 C-extein
SQMISYVQNIAPRSVYTSGKGSSAAGLTAAAVRDDFGDGQQWSLEAGALVLADNGVAAVDELDKMADDDRSAMHEALEQQKISVSKAGINATLKARCSLLGAANPKYGRFDQYEPIGEQIDLEPALISRFDLIFTVTDQPDPEEDAALADHILQTNYAGELNTQNEELANANYSEAEIESQTEDVAPAIEPGLLRKYIAYARRTCFPTMTPDARQAIEEFYVDLRSKGADEDAPVPVTARQLEAIVRLAEASARLRLSDSVEKSDADRVIGIVQSCLQDIGVDPETGEFDADVVETGQSKTQRDRVKNIKALIGEIEEEFDDGAPVEEVLDRAEEIGMDAGKAEHEIEKLKERGELYQPNTDHLRSI

SEQ ID NO: 1006 - protein, 250 aa, Halobacterium salinarum NRC-1
  Hsa-NRC1 Pol-II C-extein
CDGDEDCVMLLMDGLINFSKSYLPDKRGGRMDAPLVMSSRIDPAEIDDEAHNIDIDREYPREFYEATRELADPEDVADLITLAESTVGTDEEYTGFGHTHATSNIHLGPSLSAYKTLGSMMDKMDAQLELARKLRSVAETDVAERVIEYHFLPDLIGNLRAFSRQETRCLDCGEKYRRMPLSGDCRECGGRVNLTVHEGSVNKYMDTAMRVATEYDCREYTKQRLEIMDRRLESVFEDDTNKQSGISDFM

SEQ ID NO: 1007 - protein, 273 aa, Haloferax volcanii DS70
  Hvo PolB C-extein
TDSVMLELGPDVSKQEAIEQSFDIEEHINAAYDDFARDELGADEHRFQIEFEKLYRRFFQAGKKKRYAGHIVWKEGKDVDDIDITGFEYKRSDIAQITKEVQKNVIDMIVHGEETEVINDYLHDIITDFESGNLPLEQAGIPGGIGKRLSAYETPTAHVRGAQYANAFLGTNFGRGSKPKRVYLKKVHPSWFREMETGEFDPQVDDLYREFKRDPDVICFEYADQIPAAFEVDWDTMLTKTLEGPISRVIEALGMSWDEVKSGQEQTGLGSFM

SEQ ID NO: 1008 - protein, 204 aa, Haloquadratum walsbyi DSM 16790
  Hwa GyrB C-extein
SAKQGRERRFQAILPLKGKILNVEKHRLDRILENDEVRALITAIGAGIGDEFNVEDARYNRLIILSDADVDGAHIRTLLLTLLYRHMRPLVEAGYVYAAKPPLYRIRYNGNTYDAMTKSERDQVISDVCNGNPTQVQRFKGLGEMNPEQLWETTMNPENRVLKQITIEDAAAADKMFSVLMGDAVEPRKEFIKDRATDAEWVDI

SEQ ID NO: 1009 - protein, 1124 aa, Haloquadratum walsbyi DSM 16790
  Hwa MCM-2 C-extein
TAAAVRDDFGDGQQWTLEAGALVLADKGIAAVDELDKMRCVTGETLVSLADGRHVPIASLATDASKTGTIESKPDGVGRTIRGIDDLTVWTMTENKQLTGRPVTAIHQYDSPDTLWQITLSDGSEVTTTADHPFIIINRDGVHECPAKHLSENDEVYTPADGYTASTSDITPDSETSSDSLPDGGITQTRTNQYSSHRCDADLSDDELLDITTKTIKSIETVHPSDGTDVYDLTVSGTHNFVANGMIVHNSEDRSAMHEALEQQSYHPRSEVLLADGQRIDIGTFVDSRIEKNNANVIDGINCEILPVDDIDVYTVDTDTGSASTVSIDRVSRHPAPSEFIRVKFSNGRSVLVTPEHPMFIDDGSETKTVQANALSGGEFVPAPHHLPGVNTDASSVSDDINDVSTIRTHVRSRARAKAEVEVRATDGEFKLIDAAQTLGIITAVGKVSVDAPERGIIVDMDRTVDSSKDSINNVLGSVIPSNDNDSITRVQDTGSTGNQWRWSVNTFIERMIEIAPAVTADRPNRRVPDAVLGGSEAVVQQFLTGVIIAAGRILDETIRIYASSNELACDYADAFLRLGITASVEDGPAEIAAQTVIKCDSDYERACGMFDISSSRTTPSDTSSQNNQSSVTAQNEDTHQTTSHEILPSGIADELQSIRQLLNIPASEQLASITAGDDGIALSIARAEINLLRDHIETLRMDTENVSIGRDDCVTPTISSSSKYKYAKNSITSDENLQLFGQSQAQLSERTKTTESSSISASTDLVSIPANISENRLVAATQRLDEVETRCNRRYHRVIAVDTVSNAGPHACEWVYDITVEPTNTFISSGVVLHNSISVSKAGINATLKSRCSLLGAANPKYGRFDQYEPIGEQIDLEPALISRFDLIFTVTDEPDPDADAKLADHIINTNYAGELHTQKANIPNSEFTDGEVESATAEVTPTIDAELLRKYVAYARRNCYPTMTDDAQDVIRKFYVDFRAKGADDDAPVPVTARKLEALVRLSEASARLRLSDTVEQEDAKRVTSIVESCLRDIGMDPETGEFDADIVETGTSKNQRDRIKNLKHLIENIEADYDDGAPVDEVIEQAISELGLSESKAEGEIENLRAKGEVYEPRTGSLRTT

SEQ ID NO: 1010 - protein, 874 aa, Haloquadratum walsbyi DSM 16790
  Hwa MCM-3 C-extein
SEDRSAMHEALEQQSYHPRSEVLLADGQRIDIGTFVDSRIEKNNANVIDGINCEILPVDDIDVYTVDTDTGSASTVSIDRVSRHPAPSEFIRVKFSNGRSVLVTPEHPMFIDDGSETKTVQANALSGGEFVPAPHHLPGVNTDASSVSDDINDVSTIRTHVRSRARAKAEVEVRATDGEFKLIDAAQTLGIITAVGKVSVDAPERGIIVDMDRTVDSSKDSINNVLGSVIPSNDNDSITRVQDTGSTGNQWRWSVNTFIERMIEIAPAVTADRPNRRVPDAVLGGSEAVVQQFLTGVIIAAGRILDETIRIYASSNELACDYADAFLRLGITASVEDGPAEIAAQTVIKCDSDYERACGMFDISSSRTTPSDTSSQNNQSSVTAQNEDTHQTTSHEILPSGIADELQSIRQLLNIPASEQLASITAGDDGIALSIARAEINLLRDHIETLRMDTENVSIGRDDCVTPTISSSSKYKYAKNSITSDENLQLFGQSQAQLSERTKTTESSSISASTDLVSIPANISENRLVAATQRLDEVETRCNRRYHRVIAVDTVSNAGPHACEWVYDITVEPTNTFISSGVVLHNSISVSKAGINATLKSRCSLLGAANPKYGRFDQYEPIGEQIDLEPALISRFDLIFTVTDEPDPDADAKLADHIINTNYAGELHTQKANIPNSEFTDGEVESATAEVTPTIDAELLRKYVAYARRNCYPTMTDDAQDVIRKFYVDFRAKGADDDAPVPVTARKLEALVRLSEASARLRLSDTVEQEDAKRVTSIVESCLRDIGMDPETGEFDADIVETGTSKNQRDRIKNLKHLIENIEADYDDGAPVDEVIEQAISELGLSESKAEGEIENLRAKGEVYEPRTGSLRTT

SEQ ID NO: 1011 - protein, 288 aa, Haloquadratum walsbyi DSM 16790
  Hwa MCM-4 C-extein
SISVSKAGINATLKSRCSLLGAANPKYGRFDQYEPIGEQIDLEPALISRFDLIFTVTDEPDPDADAKLADHIINTNYAGELHTQKANIPNSEFTDGEVESATAEVTPTIDAELLRKYVAYARRNCYPTMTDDAQDVIRKFYVDFRAKGADDDAPVPVTARKLEALVRLSEASARLRLSDTVEQEDAKRVTSIVESCLRDIGMDPETGEFDADIVETGTSKNQRDRIKNLKHLIENIEADYDDGAPVDEVIEQAISELGLSESKAEGEIENLRAKGEVYEPRTGSLRTT

SEQ ID NO: 1012 - protein, 1672 aa, Haloquadratum walsbyi DSM 16790
  Hwa MCM-1 C-extein
SAMLQYIRNIAPRSVYTSGKGSSSAGLCVTGETRIHTTDGFVPLKQLATQHHPKKVTTETAAAYERELYTVDPTTQSAEVTQSKSSHVWRMPEKHCRRIRTASGKQLEASVNTPVLTVDDAEIKWKPISAIESNDSVVIPQYNNVERSSVSITDIFEFTQEQLKLTEKSITILRTEIVSQYQNIAAAADALNIDVNSVEALITGQPVVSDVIDRVCDAISVSSEDITIHHVIGPTGTAIELPEVLNDDLLYLLGAAFACGNIMTGETCEERWIQFHAPEESIRSHIIDAAVATFGSESIQTDTEQANTVQVISATVTRLFETLGLEQITDAAPREIHPRLTAVSGADAFIRGLFDTGGRIDNKNTPQIAIGTASEPLAEQIQLLLETYGIGSCRDTGDQSHTGTSTTQGQYLTLTGSDAQAYRTTIGTRTDSGSSWDRQVSSSHADSEPSVRSTTTDTRKRTDMHEHEIISAGDVSTVSSVESDGGTPQMPRSNIEPQSIGYDYESSRVNEIQTETVVEAVNTGKKEVFDLTVPNTQNFIGGGIVTHNTAAAVRDDFGDGQQWTLEAGALVLADKGIAAVDELDKMRCVTGETLVSLADGRHVPIASLATDASKTGTIESKPDGVGRTIRGIDDLTVWTMTENKQLTGRPVTAIHQYDSPDTLWQITLSDGSEVTTTADHPFIIINRDGVHECPAKHLSENDEVYTPADGYTASTSDITPDSETSSDSLPDGGITQTRTNQYSSHRCDADLSDDELLDITTKTIKSIETVHPSDGTDVYDLTVSGTHNFVANGMIVHNSEDRSAMHEALEQQSYHPRSEVLLADGQRIDIGTFVDSRIEKNNANVIDGINCEILPVDDIDVYTVDTDTGSASTVSIDRVSRHPAPSEFIRVKFSNGRSVLVTPEHPMFIDDGSETKTVQANALSGGEFVPAPHHLPGVNTDASSVSDDINDVSTIRTHVRSRARAKAEVEVRATDGEFKLIDAAQTLGIITAVGKVSVDAPERGIIVDMDRTVDSSKDSINNVLGSVIPSNDNDSITRVQDTGSTGNQWRWSVNTFIERMIEIAPAVTADRPNRRVPDAVLGGSEAVVQQFLTGVIIAAGRILDETIRIYASSNELACDYADAFLRLGITASVEDGPAEIAAQTVIKCDSDYERACGMFDISSSRTTPSDTSSQNNQSSVTAQNEDTHQTTSHEILPSGIADELQSIRQLLNIPASEQLASITAGDDGIALSIARAEINLLRDHIETLRMDTENVSIGRDDCVTPTISSSSKYKYAKNSITSDENLQLFGQSQAQLSERTKTTESSSISASTDLVSIPANISENRLVAATQRLDEVETRCNRRYHRVIAVDTVSNAGPHACEWVYDITVEPTNTFISSGVVLHNSISVSKAGINATLKSRCSLLGAANPKYGRFDQYEPIGEQIDLEPALISRFDLIFTVTDEPDPDADAKLADHIINTNYAGELHTQKANIPNSEFTDGEVESATAEVTPTIDAELLRKYVAYARRNCYPTMTDDAQDVIRKFYVDFRAKGADDDAPVPVTARKLEALVRLSEASARLRLSDTVEQEDAKRVTSIVESCLRDIGMDPETGEFDADIVETGTSKNQRDRIKNLKHLIENIEADYDDGAPVDEVIEQAISELGLSESKAEGEIENLRAKGEVYEPRTGSLRTT

SEQ ID NO: 1013 - protein, 794 aa, Haloquadratum walsbyi DSM 16790
  Hwa Pol-II-1 C-extein
CDGDEDCVMLLMDGLLNFSREYLPDKRGGSVAADSRLVAVSPDDKIVFTTIEDFWKKLNTPIERNGKFRKRTCVSEGWQTYAFDENHEASLRPIEKAIRYTADESEQLRRITTQLGRSLDITDEHSLFRYDDGIEEVAGDDLTAGDIIVAPRTLDVEVTQTTLDLSEYIHDNERCPSEQTGSGELNLASKSAISDSRNKETPGVTHNILPQRSKFTDEMTTLSPTAVGGLESEQNETLRVGESTGAIERYINVDDSFGWLLGQFIAQRSISTDALTMTVHTAAEKHAERIVATSDSVFGIKPTVNSIERGYEIVFPSVFDTIVSGLTAKEQSEPEQDVDHTHTDEIGIPECILHAPDDIVLSFLQGFILAENAQRKGNAASEASEMVSESETTVTLETPSVGVKDGLVFLCHRLGVITDISEKSGEEYSVHFEESRYTVSIATEGKTNPLDQILNGERPTMPEGVSVPVPDALLTIHESIANSPHIDQVIPDTVVQQETVSLETLQSLLTGLSTVDLPAQLEAKRDELTLLTEGDLSYLRVESVECVDYDGYLYDLQVGGEPVFTANWLYAHNSMDAPLVMSSRIDPSEIDDEAHNMDIVRQYPREFYEATRRMEDPDEWEEEVTIAEEYLDTDNEYTGFNHTHDTTDIAAGPDLSAYKTLDSMMDKMDAQLELARKLRAVDETDVAERVIEYHFLPDLIGNLRAFSRQQTRCLDCGESYRRMPLTGECRECGGRVNLTVHEGSVNKYMDTAIHIAEEFDCREYTKQRLEVLERSLESIFEDDTNKQSGIADFM

SEQ ID NO: 1014 - protein, 221 aa, Haloquadratum walsbyi DSM 16790
  Hwa Pol-II-2 C-extein
SMDAPLVMSSRIDPSEIDDEAHNMDIVRQYPREFYEATRRMEDPDEWEEEVTIAEEYLDTDNEYTGFNHTHDTTDIAAGPDLSAYKTLDSMMDKMDAQLELARKLRAVDETDVAERVIEYHFLPDLIGNLRAFSRQQTRCLDCGESYRRMPLTGECRECGGRVNLTVHEGSVNKYMDTAIHIAEEFDCREYTKQRLEVLERSLESIFEDDTNKQSGIADFM

SEQ ID NO: 1015 - protein, 1390 aa, Haloquadratum walsbyi DSM 16790
  Hwa PolB-1 C-extein
CDDFDVPYFLDRMEVINPQSEYTLTSERFSRIDEVWRSGWGGPNIKGRVVFDLLYAYKRTQFTELESYRLDAVGELELDVGKERYPGDIGDLWEQDPQQLLEYNLRDVELCVEIDRKQDIIAFWDEVRSFVGCKLEDATTPGDTVDIYILHEAHDRFALPSKGRTDAEDYEGGAVFDPATGVKEMVGVLDLKSLYPMAMTTINASPETKVDPKNYDGDTFRAPNGTHFRRSPDGIIREMIDDLLAEREEKKSLRNEYDPGESVYEQYDRQQTAVKVIMNCFTPDTNVLTPNGVRNIRDLTVGDSVYSLNPETMQMEIKPVTQTHEYPDYQGDLIDIQTNEIDFRVTPNHRMLVEATGTDTTSTNDYDFIEAGNLDISSRYELPHGWSVDHTDSLGAYIDLITLLREQSDTYNVLSDGGMTTAATADINHNNVTRRVDSDTFVSLIGWYVATGRVSRTQNGSDRVYLQLSQTNTKARTQLTMLLDELGVDWQADNEKIHFVSHVWTELFDTTCGRTEKNKHIPELIFDASASQKRAFFDAIINGSGVKNDDSYQYHTSSEDLRDDILRLCVHIGIVARYDYINDESWRIECTETANPDFTLTHSGRQSTAEDGVYCVTVADNQTLLAGRNGTFQWTGNSLYGVLGWDRFRLYDKEMGAAVTATGRDVIEHTADAASDLDKSVIYGDSVTGDRPVVVRDPSDYIQIVPIKLLFEQATAPEQNMRLTADGAPSVNSELPKERRHLDQWEALSLSDTGETEWQPINQIIRHQTDKEILTLQHEYGESTTTRDHSYITADDGEYVETSPENVDEPLPIPNIASVKTIETIDIYQTLTTDTQAQIGNDTEPDKWLPSADCIHANDEYVWIGTTDKQQDRDDSTPAIPRYIDLTSDTGHALIRFLAVYLSDWSKSTITTTERGQCLHITGPQESALKTCAADADQLFTHITPSIAVDAESNTNTVDSGFRCHIPTTLATTLISAFAGHPAHTKQIPSIVYHLPAAEQSLFIRHLIQAESTPESDGVSGRPQKSDKPILLENEFITTNRELAAGVSMLLTQCGQSYTISKQDTKGAYTIHINNSSSSGCTPTLTETTHSGYVYDLSVATNQNFVDGLGGLVLHNTDSVMLELGDDITEQEAIEQSFEVEEYINDSYDEFAREELDAVRHRFEIEFEKLYRRFFQAGKKKRYAGHIVWKEGKDVDDIDITGFEYKRSDIAPITKEVQRRVIEMIVHGEGTDSISEYLTDIINDFESGNVPLEDIGIPGGIGKRLESYDTATAQVRGAKYANEFLGTNFGRGSKPKRVYLRKVHPSWFREMETDSKFDPQRHGLYREFKRDPDVICFEYEDQIPDAFAVDWDLMLEKTLKGPIERIIEALGMSWNEIKSGQEQTGLGNFI

SEQ ID NO: 1016 - protein, 274 aa, Haloquadratum walsbyi DSM 16790
  Hwa PolB-3 C-extein
TDSVMLELGDDITEQEAIEQSFEVEEYINDSYDEFAREELDAVRHRFEIEFEKLYRRFFQAGKKKRYAGHIVWKEGKDVDDIDITGFEYKRSDIAPITKEVQRRVIEMIVHGEGTDSISEYLTDIINDFESGNVPLEDIGIPGGIGKRLESYDTATAQVRGAKYANEFLGTNFGRGSKPKRVYLRKVHPSWFREMETDSKFDPQRHGLYREFKRDPDVICFEYEDQIPDAFAVDWDLMLEKTLKGPIERIIEALGMSWNEIKSGQEQTGLGNFI

SEQ ID NO: 1017 - protein, 1300 aa, Haloquadratum walsbyi DSM 16790
  Hwa RIR1-1 C-extein
SGGGMGYAFWKLRPYGDSVGSTGGIASGPITFMRTYDQMCETIAQGGARRGAQMGVMRISHPDVIQFIHAKNKDVSLAHSLRLNDPDDFTHTSFADALEEARELIDEEGRVPEHLRNAVEGHLSNFNISVGVTDEFMEALFADEEFTFTNPRTEDPHIATPETKELYELHDLGEHVEVGEELSVPAEELWDHIVSGAHENGEPGVIYLERVNKEHSFDVEKHSEHEILATNPCGEQPLEEYEACNLGHINLSTLADKDAPDWRVWYDNNGDAYNNLDDAAEAFIYEAIDMNAFNRRIESGTRFLENVVTMSDFPVDEIEATVRDMRKIGLGIMGLAQLYIQIGVRYGSQEANAIAEQLMTHINHESKWASHELAKERGTFNDWTESKYANPTEYREWFEHHTGLDASEWEDGFLIRNHNTTTIAPTGCVEENSLVSTDEGLRPIKDLDNTTAEFEQWDEIDVGVTTDGGTKTATAVYDNGFANVRQIQTESGFNIAATPNHRFRTLSSDGTYTWKEAGKFESGDRVILQRNTFDAGSRVSLEANERADDAQDTTEGPELPGRMTSELAEFLGYFMGSGYISDETHASVDLVVDSDATELNSYLSNLGEQLFRITPAVESQEMSQVLSFRDCHLSRYFEDNGWKKTDTGHNGDASAAFVPEQILEGDEQVVNGFLRGVFEAIGTVSEKIEILTTSTTLADQLQSLLLSLGHVFTRDSTKLVETNNYHDDQLRQRLCGATRREDERFMNEIGSLIEPDELNLSTRADKNDTYPSSVIDHVQTLDGYDSVSESLKSRINQSQVDGTVSRKLIKDIEAETAETVSIADHELTGFYAATVESVTEDTAYTKDISVPSNNTYIADGFVTHNTTSMIGNTTGGCEPIYNVAYYKNVSDDVQGDEMLVEFDDYFLRVLEQNDIDVEAVKQEAQEQMANNDFDGVDGLDTVPKAIGELFVVTSDLSGKDHAGVQCACQEGIDSAISKTCNFPSSATKEDMDEVYRYIYQNGGKGVTVYRDGTRSKQVLTTRAQNTEFADESEAAETLVEQIEDVFGDVDSFLDNDTVRATVDDEIDRVLAAADGNVELGKKRPRPDVLHGVTQRIDTGYGKLYVNINEDDAGRPFELFANIGNSGGFTASFTEALAKTVSTALRSGVDPREIASELQGIRSPKVAWDKGEQINSIPDAVGTAMRRYLDGEIEKGYPQQQNLTEVGTDTGSEPRVESGSGSDAKAPGHETDGGAAVTDDTVSTNRNNGSLPSANDENNDTDDVDSLVAAGESPECPECGSMSLYYSEGCKTCESCGWSEC

SEQ ID NO: 1018 - protein, 435 aa, Haloquadratum walsbyi DSM 16790
  Hwa RIR1-2 C-extein
TTSMIGNTTGGCEPIYNVAYYKNVSDDVQGDEMLVEFDDYFLRVLEQNDIDVEAVKQEAQEQMANNDFDGVDGLDTVPKAIGELFVVTSDLSGKDHAGVQCACQEGIDSAISKTCNFPSSATKEDMDEVYRYIYQNGGKGVTVYRDGTRSKQVLTTRAQNTEFADESEAAETLVEQIEDVFGDVDSFLDNDTVRATVDDEIDRVLAAADGNVELGKKRPRPDVLHGVTQRIDTGYGKLYVNINEDDAGRPFELFANIGNSGGFTASFTEALAKTVSTALRSGVDPREIASELQGIRSPKVAWDKGEQINSIPDAVGTAMRRYLDGEIEKGYPQQQNLTEVGTDTGSEPRVESGSGSDAKAPGHETDGGAAVTDDTVSTNRNNGSLPSANDENNDTDDVDSLVAAGESPECPECGSMSLYYSEGCKTCESCGWSEC

SEQ ID NO: 1019 - protein, 336 aa, Haloquadratum walsbyi DSM 16790
  Hwa rPol A'' C-extein
TMNTFHYAGVAEIDVTQGLPRLIELVDARKTPDTPTMTVYLEEEYANERPRAHEVVWQMEATKILALGDISTNVADMLVQVDLNAETLNERWPTIGDSDLIAEEVQDIIENNLGVSTRREKMLIEFGPSEPSYRRLLQLVEELRDIVFKGLEDISRVVIRKEDNERTNGEEFVLYTEGSALGDVLPIEGVDASRTTSNNIHEVHRNLGIEAARESIINETMETLREQGLDDVNVRHLMLVADIMTNRGEIESIGRHGISGSKDSVLARAAFEVTVNHLLDAAVHGEEDDLEGVIENVIVGKPVAIGTGDVDLRMGSIDADSGRSANSGGSPELSDD

SEQ ID NO: 1020 - protein, 696 aa, Haloquadratum walsbyi DSM 16790
  Hwa Top6B C-extein
SRGQQGIGISAAVLYSQLTSGKPARITTRTQSSDTAQYFELIIDTDTNEPEVSADQERDPGAASLSPTHGTRIELEMEANMRARGQLRDYVKDTAVVNPHARITLDEPGLEEPRQYERVDGAELPAQTEEIRPHPHGVELGTLLKMLEATESYSVSGFLREEFTRVGSKTATKILDQFRDRHFGRALPMSAPETIPDNADGTDDEQVTSSLESIIEAAVVNKGASATTTFASRVAETVNQRSGTTQGELVGIVDTVAEDIEDEFETTFGTTVRENAVEAAWDVLTTDIDEDIYPLVADATSTQKDHETVRGVTDRIATKFADGSEPLRATRDAVREYVDRSADMIVSEEVSFGETARENVVDAVWTAMQTVDDELPAVKAVADDRNIASDLLEAMRLTDILAPPTDCLSPITADLVEAGLRKEFDADFYAAATRDAEVHGGDPFIVEAGIAYGGELEGGKISLLRFANRVPLVYQRGACATTDVIKSIGWRNYGLDQPGGSGMPNGPAVVMIHVASTNVPFTSESKDALANIPAIEDEIELAVREASRELKSYLNKRRSMQKRREKQDVLGRILPEMANKLADVTENDRPDIDNALARIMNNVSVERNVDNGSVTLTVQNYSDRQESPTLTDIVDSKPDTIPDEIEIVELEDEYFLTWEPVVDAGESATVTYEVPTGASFELDVDDVETEKLTIDA

SEQ ID NO: 1021 - protein, 349 aa, Invertebrate iridescent virus 6; identical to SEQ ID NO: 974
  IIV6 RIR1 C-extein

SEQ ID NO: 1022 - protein, 73 aa, Kazachstania exigua, formerly Saccharomyces exiguus, strain CBS379
  Kex-CBS379 VMA C-extein
CGERGNEMAEVLMEFPELFTEINGRKEPIMKRTTLVANTSNMPVAAREASIYTGITLAEYFRDQGKNVSMIAD

SEQ ID NO: 1023 - protein, 292 aa, Kluyveromyces lactis IFO1267
  Kla-IFO1267 VMA C-extein
CGERGNEMAEVLMEFPELFTEISGRKEPIMKRTTLVANTSNMPVAAREASIYTGITLAEYFRDQGKNVSMIADSSSRWAEALREISGRLGEMPADQGFPAYLGAKLASFYERAGKAVALGSPDRIGSVSIVAAVSPAGGDFSDPVTTSTLGITQVFWGLDKKLAQRKHFPSINTSVSYSKYTNVLNKYYEKNYPEFPVLRDRMKEILSNAEELEQVVQLVGKSALSDGDKITLDIASLIKEDFLQQNGYSTYDAFCPIWKTYDMMKSFISYHDEAQKSVSNGANWAKLSEAT

SEQ ID NO: 1024 - protein, 334 aa, Kluyveromyces lactis NRRL Y-1140
  Kla-NRRLY1140 VMA C-extein
CGERGNEMAEVLMEFPELFTEISGRKEPIMKRTTLVANTSNMPVAAREASIYTGITLAEYFRDQGKNVSMIADSSSRWAEALREISGRLGEMPADQGFPAYLGAKLASFYERAGKAVALGSPDRIGSVSIVAAVSPAGGDFSDPVTTSTLGITQVFWGLDKKLAQRKHFPSINTSVSYSKYTNVLNKYYEKNYPEFPVLRDRMKEILSNAEELEQVVQLVGKSALSDGDKITLDIASLIKEDFLQQNGYSTYDAFCPIWKTYDMMKSFISYHDEAQKSVSNGANWAKLSEATRDVKHAVSSSKFFEPSRGEEEVHAEFEKLLTNIQDRFAESTD

SEQ ID NO: 1025 - protein, 59 aa, Kineococcus radiotolerans SRS30216
  Kra DnaB C-extein
SIEQDADMVILLHREDMYEKESPRAGEADFIVAKHRNGPTDTITVAFQGHYSRFVDMAT

SEQ ID NO: 1026 - protein, 580 aa, Listonella pelagia phage phiHSIC
  LP-phiHSIC helicase C-extein
CGKSVIIAEIAKFFNEVSGKKTLVIGPNKEICQQNAEKYKSYGFPASFWSASIGKKEMRHQVVFGSPVSIKNELDKFGPQFGAVIIDEAHLLSPTVKEICSHMKEQNNLLRIVGLTATPYRLGSGYIYEYDDNNNPVGDECTKNPFFKRLVYRITAKELIDQGFLTPPIADHEMASKYDTSGVQLNKRNQFDAKDIEQAFEGQGRLTAQIIADVVSHCQNKMCCMIFAATIQHAQEIMESLPKHNSYCVTGKTKRKDREKAIERAKTGEIKYLVSVGTLTTGVDITNVDVIAILRATESASLLQQIIGRGLRLHENKTTCLVLDYAENIERHGLEDDLFNPDIRVSGGGDGSAKVNALCKSCGTVNEFTLRKGCDLDHIDEYGYALDLAGERIEMEGQPMPAHYGRRCYGGDVINGHYVRCSERWSMKVCPECEVENDIAARYCTSCRTELVDPNEKLKADYKRMKRDPRAISTDKMLGWECKPWITQRGNNTLRVDYRSEYRSFTIWYSPDSSNVKAQGLWNNLSEVVFGKGHIAPTPEAFCDALKRGFGTMPETVTVQKQGDFFRAFAHGLPEDDKPE

SEQ ID NO: 1027 - protein, 226 aa, Mycobacterium avium
  Mav DnaB C-extein
STLGLDFLRSCSIKHRMASVIFSLEMSKSEIVMRLLSAEAKIKLSDMRSGRMSDEDWTRLARRMSEISEAPLYIDDSPNLTMMEIRAKARRLRQKADLRLVVVDYLQLMSSGKKVESRQLEVSEFSRQLKLLAKELEVPVVAISQLNRGPEQRTDKKPMLSDLRESGSLEQDADMVILLNRPDAFERDDPRGGEADFILAKHRNGPTKTVTVAHQLHLSRFANMAR

SEQ ID NO: 1028 - protein, 226 aa, Mycobacterium avium 104; identical to SEQ ID NO: 1027
  Mav-104 DnaB C-extein

SEQ ID NO: 1029 - protein, 226 aa, Mycobacterium avium subsp. paratuberculosis str. k10; identical to SEQ ID NO: 1027
  Mav-PT DnaB C-extein

SEQ ID NO: 1030 - protein, 59 aa, Mycobacterium bovis subsp. bovis AF2122/97
  Mbo-AF2122 DnaB C-extein
SLEQDADVVILLHRPDAFDRDDPRGGEADFILAKHRNGPTKTVTVAHQLHLSRFANMAR

SEQ ID NO: 1031 - protein, 235 aa, Mycobacterium bovis subsp. bovis AF2122/97
  Mbo Pps1 C-extein
CTAPIYKSDSLHSAVVEIIVKPHARVRYTTIQNWSNNVYNLVTKRARAEAGATMEWIDGNIGSKVTMKYPAVWMTGEHAKGEVLSVAFAGEDQHQDTGAKMLHLAPNTSSNIVSKSVARGGGRTSYRGLVQVNKGAHGSRSSVKCDALLVDTVSRSDTYPYVDIREDDVTMGHEATVSKVSENQLFYLMSRGLTEDEAMAMVVRGFVEPIAKELPMEYALELNRLIELQMEGAVG

SEQ ID NO: 1032 - protein, 99 aa, Mycobacterium bovis subsp. bovis AF2122/97
  Mbo RecA C-extein
CSPPFKQAEFDILYGKGISREGSLIDMGVDQGLIRKSGAWFTYEGEQLGQGKENARNFLVENADVADEIEKKIKEKLGIGAVVTDDPSNDGVLPAPVDF

SEQ ID NO: 1033 - protein, 268 aa, Methylococcus capsulatus Bath, prophage MuMc02
  Mca MupF C-extein
CRCRVRPRSERSLARDGIAWQSSAGKLRTLETDAGVDKRTGEITHARRTGIDVVDADGKKHFFAPDAGFNFNPGQGWSKPFTPPPLDTLPKTFSPGQVLPDLPKPEKFAASMIVPDGLGEEDYAKAFLAEFGADLGKPVVFQDVTGDPMLIDEALFKSGAGEWKATKDGRGPYMRLLAHAIRSPDEIWMRWEESRERPGTWLLKRRYLKTFEIDGHGSESPQYGLSVFEYGSEGWSGSTAMISQASRGPGARRRYIERQRDGFLLFRR

SEQ ID NO: 1034 - protein, 655 aa, Methylococcus capsulatus Bath
  Mca RIR1 C-extein
CAEQPLPAYGCCCLGSLDLTRFVSRPFTPEAAFEAERLAEVATIAVRMLDNVLDTTYWPLARQRQEAQAKRRIGLGFTGLGDALAMLGLRYDSAAARDMAAGIARRLRDAAYLASTALAREKGAFPLFEAEPYLASPFVAGLPEPLRARILESGIRNSHLLSIAPTGTISLAFADNTSNGIEPPYAWTYLRKKREPDGSTREFPVEDHAYRLYRATAGDRPLPPAFVTALDISALDHMRMLAAVQPFVDASISKTVNVPADYPYADFQHLYLEAWKAGLKGLATYRPNPVTGAVLEATPTHGISRPEFDESDPDRRLRLDEVPAPALASLRWRRRPRPAAGNPAWSYLIDHPLGSFAVFIGHIEDHGNHPFEVWVTGAEQPRGLGALAKSLSMDMRSNDRGWLKTKLESLMKAHGDDGFDLPFPPNGRPVRVPSLVAGFARLIYYRCAELGAFDTLADTPVVDALMSPKEPKTGPDGTLSWTVDILNVATGDDFVMGLKELVLPNGQRRPYSMWLSGEYPRVLDGLCKSLSFDMRVIDPAWIGAKLRQLLDFPEPRGDFLARMPGTGRQRNYPSTVAYMAQLAIHRYAMLGLLDEQGRPLQDMGLMDYESAGPETGEAKPPVLKGARCPECGNDAVIRRDGCDFCTACGALGGCG

SEQ ID NO: 1035 - protein, 50 aa, Mycobacterium chitae
  Mch RecA C-extein
SPETTTGGKALKFYASVRIDVRRIETLKDGTDAVGNRTRAKIVKNKVSPP

SEQ ID NO: 1036 - protein, 287 aa, Methanoculleus marisnigri JR1
  Memar MCM2 C-extein
SISVAKAGITATLKSRCALLGAANPKLGRFDQFVPIGEQINMPPSLLSRFDLIFVMTDQPEVQRDGAIAQHIIKTHSVGELIKQHEYEPLPDVDDAYIERALAPVIPDIDPTLLRKYIAYAKRTCFPILSDGAKEALIAYYMRLRNLASGNKPVPVTARQLEALVRLAEASARMRLSNTVDTEDTDRILKIVDACLRQVAYDAESGSFDIDKLVTGVTKSQRDIIRSVKEAIRNVSGDSGGQARVDEVIEILLQQGFSRDKIEHTLEQLKRGGEVLEPRHGLVKLIG

SEQ ID NO: 1037 - protein, 250 aa, Methanoculleus marisnigri JR1
  Memar Pol-II C-extein
CDGDEDCVMLLLDGLINFSRAYLPETRGGTMDAPLVLTTRIDPSEVDKESHNVDVCDHYPIEVYNGCLAYAHPKDLDAFVDRVERRLGTPAQCEGFLFTHQTSNISAGPLESTYTRLGSMLDKLEAELDLAKRIRAVDEDDVAERVLNTHFIRDLQGNLNAFSKQKVRCMKCNAKYRRMPLAGKCTRCGGHVIPTVHEGSVKKYLEMSRNICATYAISDYTKQRVEVLFMQIESTFGEPPEKQLGLADFM

SEQ ID NO: 1038 - protein, 50 aa, Mycobacterium fallax
  Mfa RecA C-extein
SPETTTGGKALKFYASVRMDVRRIETLKDGSDAVGNRTRVKVVKNKVSPP

SEQ ID NO: 1039 - protein, 64 aa, Mycobacterium flavescens Fla0
  Mfl GyrA C-extein
TEARLTPLAMEMLREIDEETVDFIPNYDGRVQEPTVLPSRFPNLLANGSGGIAVGMATNIPPHN

SEQ ID NO: 1040 - protein, 50 aa, Mycobacterium flavescens, ATCC14474
  Mfl-ATCC14474 RecA C-extein
SPETTTGGKALKFYASVRMDVRRIETLKDGADAVGNRTRVKVVKNKVSPP

SEQ ID NO: 1041 - protein, 67 aa, Mycobacterium gastri
  Mga GyrA C-extein
TEARLTPLAMEIVREIDEETVDFIPNYDGRVQEPTVLPSRFPNLLANGSGGIAVGMATNIPPHNKGE

SEQ ID NO: 1042 - protein, 42 aa, Mycobacterium gastri
  Mga RecA C-extein
SPETTTGGKALKFYASVRMDVQRIETLKDGTNTVDNRTRVKI

SEQ ID NO: 1043 - protein, 141 aa, Mycobacterium gastri
  Mga SufB (Mga Pps1) C-extein
SEVVYHQIREDLEAQGVIFLDTDTGLREHPDVFKQYFGTVIPAGDNKFSALNTAVWSGGSFIYVPPGVHVDIPLQAYFRINAENMGQFERTLIIVGENAYVTYVEGCTAPIYKSDALHSAVVEIIVKPGGRCRYTTIQNWS

SEQ ID NO: 1044 - protein, 249 aa, Methanospirillum hungateii JF-1
  Mhu Pol-II C-extein
CDGDEDCVMLLLDGLINFSRSFLPVTRGGSMDAPLVLTSRIDPTEIDKESHNLDVCATYPIEVYETALRYGNAKDVESLVDRVERRLNTPAQIEGFFFTHDTSDISAGPLETMYTQLQSMLDKLDCELSLAKRIRAVDEHDVAERVLKTHFIRDLQGNLSAFSKQKFRCTKCNTSYRRMPLAGKCKCGGNIIPTVHEGSVKKYLQMSRQICEEYNITEYTRQRIEVIDMNIESTFGEEKVEQMGLADFM

SEQ ID NO: 1045 - protein, 529 aa, Methanococcus jannaschii (Methanocaldococcus jannaschii DSM 2661)
  Mja GF-6P C-extein
SRWATHGNVCKENAHPHTDCKEEIAVVHNGIISNYKELKDELMKKGHKFKSETDTEVVPHLIEEELKKFKEINEENYIKAVKNAIKKLKGTYALVIINKNFPNLLIGARNESPLILGINDDGYFLGSDITAFLDYTNKAIPLEDGDVVVIKKKENGYEVTIENNGNTVEREMMEINWDISSAEKMGYPHFMLKEIMEQPEVLKVSAKISAEEIKELAKCIKDYDRVYFVAMGTSLHAAMVVEYLFAKLGKLVIACDASEFLNKGVVDDKTLVIGITQSGETYDTLKALRFAKKNKAKTGAIVNVLGSTATREADITVMMGAGIEIAVCATKTYTSQLMILYRLFIEYGKLLGRDMSEYEKEIDKIPNYIKEVLDKKETIKEIANNLKVNNYIFISKGINIASALEGALKFKEITYLHAEGMSGGLLKHGTISLIDENMDTVAIVPPRDSAVFNSILSNIEEVKARGGKVIAITPTEIDGAENILVPEVIEEISPIVYAPAFQLLAYYKAVELGRDVDKPRGLAKSVTVE

SEQ ID NO: 1046 - protein, 357 aa, Methanococcus jannaschii (Methanocaldococcus jannaschii DSM 2661)
  Mja Helicase C-extein
SAGLNLPCRRAIVKDLTRFTNKGMRYIPIMEIQQCIGRAGRPGLDPYGEGIIVAKNDRDYLRAYQALTQKPEPIYSKLSNQAVLRTQLLGLIATGEIRDEYDLEWFIRNTFYAHQYGNLREVAKNINEVIRFLEENEFIIDFMPTELGKRVSELYIDPLSAKFIIDGLEEMENEEEIYYLYLISKTLEMMPNLRVYNSEELNLIDEMDSLGIKSFEIEDLEAFKTAKMLYDWINEVPEDEILKRYKIEPGILRYKVENAVWIMHALKEIAKLIGKSSDIPEKLEIRLEYGAKEDIIELLSIKYIGRVRARKLYNAGIRSIEDIINNPSKVASIIGEKIAKKILDELGVKFGQQKLSF

SEQ ID NO: 1047 - protein, 265 aa, Methanococcus jannaschii (Methanocaldococcus jannaschii DSM 2661)
  Mja Hyp-1 C-extein
CFTPWTSLYKSFDSIYDCYNKKPDFVELGLSADTDMADMIPELRDLPFLSNSDAHSYHPHRLGREFNQIEVDYIGGIEDNFEQIKKAIKHNKIIANYGLDPKLGKYHLTACSKCHTRFKLEDAKKYNWKCPKCGGSIKKGVLSRVEELSDGKIEHPKFRPPYYKLIPLAEMISLTIGKGIFTKAVQSLWEEFIKKYGNEIEVLINADIDELSKIHPKVAETINLFRKGKIYIYPGGGGEYGKISFKPQKVEWYREEVTLDRWLKQ

SEQ ID NO: 1048 - protein, 579 aa, Methanococcus jannaschii (Methanocaldococcus jannaschii DSM 2661)
  Mja IF2 C-extein
TTLLDKIRKTRVAKREAGGITQHIGASEIPIDVIKRLCGDLLKMLKADLKIPGLLVIDTPGHEAFTSLRKRGGALADIAILVVDINEGFKPQTVEAVNILRQCKTPFVVAANKIDLIPGWNSKEGPFILNFNEKNQHPNALTEFEIRLYENIIKPLNELGFDADLYSRVQDVTKTVCIIPVSAVTGEGIPDLLMMVAGLAQKFLEDRLKLNVEGYAKGTILEVKEEKGLGTTIDAIIYDGIAKRGDYLVVGLPDDVLVTRVKALLKPKPLDEMRDPRDKFKPVNEVTAAAGVKIAAPELDKVIAGCPIRIVPKDKIEEAKEEVMKEVEEAKIEVDDEGILIKADTLGSLEALANELRKAGVKIKKAEVGDVTKKDVIEVASYKQSNPLHGAIVAFNVKILPEAQKEIEKYDIKVFLDNIIYKLVEDFTEWIKKEEERIKYGEFEKLIKPAIIRILPDCIFRQKDPAICGVEVLCGTLRVGAPLMREDGMQLGYVREIKDRGENVKEAKAGKAVSIAIDGRVVLKRHVDEGDYMYVAVPESHVRELYHKYMDRLRNDEKEALLRYMELMQKLTNNIFWGR

SEQ ID NO: 1049 - protein, 149 aa, Methanococcus jannaschii (Methanocaldococcus jannaschii DSM 2661)
  Mja Klba C-extein
CSGTLHANSADEAILRLTSPPMNVPKIMLTALNFIINQQRIRRAGKTIRRILGIVEIVKGGGEGHEFAKTTLYEYNGLKDSLERRGICMWEEEVCEIAGITKEELLRDRENRKKVLSYLYKNNIRKLENVSDYIMRYQVDPEKLLRSIR

SEQ ID NO: 1050 - protein, 366 aa, Methanococcus jannaschii (Methanocaldococcus jannaschii DSM 2661)
  Mja PEP C-extein
CHAAIVSRELGTPCVVGTKKATKVLKDGMIVTVDGEKGIVYEGEIKKVEEKEKKQEVVVQQAPIITATEVKVNVSMPEVAERAAATGADGVGLLRAEHMILGLGKHPRKILEEEGEEALIEALMEGIRKVADAFYPRPVTYRTLDAPTDEFRGLEGGENEPIEHNPMLGWRGIRRDLDEVDILKCELKAIKRLREEGYKNIEIMIPLVTHPDEVRRVKEIMREVGLEPCKDIPFGIMVETPAAALIIEDFIKEGINFVSLGTNDLTQYTIAIDRNNELVSKYYKEDHPAVLKLVEHVIKTCKKHGIKTSICGQAGSRPHIVEKLVEWGIDSVSANIDAVETIRRVVARTEQKVILNYIRKSYVERE

SEQ ID NO: 1051 - protein, 840 aa, Methanococcus jannaschii (Methanocaldococcus jannaschii DSM 2661)
  Mja Pol-1 C-extein
SLYPSIIISYNISPDTLDCECCKDVSEKILGHWFCKKKEGLIPKTLRNLIERRINIKRRMKKMAEIGEINEEYNLLDYEQKSLKILANSILPDEYLTIIEEDGIKVVKIGEYIDDLMRKHKDKIKFSGISEILETKNLKTFSFDKITKKCEIKKVKALIRHPYFGKAYKIKLRSGRTIKVTRGHSLFKYENGKIVEVKGDDVRFGDLIVVPKKLTCVDKEVVINIPKRLINADEEEIKDLVITKHKDKAFFVKLKKTLEDIENNKLKVIFDDCILYLKELGLIDYNIIKKINKVDIKILDEEKFKAYKKYFDTVIEHGNFKKGRCNIQYIKIKDYIANIPDKEFEDCEIGAYSGKINALLKLDEKLAKFLGFFVTRGRLKKQKLKGETVYEISVYKSLPEYQKEIAETFKEVFGAGSMVKDKVTMDNKIVYLVLKYIFKCGDKDKKHIPEELFLASESVIKSFLDGFLKAKKNSHKGTSTFMAKDEKYLNQLMILFNLVGIPTRFTPVKNKGYKLTLNPKYGTVKDLMLDEVKEIEAFEYSGYVYDLSVEDNENFLVNNIYAHNSVYGYLAFPRARFYSRECAEIVTYLGRKYILETVKEAEKFGFKVLYIDTDGFYAIWKEKISKEELIKKAMEFVEYINSKLPGTMELEFEGYFKRGIFVTKKRYALIDENGRVTVKGLEFVRRDWSNIAKITQRRVLEALLVEGSIEKAKKIIQDVIKDLREKKIKKEDLIIYTQLTKDPKEYKTTAPHVEIAKKLMREGKRIKVGDIIGYIIVKGTKSISERAKLPEEVDIDDIDVNYYIDNQILPPVLRIMEAVGVSKNELKKEGAQLTLDKFFK

SEQ ID NO: 1052 - protein, 276 aa, Methanococcus jannaschii (Methanocaldococcus jannaschii DSM 2661)
  Mja Pol-2 C-extein
SVYGYLAFPRARFYSRECAEIVTYLGRKYILETVKEAEKFGFKVLYIDTDGFYAIWKEKISKEELIKKAMEFVEYINSKLPGTMELEFEGYFKRGIFVTKKRYALIDENGRVTVKGLEFVRRDWSNIAKITQRRVLEALLVEGSIEKAKKIIQDVIKDLREKKIKKEDLIIYTQLTKDPKEYKTTAPHVEIAKKLMREGKRIKVGDIIGYIIVKGTKSISERAKLPEEVDIDDIDVNYYIDNQILPPVLRIMEAVGVSKNELKKEGAQLTLDKFFK

SEQ ID NO: 1053 - protein, 253 aa, Methanococcus jannaschii (Methanocaldococcus jannaschii DSM 2661)
  Mja r-Gyr C-extein
CTYHRTSSTRVSLDGMRVAREYLKLNNLEDYLKNREYFMEGAHECIRPTKPMNTDELIEFLKENNIKLTKNHIKVYDLIFRRFIASQMKEAVVEYEEIYIKDLDEKVEGYVDIKFDGWSRIYNLKLKKLPRIEKSSLKVLDKKLRKIPKVPLYDEGEVVKLMKERGIGRPSTYAQIIKKLLDRGYVVKSKDKNKLIPTKLGIEVYNYLINNYPHLISEERTRELEEIMDKIENGEVDYIEVLKALHEEILSIR

SEQ ID NO: 1054 - protein, 1246 aa, Methanococcus jannaschii (Methanocaldococcus jannaschii DSM 2661)
  Mja RFC-1 C-extein
TTAALCLARDLFGENWRDNFLELNASVSKDTPILVKIDGKVKRTTFEELDKIYFETNDENEMYKKVDNLEVLTVDENFRVRWRKVSTIIRHKVDKILRIKFEGGYIELTGNHSIMMLDENGLVAKKASDIKVGDCFLSFVANIEGEKDRLDLKEFEPKDITSRVKIINDFDIDEDTAWMLGLYVAEGAVGFKGKTSGQVIYTLGSHEHDLINKLNDIVDKKGFSKYENFTGSGFDRKRLSAKQIRILNTQLARFVEENFYDGNGRRARNKRIPDIIFELKENLRVEFLKGLADGDSSGNWREVVRISSKSDNLLIDTVWLARISGIESSIFENEARLIWKGGMKWKKSNLLPAEPIIKMIKKLENKINGNWRYILRHQLYEGKKRVSKDKIKQILEMVNVEKLSDKEKEVYDLLKKLSKTELYALVVKEIEIIDYNDFVYDVSVPNNEMFFAGNVPILLHNSDERGIDVIRTKVKDFARTKPIGDVPFKIIFLDESDALTADAQNALRRTMEKYSDVCRFILSCLTGDAKITLPDEREIKIEDFIKMFEERKLKHVLNRNGEDLVLAGVKFNSKIVNHKVYRLVLESGREIEATGDHKFLTRDGWKEVYELKEDDEVLVYPALEGVGFEVDERRIIGLNEFYEFLTNYEIKLGYKPLGKAKSYKELITRDKEKILSRVLELSDKYSKSEIRRKIEEEFGIKISLTTIKNLINGKIDGFALKYVRKIKELGWDEITYDDEKAGIFARLLGFIIGDGHLSKSKEGRILITATINELEGIKKDLEKLGIKASNIIEKDIEHKLDGREIKGKTSFIYINNKAFYLLLNFWGVEIGNKTINGYNIPKWIKYGNKFVKREFLRGLFGADGTKPYIKKYNINGIKLGIRVENISKDKTLEFFEEVKKMLEEFEVESYIKVSKIDNKNLTELIVKANNKNYLKYLSRISYAYEKDNFARLVGEYLRIKEAYKDIILKEIAENALKEADGEKSLRELARKYNVPVDFIINQLKGKDIGLPRNFMTFEEFLKEKVVDGKYVSERIIKKECIGYRDVYDITCHKDPSFIANGFVSHNCNYPSKIIPPIQSRCAVFRFSPLKKEDIAKKLKEIAEKEGLNLTESGLEAIIYVSEGDMRKAINVLQTAAALSDVIDDEIVYKVSSRARPEEVKKMMELALDGKFMEARDLLYKLMVEWGMSGEDILNQMFREINSLDIDERKKVELADAIGETDFRIVEGANERIQLSALLAKMALMGR

SEQ ID NO: 1055 - protein, 785 aa, Methanococcus jannaschii (Methanocaldococcus jannaschii DSM 2661)
  Mja RFC-2 C-extein
SDERGIDVIRTKVKDFARTKPIGDVPFKIIFLDESDALTADAQNALRRTMEKYSDVCRFILSCLTGDAKITLPDEREIKIEDFIKMFEERKLKHVLNRNGEDLVLAGVKFNSKIVNHKVYRLVLESGREIEATGDHKFLTRDGWKEVYELKEDDEVLVYPALEGVGFEVDERRIIGLNEFYEFLTNYEIKLGYKPLGKAKSYKELITRDKEKILSRVLELSDKYSKSEIRRKIEEEFGIKISLTTIKNLINGKIDGFALKYVRKIKELGWDEITYDDEKAGIFARLLGFIIGDGHLSKSKEGRILITATINELEGIKKDLEKLGIKASNIIEKDIEHKLDGREIKGKTSFIYINNKAFYLLLNFWGVEIGNKTINGYNIPKWIKYGNKFVKREFLRGLFGADGTKPYIKKYNINGIKLGIRVENISKDKTLEFFEEVKKMLEEFEVESYIKVSKIDNKNLTELIVKANNKNYLKYLSRISYAYEKDNFARLVGEYLRIKEAYKDIILKEIAENALKEADGEKSLRELARKYNVPVDFIINQLKGKDIGLPRNFMTFEEFLKEKVVDGKYVSERIIKKECIGYRDVYDITCHKDPSFIANGFVSHNCNYPSKIIPPIQSRCAVFRFSPLKKEDIAKKLKEIAEKEGLNLTESGLEAIIYVSEGDMRKAINVLQTAAALSDVIDDEIVYKVSSRARPEEVKKMMELALDGKFMEARDLLYKLMVEWGMSGEDILNQMFREINSLDIDERKKVELADAIGETDFRIVEGANERIQLSALLAKMALMGR

SEQ ID NO: 1056 - protein, 180 aa, Methanococcus jannaschii (Methanocaldococcus jannaschii DSM 2661)
  Mja RFC-3 C-extein
CNYPSKIIPPIQSRCAVFRFSPLKKEDIAKKLKEIAEKEGLNLTESGLEAIIYVSEGDMRKAINVLQTAAALSDVIDDEIVYKVSSRARPEEVKKMMELALDGKFMEARDLLYKLMVEWGMSGEDILNQMFREINSLDIDERKKVELADAIGETDFRIVEGANERIQLSALLAKMALMGR

SEQ ID NO: 1057 - protein, 960 aa, Methanococcus jannaschii (Methanocaldococcus jannaschii DSM 2661)
  Mja RNR-1 C-extein
TIFSSINLELEIPEFLKDKPAVIAGTTRGTYGDYEEEAKLILEALVDVMMEGDAMGKPFLFPNFIIKLRENAFKDENKELMYKIHQLSAKFGIPYFINMLPDWQVTNTNAMGCRTRLSGNWTGDAEIDTLRTGNMQWYSLNLPRIAYEANGDDTKLFEILHERLEILKEALLIKHEVTKERLYVDNLMPFLTQEFDGESYYRYENTTKTFGFVGLNEMLKYHLGEELHESKDAVKFGEKVIEYIREYADKLKEETGLRWTVTQTPAESSLPYDEKILIFENNEYKLVKIGEFVEKYLNRYKDRAITYGDNNIEVYIKDENIYAPSFDKDGKIVLKPITHAIRHRGKEIYEIELESGKKVRVTGDHSVFTINDNLDVVEVKASDLKVGDFIITPKIIPSISKDKIYLSEIVKNKDKYYVKIKDHIKFIEEHEEILKESYKEYKTKWKDLKPVLKKKNAFRLDLIEDLVDKEKIEKISYGHANYINNKIKLDEKFGYLIGAFLSEGHWNDKCVEISSTNKEFIENLVEIIEEILGKDAYYITVKGDKRRYKDLYVIGLNKTVAMIFESLGLNKLSSNKEIPSILLSNETFLKGLIKGYIDGDGSIYVDESKRDYSIRLYTTSETLRDTLCLALKILGINYRLSIDKKSKVNENWRDCYVIKITGKENIEKLLDVEIKNNGGKDVIPKIAEKFKEIINQYSQREWKERFGIDVNNLHIWEDLKKGYMSRYRAKKVLNIMKNVKEIEEKYGRLLDKIGQLIDNDLLFERIKSIRVLDEIPEYVYDISVEGTENFIGGEGFICLHNTAGRFARLDYKYYKEETISVVRGDLNDVDSLYYTNSSHVRVDAPITLGEKVRIEEKFHPLCNGGHIMHIWNIESAADPEVLMDITKKITKTHIGFWTYTKNLSVCNRCGISMGGLRDRCINCGSEDVAKFSRITGYLQNISNWNRAKQKELEDRKLPRI

SEQ ID NO: 1058 - protein, 1018 aa, Methanococcus jannaschii (Methanocaldococcus jannaschii DSM 2661)
  Mja RNR-2 C-extein
TAGRFARLDYKYYKEETISVVRGDLNDVDSLYYTNSSHVRVDAPITLGEKVRIEEKFHPLCNGGHIMHIWNIESAADPEVLMDITKKITKTHIGFWTYTKNLSVCNRCGISMGGLRDRCINCGSEDVAKFSRITGYLQNISNWNRAKQKELEDRKLPRIMDMEALKQKIEGLDIPQSLKDELFEKLSKEKDLTEEMVDEIIDEVVNAYRKALVEPYEAVGIVAAQSIGEPGTQMSLPYEEKIIIKEGEFIKPVEIGKLVDEMIERFGFEKIGNSEVCDLPIDIYALSLDQDEKVHWKRIISCIRHKHNGKLIKIKTKSGREITATPYHSFVIRKDNKIIPVKGSELKIGDRIPVVKHIPANCVEAINISDYVSGNYVVDNINNKIAPKINGKSIPNNIKLDYDFGYFIGIYLAEGSVTKYFVSISNVDELILNKIRAFADKLGLNYGEYDNNNGFAESHDIRIYSSTLAEFLSNFGTSSNTKKIAEFVFGANKEFVRGLIRGYFDGDGNVNADRKVIRVTSNSKELIDGIAILLARFNIFSIKTKTKNQFVLIIPHRYAKKFHEEINFSVEKKKSELERLVSSLNDDKTYDSIDMIPSIGDALTKLGEKVDYPKVILKKFERKQKIGRATLQRHLRRIEELAVKKGVNILALKEYWLLKKAVESDVIWDEIVKIEEISCDKKYVYDISVEGLETFTTFDGVLTHNTMRTFHYAGVAEINVTLGLPRMIEIVDARKEPSTPIMTIYLKEEYKDNREKAEEIAKEIESLTLGSIAESISIDLWTQSIKVELDENRLADRGLTIDDVIEAIKKKLKVKIDVDGTTLYLKIKTPSIKALRKRIPKIKNIQLKGIPGIERVLVKKEGGEYVLYTQGSNLREVFKIDGVDTTRTITNNIIEIQEVLGIEAARNAIINEMRNTLEQQGLEVDIRHLMLVADIMTADGEVKPIGRHGVAGEKGSVLARAAFEETVKHLYAAAERGDVDKLKGVIENVIVGKPIYLGTGCVELTIDREYEEGKNMEE

SEQ ID NO: 1059 - protein, 430 aa, Methanococcus jannaschii (Methanocaldococcus jannaschii DSM 2661)
  Mja rPol A' C-extein
CPPYNADFDGDEMNLHVPQSEEARAEAEALMLVEKHILSPRFGGPIIGAIHDFISGAYLLTSNYFTKDEATLILRSGGIKDELWEPDKVENGVPLYSGKKIFSKALPKGLNLRYKAKICRKCDVCKKEECEYDAYVVIKDGELIKGVIDKNGYGAEAGLILHTIVKEFGPEAGRKFLDSATKMAIRAVMLRGFTTGIDDEDLPEEALKEIEKVLDEAEEKVKEIIEKYERGELELLPGLNLEESREAYISNVLREARDKAGAIAERYLGLDNHAVIMAVTGARGNILNLTQMAACLGQQSVRGKRIFRGYRGRVLPHFEKGDLGARSHGFVRSSYKKGLSPTEFFFHAMGGREGLVDQAVRTAQSGYMQRRLINALQDLKTEFDGTVRDSRGIMIQFKYGEDGIDPMLADRGKAVNIDRIIDKVKMKYNQ

SEQ ID NO: 1060 - protein, 383 aa, Methanococcus jannaschii (Methanocaldococcus jannaschii DSM 2661)
  Mja RtcB (Mja Hyp-2) C-extein
CGVRLIRTNLTKEEVQSKIKELIKTLFKNVPSGLGSKGILKFSKSVMDDVLEEGVRWAVKEGYGWKEDLEFIEEHGCLKDADASYVSDKAKERGRVQLGSLGSGNHFLEVQYVEKVFDEEAAEIYGIEENQVVVLVHTGSRGLGHQICTDYLRIMEKAAKNYGIKLPDRQLACAPFESEEGQSYFKAMCCGANYAWANRQMITHWVRESFEEVFKIHAEDLEMNIVYDVAHNIAKKEEHIIDGRKVKVIVHRKGATRAFPPKHEAIPKEYWSVGQPVIIPGDMGTASYLMRGTEIAMKETFGSTAHGAGRKLSRAKALKLWKGKEIQRRLAEMGIVAMSDSKAVMAEEAPEAYKSVDLVADTCHKAGISLKVARMRPLGVIKG

SEQ ID NO: 1061 - protein, 239 aa, Methanococcus jannaschii (Methanocaldococcus jannaschii DSM 2661)
  Mja TFIIB C-extein
TIHDKGLSTVIDWRNKDSYGKDLSANKRAQLYRLRKWQRRIRVSDAAERNLAFALSELDRITSKLGLPRHVRENAAIIYRGAVEKGLIRGRSIEGVVAAAIYAACRRCRVPRTLDEIAEASRVDRKEIGRTYRFLARELNIKLTPTNPIDYVPRFASELGLPGEVESKAIQILQQAAEKGLTSGRGPTGVAAAAIYIASVLLGCRRTQREVAEVAGVTEVTIRNRYKELTEHLDIDVTL

SEQ ID NO: 1062 - protein, 181 aa, Methanococcus jannaschii (Methanocaldococcus jannaschii DSM 2661)
  Mja UDP GD C-extein
CFPKDVKALIKQFENNNIEPILIKATDIVNEEQIKWFFEKIKNYYGNLNGKTFAVLGLAFKPNTDDLRESRAIKLIDMLLESGAIVKGFDYVEKARENTINMYKLDKSKGFYGYNLYVLDDLYETVKNVDGIIITVEYDFNKEDWEKIGNLVKEKVVFDGRNILDVEKIKKLGFKYYGVGR

SEQ ID NO: 1063 - protein, 221 aa, Methanopyrus kandleri AV19
  Mka CDC48 C-extein
SEKKIREIFQKARQTAPCVIFFDEIDAIAPKRGTEVGGSRVTERIVNQLLTEMDGIEATEDVFVIAATNRPDIIDEALLRPGRFDRIVYVPPPDEEAMKEIVKIHTRDMPLAEDLTVDDIVEILRRREREEDAKYTGADIEAVCMEAAMLALREVLDELERIEKESETEEELEARKEALLEELRVERRHFEKAVEKVPPSVPKEKLEEYEKLKEEYQRLAG

SEQ ID NO: 1064 - protein, 248 aa, Methanopyrus kandleri AV19
  Mka RFC C-extein
SDERGIDVIRTKVKNFARTRPMGGARFKIIFLDEADNLTRDSQQALRRIMEMYSDACRFILAANYSSAIIDPIQSRCVVFKFTKLPESAIKERLRKIAESEGVEITEDALDAIVYVSEGDMRRAINVLQAAAALGREIDEDTVFQIAATARPEEVREMIHHAWNGDFERARELLHELLTRYGMSGEDVVRQVHREIFDMDEIPEEAIPELVNAVGDFEYRLIRGSDERIQLEALLARIHALGNEYSGG

SEQ ID NO: 1065 - protein, 406 aa, Methanopyrus kandleri AV19
  Mka RtcB C-extein
CGVRVMKTDLTEDDVRPKLRELLETIFRNVPAGLGSRHRRVRLSTQELRQVMLYGAEWAVEEGFGFDEDLDHIESRGNMTHAYETIGWEEYGPRDDVASKRAIERGRPQLGTLGSGNHFLEVQVVDEIYDKEAAEKMGIREEGQVTIMVHTGSRGFGHQVCSDHLRIMERSMRDVERRFGVRIPDRQLACAAMGTDEAKRYFNAMNAAANYAFANRQMISHWTRESFVEVFGDEYGDADDMGIEVIYDIAHNMAKIEKHPVDGEERWLVVHRKGATRAFSEEALKKHGEPVPFEGLPQPVLIPGDMGTGSYILIGTEKAMEETWGSTCHGAGRTMSRAAAKRKFWGEDVARELERQGILVKAASMPVVAEEAPPAYKDVDEVVRAVAEAGISDPVVRLRPIGVVKG

SEQ ID NO: 1066 - protein, 213 aa, Methanopyrus kandleri AV19
  Mka VatB C-extein
CEALREISAAREEVPGRRGYPGYMYTDLATIYERAGCIRGRKGSITQMPILTMPHDDITHPIPDLTGYITEGQIVLSRDLHRRGIYPPIDVLPSLSRLMDEGIGKGKTREDHPDLSNQLYAAYAEGRDLRDLVAVVGEEALTERDRKFLKFADEFEQRFVKQGRDENRSIEETLDLGWELLAILPERELKRVSDELIEKYHPKYRQKKEEQEE

SEQ ID NO: 1067 - protein, 64 aa, Mycobacterium kansasii; identical to SEQ ID NO: 1039
  Mkas GyrA C-extein

SEQ ID NO: 1068 - protein, 226 aa, Mycobacterium leprae, strain TN
  Mle DnaB C-extein
STLGLDFMRSCSIKHRLASVIFSLEMSKSEIVMRLLSAEAKIKLADMRSGRMTDDDWTRLARRMSEISEAPLYIDDSPNLTMMEIRAKARRLRQKTNLKLVVVDYLQLMTSGKRFESRQVEVSEFSRHLKLLAKELELPVVAISQLNRSPEQRTDKKPMLSDLRESGSLEQDADVVILLHRPDAFDRDDPRGGEADLILAKHRNGPTKTVTVAHQLHLSRFTNMAR

SEQ ID NO: 1069 - protein, 141 aa, Mycobacterium leprae, strain TN
  Mle RecA C-extein
SPETTTGGKALKFYASVRMDVRRIETLKDGVDAVGNRTRVKIVKNKVSPPFKQAEFDILYGKGISREGSLIDMGVEQGFVRKSGSWFTYEGEQLGQGKENARNFLLENADVANEIEKKIKEKLGIGAVVTDDDILPTPVDF

SEQ ID NO: 1070 - protein, 219 aa, Bacteriophage Aaphi23
  MP-Aaphi23 MupF C-extein
CRCVAIPVFDEAQSKAKAQETLSEPVKENLTLSIDKLVEKSKKIEQTITADINNITIKAGGKLVGLENRLKTAPSIKRKIEAEVADGFSKSLSLNKIGDAIRYTTVFKEGDFVTRYKAMQYLLAIKGYKTIIVKNTWKNDSAYTGVNTFIQNEDGDVFEMQYHTQQSFDLKNGLLHKIYKQFRNPKTPFHEKEKLLLEMRKLSSKIKVPKGIELIEDKK

SEQ ID NO: 1071 - protein, 422 aa, Mycobacteriophage Bethlehem
  MP-Be DnaB C-extein
TKNTFSLFPIMVSKKLKTEYGLSVNRFIIYSEIGGRLEAATASPASMEGNRPTFVVQNETQWWGVGPGGEVNDGHQMAEVIEGNMTKVDGARTLSICNAHRPGDDTVAEMSYLNWLDILAGDAIDTGVLYDALEAPADTPVSEIPFPSDDPEGYEAGVAQLMKGLEIARGDSIWLPLDDILMSVLTAKNDVIESRRKFLNQVNATEESWIAPSEWDRNHDINLPPLRKGERITLGFDGSLSNDHTALTACRVEDGALFLVKVWVPEKYEGHKVPRQDVDAYVRSMFEKYDVVGMRADVKEFEQSVDAWGQDFRRKLKINASPGNPVAFDMRGQQKRFALDCERFRDAVLAGEVKHDNNPVLKAHITNAHQHPTIYDAISIRKPGKESKRKIDAAVTAVLAWGSRQDFLLSKSNTGKGAGLLR

SEQ ID NO: 1072 - protein, 161 aa, Mycobacteriophage Bethlehem
  MP-Be gp51 C-extein
SRARDYLSKNAPALEGTHAFDIDVLLDFDGFGVELLPDFYDIAPGWISTHGHMGKMTLSQIAGSTALNGAKKFGKSVVCGHTHRQAVVSHSFGYGGSVRKTVTGMEVGHLMDMKKANYLKGGAGNWQMGFGMLTVDGKHVKAEIVPILGGKFTVDGRVWEV

SEQ ID NO: 1073 - protein, 107 aa, Mycobacteriophage Catera
  MP-Catera gp206 C-extein
TQNSRSFDFQDTIKPIWDAQLSLGLHGTGHPLGILLVVESGYPFRMREYRVPRNDQLLTQIFQKFDYVRECIALNKVPEYCCMPQSKEMDACPARYQCWLKDKVEAS

SEQ ID NO: 1074 - protein, 464 aa, Mycobacteriophage CJW1
  MP-Mcjw1 DnaB C-extein
TELLAGIMLYLLVADGEQSGEIYGVARDKKQAALAFDVAAQMVKFSPILSKRLKVVDYKKRIYDAKTNSFYDVIAADAKSALGSNPSGCGADEILAWQDGGMWDSLRTGMGSGARVQPLMVASTTAGNDTEGFAGLKHREMERVMEDPDNPDFKHIFVYMRNTPMEEDPWNEECWPHANPALGRFLSWEAMRKQAAEARNNPIAEMAFRQFKLNQWQNSTIRWMRMPAWDECKGTVFKSNKDLFDAFAGQSCWFGLDLAARRDLCSICYLFPQSDGSVDLLWRHWIPESALAKLDRLNDGRFAKEFVPGGWLKVTEGDVLDFDVVYDDIEADAKRFTILGGDADQWSSDPVIQEIEKRTYLYEDIFAYKNDFAHMSDSMHRIFEWTLAKNLRHHGNPLARFCFSACEARVAAYDPNLIRPDKPDRDMAAKRIDAVPTAVMATNAFYTRGNDYDSVYEEREALSV

SEQ ID NO: 1075 - protein, 404 aa, Mycobacteriophage Omega
  MP-Omega DnaB C-extein
TAVNGMERLESLIAKSGLKYKAKQAHGAESIEILDGPNPGARVMFQTRTDRSGLGLTADRVIFDEAMTITPGSLKALLPTVSSRPNPQIVYTGTAADQRTQPYCHTFGGVRYRALEQLRTGERKRLCFLEWSAPDDLPEEKFGDPQYWAMANPGLGYRQTEEKILDEYEEMWANLRDFGVDRLGIGDWPQFGAEMSEIPLDKWRRLNNPSPDLAGARALILYRTPEGGPWAIVGSQRCTDGRIHVEVGYAGTDPVDRVVDKFIQAITAWGPEEILVGRGGAAEVIPQIEAAGFTVYSPNQSEEAQACGGFLNDALVDPENPLLSHGDQHSLNAAITRAVKRDLPSGGFVWDCIEPSTYAQLMGVTLGRWALLKHAINAKPTPAIHDWPDQQEIDSWIQELYEEA

SEQ ID NO: 1076 - protein, 161 aa, Mycobacteriophage U2
  MP-U2 gp50 C-extein
SRARDYLSKNAPALEGTHAFDIDVLLDFDGFGVELLPDFYDIAPGWISTHGHMGKMTLSQIAGSTALNGAKKFGKSVVCGHTHRQAVVSHSFGYGGSVRKTVTGMEVGHLMDMKKANYLKGGAGNWQMGFGMLTVDGKHVKAEIVPILGGKFIVDGQVWEV

SEQ ID NO: 1077 - protein, 50 aa, Mycobacterium shimodei
  Msh RecA C-extein
SPETTTGGKALKFYASVRMDVRRIETLKDGTDAVGNRTRVKVVKNKVSPP

SEQ ID NO: 1078 - protein, 227 aa, Mycobacterium species KMS
  Msp-KMS DnaB C-extein
STLGLDFMRSCSIKHQLPSVIFSLEMSKSEIVMRLLSAEAKIKLADMRSGRMSDDDWTRLARRMSEISEAPLYIDDSPNLTMMEIRAKARRLHQKAGLRLIVIDYLQLMTSGKKVESRQQEVSEFSRNMKLLAKELEVPVIAMSQLNRGPEQRTDKKPMLSDLRESGAIEQDADMVILLHRPDAFERDDPRGGEADLIVAKHRNGPTKTITVAHQLHLSRFANMAHA

SEQ ID NO: 1079 - protein, 706 aa, Mycobacterium species KMS
  Msp-KMS GyrA C-extein
TEARLTPLAMEMLREIDEETVDFIPNYDGRVQEPTVLPSRFPNLLANGSGGIAVGMATNIPPHNLRELADAVYWCLENFEADEETTLAAVMERVKGPDFPTHGLIVGSQGIEDTYKTGRGSVKMRGVVEIEEDSRGRTGIVITELPYQVNHDNFITSIAEQVRDGKLAGISNIEDQSSDRVGLRIVVELKRDAVAKVVLNNLYKHTQLQTSFGANMLSIVDGVPRTLRLDQMIRYYVEHQLDVIVRRTRYRLRKANERAHILRGLVKALDALDEVIALIRASQTVDIARAGLIELLDIDEIQAQAILDMQLRRLAALERQRIVDDLAKIEAEIADLEDILAKPERQRAIVRDELKEIADKYGDDRRTRIVPADGEVSDEDLIAREDVVVTITETGYAKRTKTDLYRSQKRGGKGVQGAGLKQDDIVNHFFVCSTHDWILFFTTQGRVYRAKAYELPEASRTARGQHVANLLAFQPNERIAQVIQIKSYEDAPYLVLATRNGLVKKSRLTDFDSNRSGGIVAVNLRDGDELVGAVLCSSEDDLLLVSAKGQSIRFSATDEALRPMGRATSGVQGMRFNADDELLSLNVVRPDTYLLVATSGGYAKRTSIEEYTAQGRGGKGILTIQYDRRRGNLVGALIVDDDTELYAITSGGGVIRTAARQVRKAGRQTKGVRLMNLGEGDTLIAIARNAEAGDSTDEVNTDPDAV

SEQ ID NO: 1080 - protein, 227 aa, Mycobacterium species MCS; identical to SEQ ID NO: 1078
  Msp-MCS DnaB C-extein

SEQ ID NO: 1081 - protein, 706 aa, Mycobacterium species MCS; identical to SEQ ID NO: 1079
  Msp-MCS GyrA C-extein

SEQ ID NO: 1082 - protein, 304 aa, Methanothermobacter thermautotrophicus (Methanobacterium thermoautotrophicum)
  Mth RIR1 C-extein
CGEQPLLTHESCNLGSVNLSLMVGPSGINWEKLRRTIHVAVHFLDNVIDVNSYPLRPVEEMTLRTRKIGLGVMGFADMLIKLGIPYNSVAALEVAGRVMSFISSEARRASMELARERGSFPEFKGSIWDIQGFECMRNATLTTIAPTGSLSIIAGTSSGIEPLFAVSFTRNILGRSFHELHPLFKTMAGRLDKRSLEAIESRGSLRGVPGVPARIRRLFVTAHEIDPVFHVKMQAAFQRYVDNAVSKTVNLPADSSPADVERVFRAAHELGCKGVTVYRYGSKVDEVLRFPEYAGSCRDMTCPN

SEQ ID NO: 1083 - protein, 50 aa, Mycobacterium thermoresistibile
  Mthe RecA C-extein
SPETTTGGKALKFYASVRIDVRRIETLKDGTEAVGNRTRAKIVKNKVSPP

SEQ ID NO: 1084 - protein, 235 aa, Mycobacterium tuberculosis strains H37Rv & CDC1551; identical to SEQ ID NO: 1031
  Mtu SufB (Mtu Pps1) C-extein

SEQ ID NO: 1085 - protein, 59 aa, Mycobacterium tuberculosis, CDC1551; identical to SEQ ID NO: 1030
  Mtu-CDC1551 DnaB C-extein

SEQ ID NO: 1086 - protein, 59 aa, Mycobacterium tuberculosis H37Rv; identical to SEQ ID NO: 1030
  Mtu-H37Rv DnaB C-extein

SEQ ID NO: 1087 - protein, 99 aa, Mycobacterium tuberculosis H37Rv,Also CDC1551; identical to SEQ ID NO: 1032
  Mtu-H37Rv RecA C-extein

SEQ ID NO: 1088 - protein, 99 aa, Mycobacterium tuberculosis So93/sub_species="Canetti"; identical to SEQ ID NO: 1032
  Mtu-So93 RecA C-extein

SEQ ID NO: 1089 - protein, 226 aa, Mycobacterium vanbaalenii PYR-1
  Mvan DnaB C-extein
STLGLDFMRSCSIKHHLPSIVFSLEMSKTEIVMRLLSAEAKIKLADMRSGRMNDDDWTRLARRMSEISEAPLYIDDSPNLTMMEIRAKARRLKQKADLRLVVIDYLQLMTSGKKVESRQQEVSEFSRQIKLLAKELEVPVVAMSQLNRGPEQRTDKKPMLSDLRESGSIEQDADMVILLHRPDAFESDDPRGGEADLIVAKHRAGPTRTITVAHQLHLSRFSNMAK

SEQ ID NO: 1090 - protein, 60 aa, Nocardia farcinica IFM 10152
  Nfa DnaB C-extein
SLEQDADMVILLHRPDAFERDDPRGGEADLIVGKHRNGPTATITVAHQLHLSRFVDMARG

SEQ ID NO: 1091 - protein, 537 aa, Nocardia farcinica IFM 10152
  Nfa RIR1 C-extein
CFLLRIEDNMESIGRSINSALQLSKRGGGVALLLSNIREHGAPIKKIENQSSGVIPIMKLLEDSFSYANQLGARQGAGAVYLHAHHPDIYRFLDTKRENADEKIRIKTLSLGVVIPDITFELAKKNEDMYLFSPYDVERIYGKPFADIDVTEKYYEMVDDKRIRKSKIKAREFFQTIAELQFESGYPYIMFEDTVNRANPIAGKITHSNLCSEILQVSTPSEFNDDLSYAKVGKDISCNLGSLNIAKAMDSPDFAQTIEVAIRALTAVSDQTHITSVPSIEQGNQQSHAIGLGQMNLHGYLARERIHYGSDEGIDFTNMYFYTVVYHALRASNRLAIERGTYFGGFPESKYASGEYFDKYTEQVWEPKTERVRQLFADAGVRIPTQDDWRELKASVMEHGIYNQNLQAVPPTGSISYINHSTSSIHPVASKIEIRKEGKIGRVYYPAPYMTNDNLEYYQDAYEIGYEKIIDTYAAATQHVDQGLSLTLFFKDTATTRDLNKAQIYAWRKGIKTLYYIRLRQMALEGTEVEGCVSCML

SEQ ID NO: 1092 - protein, 8 aa, Neosartorya fischeri
  Nfi PRP8 C-extein
SGFEESMK

SEQ ID NO: 1093 - protein, 8 aa, Neosartorya glabra FRR2163
  Ngl-FR2163 PRP8 C-extein
SGFEESMK

SEQ ID NO: 1094 - protein, 8 aa, Neosartorya glabra FRR1833
  Ngl-FRR1833 PRP8 C-extein
SGFEESMK

SEQ ID NO: 1095 - protein, 367 aa, Natronomonas pharaonis DSM 2160
  Nph CDC21 C-extein
SQLLQYVKNIAPRSVYTSGKGSSSAGLTAAAVRDDFGEGQQWTLEAGALVLADQGIAAVDELDKMRSEDQSAMHQALEQQEISVSKAGINATLKSRCSLLAAANPIHGRFDEYEPFAEQIDLDPPLISRFDLIFTVTDQPDEEEDRQLAEHIIETNYAGELQTHRTKAATSNVSQEQVDSVTEDVAPAIDDELLRKYVAYAKRNCYPTMTEEAKEAIQEFYVDLRLEGQSEDNPVPITARKLEALVRLAEASARIRLSDTATKDDAERVIEIVRSSLEDVGVDPETGELDADIIESGTSKTQRDRIKNIKSLISEVETEYDEGAPIDVVLDRAEEMGMDRSQAEHEIEKLRRQGDVYEPQTDHLRTV

SEQ ID NO: 1096 - protein, 821 aa, Natronomonas pharaonis DSM 2160
  Nph PolB-1 C-extein
SLYPMCMVTINASPETKVDPDNYGAETYAAPNGTHFRKEPDGVIREMVDELLEEREEKKSLRNEHEPSTDAYETYDRQQSAVKVIMNCFTPDTEVLTPDGVRNIRALDIGDEVYSLDPETMEMEVKPVVDTHAYPDYRGELVDIQTGEIDFRVTPNHRMLVRKNGTNGITDDEYRFVEAGALDLATTYELPHDWAGPDGEDVTQIDLTELIDEEYEVWVRPEVHGRTFTAELGWKPRRVPKADIDTVGYVFTADEFKQHREYIESVCEQSYIRRESGLKWIPRVYDGDDFLELLAWYVTEGNAHTSERKEFDGQRHGSSTVQIAQEPVVADGGDTHATIGTLLDRMGFDYDNDNGSYQVTSKLLGDLFCTLGGGGSEDKRIPQLVFEASRRQKERFMQTLISGDGDRQPNSWQYNTASERLRDDVLRLCAHLGVPASYSEESGVYRIYVTEDGTNTLRMDRSAERTTADDGVYCVTVEDNHTLLAGRAGKFQFVGQSLYGVLGWDRFRLYDKEMGAAVTATGRDVIEFTEQAAAELDKDVIYGDTDSVMLELGNEVSEDEAIEQSFEIESHINDAYDRFAERLNAEEHRFQIEFEKLYRRFFQAGKKKRYAGHIIWKEGKEVDDLDITGFEYQRSDIAPITKEVQREVLEMIVTGEDPEDIKSYVHDVIERVREGDISHEELAIPGGIGKKLDNYETDTAQVRGAKYANRLLGTNFTSGSKPKRLYLAKVHPSFFRKMESEEGLDPSTDQLYGEFKREAESGEAVICFEYEDQIPDAFEVDYEKMLDKTLKGPIARVLEALDISWDEVESGQEQTGLGSFM

SEQ ID NO: 1097 - protein, 325 aa, Natronomonas pharaonis DSM 2160
  Nph PolB-2 C-extein
SLYGVLGWDRFRLYDKEMGAAVTATGRDVIEFTEQAAAELDKDVIYGDTDSVMLELGNEVSEDEAIEQSFEIESHINDAYDRFAERLNAEEHRFQIEFEKLYRRFFQAGKKKRYAGHIIWKEGKEVDDLDITGFEYQRSDIAPITKEVQREVLEMIVTGEDPEDIKSYVHDVIERVREGDISHEELAIPGGIGKKLDNYETDTAQVRGAKYANRLLGTNFTSGSKPKRLYLAKVHPSFFRKMESEEGLDPSTDQLYGEFKREAESGEAVICFEYEDQIPDAFEVDYEKMLDKTLKGPIARVLEALDISWDEVESGQEQTGLGSFM

SEQ ID NO: 1098 - protein, 325 aa, Natronomonas pharaonis DSM 2160
  Nph rPol A'' C-extein
TMNTFHYAGVAEIDVTQGLPRLIELVDARKTPDTPMMTVHLEGEYARDRERAHEVVWKIEATKILALGDVSTNVADMLVQIDLNEETLAERWPTMESIDDIAGRIAGTIEGELGVDTARPKPTVIEFGPEEPSYRQLLQLVEELREIVFKGIEEINRVVIRKEETEQGEEFVLYTEGSDLKEVLDIEGVDASRTTCNNIHEIHNNLGIEAAREAIIEETMNTLEEQGLDDVNIRHLMLVADIMTNNGEIESIGRHGISGNKDSVLARAAFEVTVNHLLDAAIHGEVDDLDGVTENVIVGKPIKLGTGDVDLRMGATRDSGSRADD

SEQ ID NO: 1099 - protein, 316 aa, Nostoc punctiforme
  Npu GyrB C-extein
CGMSAIKTSFTAEQLEGKLKKIRLDIEAAIPTGFNENKDVEKSVSNWQHWDDFKDLHRGVQDLQGKAMKQMGSLGGGNHFIEVCLDTENQVWLMLHSGSRNIGNKLAQCHIYTARELAKMAGNKLPDPDLAHFVAGTREFQAYWHDLQWSQNYARVNRDVMMARFKHIVEKHLVGGKATKPLLQVNCHHNYAEKEVHFDEDVYVTRKGAVRAQTEDYGIIPGSMGAKSFIVKGKGNAHSFCSCSHGAGRLMSRNKAKNVYTLDDLIEQTNGVECRKDEGVLDEIPGAYKPIEQVMANQADLVEVVATLKQVLCVKG

SEQ ID NO: 1100 - protein, 8 aa, Neosartorya quadricincta, strain NRRL 4175
  Nqu PRP8 C-extein
SGFEESMK

SEQ ID NO: 1101 - protein, 226 aa, Nocardioides species JS614
  Nsp-JS614 DnaB C-extein
STLALDLCRAASIHNNLTSVFFSLEMTRSEITMRLLSAEAKVPLNHIRNGNMNDDDWAKLARKMGEVSSAPMFIDDSPNMTMMEIRAKARRLKQRHDLRLVVIDYMQLMTSGRKVESRQLEVSEFSRQIKLLAKELEVPIIALSQLNRGPEQRGDKRPMMSDLRESGSLEQDADMVILLHRDDVYEKESTRPGEADLIVAKHRNGPTRDITVAFQGHYSRFVDMAH

SEQ ID NO: 1102 - protein, 559 aa, Nocardioides species JS614
  Nsp-JS614 TOPRIM C-extein
CFGCSEGGNVITFLMKIDGLTFGEAVERLADKVGVQLRREEGDVREERPKGPPRRRLVEAHKVAQEYYADQLATPDALVARQFLGGRGFDQAAAEHFGIGFAPRDGDALKTHLRQKGFSAEEMTVGGLIGPSGYDRFRGRLLWPIRDASGDTIGFGARRIFDDDRIDAKYLNTSETPIYKKSQVLYGIDLARRDIGRSSQAVIVEGYTDVMACHLSGVTTAVATCGTAFGDDHSRVLRRFLNDHQVTHGEIIFTFDGDAAGQKAALRAFGGDQNFVSQTYVAVEPGGLDPCDLRIQQGDAAVRELVARRVPLYRFVLTNVVREFDLDRADGRIAAVREAAKLVLSSRDNSVAQSSFARDISELTGVDPNEVLVEVRRVVARHRNGDRGAVAEPPTNRSAVPSLHDPRFAIERETLQLVIQHPMTIGRSTGDIGPNDFVHPTYRAVWELVAAAGGPGAGAGDPSWANRLRDAATDPAASSVISALAVEPLKKEPDAAYVAEHVFRLLELTAARRIAAIKSKLQRTNPVEHAEEFNKMFGELAALEAHRRALRDRLAGSAT

SEQ ID NO: 1103 - protein, 490 aa, Nostoc species PCC7120, (Anabaena sp. PCC7120)
  Nsp-PCC7120 RIR1 C-extein
SAGMRQFISDDQLGAAAKDNLWQQDENGRWRIDPERDSLRMANHTRVFHRKPTLEECVDAVRKQYYSGEGAIQWAGEAVARANIDLLPTQALKVEFLKAYEQGTAKDWLQKRHPHFDEKELKHRLARYALNPCGEIIGSNFHCNLSEIHLNQIDPFNYKEQEEAFTAGALSVATLLNHKFPEPRYQYSRELDPIVGVSFTGLFDFFVHAFGAEWLQWWEAGRPATPQGLAFKREEEKYLSSWREIVQRVVWDYCDRHNIKRPNRCTTVQPSGTKSLLTGASPGWHPPKAQRFIRRITFRKNDPVALACIDYGYNVIPSQSDKDEQGNLLNDPLDPRVSEWLVEIPVAVSWADIPGADTIDISKFNAIAQMDFYMQVQKFYVTHNTSATIEVREHEVETLGTQIWQAIQNDEGYISAALLARFDDHQTFPRLPFEPISKEQYEQMVKEVVQRRKTDDFYAVLSRYDFGDLMEVGPAGCDSDKCMMPEQSPN

SEQ ID NO: 1104 - protein, 614 aa, Pyrococcus abyssi
  Pab CDC21-1 C-extein
SQLLRYIANLAPRAIYTSGKSSSAAGLCVAPETLIITENGTKEIGEVVERWMKELGEIEYDDGISYSPAFEKVASLNGGKVKMLPVRRVWKLRSPGKMIKIRSESGKQITVTPETKLLTIIDGSLEWVEARKLKKGNYVAVVNKERSIVPIGDFLAKLLKFYGVELNLNEAVERDQARKLLETLKSKGLSDVTIEIPEKLRRFIKCDRVRYVDLVEMLSSMEGELKEEVMLLLSDVGDIHEVIQERLKEIGKILESDASWERIAEVEEVVRDGHVYDLTVEGSHSFIANGFVVHNTAAVVRDEFTGGWVLEAGALVLADGGYALIDELDKMNDKDRSVIHEALEQQTISLSKAGITATLNARTTVIAAANPKQGRFNRMKRISEQINLPPTLMSRFDLIFVLVDEPDEKIDSEIARHILRVRRGESEVVTPKIPHDLLRKYIAYARKNVHPVISEEAMEEIEKYYVKMRKSVKKSSEEEIKPIPITARQLEALIRLSEAHARMRLSPIVTREDAREAIKLMEYTLRQIAVDETGQIDVTILEVGQSARKLSKVERILDIIEKLEGTSEKGAKIDDILEEAKKFGIEKQEAREILEKLLEQGQIYMPENGYYRTV

SEQ ID NO: 1105 - protein, 319 aa, Pyrococcus abyssi
  Pab CDC21-2 C-extein
TAAVVRDEFTGGWVLEAGALVLADGGYALIDELDKMNDKDRSVIHEALEQQTISLSKAGITATLNARTTVIAAANPKQGRFNRMKRISEQINLPPTLMSRFDLIFVLVDEPDEKIDSEIARHILRVRRGESEVVTPKIPHDLLRKYIAYARKNVHPVISEEAMEEIEKYYVKMRKSVKKSSEEEIKPIPITARQLEALIRLSEAHARMRLSPIVTREDAREAIKLMEYTLRQIAVDETGQIDVTILEVGQSARKLSKVERILDIIEKLEGTSEKGAKIDDILEEAKKFGIEKQEAREILEKLLEQGQIYMPENGYYRTV

SEQ ID NO: 1106 - protein, 578 aa, Pyrococcus abyssi
  Pab IF2 C-extein
TTLLDRIRKTNVAAKEAGGITQHIGATEVPIEVVKKIAGPLIKLWKAEIKLPGLLFIDTPGHEAFTSLRARGGSLADLAVLVVDINEGFQPQTIESIEILRKYRTPFVVAANKIDRIKGWVIEEDEPFLMNIKKQDQRAVQELETKLWELIGKFYEFGFQANRFDRVQNFTRELAIVPISAKYGIGIAELLVLIAGLSQRYLEEKLKIEVEGPARGTILEVREEPGLGHTIDVIIYDGTLHKDDTIVVGGKDKAIVTKIRALLKPKPLDEIRDPRFRFDYVDEVTAAAGVKIAAPGLEEALAGSPVIAAPTPEDVEKAKQEILEQIERVVISTDKVGVIVKADTLGSLEALSKELQEKEIPIRKADVGNVSKTDVMEALSVKEEEPKYGVILGFNVKVNEDAEEVAKAKDVKIFVGNVIYKLIEDYEEWVKEEEEKKKRELLSKVTFPGVIRLYPDERYVFRRSNPAIVGIEVIEGRIKPGVTLIKQNGQKVGVIRSIKSRDEFLQEAKKGQAVAIAIEGAIVGRHIHPGETLYVDLSRDDAITLLKHLRDTLEDTDIKALKMIAKVKAKEDPFWRAI

SEQ ID NO: 1107 - protein, 165 aa, Pyrococcus abyssi
  Pab KlbA C-extein
CMGTIHSNSARETIIRLESPPMNVPKIMIPALDIIIMQVRYHTRKKGTIRRVTEIAEVSGIEGESIQLNFLYKYDPAKDELVRTEVPSRFLQILSYHTGMSLEEIHLEIEKRKLVLDWMIEKGLRRIDEVGAQIREFYIDEEEFFKKIQREAATMEISRRVKEFI

SEQ ID NO: 1108 - protein, 445 aa, Pyrococcus abyssi
  Pab Lon C-extein
SGGLGTPAHLRVEPGMIHRAHKGVLFIDEIATLSLKMQQSLLTAMQEKKFPITGQSELSSGAMVRTEPVPCDFILVAAGNLDTIEKMHPALRSRIRGYGYEVYMRTTMPDTVENRRKLVQFVAQEVKKDGRIPHFTRDAVEEIIREAQRRAGRKGHLTLRLRDLGGVVRAAGDIAVRKGKKYVTREDVLEALQMAKPLEKQLADWYIERKKEYQVIRTEGGEIGRVNGLAIIGEQSGIVLPIEAIVAPAASKEEGKIIVTGKLGEIAREAVLNVSAIIKRYKGEDISRYDIHVQFLQTYEGVEGDSASISVATAVISALEEIPVRQDVAMTGSLSVRGEVLPVGGVTPKIEAAIEAGIKKVIIPKANEKDVFLSPDKREKIEIIPVERIDEVLEVALVESEKKKELIKRIRETLPLGVSESAGSETLHEHGRDSGSALSVEESKA

SEQ ID NO: 1109 - protein, 432 aa, Pyrococcus abyssi
  Pab Moaa C-extein
CFFYAREGEPIYEPTLEQIRMMLRNAKKEHPIGANAVQFTGGEPTLRDDLIEIIKIAKEEGYDHVQLNTDGIKLAFDPELVKKIRQAGVNTLYLSYDGMTPQTNWKNHWEIPLIFENVRKAGGPGIVLVPTLIRNVNDHEAGAIINFGLNHLDIVRGVNFQPISLVGRVPKKERQRFRITIAGAIKKIEEQTNGVISKDDWYPIPIAGHIARFFEVFTGSKYYMTSHFACGAATYVFLDREEKKVIPIPRFLDVEGFVEFLLEKAEEIEKARFKGLAKLKAIGETVFIKFKQFYDEKNAPKGLDVLGLIKNAFVHGNYDALGKFHMNTLFLGMMHFMDEYNYDVERVERCVIHYAMPDGRIVPFCTFNVIPELYRDKVQRQFSYSWEEWKKLHPDWDYMKDKYVRTKEFVEKMKKSELYRKTYIDIVNYFER

SEQ ID NO: 1110 - protein, 316 aa, Pyrococcus abyssi
  Pab Pol-II C-extein
CDGDEDAVMLLLDALLNFSRYYLPEKRGGKMDAPLVITTRLDPREVDSEVHNMDIVRYYPLEFYEATYELKSPKELVGVIERVEDRLGKPEMYYGLKFTHDTDDIALGPKMSLYKQLGDMEEKVRRQLEVAKRIRAVDEHGVAEKILNSHLIPDLRGNLRSFTRQEFRCVKCNTKFRRPPLNGKCPVCGGKIVLTVSKGAIEKYLGTAKMLVTEYNVKNYTRQRICLTERDIDSLFENVFPETQLTLIVNPNDICQRLVMARTGEVNKSGLLENLSNGSKKTEKAEKAEKPRKKSDEKPKKKRVISLEEFFSRKSK

SEQ ID NO: 1111 - protein, 877 aa, Pyrococcus abyssi
  Pab RFC-1 C-extein
TTAALALARELFGENWRHNFLELNASDERGINVIREKVKEFARTKPIGGASFKIIFLDEADALTQDAQQALRRTMEMFSSNVRFILSCVTGDTKVYTPDEREVKIRDFMNYFENGLIKEVSNRIGRDTVIAAVSFNSRIVGHPVYRLTLESGRIIEATGDHMFLTPEGWKQTYDIKEGSEVLVKPTLEGTPYEPDPRVIIDIKEFYNFLEKIEREHNLKPLKEAKTFRELITKDKEKILRRALELRAEIENGLTKREAEILELISADTWIPRAELEKKARISRTRLNQILQRLEKKGYIERRIEGRKQFVRKIRNGKILRNAMDIKRILEEEFGIKISYTTVKKLLSGNVDGMAYRILKEVKEKWLVRYDDEKAGILARVVGFILGDGHLARNGRIWFNSSKEELEMLANDLRKLGLKPSEIIERDSSSEIQGRKVKGRIYMLYVDNAAFHALLRFWKVEVGNKTKKGYTVPEWIKKGNLFVKREFLRGLFGADGTKPCGKRYNFNGIKLEIRAKKESLERTVEFLNDVADLLREFDVDSKITVSPTKEGFIIRLIVTPNDANYLNFLTRVGYAYAKDTYARLVGEYIRIKLAYKNIILPGIAEKAIELATVTNSTYAAKVLGVSRDFVVNRLKGTQIGITRDFMTFEEFMKERVLNGYVIEKVIKKEKLGYLDVYDVTCARDHSFISNGLVSHNCNYSSKIIEPIQSRCAIFRFRPLNDEDIAKRLRYIAENEGLELTEEGLQAILYIAEGDMRRAINILQAAAALDRKITDENVFLVASRARPEDIREMMLLALKGNFLKAREKLREILLKQGLSGEDVLVQMHREVFNLPIDEPMKVYLADKIGEYNFRLVEGANEMIQLEALLAQFTLIGKKK

SEQ ID NO: 1112 - protein, 182 aa, Pyrococcus abyssi
  Pab RFC-2 C-extein
CNYSSKIIEPIQSRCAIFRFRPLNDEDIAKRLRYIAENEGLELTEEGLQAILYIAEGDMRRAINILQAAAALDRKITDENVFLVASRARPEDIREMMLLALKGNFLKAREKLREILLKQGLSGEDVLVQMHREVFNLPIDEPMKVYLADKIGEYNFRLVEGANEMIQLEALLAQFTLIGKKK

SEQ ID NO: 1113 - protein, 1422 aa, Pyrococcus abyssi
  Pab RIR1-1 C-extein
TGLNFSKLRPEGDIVGTTTGAACFTGDTRILTEKGLIPIEEIVHETGKKPKVVTHAGLKDIIETYDNGEMEVFRVTTEDGYELKVTGDHKFLVFDENGNPTLKPLKELKVGDYVYILAPEWKGGEYVELDTNIELKGKGYNVNLPSKLDEKLAYLLGIIYADGHIRHYFENGKRKNSKIEIYLHQDETEIKEKVKRYFKEIFGIEPKEFLKEEQHKVILVIPSTKIVKFLEINGLLKDKSENIRVPEAIFRSRPSVIAAFLAGFFDGDGSIDQNYRIAFKSISREFIKEAQLLFLALGIVTSIQEYNPPNPNNKTVYTLRVQTRDMKIKAFNVLKESVKLSKIMKEAISKLEENGKNKKFSFPFNAIYHIKDPKIRAKIQRDYKILSYNSKVTHRAFINNILKLKEELGLDDEEVKYFEMLSKLYPTKITKIEPLGKAHVYDLQVEDVHLLTGNGIYTSNSGPVSFMHLIDAVSDVIKQGGVRRGANMGILEIWHPDIEKFIHAKEKNIGTNVLSNFNISVGIWEDFWEALKEGKKYPLINPRTGEVVKEIDPKTLFEELAYMAWAKADPGVIFFDIINRRNVLKEAKGGPIRATNPCVVGETRILTPEGYIKAEELFKLAKERGKMEAIAVEGIAEGGEPYAYSLEILLPGDKQVKYETVHGNAVEVADPVSVPAYVWKVGMKEVARVRTKEGYEITATLDHKLMTPEGWKEIKDLKPGDKILLPRFEVEEDFGSESIGEDLAFVLGWFIGDGYLNVKDKRAWFYFNAEKEEEIAWKIREILAKRFEIKAEPHRYGNQIKLGVRGKAYEWLESIVKTNEKRIPEIVYRLKPNEIASFLRGLFSADGYVDNDMAIRLTSKSRELLREVQDLLLLFGILSKIYERPYKREFKYTTKDGEERTYTTEGYYELVIANYSRKIFAERIGLEGYKMEKLSLEKIKVDEPIVTVESVEILGKKLVYDFTVPEHHMYISNGFMSHNCGEEPLYEYESCNLASINLAKFVKYDENGKPYFDWDEYAYVIQKVAKYLDNSIDVNKFPLPEIDYNTKLTRRIGVGMMGLADALFKLGIPYNSEEGFKFMRKVTEYLTFYAYKYSIEAAKKRGTFPLYEKTGYPKGELPVEGFYHPEIWNLPWDKLVEEIKKYGVRNAMVTTCPPTGSVSMIADTSSGIEPIFALVYKKSVTVGEFYYVDPVFEAELKRRGLYSEELLKKISDNYGSVQGLEEIPEDMRRVFVTALDIHWLDHLLAQANIQMWLTDSASKTINMINEATVEDVKAAYLIAHFLGCKGVTVYRDGSLSVQVYSVEGEKKRRYKPKPSEYAKKVLLEIVEKEPWIKNFINVDEILNGKRQELNFSLTGLKRETHEVKKVEVKQQNNKIPEEKIKELLGVVYCPVCYEREGKLVELRMESGCATCPVCGWSKCVIS

SEQ ID NO: 1114 - protein, 962 aa, Pyrococcus abyssi
  Pab RIR1-2 C-extein
SGPVSFMHLIDAVSDVIKQGGVRRGANMGILEIWHPDIEKFIHAKEKNIGTNVLSNFNISVGIWEDFWEALKEGKKYPLINPRTGEVVKEIDPKTLFEELAYMAWAKADPGVIFFDIINRRNVLKEAKGGPIRATNPCVVGETRILTPEGYIKAEELFKLAKERGKMEAIAVEGIAEGGEPYAYSLEILLPGDKQVKYETVHGNAVEVADPVSVPAYVWKVGMKEVARVRTKEGYEITATLDHKLMTPEGWKEIKDLKPGDKILLPRFEVEEDFGSESIGEDLAFVLGWFIGDGYLNVKDKRAWFYFNAEKEEEIAWKIREILAKRFEIKAEPHRYGNQIKLGVRGKAYEWLESIVKTNEKRIPEIVYRLKPNEIASFLRGLFSADGYVDNDMAIRLTSKSRELLREVQDLLLLFGILSKIYERPYKREFKYTTKDGEERTYTTEGYYELVIANYSRKIFAERIGLEGYKMEKLSLEKIKVDEPIVTVESVEILGKKLVYDFTVPEHHMYISNGFMSHNCGEEPLYEYESCNLASINLAKFVKYDENGKPYFDWDEYAYVIQKVAKYLDNSIDVNKFPLPEIDYNTKLTRRIGVGMMGLADALFKLGIPYNSEEGFKFMRKVTEYLTFYAYKYSIEAAKKRGTFPLYEKTGYPKGELPVEGFYHPEIWNLPWDKLVEEIKKYGVRNAMVTTCPPTGSVSMIADTSSGIEPIFALVYKKSVTVGEFYYVDPVFEAELKRRGLYSEELLKKISDNYGSVQGLEEIPEDMRRVFVTALDIHWLDHLLAQANIQMWLTDSASKTINMINEATVEDVKAAYLIAHFLGCKGVTVYRDGSLSVQVYSVEGEKKRRYKPKPSEYAKKVLLEIVEKEPWIKNFINVDEILNGKRQELNFSLTGLKRETHEVKKVEVKQQNNKIPEEKIKELLGVVYCPVCYEREGKLVELRMESGCATCPVCGWSKCVIS

SEQ ID NO: 1115 - protein, 443 aa, Pyrococcus abyssi
  Pab RIR1-3 C-extein
CGEEPLYEYESCNLASINLAKFVKYDENGKPYFDWDEYAYVIQKVAKYLDNSIDVNKFPLPEIDYNTKLTRRIGVGMMGLADALFKLGIPYNSEEGFKFMRKVTEYLTFYAYKYSIEAAKKRGTFPLYEKTGYPKGELPVEGFYHPEIWNLPWDKLVEEIKKYGVRNAMVTTCPPTGSVSMIADTSSGIEPIFALVYKKSVTVGEFYYVDPVFEAELKRRGLYSEELLKKISDNYGSVQGLEEIPEDMRRVFVTALDIHWLDHLLAQANIQMWLTDSASKTINMINEATVEDVKAAYLIAHFLGCKGVTVYRDGSLSVQVYSVEGEKKRRYKPKPSEYAKKVLLEIVEKEPWIKNFINVDEILNGKRQELNFSLTGLKRETHEVKKVEVKQQNNKIPEEKIKELLGVVYCPVCYEREGKLVELRMESGCATCPVCGWSKCVIS

SEQ ID NO: 1116 - protein, 383 aa, Pyrococcus abyssi
  Pab RtcB (Pab Hyp-2) C-extein
CGVRLIRTNLTEKDVRPRIKQLVDTLFKNVPSGVGSQGRVRLHWTQIDDVLVDGAKWAVDNGYGWEEDLERLEEGGRMEGADPDAVSQRAKQRGAPQLGSLGSGNHFLEVQVVDKIFDPEVAKVYGLFEGQVVVMVHTGSRGLGHQVASDYLRIMERAIRKYRIPWPDRELVSVPFQSEEGQRYFSAMKAAANFAWANRQMITHWVRESFQEVFRQDPEDLGMSIVYDVAHNIGKVEEHEVDGKKVKVIVHRKGATRAFPPGHEAIPKIYRDVGQPVLIPGSMGTASYVLAGTEGAMKETFGSTCHGAGRVLSRKAATRQYRGDRIRQELLNRGIYVRAASMRVVAEEAPGAYKNVDNVVKVVSEAGIAKLVARMRPIGVAKG

SEQ ID NO: 1117 - protein, 348 aa, Pyrococcus abyssi
  Pab VMA C-extein
TVTQHQLAKWSDAQVVIYIGCGERGNEMTDVLEEFPKLKDPKTGKPLMERTVLIANTSNMPVAAREASIYTGITIAEYFRDMGYDVALMADSTSRWAEALREISGRLEEMPGEEGYPAYLASKLAEFYERAGRVVTLGSDYRVGSVSVIGAVSPPGGDFSEPVVQNTLRVVKVFWALDADLARRRHFPAINWLTSYSLYVDAVKDWWHKNVDPEWKAMRDKAMELLQKESELQEIVRIVGPDALPERERAILLVARMLREDYLQQDAFDEVDTYCPPEKQVTMMRVLLNFYDKTMEAISRGVPLEEIAKLPVREEIGRMKFEPDVGKIKALIDKTNEQFEELFKKYGA

SEQ ID NO: 1118 - protein, 165 aa, Pyrococcus furiosus
  Pfu KlbA C-extein
CMGTIHANSARETIIRLESPPMSVPRIMIPALDIIIMQVRYHSRKKGTLRRITEIAEVSGIEGESIQLNFLYKYDPAKDELIRTEVPSRFIQTLSYHTGLSIEELKWEIEKRRLILDWMIEKGIRRIDEVGYYIKEFYIDEEELLKKIEREAETIETSKRAKEFI

SEQ ID NO: 1119 - protein, 985 aa, Pyrococcus furiosus
  Pfu RIR1-1 C-extein
TGLNFSKLRPEGDIVGTTTGAASGPVSFMHLIDAVSDVIKQGGVRRGANMGILEIWHPDIEKFIHAKEKNIGTNVLSNFNISVGIWEDFWEALKEGKKYPLINPRTGEVVKEVDPKTLFEELAYMAWAKADPGVIFFDVINRRNVLKKAKGGPIRATNPCVVGDTRILTPEGYLKAEEIFSLAKERGKKEAVAVEGIAEEGEPYAYSVEILLPGEEKVEYETVHGKVLAVADPVAVPAYVWKVGRKKVARVKTKEGYEITATLDHKLMTPEGWKEVGKLKEGDKILLPRFEVEEEFGSESIGEDLAFVLGWFIGDGYLNVNDKRAWFYFNAEKEEEIAVRIRDILVKHFGIKAELHRYGNQIKLGVRGEAYRWLENIVKNNEKRIPEIVYRLKPREIAAFLRGLFSADGYVDKDMAIRLTSKSRELLREVQDLLLLFGILSKIYEKPYESEFHYTTKNGEERIYRSKGYYELVITNYSRKLFAEKIGLEGYKMEKLSLKKTKVDQPIVTVESVEVLGEEIVYDFTVPNYHMYISNGFMSHNCGEEPLYEYESCNLASINLAKFVKYDENGKPYFDWDEYAYVIQKVAKYLDNSIDVNKFPLPEIDYNTKLTRRIGVGMMGLADALFKLGIPYNSEEGFKFMRKVTEYLTFYAYKYSVEAAKKRGTFPLYDKTEYPEGKLPVEGFYHPEIWNLPWDKLVEEIKKYGLRNAMVTTCPPTGSVSMIADTSSGIEPVYALVYKKSVTVGEFYYVDPVFEEELKKRGLYSEELLKKISDNYGSVQGLEEIPEDMQRVFVTALDIHWLDHIIAQASIQMWLTDSASKTINMINEATVEDVKAAYLIARFLGCKGVTVYRDGSLSVQVYSVEGEKKKRRFKPKPSEYAKKILLEIVEKEPWIKNFINVDEILNGKKEQLLFSLRPANESKLKVPGREEEVRPGNIPEEKIRELLGVVYCPVCYEKEGKLVELKMESGCATCPVCGWSKCVIS

SEQ ID NO: 1120 - protein, 444 aa, Pyrococcus furiosus
  Pfu RIR1-2 C-extein
CGEEPLYEYESCNLASINLAKFVKYDENGKPYFDWDEYAYVIQKVAKYLDNSIDVNKFPLPEIDYNTKLTRRIGVGMMGLADALFKLGIPYNSEEGFKFMRKVTEYLTFYAYKYSVEAAKKRGTFPLYDKTEYPEGKLPVEGFYHPEIWNLPWDKLVEEIKKYGLRNAMVTTCPPTGSVSMIADTSSGIEPVYALVYKKSVTVGEFYYVDPVFEEELKKRGLYSEELLKKISDNYGSVQGLEEIPEDMQRVFVTALDIHWLDHIIAQASIQMWLTDSASKTINMINEATVEDVKAAYLIARFLGCKGVTVYRDGSLSVQVYSVEGEKKKRRFKPKPSEYAKKILLEIVEKEPWIKNFINVDEILNGKKEQLLFSLRPANESKLKVPGREEEVRPGNIPEEKIRELLGVVYCPVCYEKEGKLVELKMESGCATCPVCGWSKCVIS

SEQ ID NO: 1121 - protein, 348 aa, Pyrococcus furiosus
  Pfu VMA C-extein
TVTQHQLAKWSDAQVVVYIGCGERGNEMTDVLEEFPKLKDPNTGKPLMERTVLIANTSNMPVAAREASIYTGITIAEYFRDMGYDVALMADSTSRWAEALREISGRLEEMPGEEGYPAYLASRLAEFYERAGRVVTLGSDYRVGSVSVIGAVSPPGGDFSEPVVQNTLRVVKVFWALDADLARRRHFPAINWLTSYSLYVDAVQDWWHKNVDPEWRRMRDKAMELLQKEAELQEIVRIVGPDALPERERAILLVARMLREDYLQQDAFDEVDTYCPPQKQVTMMRVLMTFYERTMDAISRGVPLEEIAKLPVREEIGRMKFEPDIEKIRALIDKTNEQFDELLKKYGA

SEQ ID NO: 1122 - protein, 606 aa, Pyrococcus horikoshii OT3
  Pho CDC21-1 C-extein
SQLLRYVANLAPRAIYTSGKSSSAAGLCVAPDTLINTDNGRVEIGKFVEEWMKEVGEISEEGISYAPCFRKVETFKDGKIVESPIRRVWKLRAPKKLVRIKTENGRSIALTRETKLLTINDGELSWVEAGEVKVGTYVGTVKSEKDVIPGAGKTIRDVSKLYNMEMEVKDYLTREEVRKAIEKLEEIMNPMNIKIPGVQESYEELLRKLETTNDERVRNETLILLSDVSDAHELAKEKIEKIKEIVNSEVHWEKVTEVGEVDGVEYVYDLTVEGSHNFVANGFIVHNTAAVVRDEFTGGWVLEAGALVLADGGYALIDELDKMSDRDRSVIHEALEQQTISLSKAGITATLNARTTVIAAANPKHGRFNRMKRVSEQIDLPPTLLSRFDLIFVLMDEPDEKVDSEIARHILKVRRGESEVVTPKIPHELLRKYIAYARKNIHPVISEEAMEEIEKYYVKMRRSAKKSSGDEIKPIPITARQLEALIRLSEAHARMRLSPIVTREDAREAIKLMEYTLKQIAVDEAGQLDVTILEVGQSARKLSKVERILDIVEKLERTSEKGAKIDDILEEAAKFGIEKSEAREILEKLLEKGQIYMPENGYYKTV

SEQ ID NO: 1123 - protein, 319 aa, Pyrococcus horikoshii OT3
  Pho CDC21-2 C-extein
TAAVVRDEFTGGWVLEAGALVLADGGYALIDELDKMSDRDRSVIHEALEQQTISLSKAGITATLNARTTVIAAANPKHGRFNRMKRVSEQIDLPPTLLSRFDLIFVLMDEPDEKVDSEIARHILKVRRGESEVVTPKIPHELLRKYIAYARKNIHPVISEEAMEEIEKYYVKMRRSAKKSSGDEIKPIPITARQLEALIRLSEAHARMRLSPIVTREDAREAIKLMEYTLKQIAVDEAGQLDVTILEVGQSARKLSKVERILDIVEKLERTSEKGAKIDDILEEAAKFGIEKSEAREILEKLLEKGQIYMPENGYYKTV

SEQ ID NO: 1124 - protein, 578 aa, Pyrococcus horikoshii OT3
  Pho IF2 C-extein
TTLLDKIRKTNVAAKEAGGITQHIGATEVPIDVVKKIAGPLIKLWKAEIRLPGLLFIDTPGHEAFTSLRARGGSLADLAVLVIDVNEGFQPQTIESIEILRRYRTPFVVAANKIDRIRGWVIEEDEPFLMNIKRQDQRAIQELETKLWELIGKFYEFGFQANRFDRVQNFTRELAIVPISAKYGIGIAELLVLIAGLSQKYLEEKLKIEVEGPARGTILEVREEPGLGHTIDVIIYDGTLHKDDTIVVGGKDKAIVTKVRALLKPKPLDEIRDPRFRFDYVDEVTAAAGVKIAAPGLEEALAGSPVIAAPTPEDVERAKEEIMRQIESVVISTDKVGVIVKADTLGSLEALSKELQEKEIPIRKADVGNISKTDVMEALSVKEENPKYGVILGFNVKVNEDAKEVAKAKEVPIFVGNIIYKLIEDYEAWIKEEEEKRKRELLAKVTFPGVIKLYPDERYVFRRSNPAIVGIEVLEGRIKPGVTLIKQNGQKVGTIRSIKSRDEFLQEARKGQAVAIAIEGAIVGRHIHPGETLYVDLSRDDAIILLKHLRDVLEDTDIKALKMIAQVKAKEDPFWRAV

SEQ ID NO: 1125 - protein, 165 aa, Pyrococcus horikoshii OT3
  Pho KlbA C-extein
CMGTIHSNSARETIIRLESPPMNVPRIMIPALDIIIMQVRYHTRKKGTIRRMTEIAEVSGIEGESIQLNFLYKYDPAKDEIVRTEVPSRFLNILSYHTGMGMDELYYEIEKRKLVLDWMIEKGIRRIDEVGAQIREFYIDEEEFFKKLEREATTIEMSKRVKEFI

SEQ ID NO: 1126 - protein, 531 aa, Pyrococcus horikoshii OT3
  Pho LHR C-extein
SSTSLELGIDIGTIDLVVLVGSPKSVNRALQRIGRAGHRLHEVSRGIILALDRDDLVEVTVLAHNARNRKLDRIKIPKNPLDVLVQHILGMALEKVWEIEEAYRVVRRAYPYHELPFSDFMNVLKYLAGEYSGLEEKRVYAKIWLENGKFGRRGKMTRAIYYMNTGTIPDEAKIDVFTLDKKYIGTVEEEFAERLMPGDIFVLAGRTYEFVKSRGNKIYVIPREGAKPTIPSWFSEMLPLSFDLAIDIQRFRGEVKKLLTSKRAESLLMKKYGIDNVTAKAIISYFREQAKYSIIPDDETVLVEIVREGNVTKYFFHTLIGRRANDALSRAFAYMISKKKKCNVGIAITDNGFMLKVPVDKELKEGEILELFYVENLREILKRALDNTELLKRRFRHVANRGLLILRRYMGREKSLSRQQMNAQTLLNFLKKNHPNFPLLKEVYREIMEDKMDIENAELFLKWIKEGKIKVTVREHPYPSPFAFNLEVIGASDVVLMEDRRELIKELHKKIMAIIKGVPSPTAPRSPITGV

SEQ ID NO: 1127 - protein, 443 aa, Pyrococcus horikoshii OT3
  Pho Lon C-extein
SGGLGTPAHLRVEPGMIHRAHKGVLFIDEIATLSLKMQQSLLTAMQEKKFPITGQSELSSGAMVRTEPVPCDFILVAAGNLDTIEKMHPALRSRIRGYGYEVYMRTTMPDTPENRRKLVQFVAQEVKKDGRIPHFTRDAVEEIVREAQRRAGRKGHLTLRLRDLGGVVRAAGDIAVRKGKKYVTREDVLEALKLAKPLEKQLADWYIERKKEYQVIRVEGGEIGRVNGLAIIGEQSGIVLPIEAIVAPAASKEEGKIIVTGKLGEIAKEAVLNVSAIIKRYKGEDISKYDIHVQFLQTYEGVEGDSASISVATAVISALEEIPVRQDVAMTGSLSVRGEVLPVGGVTPKIEAAIEAGIKTVIIPKSNEKDVFLSPDKRKKIKIIPVERIDEVLEVALVESEKKRELIKRVRESLPLWMEETPSGETLHEHKGGATLPLEESKA

SEQ ID NO: 1128 - protein, 283 aa, Pyrococcus horikoshii OT3
  Pho Pol I C-extein
SYYGYYGYAKARWYCKECAESVTAWGRQYIDLVRRELEARGFKVLYIDTDGLYATIPGVKDWEEVKRRALEFVDYINSKLPGVLELEYEGFYARGFFVTKKKYALIDEEGKIVTRGLEIVRRDWSEIAKETQARVLEAILKHGNVEEAVKIVKDVTEKLTNYEVPPEKLVIYEQITRPINEYKAIGPHVAVAKRLMARGIKVKPGMVIGYIVLRGDGPISKRAISIEEFDPRKHKYDAEYYIENQVLPAVERILKAFGYKREDLRWQKTKQVGLGAWIKVKKS

SEQ ID NO: 1129 - protein, 314 aa, Pyrococcus horikoshii OT3
  Pho Pol-II C-extein
CDGDEDAVMLLLDALLNFSRYYLPEKRGGKMDAPLVITTRLDPREVDSEVHNMDIVRYYPLEFYEATYELKSPKELVGVIERVEDRLGKPEMYYGLKFTHDTDDIALGPKMSLYKQLGDMEEKVKRQLDVARRIRAVDEHKVAETILNSHLIPDLRGNLRSFTRQEFRCVKCNTKFRRPPLDGKCPICGGKIVLTVSKGAIEKYLGTAKMLVTEYKVKNYTRQRICLTERDIDSLFETVFPETQLTLLVNPNDICQRIIMERTGGSKKSGLLENFANGYNKGKKEEMPKKQRKKEQEKSKKRKVISLDDFFSRK

SEQ ID NO: 1130 - protein, 261 aa, Pyrococcus horikoshii OT3
  Pho r-Gyr C-extein
CTYHRTDSIHVSNTGIEVAKEYITQEIGEEYFTPRKWGEEGAHEAIRPTRPIDTGRLIQLIRDGIITIPKNLTRDHFRLYDLIFRRFMASQMKPAKILYEKAIISTPFKDVEVEGYIDVLYDGWSKIKSLPLRQIPKLEKGQRLRVKEVKQWRAPKVSLYTQGDVIALMKERGIGRPSTYAKIVQTLLQRGYVIETKGKKKLVPTEKGIKVYQYLITKYKDLVSEERTRQLEKIMDMVEEAKADYQDVLNELYEEIKRYVR

SEQ ID NO: 1131 - protein, 205 aa, Pyrococcus horikoshii OT3
  Pho RadA C-extein
TQLAHTLAVMVQLPPEEGGLNGSVIWIDTENTFRPERIREIAKNRGLDPDEVLKHIYVARAFNSNHQMLLVQQAEDKIKELLNTDKPVKLLIVDSLTSHFRSEYIGRGALAERQQKLAKHLADLHRLANLYEIAVFVTNQVQARPDAFFGDPTRPIGGHILAHSATLRVYLRKGKGGKRVARLIDAPHLPEGEAVFRITEKGIED

SEQ ID NO: 1132 - protein, 269 aa, Pyrococcus horikoshii OT3
  Pho RFC C-extein
TTAALALSRELFGENWRHNFLELNASDERGINVIREKVKEFARTKPIGGASFKIIFLDEADALTQDAQQALRRTMEMFSSNVRFILSCNYSSKIIEPIQSRCAIFRFRPLRDEDIAKRLRYIAENEGLELTEEGLQAILYIAEGDMRRAINILQAAAALDKKITDENVFMVASRARPEDIREMMLLALKGNFLKAREKLREILLKQGLSGEDVLIQMHKEVFNLPIDEPTKVYLADKIGEYNFRLVEGANEMIQLEALLAQFTLVGKKK

SEQ ID NO: 1133 - protein, 439 aa, Pyrococcus horikoshii OT3
  Pho RIR1 C-extein
CGEEPLYEYESCNLASINLAKFVKYDENGKPYFDWDEYAYVIQKVTKYLDNAIDVNKFPLPEIDHNTKLTRRIGVGMMGLADALFKLGIPYNSEEGFKFMRKVTEYLTFYAYKYSVEAAKRRGTFPLYEKTEYPKGKLPVEGFYHPEIWNLPWDKLVEEIKKYGLRNAMVTTCPPTGSVSMIADTSSGIEPIYALVYKKSVTVGEFYYVDPVFEAELKKRGLYSEELLKKISDNYGSIQGLEEIPEDMKRVFVTALDIHWLDHLLAQASIQMWLTDSASKTINMINEATVEDVKAAYLIAHFLGCKGVTVYRDGSLSVQVYSVEGEKKKRKYKPKPSEYAKKVFLEIVEKEPWIKNFINVDEILNGKRESNLTFSLSIKKEHQEKPQENKGIPEEKIKELLGVVYCPVCYEREGKLVELRMESGCATCPVCGWSKCVIS

SEQ ID NO: 1134 - protein, 348 aa, Pyrococcus horikoshii OT3
  Pho VMA C-extein
TVTQHQLAKWSDAQVVIYIGCGERGNEMTDVLEEFPKLKDPKTGKPLMERTVLIANTSNMPVAAREASIYTGITIAEYFRDMGYDVALMADSTSRWAEALREISGRLEEMPGEEGYPAYLASKLAEFYERAGRVVTLGSDYRVGSVSVIGAVSPPGGDFSEPVVQNTLRVVKVFWALDADLARRRHFPAINWLTSYSLYVDAVKDWWHKNIDPEWKAMRDKAMALLQKESELQEIVRIVGPDALPERERAILLVARMLREDYLQQDAFDEVDTYCPPEKQVTMMRVLLNFYDKTMEAINRGVPLEEIAKLPVREEIGRMKFERDVSKIRSLIDKTNEQFEELFKKYGA

SEQ ID NO: 1135 - protein, 698 aa, Pelodictyon luteolum DSM 273
  Plut RIR1 C-extein
CSEYMFLDNTACNLASLNLIHFVDEESGHVKINELRHAAALWTVVLEISVLMAHFPSPDIARLSYEYRTLGLGFANLGTVLMVLGIPYDSPKALALAGAISAIITGQAYVTSAEISRDLGPFDGYQANSKEMLRVIRNHRRAARNESEEEYEELSVKPRGIDSEYCPKELFEAAGSVWDEALQKGKKYGFRNAQVSVIAPTGTIGLVMDCDTTGIEPEFAIVKFKKLAGGGYFKIVNQSVHKALKRLGYAAQEIEEIEKYCKGSGSLEGCPSINSQWLMNRGFTEEKIALLESNLAAVFDIRFAFNKWILGEEFCQSLGFTEAQLNDPGFDMLQALGASAEDAEAANDFICGTMTIEGAPHLKLEHLPVFDCASRCGQKGLRFINHMAHVRMMSSVQPFISGAISKTVNMPATATTAEIGEVYLSGWQHMVKAITVYRDGSKLSQPLNISSYQDLDEVIMLGNEEDLDETKGPREVQERIIERVYHRSERRLLPKRRKGFIREAYVGGHKVFLRTGEYEDGSLGEVFIDMYKEGASFKGLLNCFAVLASKALQYGMPLEELVDSFTFTRFEPAGAVQGHNAIKNSTSILDYVFRSIGYDYLGRKDFVHVKAVDEVPEHGADAKNSNGQTSPVAALEAEAVPAAHHAGSEYTNTLKSQVMQAKVQGYTGEQCENCGSMRVKQNGTCKVCEDCGMTTGCS

SEQ ID NO: 1136 - protein, 513 aa, Polaromonas naphthalenivorans CJ2
  Pna RIR1 C-extein
CGEQPLPPYGCCDLGPIILTRFVRHPFGFGGEPEFDFEAFEASVATQVRALDNVLEVTFWPLPQQQTESSAKRRIGVGFTGLGNALAMLRLRYDAPEGRDMAARIAVRMRDAAYAASSELAKEKGAFPKFDANGYLATGTFASRLPAALQQAIRAHGIRNSHLLSIAPTGTVSLAFADNASNGIEPAFSWMYKRKKRESDGSTTEYAVEDHAWRLYRELGGDVNKLPGYFVSALDMSATSHIAMMQAVQPFIDTAISKTVNVPADYPYGDFKSLYHQAWRAGLKGLATYRPNAILGAVLETHASPDATPAAAAPAPMDPMRTVIESRPKGALSAVAEKVEYWTQEGHKTLYIVVSFLPVPSASGSGTVERAIEFFMPVGQSGESQQWITSSMRMLSLAARGGFLERALSDMRKVAWDRGPVRLGTYEKADGTRVPLWHDSEVAAIAYAVQNIIARRAAQSALSLAPAEPVQVASSLAPPVMAGKKCSECGAHAVIRKDGCDYCTQCGHLGTCG

SEQ ID NO: 1137 - protein, 512 aa, Polaromonas species JS666
  Posp-JS666 RIR1 C-extein
CGEQPLPPYGCCDLGPIILTRFVRNPFGFNGVPDFDFDAFGKSVTTQVRALDNVLDLTFWPLPQQQAESAAKRRIGVGFTGLGNALVMLCLRYDAPEGREMAARIAVCMRDAAYAASVALAKEKGAFLKFDAEGYLAPGTFANRLPAGLQQAIRAHGIRNSHLLSIAPTGTVSLAFADNASNGIEPSFSWMYRRRKRESDGSTTDYAVEDHAWRLYRELGGDVDRLPGYFVSALEMSAASHIAMMEAVQPFVDTAISKTVNVPVDYAYDDFKGLYQQAWRARLKGLATYRPNAILGAVLETHASAAATPPAAPTPVDPMRTVIESRPKGALSAVAEKVEYWTQEGHKTLYIVVSFLPVPAASGEGTVERAIEFFMPVGQSGESQQWITSSMRMLSLAARGGFLERALSDMRKVAWDRGPVRLGTYEKADGTRVPLWHDSEVAAIAYAVQNIIARRARQPAAGTTPVVEPQVDPALAPPVMAGKKCSECGAHAVIRKDGCDYCTQCGHLGVCG

SEQ ID NO: 1138 - protein, 527 aa, Pseudomonas aeruginosa phage phiEL
  PP-PhiEL Helicase C-extein
TFTSLAWSQLINTAPTVVFCPMNIVDKVWVEQPLQHFKVPPRIWTSISGKVLEEGYDFYIVHYDYMTSGMGKYLENFLIALSKKHKGALKMILDESQNFNDPKAARTRKLIEWCDMELFGHHLPMSGTPLKAQGSEIFPTTCMIDPYFDKKAREFFMASYGRNRPSLMDLLSRRIGRMKFTIPELVGLGDPPPMELVKVKIPNSDQYTLDAIRLQMQIYIGERIAFYTKHMPSFLEFYNDVMTSYELSIQGNAKAVENLVKYKQIVHRFRTRGYNSFTDNQDSQFCKLVEEDIEKGLKGTTLKDFRNIKSAVKYLGLKLRGEALGNVLGRARINAIKDTIAHAGLPELIDNVEKKTLIFTSYVDALKLCEEYLTKVGYPNVTVYGENSNERDTNIKRFEKDPTLRALIAIFDSLKEGYPLIMANLTILLNAPFREYEVKQVQARTWRTGQDAPCYFKLLDMDTGDKLNIMTRSINIMEWSKEQVDILMSKEQGHELLGNITGQEMFDMGDEPETHSLYTSRSVLSLF

SEQ ID NO: 1139 - protein, 594 aa, Pseudomonas aeruginosa phage phiEL
  PP-PhiEL ORF11 C-extein
TVSVQVIDFWLTYIMGRGYTSHLITLKSDNRAQFIAAIKQIRSSIPSYLINSTYKDKDAGTSLTYKAFGEDNVNTLYINVPQISQDAAGDLGRGLRVGTTNYDESGYIRFIDTIIDGCSPSSLTEMALCREQGLPYGITHITTPNTTLHPSGEFMFNKLMSATEWREKFFDCFSESHLRQMLLRASPTKTTSPSVSMVYNYLQLGKDKAWVRETIDLLGLSLAKAKIDLLLMWVEDGENRLFDDVTREAINNMKRDVVWSKEYRDCNLYVDFFVTQQELLEMAKKEYNDHFLIGVDTSSAINKDACTIVIRSMKTGKVIGVGRYPLTFLDDVTAIVVDLLDVIQNSTLIIERNYAHHMIDSLLIMLPAKGMDPFKRVFNQIYQDTVNNAKEFEEVQNTKFAYRNKAFYLKYKQYFGFVTTKTTRDVLYGLIQEAVGNTGYGLCYAKLADELINLKLKGDRIDHDAKQHDDLVIAWLLSYWFIKLGENKSLYGIPPGIALTDTRNLLNSAQNQGRTEYEPYVVQLIDKVRSKVHSLTEELMSTQDNILALRLEVEIRKLAKMLPPEQNRMMTIDVLLENAKVERNKRLLQQRRTA

SEQ ID NO: 1140 - protein, 424 aa, Pseudomonas aeruginosa phage phiEL
  PP-PhiEL ORF39 C-extein
SLTNNGKALKSSEWFHRKVHILSAVVADIDHFMDCGTTTTVPIRIPNMQAAMALLGKFRVTDTGELELIDQTTVWSIKPGEWVNIRSVAFCNHYNSASPCRVCYGMMASSIPYNVMMKKGADVGMWCTTSICNPIGQGMLSTKHFIRNATTRKFVPATKDKNVIYSNGDDIFLTKELCAPGTELVLKADIVNILSDIRSLDVLDNLSLDKLPYFSEVTFRYEVEDIMMGGKTLQQHAACTSVSSRNARFSLEFLNYLLSKGWANEGKKHITVDLSEWNTLSPIFTLPYVREDLDMHRARVENFITFNKRNNAWRQQIVTPRLFGEVLAEYWGLINQETKGINIIHPEVLLYSTLCRDPMRGDYSLANGKGPKYFVNFQECIKGRGAGMLMIYENQQNVLSDPKTFRVVNRQGSPLECFFSLAVS

SEQ ID NO: 1141 - protein, 368 aa, Pseudomonas aeruginosa phage phiEL
  PP-PhiEL ORF40 C-extein
TYMAIHSMVKIGKRTLITMQPRYQINWVRELNKIVKLIPGDLLIWENTLESLYECLEDGKFDPKIIIIPMSRIEVFLRKGKETRDGLHMDDLIKRINPGLRIIDEGHEAIHQIFLSLMFGNIKKLFLLSATLKADDPFTNKMYQYLFPKRLRLKEAEPEHYIDVVAYLYRLNTRRYHLKTEQFGAYNDKTFEKSILKSGVLLAFYFKLVNKAFKEYYLNVRREGTKCLFFFSRVSMCDAMLELFRKEYPGWDFETFTGDDSKLKDKKDKYLKHEIIITTPNSCGTGKDIGGLVTVICAHTVASTQANKQIIGRLRALSGKFNNEIDPAFVFLVCLDLAKHVEYLAKREQVFFEKQKTFKRINSECSLD

SEQ ID NO: 1142 - protein, 57 aa, Porphyra purpurea (chloroplast)
  Ppu DnaB C-extein
SIEQDADLVIMLYRESYYNKEMEMEDMTEIIVAKHRNGPLGTFQLKFDANLANFLNV

SEQ ID NO: 1143 - protein, 283 aa, Pyrococcus species GB-D
  Psp-GBD Pol C-extein
SYYGYYGYAKARWYCKECAESVTAWGREYIEFVRKELEEKFGFKVLYIDTDGLYATIPGAKPEEIKKKALEFVDYINAKLPGLLELEYEGFYVRGFFVTKKKYALIDEEGKIITRGLEIVRRDWSEIAKETQAKVLEAILKHGNVEEAVKIVKEVTEKLSKYEIPPEKLVIYEQITRPLHEYKAIGPHVAVAKRLAARGVKVRPGMVIGYIVLRGDGPISKRAILAEEFDLRKHKYDAEYYIENQVLPAVLRILEAFGYRKEDLRWQKTKQTGLTAWLNIKKK

SEQ ID NO: 1144 - protein, 334 aa, Pichia stipitis CBS 6054, taxon:322104
  Pst VMA C-extein
CGERGNEMAEVLMEFPELFTEINGRKEPIMKRTTLVANTSNMPVAAREASIYTGITLAEYFRDQGKNVSMIADSSSRWAEALREISGRLGEMPADQGFPAYLGAKLASFYERAGKSVALGSPERLGSVSIVAAVSPAGGDFSDPVTTSTLGITQVFWGLDKKLAQRKHFPSINTSVSYSKYTNVLDKYYDANYPEFPALRNKIKEILSDAEELEQVVQLVGKSALSDSDKITLDVASLIKEDFLQQNGYSTYDAFCPIWKTFDMMRAFISYHDEAQKAVANGAQWSKLSESTSDVKHSVSSAKFFEPSRGEAEGKTEFNTLLTSISERFAEASE

SEQ ID NO: 1145 - protein, 140 aa, Pseudomonas syringae pv. tomato str. DC3000
  Psy Fha C-extein
TGPCELPEGYFGAAGGNGPKATATSAAEGATPRVSIDPPDGSFSISDWTGYPAGVPVPQGPFRLLEGTEYNAARNVANKANSALRREQGLVGQPVDVHEINPVKFGGSPTDSANKVILPRDVHRQQVTPWWNQLQKDLGK

SEQ ID NO: 1146 - protein, 353 aa, Picrophilus torridus, DSM 9790
  Pto VMA C-extein
TVIQHQLSKWSDSDIVVYVGCGERGNEMTEILSTFPELMDPKTGKPIMQRTVLIANTSNMPVAAREASIYTGVTIAEYYRDMGYNVALMADSTSRWAEALREISGRLEEMPGEEGYPAYLGRRISEFYERSGNAQIIAEDQRTGSVTLIGAVSPPGGDLSDPVVQNTLRVTRVFWALDASLASRRHFPSINWLTSYSLYTNNLSKWYTENVGPDWPEIYKTMMDLLEKESELQEIVQLVGYDALPEKEKNVLDIAKMIREDFLQQNAFDDIDTYCSIKKQYMMLKIIKTVYEMQMNALNHGMKISQITSIPARSKISRMKEVSEQDFPAFYKNIIKEINDEYNSMIEVGGVNA

SEQ ID NO: 1147 - protein, 57 aa, Porphyra yezoensis chloroplast, cultivar U-51
  Pye DnaB C-extein
SIEQDADLVIMLYRESYYTQETRSRDFTEVIIAKHRNGPTGTFQLKFNAQIAKFSDA

SEQ ID NO: 1148 - protein, 494 aa, Roseovarius species 217
  Rsp Rir1 C-extein
CGEQPLPPYGACLLGSINLARLVTEPFATGARVDAAALDDLVRVAVRMMDNVVDVSGFPLPAQAAEAQAKRRIGLGVTGLADALLMVGLRYGSDEAVQQTEAWLHAIARAAYLASVDLAREKGAFPLFDRDAYLASGTMQAMDEDVRAAVAAHGIRNALLTSIAPTGTISLYAGNVSSGIEPVFAYSYTRKVLQKDGSRTEEEVVDYAVQMWRDRMGDAPLPSYFVNAQTLPPEDHVKMQAAAQKWVDSSISKTINCPEDISFEAFKNVYLQAWDLGCKGCTTYRPNDVTGSVLSVSETSDKVPGETRGDIPVTGGEVVYMSEPLDRPKELEGATYKLKWPDSNHAIYVTVNDIVLNGHRRPFEVFINSKNMEHYAWTVALTRMISAVFRRGGDVSFVVEELKAVFDPRGGAWMQGKYVPSILAAIGGVLEQHLVQIGFLEGEGMGLKQDPQAQIVGIDGARKGPACPACGQYDMRMIEGCMTCGSCGHSKCSG

SEQ ID NO: 1149 - protein, 286 aa, Salmonella phage SETP12
  SaP-SETP12 dpol C-extein
CELGLGYEGGVGAFVTFAKNLGLDLIEMAKTMDGTFPDHIWAATARGYEWARIQEAKRPPHPGEKDDRPSYILDKKVWRTCDAIKRMWRESHPETVAFWRDLKDGILAAVRNPGREFWAGAHLRRNGERAIRIWRTVEFDSSGRKVPGWWLCMELPSGRILSYPGIGVSVTKETDEDGRINTNVRIKYQGENQLTRQWTTLYTHGGKACENIVQALCRDLLAYAMLNVEAGGYPIVLSVHDELVCETPDTPDYTVAELEKLMCALPGWADGFPLVAEGAELKRYAK

SEQ ID NO: 1150 - protein, 286 aa, Salmonella phage SETP3; identical to SEQ ID NO: 1149
  SaP-SETP3 dpol C-extein

SEQ ID NO: 1151 - protein, 440 aa, Salmonella phage SETP3
  SaP-SETP3 Helicase C-extein
SSTLWVLNRLFRNGQLNDDDRVLILAPLRVASGTWPAEQARWNFPCLRVVDATGSEKRRIAALESDANVVCTNYEVIEWLIDYYGKDDWPFTVIVADESTKLKSFRSRSGGSKRAKALSKVAFGKVKRFINLTGTPSPNGLKDLWGQNWFIDAGERLGSSYTAFTDRWFNSVQKGKSAMAREYHARPGADNEIHQKMKDISLTIDAAEWFGCEAPVIVPVEIDLPKKARQAYIDMEEKLFAELESGEVEAANAAAKTSKCLQIASGAVYVSGPDGEATKDWEKVHDTKLDALESIVEELQGAPLLVAYQFKHELERILRRFPQAQAFAKGAKGNKQMESWNRGEIEILCVHPASAGHGLNLQDGGHHLAFISQGWNLEHYLQVVERIGPVRQKQAGHERPVFLYHIVAKDTLDEVVAARTDEKKSVQEELLNYMKRRGKR

SEQ ID NO: 1152 - protein, 286 aa, Salmonella phage SETP5; identical to SEQ ID NO: 1149
  SaP-SETP5 dpol C-extein

SEQ ID NO: 1153 - protein, 427 aa, Streptomyces avermitilis MA-4680
  Sav Helicase C-extein
TMVALRAMLAVVDSGGQAAMLAPTEVLAQQHHRSITEMMGELAEGGMLGGAEHSTKVVLLTGSMGAAARRQALLDLVTGEAGIVIGTHALIEDKVQFHDLGLVVVDEQHRFGVEQRDALRGKGKQPPHLLVMTATPIPRTVAMTVFGDLETSVLDQLPAGRSPIASHVVPAADKPHFLARAWERVREEVGKGHQAYVVCARIGDEEDDPKKAKKKSPEDEAEKRPPLAVLEVADQLAKGPLQGLGVEVLHGRMPPDDKDAVMRRFAAGERDVLVATTVIEVGVNVPNATAMVIMDADRFGVSQLHQLRGRVGRGSAAGLCLLVTEMPEASPARQRLNAVASTLDGFELSRIDLEQRREGDVLGQAQSGVRSSLRMLAVIEDEEIIAEAREEAAAVVAADPELGHLPGLRTALEALLDEEREQYLDKG

SEQ ID NO: 1154 - protein, 73 aa, Saccharomyces castellii, strain CBS4309
  Sca-CBS4309 VMA C-extein
CGERGNEMAEVLMEFPELFTEKDGRKEPIMKRTTLVANTSNMPVAAREASIYTGITLAEYFRDQGKDVSMIAD

SEQ ID NO: 1155 - protein, 73 aa, Saccharomyces cariocanus, strain="UFRJ 50791
  Scar VMA C-extein
CGERGNEMAEVLMEFPELYTEMSGTKEPIMKRTTLVANTSNMPVAAREASIYTGITLAEYFRDQGKNVSMIAD

SEQ ID NO: 1156 - protein, 334 aa, Saccharomyces cerevisiae (nucleus)
  Sce VMA C-extein
CGERGNEMAEVLMEFPELYTEMSGTKEPIMKRTTLVANTSNMPVAAREASIYTGITLAEYFRDQGKNVSMIADSSSRWAEALREISGRLGEMPADQGFPAYLGAKLASFYERAGKAVALGSPDRTGSVSIVAAVSPAGGDFSDPVTTATLGITQVFWGLDKKLAQRKHFPSINTSVSYSKYTNVLNKFYDSNYPEFPVLRDRMKEILSNAEELEQVVQLVGKSALSDSDKITLDVATLIKEDFLQQNGYSTYDAFCPIWKTFDMMRAFISYHDEAQKAVANGANWSKLADSTGDVKHAVSSSKFFEPSRGEKEVHGEFEKLLSTMQERFAESTD

SEQ ID NO: 1157 - protein, 34 aa, Saccharomyces cerevisiae strain DH1-1A
  Sce-DH1-1A VMA C-extein
CGERGNEMAEVLMEFPELYTKMSGTKEPIMKRTT

SEQ ID NO: 1158 - protein, 310 aa, Saccharomyces cerevisiae OUT7091
  Sce-OUT7091 VMA C-extein
CGERGNEMAEVLMEFPELYTEMSGTKEPIMKRTTLVANTSNMPVAAREASIYTGITLAEYFRDQGKNVSMIADSSSRWAEALREISGRLGEMPADQGFPAYLGAKLASFYERAGKAVALGSPDRTGSVSIVAAVSPAGGDFSDPVTTATLGITQVFWGLDKKLAQRKHFPSINTSVSYSKYTNVLNKFYDSNYPEFPVLRDRMKEILSNAEELEQVVQLVGKSALSDSDKITLDVATLIKEDFLQQNGYSTYDAFCPIWKTFDMMRAFISYHDEAQKAVANGANWSKLADSTGDVKHAVSSSKFFEPSRG

SEQ ID NO: 1159 - protein, 310 aa, Saccharomyces cerevisiae OUT7112
  Sce-OUT7112 VMA C-extein
CGERGNEMAEVLMEFPELYTEMSGTKEPIMKRTTLVANTSNMPVAAREASIYTGITLAEYFRDQGKNVSMIADSSSRWAEALREISGRLGEMPADQGFPAYLGAKLASFYERAGKAVALGSPDRTGSVSIVAAVSPAGGDFSDPVTTATLGITQVFWGLDKKLAQRKHFPSINTSVSYSKYTNALNKFYDSNYPEFPVLRDRMKEILSNAEELEQVVQLVGKSALSDSDKITLDVATLIKEDFLQQNGYSTYDAFCPIWKTFDMMRAFISYHDEAQKAVANGANWSKLADSTGDVKHAVSSSKFFEPSRG

SEQ ID NO: 1160 - protein, 73 aa, Saccharomyces dairenensis, strain CBS 421
  Sda VMA C-extein
CGERGNEMAEVLMEFPELFTEQTGRKEPIMKRTTLVANTSNMPVAAREASIYTGITLAEYFRDQGKDVSMIAD

SEQ ID NO: 1161 - protein, 208 aa, Staphylococcus epidermidis RP62A
  Sep RIR1 C-extein
CTEIFQYMHVSDIKDYYEPDELGQDIICNLASLNMVKSIEEKEIEESIRTGMRALTFVANNSRIEHLPTVHKANKNNRAVGLGVMSFHSMCAKNKIRYGSEESLDLLNVYCMMMDYYSLDESMKIAVERNDKFYGFDQTDYKAKDGKEFGEYFYKNNRVTKNVEPITPKVKEIFKGIYIPTKEDWQRLAREVDKNGLYNSYRLSIAPY

SEQ ID NO: 1162 - protein, 301 aa, Saccharomyces exiguus, strain="IFO1128"
  Sex-IFO1128 VMA C-extein
CGERGNEMAEVLMEFPELFTEINGRKEPIMKRTTLVANTSNMPVAAREASIYTGITLAEYFRDQGKNVSMIADSSSRWAEALREISGRLGEMPADQGFPAYLGAKLASFYERAGKAVALGSPDRIGSVSIVAAVSPAGGDFSDPVTTATLGITQVFWGLDKKLAQRKHFPSINTSVSYSKYTNVLDKFYDQNYPEFPTLRNRMKEILSNAEELEQVVQLVGKSALSDSDKITLDVASLIKEDFLQQNGYSTYDAFCPIWKTFDMMKAFIAYHDEAQKSVANGANWSKLAEATSDVKHQVSS

SEQ ID NO: 1163 - protein, 112 aa, Stigeoclonium helveticum, strain UTEX 441
  She RPB2 (RpoB) C-extein
SRSSGPYSLITQQPLKGRSKHGGQRLGEMEVWAIEAYGAAFTLLELLTIKSDDVTGRLTIWDYVLYKKPLYIGTPASFKVLICELQALCLDIGIYKADKSNILKQINVSSMG

SEQ ID NO: 1164 - protein, 255 aa, Shigella flexneri 5 str. 8401
  ShP-Sfv-5 Primase C-extein
TEVVGHMALEAMRQGVKTCIASLELKPGILLKRLTRQATCCKMPPVLEIDSAFKFYDERLWVFGLTGTAKADRLIEIFDYARRRYGIQLFIIDSLMKCGIGDDDYNGQKAFVDSICDFKNKTNSHVILVTHSRKGDSEEKPTGKMDVKGSGAITGLTDNLFIIWRNKARERALQRVQSGEKMSEKDEQLLASPASVLMLEKQRNGEGWEGGVPLFLDEQSHQFLQLESGSPYSYIANMPKSEYDEAWRQENVTEY

SEQ ID NO: 1165 - protein, 203 aa, Staphylothermus marinus F1
  Smar 1471 C-extein
TGHGGLSTIHAETLDYAIKRLTSPPMNIPPTYMKLMNTFIHLQRVIARIEKGVVRVRRRATIVQEVEDFGKYRTIAVWDPRTDQFKVNLEESLHLRDIAAKRGLELEDIIDEIYRKATVLNWMIYKNIFNVWDVSRIIFNYYYDPVSVYKRAVRELEEAGREAGVPTMVAPEEVASTEELVGGTKEMGEATKELFERTRELEK

SEQ ID NO: 1166 - protein, 268 aa, Staphylothermus marinus F1
  Smar MCM2 C-extein
TVSIAKAGIVARLNARASVLAAGNPKLGRYDHSLPVSKNIDLPPPILSRFDLIFIVEDIPEKTKDTLLAKHILDIHTDYEKAKPLIDTQLLKKYISYARRYIRPKLTQEAKKLLLDFYVNMRLSGVKASKEGPPAIAMTPRQLEALIRLSEAHAKMALKTKATIEDAEEAIRLMYYSLRKVGYDVKSGRLDIDLVELGVSRSKQVKMKEFMKFIDKVFEEYDEIEYKELYNLAKEKGFDKEFVIEMIRRLKKDGLVYEPRPGVLSKVY

SEQ ID NO: 1167 - protein, 323 aa, Saccharomyces pastorianus IFO11023
  Spa VMA C-extein
CGERGNEMAEVLMEFPELYTEMSGTKEPIMKRTTLVANTSNMPVAAREASIYTGITLAEYFRDQGKNVSMIADSSSRWAEALREISGRLGEMPADQGFPAYLGAKLASFYERAGKAVALGSPDRTGSVSIVAAVSPAGGDFSDPVTTATLGITQVFWGLDKKLAQRKHFPSINTSVSYSKYTNVLNKFYDSNYPEFPVLRDRMKEILSNAEELEQVVQLVGKSALSDSDKITLDVATLIKEDFLQQNGYSTYDAFCPIWKTFDMMRAFISYHDEAQKAVANGANWSKLADSTGDVKHAVSSSKFFEPSRGEKEVHGEFEKLLS

SEQ ID NO: 1168 - protein, 503 aa, Spirulina platensis, strain C1
  Spl DnaX C-extein
CHMLSTAAFNALLKTLEEPPDRVVFVLATTDPQRVLPTIISRCQRFDFRRIPLQAMATHLETIAAKENIAITPEAVMMVAQIAQGGLRDAESLLDQLSLLSGEITVERVWDLVGAVPERDLMTLLEAIAEGKATAILDQTRELLNRGRDPLIVLQNLGEFYRDLLIAKTAPNRQDLVKLTQPTWESLCAFSQRWEHEIILAGQKHLRDSEVQIKNTTQPRLWLEVTLLGLLPEALRPQTVSTGVVNVQPQPISNQPTSKMRSQPVYKPPAPAQPVSQAVSVPDAPPPPPPPPQPTTANQEEAVNYSLEELWEQILSAIEQLGTQALMRQHGCLRSHHGNVVCIGLKSHPLLKIAQAKISSLEVACQKVFNTKIQVNLEVGMGAVSPGVHPEKTPISQRVQSPPPPPPEPPPPTREPETERPPELTTPKIEDISVKVADNDNNSPVDDVATAAEKLAEFFDGEIIPWYPENTQVTTVSSSSVALEDTIEFYSPEDDDSEDDVPF

SEQ ID NO: 1169 - protein, 276 aa, Salinibacter ruber DSM 13855
  Sru DnaB C-extein
TAFALASAQNAATHPERSTGVAIFSLEMGAQQLAQRMLTSEARVDAHRARTGRMKDDDWQRLARAAGALSDADIYIDDTPGLSVLELRAKCRRLKAEHELGLVVVDYLQLMQASGANLRSGANREQEIAHISRSLKGLAKELDIPVIALSQLNRAVENRGGDKRPQLSDLRESGSIEQDADVVSFIYRAERYGITVDEQGNSTEGIAEIIVGKQRNGPIGSVELAFVDQYARFEPLTTQYDNPGGGPPQGDGSAPMPPDGNAGGGGGNSFEDDAPF

SEQ ID NO: 1170 - protein, 306 aa, Salinibacter ruber DSM 13855
  Sru PolBc C-extein
SFYGLLGFGLSAFNDFEEADRVARTGQQILRQLIDEIRARGGTVIEVDTDGVLFVPPEDVRGEQAEIDYTVSLTEAMPEGIRVGFDGRFKKMLSYKKKNYALLTYDDELKFKGSSLISRSNEPFGRDFVRKAIRRLLDHDVAGLHELYVDTRDKIVNSDWEGVERFARTETLKDTLEQYEADVEAGQRPRAATYELAKEKQNRTGKPVKKGDRITYYITGDDATVTAFKHCRRAEEWDPEDPDENTAYYLKRLDEFASKFEPFFDEADFRLVFSPEDLFGFSADGIEIQREEHASDYAEDQEDVPF

SEQ ID NO: 1171 - protein, 557 aa, Synechocystis species, strain PCC6803
  Ssp DnaX C-extein
CHMLSTAAFNALLKTLEEPPERVVFVLATTDPQRVLPTIISRCQRFDYRRIPLQAMVDHLRYIAGRENINIDQPALTLVAQIANGGLRDAESLLDQLSLLPDLITPDKVWDLVGAVPEQDLLALLEAIASDDAETLLATCRQILNRGREPLVVLQNLASFYLNLLIAQTAPQRSDLVAVTAETWQALCDTAPQWQRGVILQGQQKLKESEIQIRNTTQPRLWLEVTLLGLLPSACGLDTGAVSQTAVRTPVAQPITPPKPSNVVTFPGGSHNHLTVVDSPTMIPVSEPIVLEEKLEADVEPSSFEPSNAHWDLTQLWSETLNNLGALSQSLFKSFGSLINLVGNNATVSVTTQQLLKIAAGKKDELEAALGQACGQSVKVNLVVGKPSTPETTPVNSAPPPSHSKPPAFAPEPSPPPTAAVNANPAPTVPPSPPAIARGPATSEIKPSPRRESNNFSNPSRPKPKPAPAMEEPPPTDIGDSATRKAIEQFAKNFDGEIVASDAAPKQESDNGDDLSTEPTAELGQQPMDHNGHLQINQPTVLNRPAIAPEEEEDLPF

SEQ ID NO: 1172 - protein, 207 aa, Synechocystis species, strain PCC6803
  Ssp GyrB C-extein
SAKQGRDRRFQAILPLRGKILNIEKTDDAKIYKNTEIQALITALGLGIKGDDFDISSLRYHRVVIMTDADVDGAHIRTLLLTFFYRYQRDLVDQGYIYIACPPLYKLERGKNHFYCYSDRELQEQISQFPPNANYTIQRFKGLGEMMPQQLWDTTMNPESRTMKRVHIEDAAEADRIFTVLMGDRVAPRREFIETYGTKLDLTDLDI

SEQ ID NO: 1173 - protein, 62 aa, Synechococcus species JA-2-3B'a(2-13)
  Ssp-JA2 DnaB C-extein
SIEQDADLVMMIYRPEYYDPNTSDRGIAEVIIAKHRNGPTGTVRLLFESQYTQFRNLADPNR

SEQ ID NO: 1174 - protein, 358 aa, Synechococcus species JA-2-3B'a(2-13)
  Ssp-JA2 RIR1 C-extein
CGEIIGHTFHCNLAEIHLNRLDPHNRQEQEEAFTAGALTVAALLHHRFVEPRFQRSREWDPIVGVSFTGLFDFCVKAFGVEWLRWWQEGRPDTPIGKEFKQQEREYLSRWKEIVHRVVWDYCDRHSLRRPNRCTTVQPAGTKSLLTNASPGWHPPKAQRYIRRITFAKNDPVALACLDYGYSVVPAQADKDENGNLLNDPFDPRCTEWLVELPVEVEWANLPGAGQIEIEQFSALAQFDFYMQVQKYYTTHNTSATIELREDEVEALGSRIYEAIRDDEGYISAALLARFDAPFPRLPFEKIDKPTYERLVAEVKKRRRTDNFFAALARYGRNFTLAAEGPAGCDALGCLLPDSAPQS

SEQ ID NO: 1175 - protein, 62 aa, Synechococcus species JA-3-3Ab
  Ssp-JA3 DnaB C-extein
SIEQDADVVMMIYRPEYYDPNTSDRGIAEVIVAKHRNGPTGTVRLLFESQYTQFRNLADPYR

SEQ ID NO: 1176 - protein, 363 aa, Synechococcus species JA-3-3Ab
  Ssp-JA3 RIR1 C-extein
CGEIIGCDFHCNLAEIHLNRLDPHNRQEQEEAFTAGALSAAALLHHRFVEPRFQRSREWDPIVGVSFTGLFDFCVKAFGVDWLRWWQEGRPDTPLGREFKQQEREYLSFWKEVVHRVVWDYCDRHGLRRPNRCTTVQPAGTKSLLTNASPGWHPPKAQRYIRRITFAKNDPVALACLDYGYSVVPAQSDKDENGNLLNDPFDPRCTEWLVELPVEVEWANLPGAEEIEIERFSALAQFDFYMQVQKYYTTHNTSATLELREDEIEALGSRIYEAIRDDEGYISAALLARFDAPFPRLPFEKIDKATYERLMAEVKQRRKVDNFYEALARYDRNLALTAEGPAGCDALGCLMPEASPQGENLSR

SEQ ID NO: 1177 - protein, 437 aa, Staphylococcus phage Twort
  StP-Twort ORF6 C-extein
TECASGIIDQLLPQLEKGETIAFFTGSTEIFHQSADRLKERLNIPIGKIGAGKFDVKQVNVVMIPTLNSNMKDPTEGLKVTPKQNISKKIAKEVLPKFEGGKNQKRFMGMYLKQFEPKTKVDQKVKDELINIYNTSKSDQELLLNLRKHNVIFQNIAKSKNEKKYNKYHQMREFLDSVAVMIVDEAHHSKSDSWYNNLMTCDNALYRIALTGSIDTQDDLLNMRLEALFGEVISRVSNEFLISEGHSAKPTINTIPIMTPKDIENQKEYRDVYDEGITNNEFRNKLIAKLTEKWYNKDKGVLIIVNFITHGENISKLLEELGIEHFFLHGEVDSELRQQKLNDMRSGKLKVMIATSLIDEGVDISGIHALILGAGGKSLRQVLQRIGRALRKKKDDNTTQIFDFEDRTHKFLYEHFKQRLSIYEEEKFEVKDVTRKG

SEQ ID NO: 1178 - protein, 73 aa, Saccharomyces unisporus, strain CBS 398
  Sun VMA C-extein
CGERGNEMAEVLMEFPELFTEINGRKEPIMIRTTLVANTSNMPVAAREASIYTGITLAEYFRDQGKDVSMIAD

SEQ ID NO: 1179 - protein, 355 aa, Thermoplasma acidophilum, ATCC 25905
  Tac-ATCC25905 VMA C-extein
TVIQHQLAKWSDANIVVYIGCGERGNEMTEILTTFPELKDPNTGQPLMTGLSFIANTSNMPVAAREASIYTGITIAEYYRDMGYDVALMADSTSRWAEALREISGRLEEMPGEEGYPAYLGRRVSEFYERSGRARLVSPDERYGSITVIGAVSPPGGDISEPVSQNTLRVTRVFWALDAALANRRHFPSINWLNSYSLYTEDLRSWYDKNVSSEWSALRERAMEILQRESELQEVAQLVGYDAMPEKEKSILDVARIIREDFLQQSAFDEIDAYCSLKKQYLMLKAIMEIDTYQNKALDSGATMDNLASLAVREKLSRMKIVPEAQVESYYNDLVEEIHKEYGNFIGEKNAEASL

SEQ ID NO: 1180 - protein, 355 aa, Thermoplasma acidophilum, DSM1728
  Tac-DSM1728 VMA C-extein
TVIQHQLAKWSDANIVVYIGCGERGNEMTEILTTFPELKDPNTGQPLMDRTVLIANTSNMPVAAREASIYTGITIAEYYRDMGYDVALMADSTSRWAEALREISGRLEEMPGEEGYPAYLGRRVSEFYERSGRARLVSPDERYGSITVIGAVSPPGGDISEPVSQNTLRVTRVFWALDAALANRRHFPSINWLNSYSLYTEDLRSWYDKNVSSEWSALRERAMEILQRESELQEVAQLVGYDAMPEKEKSILDVARIIREDFLQQSAFDEIDAYCSLKKQYLMLKAIMEIDTYQNKALDSGATMDNLASLAVREKLSRMKIVPEAQVESYYNDLVEEIHKEYGNFIGEKNAEASL

SEQ ID NO: 1181 - protein, 1060 aa, Thermococcus aggregans
  Tag Pol-1 (Tsp-TY Pol-1) C-extein
SLYPSIIVTHNVSPDTLEREGCKNYDVAPIVGYKFCKDFPGFIPSILGELITMRQEIKKKMKATIDPIEKKMLDYRQRAVKLLANSILPNEWLPIIENGEVKFVKIGEFIDRYMEEQKDKVRTVDNTEVLEVDNIFAFSLNKESKKSEIKKVKALIRHKYKGEAYEVELNSGRKIHITRGHSLFTIRNGKIKEIWGEEVKVGDLIIVPKKVKLNEKEAVINIPELISKLPDEDTADVVMTTPVKGRKNFFKGMLRTLKWIFGEESKRIRTFNRYLFHLEELGFVKLLPRGYEVTDWEGLKRYRQLYEKLVKNLRYNGNKREYLVRFNDIKDSVSCFPRKELEEWKIGTAKGFRAKCILKVDEDFGKFLGYYVSEGYAGAQKNKTGGMSYSVKLYNENPNVLKDMKNIAEKFFGKVRVGKNCVDIPKKMAYLLAKSLCGVTAENKRIPSIIFDSSEPVRWAFLRAYFVGDGDIHPSKRLRLSTKSELLANQLVFLLNSLGVSSIKIGFDSGVYRVYINEDLPFLQTSRQKNTYYPNLIPKEVLEEIFGRKFQKNITFEKFKELADSGKLDKRKVKLLDFLLNGDIVLDRVKNVEKREYEGYVYDLSVEDNENFLVGFGLLYAHNSYYGYMGYPKARWYSKECAESVTAWGRHYIEMTIKEIEEKFGFKVLYADSVTGDTEIIVKRNGRIEFVPIEKLFERVDYRIGEKEYCILEDVEALTLDNRGKLIWKKVPYVMRHRAKKKVYRIWITNSWYIDVTEDHSLIVAEDGLKEARPMEIEGKSLIATKDDLSGVEYIKPHAIEEISYNGYVYDIEVEGTHRFFANGILVHNTDGFYATIPGEKPETIKKKAKEFLKYINSKLPGLLELEYEGFYLRGFFVAKKRYAVIDEEGRITTRGLEVVRRDWSEIAKETQAKVLEAILKEDSVEKAVEIVKDVVEEIAKYQVPLEKLVIHEQITKDLSEYKAIGPHVAIAKRLAAKGIKVRPGTIISYIVLRGSGKISDRVILLSEYDPKKHKYDPDYYIENQVLPAVLRILEAFGYRKEDLKYQSSKQVGLDAWLKK

SEQ ID NO: 1182 - protein, 437 aa, Thermococcus aggregans
  Tag Pol-2 (Tsp-TY Pol-2) C-extein
SYYGYMGYPKARWYSKECAESVTAWGRHYIEMTIKEIEEKFGFKVLYADSVTGDTEIIVKRNGRIEFVPIEKLFERVDYRIGEKEYCILEDVEALTLDNRGKLIWKKVPYVMRHRAKKKVYRIWITNSWYIDVTEDHSLIVAEDGLKEARPMEIEGKSLIATKDDLSGVEYIKPHAIEEISYNGYVYDIEVEGTHRFFANGILVHNTDGFYATIPGEKPETIKKKAKEFLKYINSKLPGLLELEYEGFYLRGFFVAKKRYAVIDEEGRITTRGLEVVRRDWSEIAKETQAKVLEAILKEDSVEKAVEIVKDVVEEIAKYQVPLEKLVIHEQITKDLSEYKAIGPHVAIAKRLAAKGIKVRPGTIISYIVLRGSGKISDRVILLSEYDPKKHKYDPDYYIENQVLPAVLRILEAFGYRKEDLKYQSSKQVGLDAWLKK

SEQ ID NO: 1183 - protein, 407 aa, Trichodesmium erythraeum IMS101
  Ter DnaB-1 C-extein
TSFAVNIAHSIAANLKLPIAIFSLEMSKEQLVLRLLASEARIESNRLRAGRISQNEWEPLTSAITNLSEMPIFIDDTPNITVNEIRSKTRQLQSEQGGKLGLILLDYLQLMEGNNSDNRVLELARITRNLKGLARELSVPIIALSQLSRSVEARTNKRPMMSDLRESGCLTGESLICLADGKKIPISCLVGNSNFAVLALNENTWKFESAMVSRVFSTGVKPIFSLQTSSGKLIRATANHPFFSMGGWKQLNTLNIGDSLAILNQKMLKCSILYDGHFLSQSDFGPKYGRNLGSIVKSHEWEKSTEIDVEWDEIVEIMPHGEAEVFDLTVPGLHNFVANEIVVHNSIEQDADLVIMLYRDEYYSPDTPDQGIAEVIITKHRNGPTGTVKLLFDPQFTKFRNLAVDKR

SEQ ID NO: 1184 - protein, 600 aa, Trichodesmium erythraeum IMS101
  Ter DnaE-1 C-extein
CYQEQIMKMAQDLAGYSLGEADLLRRCLSGSTKVIDAATGNLFSLKEIAAQPEYWLSRKVFSLDLKSQQVVQQPITEIHPNGVRDVWQITTRTNRKVCATDDHLFYTVLGWKPLKDFSVGDRLGLPNKIPINYRSQISDSKVKFTAYLIGEGYLYTNSFSCSYFCNSDGELIADFYGCAEELFGSSAPIEKQLHLGNKSVIYVRIGLISGLKNWVDSYLQCANSRVQEIPNWIFSLSQSQLQLFLGILWSTSGIFDETIGYTYYSSNSEVLVRQVQHLFLRLGIVSLFNVNKVKGQGELDVSYVVEVRGREDMLKFYKLIKPYLSSYKQGLCESCYLVIKYQQSYQFKYFLTPDFFDLIVKAKKASSMTRALGVCGGEISSVWNFQNTSNRSLSFDKFNNFSTVLADEELTAIANSDVFWDEIISIEYIGKEEVFDLTIPETHNFIANDFIVHNCMGKKKVSEMEKHREKFIDGAAQRGVSSVVAKDLFEQMIKFAEYCLTYETEIMTVEYGPLPIGKIVEYRIECTVYTVDKNGYIYTQPIAQWHNRGMQEVYEYSLEDGTVIRATPEHKFMTEDGQMLPIDEIFERNLDLKCLGTLEL

SEQ ID NO: 1185 - protein, 208 aa, Trichodesmium erythraeum IMS101
  Ter GyrB C-extein
SAKQGRDRRFQAILPLRGKIINIEKTDDAKIYKNNEIQSMITALGLGIKGDEFDASQLRYHKVIIMTDADVDGSHIRTLLLTFFYRYQRALVDQGYIYIACPPLYKVERGRNHYYCYSDRELNELIQNEFPDNANYTIQRFKGLGEMMPVQLWDTTMNPETRTLKRVEIEDAAEADRIFTVLMGDRVAPRREFIETYGPKLKITDLDI

SEQ ID NO: 1186 - protein, 603 aa, Trichodesmium erythraeum IMS101
  Ter Ndse-1 C-extein
CYDEGKRVAETLAFDYHRQNNVDIRVARIFNSLTGDQKVLYYIAKKLYYETFAECYDRINGDISSVSVPCFDENYQTVIKPISAIWKHHVKKKGFKIKITWGKQIKITEDHSLFTRNENNKPQAVFGNEIKVGDEIGIPSYISFLEQPLEPFHITDKILIQEEIYVESEDTISYIEKYGDKMREYLLAKSLSPSQFYSILKTYEAKNQIPWHLWKYLELPLSEKDKVCYLSKKAIKNWIDNVEELLWFLGFYVARGSLIKNEVVLKGEPSQLEKVIELIERIFEYKSEINDSGYISIKSKILVDLIGYGLNFGNQEKDIPNWILQLPEQQLIRFLKGFVAGNNLENQLNFYLEFKTDSQLVAEKLVLILSKFGLVADVSEIEVNEEDIAKIYRIIIEGLEDKNIHNLSKVEQKISALTTGDIAWGKIESIEEFEIDDYVYDFSVPNYENFIGGSYNVFAHNTYGPRMLENDGRVVSNFIVQALKGIPLTVYGDGSQTRSFCYVSDLIEGFIRLMNQDFIGPVNLGNPREYTILELAQKIQTMVNPGTEIIYKPLPQDDPKQRQPDITRGKKYLGWEPTVFLEEGLKLTIEDFRERLKNELPKN

SEQ ID NO: 1187 - protein, 142 aa, Trichodesmium erythraeum IMS101
  Ter Ndse-2 C-extein
TYGPRMLENDGRVVSNFIVQALKGIPLTVYGDGSQTRSFCYVSDLIEGFIRLMNQDFIGPVNLGNPREYTILELAQKIQTMVNPGTEIIYKPLPQDDPKQRQPDITRGKKYLGWEPTVFLEEGLKLTIEDFRERLKNELPKN

SEQ ID NO: 1188 - protein, 452 aa, Trichodesmium erythraeum IMS101
  Ter Snf2 C-extein
TIQTIAFLLKQQEQKALKGPTLLVCPTSVLGNWEREVKKFGPTLKAIVHHGDKRAKGKGFATAVKDTNLVITSYALLHRDEKILETIKWQSVIVDEAQNIKNPEAKQSQAARKLDASFRIALTGTPVENRLSELWSILDFLNPGYLGQKQFFQRRFAIPIEKYGDTSSLQILRSLVQPFILRRLKTDKDIIQDLPEKQENTIFCPLANEQALLYQNIVENSLAEIDTVGGIQRKGKILALLIKLKQLCNHPVLLQIKKGSRKKVEITDKNSGKLQRLGAMLEEIISEEERAIIFTQFAEWGKVLQPYLQKSLGREVSFLYGSTQRSKREEMIDQFQLDPQGPPVMILSLKAGGTGLNLTRANHVFHFDRWWNPAVENQATDRVFRIGQTRNVQVHKFVCTGTLEEKIHDLIESKKELAEQVVGAGEKWLTELDTDQLRNLLILDRNQVIKEE

SEQ ID NO: 1189 - protein, 149 aa, Trichodesmium erythraeum IMS101
  Ter ThyX C-extein
SFDVQSYRFCSGKVIAVADGKTDIETAFYLRPVGEYSDRKGKKYYYSAEQREKDLYWCLEAAKKYKLDMELGMSEEHARGKIPFDYRQHFVVSFNCRSLLHFLDLRFKKNAQLEIQKLCELMWPHFQDWVPNIAEWYEKNRLKKGKLAP

SEQ ID NO: 1190 - protein, 757 aa, Thermococcus fumicolans
  Tfu Pol-1 C-extein
SLYPSIIISHNVSPDTLNREGCGEYDEAPQVGHRFCKDFPGFIPSLLGDLLDERQKVKKHMKATVDPIEKKLLDYRQRAIKILANSFYGYYGYAKARWYCKECAESVTAWGRQYIETTMREIEEKFGFKVLYADSVTGDTEVTIRRNGRIEFVPIEKLFERVDHRVGEKEYCVLGGVEALTLDNRGRLVWKKVPYVMRHKTDKRIYRVWFTNSWYLDVTEDHSLIGYLNTSKVKPGKPLKERLVEVKPEELGGKVKSLITPNRPIARTIKANPIAVKLWELIGLLVGDGNWGGQSNWAKYYVGLSCGLDKAEIERKVLNPLREASVISNYYDKSKKGDVSILSKWLAGFMVKYFKDENGNKAIPSFMFNLPREYIEAFLRGLFSADGTVSLRRGIPEIRLTSVNRELSDAVRKLLWLVGVSNSLFTETKPNRYLEKESGTHSIHVRIKNKHRFADRIGFLIDRKSTKLSENLGGHTNKKRAYKYDFDLVYPRKIEEITYDGYVYDIEVEGTHRFFANGILVHNTDGFFATIPGADAETVKKKAREFLNYINPKLPGLLELEYEGFYRRGFFVTKKKYAVIDEEGKITTRGLEIVRRDWSEVAKETQARVLEAILRHGDVEEAVRIVKEVTEKLSKYEVPPEKLVIHEQITRELKDYKATGPHVAIAKRLAARGIKVRPGTVISYIVLKGSGRIGDRTIPFDEFDPTKHRYDAEYYIENQVLPAVERILKAFGYKKEDLRYQKTRQVGLGAWLKMGKK

SEQ ID NO: 1191 - protein, 234 aa, Thermococcus fumicolans
  Tfu Pol-2 C-extein
TDGFFATIPGADAETVKKKAREFLNYINPKLPGLLELEYEGFYRRGFFVTKKKYAVIDEEGKITTRGLEIVRRDWSEVAKETQARVLEAILRHGDVEEAVRIVKEVTEKLSKYEVPPEKLVIHEQITRELKDYKATGPHVAIAKRLAARGIKVRPGTVISYIVLKGSGRIGDRTIPFDEFDPTKHRYDAEYYIENQVLPAVERILKAFGYKKEDLRYQKTRQVGLGAWLKMGKK

SEQ ID NO: 1192 - protein, 247 aa, Thermobifida fusca YX
  Tfus Hyp-2914 C-extein
SFGACPHGYVFEGRGLYKSQAAQPGGNATYYSVTLMCGPSDTITDAQINAVRQLREWLMEPAMSIAGTVKGHRDFISTSCPGDTLYRMVRDGVFSKPARWGTTDTEEDEVPHYLNIAQTKEVVVPPKQYVSLRWDTVWTDTAKTAHKDGLAVISKPCDLNGALWLDIEGLAEGEDVQVHMADWERATKKYSLHPIAEGIGTEGRSFPVFPVVNRLGSGRTMDLRVYNVGEQPFTIRRATFKGHVWLR

SEQ ID NO: 1193 - protein, 660 aa, Thermobifida fusca YX
  Tfus RecA-1 C-extein
TTVALHAVANAQRAGGIAAFIDAEHALDPSYAEKIGVNIDDLLLSQPDTGEQALEIVDMLVRSGAISIIVIDSVAALVPRAEIEGEMGDSHVGLQARLMSQALRKIAGALNQTKTTAIFINQLREKVGVMFGCMHYDTLVTLADGTQEKIGTIVDRKLDVEVLSYDPETDRIVPRRVVNWFDNGAADHFLQFTVGRSGKPGGAQFTATPNHLIRTPGGWREAGELIAGDRVLVHEPHYLNEQQRQVVYGSLMGRGTLVPDRHGGPGVHFCMAHTAEQAAYLDWKVSLLGNIAHSRTAEASATVGVEFTPMPELSELHRVVDFGDGHTHLTWEFLKQLTPLALAVWYLDAGTLTIPQSGTDDDARVQIDVETLSPGSRQRLVEYLRDTHELDAAVVQQGADARSLLEFTPAATVRFLELVAPYVPESMSSMLLAQFRGRCSVTPEYSDPVQRLVAAPVLDIQVKPGSTRKFDIEVEGNHNYFVDGVMVHNSPETTSGGRALKFYASVRMDVRRIETLKDGTEAVGNRTRVKVVKNKLAPPFKQAEFDILYGVGISREGGLLDLGVEHGIVRKSGAWYTYEGTQLGQGKENARNFLRANPDMADEIEKRIKQKLGIPTGDDSAPAEEAAKDEAKAASTTKRTTRKTTASTSASKSAAPSTDA

SEQ ID NO: 1194 - protein, 171 aa, Thermobifida fusca YX
  Tfus RecA-2 C-extein
SPETTSGGRALKFYASVRMDVRRIETLKDGTEAVGNRTRVKVVKNKLAPPFKQAEFDILYGVGISREGGLLDLGVEHGIVRKSGAWYTYEGTQLGQGKENARNFLRANPDMADEIEKRIKQKLGIPTGDDSAPAEEAAKDEAKAASTTKRTTRKTTASTSASKSAAPSTDA

SEQ ID NO: 1195 - protein, 73 aa, Torulaspora globosa, strain CBS 764
  Tgl VMA C-extein
CGERGNEMAEVLMEFPELYTEKNGKKEPIMKRTTLVANTSNMPVAAREASIYTGITLAEYFRDQGRDVSMIAD

SEQ ID NO: 1196 - protein, 673 aa, Thermococcus hydrothermalis
  Thy Pol-1 C-extein
SYYGYYGYARARWYCKECAESVTAWGRDYIETTIHEIEERFGFKVLYADSVTGETEIIIKRNGKVEFVAIEELFQRVDYRIGEKEYCVLEGVEALTLDNRGRLVWKSVPYVMRHRTNKRIYRVWFTNSWYLDVTEDHSLIGYMNTSKVKPGKPLKERLVEVKPGELGESVKSLITPNRAIAHGIRVNPIAVKLWELIGLLVGDGNWGGQSNWAKYNVGLSLGLDKEEIEEKILKPLKNTGIISNYYDKSKKGDVSILSKWLARFMVRYFKDESGSKRIPEFMFNLPREYIEAFLRGLFSADGTVSLRKGVPEVRLTSVNPELSSSVRKLLWLVGVSNSMFVETNPNRYLGKESGTHSVHVRIKDKHRFAERIGFLLDRKATKLSENLGGHTSKKRAYKYDFDLVYPKKVEEIAYDGYVYDIEVEGTHRFFANGILVHNTDGFFATIPGADAETVKKKAKEFLKYINAKLPGLLELEYEGFYVRGFFVTKKKYAVIDEEGKITTRGLEIVRRDWSEIAKETQARVLEAILRHGDVEEAVRIVKDVTEKLSKYEVPPEKLVIHEQITRELKDYKATGPHVAIAKRLAARGIKIRPGTVISYIVLKGSGRIGDRAIPFDEFDPTKHRYDAEYYIENQVLPAVERILKAFGYKKEELRYQKTRQVGLGAWLKLKGKK

SEQ ID NO: 1197 - protein, 235 aa, Thermococcus hydrothermalis
  Thy Pol-2 C-extein
TDGFFATIPGADAETVKKKAKEFLKYINAKLPGLLELEYEGFYVRGFFVTKKKYAVIDEEGKITTRGLEIVRRDWSEIAKETQARVLEAILRHGDVEEAVRIVKDVTEKLSKYEVPPEKLVIHEQITRELKDYKATGPHVAIAKRLAARGIKIRPGTVISYIVLKGSGRIGDRAIPFDEFDPTKHRYDAEYYIENQVLPAVERILKAFGYKKEELRYQKTRQVGLGAWLKLKGKK

SEQ ID NO: 1198 - protein, 655 aa, Thermococcus kodakaraensis KOD1
  Tko CDC21-1 C-extein
TAAAVRDEFTGSWVLEAGVLVLADGGFALIDEFDKMSDRDRSAIHEALEQQSYHHDFELLLADGRKVKIGELVDKLIEKNRDRVILGKDTEILPVEDIELLAYDLEKREIVKVKADRVSRHKAPERFIKLRFSNGREITVTPEHPVMVWENGEITEKPAEKITPGDIALGVLRYPIQVDGKFKERYRDMREAEDYQDYLYSRGVVSKIKRTGIYFTVEKARRALPRELVKPLINAGKILRVTQTPKERASFNQKLVRENIIEGYLQRIIERMDELERLSREDPAKALELLPKTQLYYKYGITYGKLKKLAEARNSWAEGIIQSAVAERISLAKRELEEFFKWWNANVNFLKVKCVEEIKNDRWEWVYDVTVEPHHLFVSHGLVLHNTISISKAGITATLNSRTTVIAAANPKFGRFNRHKSLPEQLDLPPTLLSRFDLIFLLLDEPDEKVDASIAEHILKVRRGEAEAVTPKIPYDLLKKYIAYARKNVHPVLSREAMEEIKRYYVKMRKGLRRGDEDGVQPIPITARQLEALIRLSEAHARMRLSETVTREDARAAIEIIEAMMKTIAVDEEGNLDVSILEVGKSSKKINKIEKLVDIIKSLESEGEFGAPEEKVIEAAKQAGIGTKADIEKLLNELKSDGRVYEPRAGFYRVI

SEQ ID NO: 1199 - protein, 269 aa, Thermococcus kodakaraensis KOD1
  Tko CDC21-2 C-extein
TISISKAGITATLNSRTTVIAAANPKFGRFNRHKSLPEQLDLPPTLLSRFDLIFLLLDEPDEKVDASIAEHILKVRRGEAEAVTPKIPYDLLKKYIAYARKNVHPVLSREAMEEIKRYYVKMRKGLRRGDEDGVQPIPITARQLEALIRLSEAHARMRLSETVTREDARAAIEIIEAMMKTIAVDEEGNLDVSILEVGKSSKKINKIEKLVDIIKSLESEGEFGAPEEKVIEAAKQAGIGTKADIEKLLNELKSDGRVYEPRAGFYRVI

SEQ ID NO: 1200 - protein, 578 aa, Thermococcus kodakaraensis KOD1
  Tko IF2 C-extein
TTLLDRIRHTNVAGKEAGGITQHIGATEVPIDVVKQLAGPLIKLWKGEIKLPGLLFIDTPGHEAFTSLRARGGSLADLAVLVVDINEGFQPQTIESIEILRRYRTPFIVAANKIDRIKGWVIEEDEPFLVNIKKQDQRAIQELETKLWELIGKFYEMGFNANRFDRVQDFTRELAIVPISAKYGIGIPELLVLIAGLSQKYLEEKLKIEVEGPARGTILEVREEVGLGTTIDVIIYDGTLRKDDTIVVGGKDKAIVTKIRALLKPKPLDEIRDPRFRFDQVDEVTAAAGVKIAAPGLEEALAGSPVIAARSEEEIEKAKQEILSQIQSVVINTGKIGVIVKADTLGSLEALSKELQEKGIPIRKADVGNISKTDVMEALSVKEEEPKYGVVLGFNVKVNEDAEEVANAKGVPIFVGNIIYKLIEDYEAWVKEEEEKRKRELLKNVTFPGVIRLYPDERYVFRRSKPAIVGVEVLEGRIRPGVTLIKETGEKVGVIKSIKNKNDFVQEAKKGDAVAIAIEGAIVGRHIHPGETLYVDLSKNDVIILAKQLKDELEETDIKALKMTAKVKAKEDPFWRAV

SEQ ID NO: 1201 - protein, 164 aa, Thermococcus kodakaraensis KOD1
  Tko KlbA C-extein
CMGTIHANSARETIVRLESPPMSVPRIMIPALDIILMQVRFHSRKKGTIRRVTEIAEVSGLEGESIQLNTLYKYDPAKDELVPTGVPSRTVNILAQHTGMSVREIELEIEKRRLILEWMVEKGIRDIDKVGYYIRQFYIDEEWLLNKISAESDVETSKQIQALM

SEQ ID NO: 1202 - protein, 520 aa, Thermococcus kodakaraensis KOD1
  Tko LHR C-extein
SSTSLELGIDIGTIDLVVLIGSPKSVNRALQRIGRAGHRLHDVSKGVILALDRDDLVEVTVLAHNARNRRLDRVRIPKNPLDVLVQHIVGMALYKVWEVEEAYRLVRRAYPFHELPFEDFMSVLKYLSGGYEGLEDRKVYAKIWLEDGKFGRRGKMTRAIYYMNVGTIPDEAKIRVYTMDKQMIGTVEEEFAERLMPGDIFVLAGRTYEFIKSRGNKIYVVPREGAKPTIPAWFSEMLPLSFDLALDVQRFRREVKELLNKKRAKSLLMRKYGIDERAAKAIIAYFREQERYSTVPDDETVLVEEVEKENTYEYFFHTLIGRRANDALSRAFAYAVGRRKGVNVGIALNDNGFLLRVPKEARLSEAEIRELFQLEDLREILKRALDNTELLKRRFRHVANRGFLILRRYVGGSKRLGRQQVIAVSLLKVLKEHYPDFPLLKEVYREIMEDKMDVENAELFLSWVREGKIKVVFERNELPSPFAFNLEAIGSSDVVLMEDRREMIKALYRKIMALIGENAT

SEQ ID NO: 1203 - protein, 904 aa, Pyrococcus/ Thermococcus kodakaraensis KOD1
  Tko Pol-1 (Pko Pol-1) C-extein
SLYPSIIITHNVSPDTLNREGCKEYDVAPQVGHRFCKDFPGFIPSLLGDLLEERQKIKKKMKATIDPIERKLLDYRQRAIKILANSILPEEWLPVLEEGEVHFVRIGELIDRMMEENAGKVKREGETEVLEVSGLEVPSFNRRTNKAELKRVKALIRHDYSGKVYTIRLKSGRRIKITSGHSLFSVRNGELVEVTGDELKPGDLVAVPRRLELPERNHVLNLVELLLGTPEEETLDIVMTIPVKGKKNFFKGMLRTLRWIFGEEKRPRTARRYLRHLEDLGYVRLKKIGYEVLDWDSLKNYRRLYEALVENVRYNGNKREYLVEFNSIRDAVGIMPLKELKEWKIGTLNGFRMRKLIEVDESLAKLLGYYVSEGYARKQRNPKNGWSYSVKLYNEDPEVLDDMERLASRFFGKVRRGRNYVEIPKKIGYLLFENMCGVLAENKRIPEFVFTSPKGVRLAFLEGYSSAMATSTEQETQALNEKRALANQLVLLLNSVGVSAVKLGHDSGVYRVYINEELPFVKLDKKKNAYYSHVIPKEVLSEVFGKVFQKNVSPQTFRKMVEDGRLDPEKAQRLSWLIEGDVVLDRVESVDVEDYDGYVYDLSVEDNENFLVGFGLVYAHNSYYGYYGYARARWYCKECAESVTAWGREYITMTIKEIEEKYGFKVIYSDTDGFFATIPGADAETVKKKAMEFLNYINAKLPGALELEYEGFYKRGFFVTKKKYAVIDEEGKITTRGLEIVRRDWSEIAKETQARVLEALLKDGDVEKAVRIVKEVTEKLSKYEVPPEKLVIHEQITRDLKDYKATGPHVAVAKRLAARGVKIRPGTVISYIVLKGSGRIGDRAIPFDEFDPTKHKYDAEYYIENQVLPAVERILRAFGYRKEDLRYQKTRQVGLSAWLKPKGT

SEQ ID NO: 1204 - protein, 283 aa, Pyrococcus/Thermococcus kodakaraensis KOD1
  Tko Pol-2 (Pko Pol-2) C-extein
SYYGYYGYARARWYCKECAESVTAWGREYITMTIKEIEEKYGFKVIYSDTDGFFATIPGADAETVKKKAMEFLNYINAKLPGALELEYEGFYKRGFFVTKKKYAVIDEEGKITTRGLEIVRRDWSEIAKETQARVLEALLKDGDVEKAVRIVKEVTEKLSKYEVPPEKLVIHEQITRDLKDYKATGPHVAVAKRLAARGVKIRPGTVISYIVLKGSGRIGDRAIPFDEFDPTKHKYDAEYYIENQVLPAVERILRAFGYRKEDLRYQKTRQVGLSAWLKPKGT

SEQ ID NO: 1205 - protein, 361 aa, Thermococcus kodakaraensis KOD1
  Tko Pol-II C-extein
CDGDEDAVMLLLDALLNFSKYYLPEKRGGKMDAPLVVTTRLDPREVDSEVHNMDVVRYYPLEFYKATYELKSPKEVKVIERVEDRLGKPEMYEGIKFTHDTDDIGLGPKMSLYKQLGDMEEKVARQLALAERIRAVDEHHVAETIINSHLVPDLRGNLRSFTRQEFRCVKCNTKYRRPPLTGKCPKCGGKIVLTVSKGAIEKYLPTAKMLVTKYRVKDYTRQRICITEKDIKTLFENVFPEKQRTLMGFSADICEKMVKERTGHSNGKNGYLDEFNGKNGKASKKSGSLASKLSGKGKEPSKKKESAKPKRSEKVKNLTSFEAAAKNEQARGTAGNAKKAESEKPKRKKRKGISLDEFFGS

SEQ ID NO: 1206 - protein, 262 aa, Thermococcus kodakaraensis KOD1
  Tko r-Gyr C-extein
CTYHRTDSTHVSNTGIEVAKEYITQELGEKYFKPRPWGEEGAHEAIRPTRPIDTGRLMQLIRDGIIQLPRNLTRNHYRLYDMIFRRFMTSQMTPAKILYEKAVINAGVGKAELEGYVEIIEDGWTRLRSPPLRELPKLEKGMKLKVVEAKKWKAPKVSLYTQGDIIALMKERKIGRPSTYAKIVETLMRRGYVVETKGRKKLLPTEKGIKVYHYLVSKYRDLVSEERTRELEEIMDRIEEGIEDYIKVLGELYSEIQRYVSG

SEQ ID NO: 1207 - protein, 205 aa, Thermococcus kodakaraensis KOD1
  Tko RadA C-extein
TQLAHTLAVMVQKPPEEGGLGGSVIWIDTENTFRPERIKQIAENRGLDPEETLKNIYVARAFNSNHQMLLVEKAEEIIKEKAESDRPVKLLVVDSLMAHFRAEYVGRGTLAERQQKLAKHLADLHRLADLYDIAVFVTNQVQAKPDAFFGDPTRPVGGHILAHSATLRVYLRKGKAGKRVARLIDSPHLPEGEAVFRITEKGVED

SEQ ID NO: 1208 - protein, 991 aa, Thermococcus kodakaraensis KOD1
  Tko RIR1-1 C-extein
TGLNFSKLRPEGDLVGTTTGAASGPVSFMHLIDAVSDVIKQGGVRRGANMGILEVWHPDIEKFIHAKEKNTGTNVLSNFNISVGLWEDFWEALKEGKRYPLINPRTGEKVKEIDPKSLFEELAYMAWAKADPGVVFFDVINRRNVLEPAKGEKIRATNPCVVGDTRVLTPEGYIKAEELFSLAKERGKKEAVAVEGIAEEGEPYAYSVEVLLPGEEEVKYETVHGKALAIADPVAVPAYVWKVGKKKVARVRTKQGYEITATLDHRLMTSEGWKEVGELKPGDEILLPRFEIEEDFGSESIGEDLAFVLGWFIGDGYLNVNDKRAWFYFNAEKEEDIAWKIREILAKHFGIKAEPHRYGNQIKLGVRGEAYRWLESIMGSNEKRVPEIIYRLKPREIAAFLRGLFSADGYVDNDNAVRLTSKDRGLLRDVQDLLLLFGILSKIYERPYSSEFKYTTKDGEERTYRAEGYYELVIANYSRKLFAEKIGFEGYKMEKLSLQKTKIDEPVVTVESVEVLGEEIVYDFTVPEHHSYISNGFMSHNCGEEPLYEYESCNLASINLAKFVKYDDEGKPYFDWDEYAYVIQKVAKYLDNAIDVNKFPLPEIDRNTKLTRRIGVGMMGLADALFKLGIPYNSKEGFDFMRKATEYLTFYAYKRSVEAAKERGPFPLYEKTRYKDGELPVEGFYHREIWNLPWDELVEEIKKYGVRNGMVTTCPPTGSVSMIADTSSGIEPIFALVYKKSVTVGEFYYVDPVFEAELKKRGLWSDEILKKISDNYGSVQGLEEIPEDMQRVFVTAMDIHWLDHILAQANIQLWLTDSASKTINMPNDATVEDVKAAYLLAYKLGCKGVTVYRDGSLSVQVYSVEGEKKKRVPAKPSDYAVEKLKTIVEAEPWLSRFINVEAILNGTNGKEKSAQAGGLTFSVSHVSAVKPAHEHSHHAKRPDIPEEKIRELLGVAYCPVCYEKDGELVELRMESGCATCPRCGWSKCVIS

SEQ ID NO: 1209 - protein, 450 aa, Thermococcus kodakaraensis KOD1
  Tko RIR1-2 C-extein
CGEEPLYEYESCNLASINLAKFVKYDDEGKPYFDWDEYAYVIQKVAKYLDNAIDVNKFPLPEIDRNTKLTRRIGVGMMGLADALFKLGIPYNSKEGFDFMRKATEYLTFYAYKRSVEAAKERGPFPLYEKTRYKDGELPVEGFYHREIWNLPWDELVEEIKKYGVRNGMVTTCPPTGSVSMIADTSSGIEPIFALVYKKSVTVGEFYYVDPVFEAELKKRGLWSDEILKKISDNYGSVQGLEEIPEDMQRVFVTAMDIHWLDHILAQANIQLWLTDSASKTINMPNDATVEDVKAAYLLAYKLGCKGVTVYRDGSLSVQVYSVEGEKKKRVPAKPSDYAVEKLKTIVEAEPWLSRFINVEAILNGTNGKEKSAQAGGLTFSVSHVSAVKPAHEHSHHAKRPDIPEEKIRELLGVAYCPVCYEKDGELVELRMESGCATCPRCGWSKCVIS

SEQ ID NO: 1210 - protein, 403 aa, Thermococcus kodakaraensis KOD1
  Tko TopA C-extein
CSYPRTSSQKLPKNLNFRSIIQNLAKLPEYKPFAHELLGKESLKPVEGKKDDPAHPAIYPTGELPKPGELTKDEGNLYDLIVRRFLALFMEPAVRETMKVVINSNNHRFILSGARTLKEGWLKVYGKYVKFDEVILPAFKEGEPVKVIQIKREKKKTKPPARYSPAAVIKKMEDLGIGTKATRAQILETLYQRGYIEGKKKIKVTPLGMRVVEALEKNVPDIVSVELTRAFEEKMEEIMAGKADKDQVIEESKEQLIKILQVFKEKELDIGKMLLESTGTGVTTSKEAAKKTGAVKDANDEEKSDGKAGEGTTPKAERKPLVVGKCPKCGGDLVIRYNRKTGKRFVGCSNWPKCDVTYPILQRGQVIPTEKTCCNGAPVVKIREKGREYEICLDMNCKDWKKK

SEQ ID NO: 1211 - protein, 670 aa, Thermococcus litoralis
  Tli Pol-1 C-extein
SYYGYMGYPKARWYSKECAESVTAWGRHYIEMTIREIEEKFGFKVLYADSVSGESEIIIRQNGKIRFVKIKDLFSKVDYSIGEKEYCILEGVEALTLDDDGKLVWKPVPYVMRHRANKRMFRIWLTNSWYIDVTEDHSLIGYLNTSKTKTAKKIGERLKEVKPFELGKAVKSLICPNAPLKDENTKTSEIAVKFWELVGLIVGDGNWGGDSRWAEYYLGLSTGKDAEEIKQKLLEPLKTYGVISNYYPKNEKGDFNILAKSLVKFMKRHFKDEKGRRKIPEFMYELPVTYIEAFLRGLFSADGTVTIRKGVPEIRLTNIDADFLREVRKLLWIVGISNSIFAETTPNRYNGVSTGTYSKHLRIKNKWRFAERIGFLIERKQKRLLEHLKSARVKRNTIDFGFDLVHVKKVEEIPYEGYVYDIEVEETHRFFANNILVHNTDGFYATIPGEKPELIKKKAKEFLNYINSKLPGLLELEYEGFYLRGFFVTKKRYAVIDEEGRITTRGLEVVRRDWSEIAKETQAKVLEAILKEGSVEKAVEVVRDVVEKIAKYRVPLEKLVIHEQITRDLKDYKAIGPHVAIAKRLAARGIKVKPGTIISYIVLKGSGKISDRVILLTEYDPRKHKYDPDYYIENQVLPAVLRILEAFGYRKEDLRYQSSKQTGLDAWLKR

SEQ ID NO: 1212 - protein, 231 aa, Thermococcus litoralis
  Tli Pol-2 C-extein
TDGFYATIPGEKPELIKKKAKEFLNYINSKLPGLLELEYEGFYLRGFFVTKKRYAVIDEEGRITTRGLEVVRRDWSEIAKETQAKVLEAILKEGSVEKAVEVVRDVVEKIAKYRVPLEKLVIHEQITRDLKDYKAIGPHVAIAKRLAARGIKVKPGTIISYIVLKGSGKISDRVILLTEYDPRKHKYDPDYYIENQVLPAVLRILEAFGYRKEDLRYQSSKQTGLDAWLKR

SEQ ID NO: 1213 - protein, 73 aa, Torulaspora pretoriensis, strain CBS 5080
  Tpr VMA C-extein
CGERGNEMAEVLMEFPELHTEKNGKMEPIMKRTTLVANTSNMPVAAREASIYTGITLAEYFRDQGRDVAMIAD

SEQ ID NO: 1214 - protein, 673 aa, Thermococcus species GE8
  Tsp-GE8 Pol-1 C-extein
SYYGYYGYAKARWYCRECAESVTAWGRSYIETTIREIEEKFGFKVLYADSVAGNTEVIIRRNGKVEFVPIEKLFQRVDYRIGEKEYCALEGVEALTLDNRGRLVWRKVPYIMRHKTNKKIYRVWFTNSWYLDVTEDHSLIGYLNTSKVKSEKPLKERLVEVKPRELGEKVKSLITLNRAIARSIKANPIAVRLWELIGLLVGDGNWGGHSKWAKYYVGLSCGLDKAEIEEKVLRPLKEAGIISNYYGKSKKGDVSILSKWLAGFMVKYFKDENGNKRIPSFMFNLPREYIEAFLRGLFSADGTVSLRRGIPEIRLTSVNRELSNEVRKLLWLVGVSNSMFTETTPNKYLGNESGTRSIHVRIKNKHRFAKRIGFLLDRKATKLSDNLREHTNKKMAYRYDFDLVYPKKIEEINYDRYVYDIEVEGTHRFFANGILVHNTDGFFATIPGADAETVKKKAMEFLKYINAKLPGLLELEYEGFYVRGFFVTKKKYAVIDEEGKITTRGLEIVRRDWSEIAKETQARVLEAILKHGDVEEAVRIVKEVTEKLSKYEVPPEKLVIHEQITRDLKDYKATGPHVAVAKRLAARGIKIRPGTVISYIVLKGSGRIGDRAIPFDEFDPAKHKYDAEYYIENQVLPAVERILRAFGYRKEDLRYQKTKQVGLGAWLKVKGKK

SEQ ID NO: 1215 - protein, 235 aa, Thermococcus species GE8
  Tsp-GE8 Pol-2 C-extein
TDGFFATIPGADAETVKKKAMEFLKYINAKLPGLLELEYEGFYVRGFFVTKKKYAVIDEEGKITTRGLEIVRRDWSEIAKETQARVLEAILKHGDVEEAVRIVKEVTEKLSKYEVPPEKLVIHEQITRDLKDYKATGPHVAVAKRLAARGIKIRPGTVISYIVLKGSGRIGDRAIPFDEFDPAKHKYDAEYYIENQVLPAVERILRAFGYRKEDLRYQKTKQVGLGAWLKVKGKK

SEQ ID NO: 1216 - protein, 673 aa, Thermococcus species GT
  Tsp-GT Pol-1 C-extein
SYYGYYGYARARWYCKECAESVTAWGRDYIETTIHEIEERFGFKVLYADSVTGETEIIIKRNGKVEFVAIEELFQRVDYRIGEKEYCVLEGVEALTLDNRGRLVWKSVPYVMRHRTNKRIYRVWFTNSWYLDVTEDHSLIGYMNTSKVKPGKPLKERLVEVKPGELGESVKSLITPNRAIAHGIRVNPIAVKLWELIGLLVGDGNWGGQSNWAKYYVGLSLGLDKEEIEEKILKPLKNTGIISNYYDRSKKGDVSILSKWLARFMVRYFKDESGSKRIPEFMFNLPREYIEAFLRGLFSADGTVSLRKGVPEVRLTSVNPELSSSVRKLLWLVGVSNSMFVETNPNRYLGKESGTHSVHVRIKDKHRFAERIGFLLDRKATKLSENLGGHTSKKRAYKYDFDLVYPKKVEEIAYDGYVYDIEVEGTHRFFANGILVHNTDGFFATIPGADAETVKKKAKEFLKYINAKLPGLLELEYEGFYVRGFFVTKKKYAVIDEEGKITTRGLEIVRRDWSEIAKETQARVLEAILRHGDVEEAVRIVKDVTEKLSKYEVPPEKLVIHEQITRELKDYKATGPHVAIAKRLAARGIKIRPGTVISYIVLKGSGRIGDRAIPFDEFDPTKHRYDAEYYIENQVLPAVERILKAFGYKNEDLRYQKTRQVGLGAWLKPKGKK

SEQ ID NO: 1217 - protein, 1307 aa, Thermococcus species GT
  Tsp-GT Pol-2 C-extein
TDGFFATIPGADAETVKKKAKEFLKYINAKLPGLLELEYEGFYVRGFFVTKKKYAVIDEEGKITTRGLEIVRRDWSEIAKETQARVLEAILRHGDVEEAVRIVKDVTEKLSKYEVPPEKLVIHEQITRELKDYKATGPHVAIAKRLAARGIKIRPGTVISYIVLKGSGRIGDRAIPFDEFDPTKHRYDAEYYIENQVLPAVERILKAFGYKNEDLRYQKTRQVGLGAWLKPKGKKMILDVDYITEDGKPVIRIFKKEKGEFKIEYDRDFEPYIYALLKDDSAIEEVKKITAERHGKVVKVKRAEKVNKKFLGRPVEVWKLYFEHPQDVPAIRDKIRAHPGVIDIYEYDIPFAKRYLIDKGLVPMEGDEELKMLAFDIETLYHEGEEFGTGPILMISYADENEARVITWKKIDLPYVDVVSTEKEMIKRFLRVVKEKDPDVLITYNGDNFDFAYLKKRCEKLGISFTLGRDGSEPKIHRMGDRFAVEVKGRIHFDLYPVIRRTINLPTYTLEVVYEAVFGKPKEKVYAEEITLAWESGEGLERVARYSMEDAKATYELGREFFPMEAQLSRLIGQSLWDVSRSSTGNLVEWFLLRKAYERNELAPNKPDEGELARRRNSYAGGYVKEPERGLWDNIVYLDFRSLYPSIIITHNVSPDTLNREGCKEYDVAPQVGHKFCKDFPGFIPSLLGNLLEERQKIKRKMKATIDPLEKKLLDYRQRAIKILANSILPDEWVPLLIDGRLKLTRIGDFVDNAMDEGNPLKSNETEVLEVLGINAISFNRKTKISEVRPVRALIRHRYRGKVYSIKLSSGRKIKVTEGHSLFTVKNGELVEVTGGKVKPGDFIAVPRRINLPERHERINLADVLLNLPEEETADVVLTIPTKGRKNFFRGMLRTLRWIFEGEKRPRTARRYLEHLQKLGYVRLKKIGYEVLDEKALRKYRALYEVLAEKVRYNGNKREYLVAFNDLRDKIEFMPEEELREWKIGTLNGFRMEPFIEVNEDLAKLLGYYVSEGYAGKQRNQKNGWSYSVKLYNNDQKVLDDMERLASKFFGKVRRGKNYVEMPKKMAYVLFKSLCGTLAENKRVPEVIFTSPENVRWAFLEGYFIGDGDLHPSKRVRLSTKSETLVNGLIILLNSLGISAVKIRFESGVYRVLVNEELSFLGNSKKKNAYYSHVIPKEILEDVFEKRFQKNVSPKKLREKIKRGELNQEKAKRISWLLEGDIVLDRVEEVEVEDYNGYVYDLSVEENENFLAGFGMIYAHNSYYGYYGYPRARWYCKECAESVTAWGREYIEMTIREIEEKYGFKVL

SEQ ID NO: 1218 - protein, 877 aa, Thermus thermophilus HB27
  Tth-HB27 DnaE-1 C-extein
SMGKKKVEEMKSHRERFVQGAKERGVPEEEANRLFDMLEAFANYGFNKCLPARARVVDWCTGRVVRVGEIVRGEAKGVWVVSLDEARLRLVPRPVVAAFPSGKAQVYALRTATGRVLEATANHPVYTPEGWRPLGTLAPGDYVALPRHLSYRPSLHLEGHELDLLGFALAEGHLRHPSGVYLYTSSEEELAAMEEALRAFPNTRIRVVWRRGVAHVYVGRVDRRQEAGAVAFLRRMGLLGLDAKTKRLPEAVFGLPPEEVARFLGRLWTGDGGVDPKGRLIHYATASKELAWGVQHLLLRLGLQSRLVEKRFSGGYKGYAVYLLGGLEAARRFAETVGPYLVGKRRQDLEALLASWEKAGRSTGDVLPLAFLEEVRAAVAEVAQGQVADLLREAGLAEGLLCLGRGRRGLSRATVGRLAALTGSLALLRLAEAEVYWDRVEAVEPLGEEEVFDLTVEGTHTFVAEDVIVHNSHAAAYSLLSYQTAYVKAHYPVEFMAALLSVERHDSDKVAEYIRDARAMGIEVLPPDVNRSGFDFLVQGRQILFGLSAVKNVGEAAAEAILRERERGGPYRSLGDFLKRLDEKVLNKRTLEFLIKAGALDGFGERARLLASLEGLLKWAAENREKARSGMMGLFSEVEEPPLAEAAPLDEITRLRYEKEALGIYVSGHPILRYPGLRETATCTLEELPHLARDLPPRSRVLLAGMVEEVVRKPTKSGGMMARFVLSDETGALEAVAFGRAYDQVSPRLKEDTPVLVLAEVEREEGGVRVLAQAVWTYEELEQVPRALEVEVEASLLDDRGVAHLKSLLDEHAGTLPLYVRVQGAFGEALLALREVRVGEEALGALEAAGFRAYLLPDREVLLQGGQAGEAQEAVPF

SEQ ID NO: 1219 - protein, 406 aa, Thermus thermophilus HB27
  Tth-HB27 DnaE-2 C-extein
SHAAAYSLLSYQTAYVKAHYPVEFMAALLSVERHDSDKVAEYIRDARAMGIEVLPPDVNRSGFDFLVQGRQILFGLSAVKNVGEAAAEAILRERERGGPYRSLGDFLKRLDEKVLNKRTLEFLIKAGALDGFGERARLLASLEGLLKWAAENREKARSGMMGLFSEVEEPPLAEAAPLDEITRLRYEKEALGIYVSGHPILRYPGLRETATCTLEELPHLARDLPPRSRVLLAGMVEEVVRKPTKSGGMMARFVLSDETGALEAVAFGRAYDQVSPRLKEDTPVLVLAEVEREEGGVRVLAQAVWTYEELEQVPRALEVEVEASLLDDRGVAHLKSLLDEHAGTLPLYVRVQGAFGEALLALREVRVGEEALGALEAAGFRAYLLPDREVLLQGGQAGEAQEAVPF

SEQ ID NO: 1220 - protein, 1064 aa, Thermus thermophilus HB27
  Tth-HB27 RIR1-1 C-extein
TRRGAGMATLSIEHPDLLDFLTAKDLDREKAEGDISTFNISVLATDRFLEAVEKDELWPVTPIEVPGKYYPYPVEGPYTGKLPSLPEREDGAKAIPLYGGKVPARWLWHEIAWHAWATGEPGLIFVDRVNALSALKGLGERYQIRSTNPCFVGSTRIPTERGLVPIEELAREGGSFYLVTDNRAPFGGRGAPLPGHGTAVRKAVRAFFTGVKPVVRLRTREGLEVTLTPDHLLLTPEGYREAGKLRPGEKILVQSGEGLFPKEESLPAQALAVVHERVATAGGRGGRGRADVRAQYRNLPTRWSRELGVALGWLLGDGYLREDGVGFYFSRKDFADLAWLPDLLRDWFGPGTLQETRSNTFHLHFNRIPAEFFQALGVKAARATEKRVPESLFRAPREAVVGFLQGLFSADGSVQINENKQDATVRLASSSLALLQDVQLLLLNLGILGKIHKRREAARKALPDGKGGLREYPVAPQYELILGGENRDRFAEVVGFLQEEKQSKLLAFLRHRPRGSYRKPFLATVASVEPAGEAPVYDLTEPVTHSLIANGLVAHNCGEIPLTVGEPCDLGAMNLAAYVKDGEFQMEEFRRDVRTAIRFLDNVLDVNKFALPDNEMAAKSLRRLGLGLMGLADALIKMGLPYDSEEARRKVYEIVSVMREEAIRASEALAEERGPFPLYEEHREYFQSLGIRPRRNVALLTVAPTGTTSMLMGVSSGIEPVFSPFVWRRIGGEYKPLLHPLFVELMEAYPPAPGYAKDGKWDWEKIIEEIQKDGHGSVQNLPFVPEAIRKVFLCAHDVHPLDHVRMQGAVQRAFDAEGYAANSISKTINLPNHAAVEDVEAAYTEAYRTGCKGITVYRDGSREFQVLTVKKEAKEEKAGKTPEEAKPQEARAHEPGRPVYERPGRLMGFTDMVKLFAPDGSKRSFLVTVNTLEGRPIEVILTSGKAGDEANADSEALGRVVSIALQYGVPPEAIVRTLRGINGGLYGTYQGRLVSSKADLIAVALETVPQMAPGAPEDLSSAPVLSGGGIALAGAAPCPSCGEKALVREEGCWKCQACGYAKCG

SEQ ID NO: 1221 - protein, 508 aa, Thermus thermophilus HB27
  Tth-HB27 RIR1-2 C-extein
CGEIPLTVGEPCDLGAMNLAAYVKDGEFQMEEFRRDVRTAIRFLDNVLDVNKFALPDNEMAAKSLRRLGLGLMGLADALIKMGLPYDSEEARRKVYEIVSVMREEAIRASEALAEERGPFPLYEEHREYFQSLGIRPRRNVALLTVAPTGTTSMLMGVSSGIEPVFSPFVWRRIGGEYKPLLHPLFVELMEAYPPAPGYAKDGKWDWEKIIEEIQKDGHGSVQNLPFVPEAIRKVFLCAHDVHPLDHVRMQGAVQRAFDAEGYAANSISKTINLPNHAAVEDVEAAYTEAYRTGCKGITVYRDGSREFQVLTVKKEAKEEKAGKTPEEAKPQEARAHEPGRPVYERPGRLMGFTDMVKLFAPDGSKRSFLVTVNTLEGRPIEVILTSGKAGDEANADSEALGRVVSIALQYGVPPEAIVRTLRGINGGLYGTYQGRLVSSKADLIAVALETVPQMAPGAPEDLSSAPVLSGGGIALAGAAPCPSCGEKALVREEGCWKCQACGYAKCG

SEQ ID NO: 1222 - protein, 877 aa, Thermus thermophilus HB8
  Tth-HB8 DnaE-1 C-extein
SMGKKKVEEMKSHRERFVQGAKERGVPEEEANRLFDMLEAFANYGFNKCLPARARVVDWCTGRVVRVGEIVRGEAKGVWVVSLDEARLRLVPRPVVAAFPSGKAQVYALRTATGRVLEATANHPVYTPEGWRPLGTLAPGDYVALPRHLSYRPSLHLEGHELDLLGFALAEGHLRHPSGVYLYTSSEEELAAMEEALRAFPNTRIRVVWRRGVAHVYVGRVDRRQEAGAVAFLRRMGLLGLDAKTKRLPEAVFGLPPEEVARFLGRLWTGDGGVDPKGRLIHYATASKELAWGVQHLLLRLGLQSRLVEKRFSGGYKGYAVYLLGGLEAARRFAETVGPYLVGKRRQDLEALLASWEKAGRSTRDVLPLAFLEEVRAAVAEVAQGQVADLLREAGLAEGLLCLGRGRRGLSRATVGRLAALTGSLALLRLAEAEVYWDRVEAVEPLGEEEVFDLTVEGTHTFVAEDVIVHNSHAAAYSLLSYQTAYVKAHYPVEFMAALLSVERHDSDKVAEYIRDARAMGIEVLPPDVNRSGFDFLVQGRQILFGLSAVKNVGEAAAEAILRERERGGPYRSLGDFLKRLDEKVLNKRTLESLIKAGALDGFGERARLLASLEGLLKWAAENREKARSGMMGLFSEVEEPPLAEAAPLDEITRLRYEKEALGIYVSGHPILRYPGLRETATCTLEELPHLARDLPPRSRVLLAGMVEEVVRKPTKSGGMMARFVLSDETGALEAVAFGRAYDQVSPRLKEDTPVLVLAEVEREEGGVRVLAQAVWTYEELEQVPRALEVEVEASLLDDRGVAHLKSLLDEHAGTLPLYVRVQGAFGEALLALREVRVGEEALGALEAAGFRAYLLPDREVLLQGGQAGEAQEAVPF

SEQ ID NO: 1223 - protein, 406 aa, Thermus thermophilus HB8
  Tth-HB8 DnaE-2 C-extein
SHAAAYSLLSYQTAYVKAHYPVEFMAALLSVERHDSDKVAEYIRDARAMGIEVLPPDVNRSGFDFLVQGRQILFGLSAVKNVGEAAAEAILRERERGGPYRSLGDFLKRLDEKVLNKRTLESLIKAGALDGFGERARLLASLEGLLKWAAENREKARSGMMGLFSEVEEPPLAEAAPLDEITRLRYEKEALGIYVSGHPILRYPGLRETATCTLEELPHLARDLPPRSRVLLAGMVEEVVRKPTKSGGMMARFVLSDETGALEAVAFGRAYDQVSPRLKEDTPVLVLAEVEREEGGVRVLAQAVWTYEELEQVPRALEVEVEASLLDDRGVAHLKSLLDEHAGTLPLYVRVQGAFGEALLALREVRVGEEALGALEAAGFRAYLLPDREVLLQGGQAGEAQEAVPF

SEQ ID NO: 1224 - protein, 908 aa, Thermus thermophilus HB8
  Tth-HB8 RIR1-2 C-extein
CGEIPLTVGEPCDLGAMNLAAYVKDGEFQMEEFRRDVRTAIRFLDNVLDVNKFALPDNEMAAKKLRRLGLGLMGLADALIKMGLPYDSEEARRKVYEIVSAMREEAIRASEALAEERGPFPLYEEHREYFQSLGIKPRRNVALLTVAPTGTTSMLMGVSSGIEPVFSPFVWRRIGGEYKPLLHPLFVELMEAYPPAPGFAKEGKWDWEKIVEEIQKDGHGSVQNLPFVPEAIRRVFLSAHDIHPLDHVRMQGAVQRAFDAEGYAANSISKCIAKGTLIPTSKGLIPIEEIAPPHPEDTFVPVEGLYTAEGYRITAHYYAGKKRGVRIRLDNGAELVGAWESHRLLTPEGWRLMRELKPGDVVLGKLVPSHGEGGLPIPEAKGLSLRTNARNLPLPERMSEDLALFLGMLAADGSTVEATGFVGIATKDPDVERVFQEVAGRLFGVEPKCTVDKRTGVRNLYLTSRRLVRFVEALIGKGAAQKRVPSQILQGSPGEKLAFLRGLTLDGYVHANMGLVVYEGRSQRLAYEAAELARSFGLPKVYQGRKKVLAPKETYYVHSVAVSGPLQELLEPLEAHKRAKVEARYKVFVPQEVLAATRVGTHHPGYVSLKSVRQREAQAVYNTTAERLGWPTEILAHRVVEVEEVGEVEMYDIEVEEVHRYVVNGLISHNTINLPNHATVEDVEAAYTEAYRTGCKGITVYRDGSREFQVLTVKKEAKEEKAGKTPEEAKPQEARAHEPGRPVYERPGRLMGFTDMVKLFAPDGSKRSFLVTVNTLEGRPIEVILTSGKAGDEANADSEALGRVVSIALQYGVPPEAIVRTLRGINGGLYGTYQGRLVSSKADLIAVALETVPQMAPGAPEDLSSAPVLSGGGIALAGAAPCPSCGEKALVREEGCWKCQACGYAKCG

SEQ ID NO: 1225 - protein, 444 aa, Thermococcus zilligii
  Tzi Pol C-extein
SYYGYYGYANARWYCRECAESVTAWGRQYIETTMREIEEKFGFKVLYADSVTGDTEVIIRRNGRIEFVPIERLFEHVDYRVGEKEYCVLSGVEALTLDNRGRLVWKKVPYVMRHKTDKRIYRVWVTNSRYLNVTEDHSLIGYLDGKYLEIRPADIPKDPDIKLITLASPGLQEVALKTPSRLEEITYEGYVYDIEVEGTHRFFANGILVHNTDGFFATIPGADAETVKKKAKEFLNYINPRLPGLLELEYEGFYRRGFFVTKKKYAVIDEEDKITTRGLEIVRRDWSEIAKETQARVLEAILKHGDVEEAVRIVKEVTEKLSRYEVPPEKLVIYEQITRDLRDYRATGPHVAVAKRLAARGIKIRPGTVISYIVLKGPGRVGDRAIPFDEFDPAKHRYDAEYYIENQVLPAVERILRAFGYRKEDLRYQKTKQAGLGAWLKPKT

SEQ ID NO: 1226 - protein, 199 aa, uncultured archaeon GZfos13E1
  Unc-ERS PFL C-extein
CHNPELVDPKQFSNLISEKKIFSFLEERRGKLDAVEITGGEPTLQPDLIDFMCDLKKLDYLVKLDSNGSKPEILSEAIEHEIVDYIAMDVKAPLERYQEITNSRVDPVKIEHSIELIMSSGLDYEFRTTVVKSQLGKRDILEIGRLIRGSKRYILQKFVPVKVLDKKFLDEVFFYTDDELESLRNAVKRKGYVAECKVR

SEQ ID NO: 1227 - protein, 318 aa, uncultured archaeon GZfos9C4
  Unc-ERS RIR1 C-extein
CGEQPLLPYDSCNLGSINVSKFVKSGDGEIDWERLREVICISVKFLDDVIDVNRYPLPEIEKMTKANRKIGLGIMGFAELLIKLGIAYDSKDALSTGEKLMQFITNEARRCSTELGLERGSFSNFELSVWNSKYEAMRNATVTTIAPTGTISIIAGCSSGIEPIFAVAFVRNVMGGMLEINKLFEEIAKERGFYSKELITEIAKCGSVQDIDGVPGDIKRVFVTALDISPEWHVRMQAAFQKYTDNATSKTVNLPSDATWGDVKKVFLLAYKLKCKGITIYRYGSKEQVLSLDIPKLMLEEYVCADSEYTGECRICSV

SEQ ID NO: 1228 - protein, 287 aa, uncultured archaeon (Rice Cluster I)
  Unc-MetRFS MCM2 C-extein
SISIAKAGILATLKCRCAILGAANPKLGRFDPYESIPDQINMPPSLMSRFDLIFILQDKPEEKRDTNIAGHILKSHFAGELHEHRKNNPASHVTDDMVRTAMSTIKPQIDPKLFRKYVAYAKRKVFPIMTEDAKAQIINFYLGLRKQGEGDNAPIPVTARQLEGLVRLAEASARMRLSDKVTADDVARTIRITMTSLKQVGMDTETGRLDIDVLQVGVAKSQRDRIKNLKHLIEDLSREYEGSVPVDVLIDRAVESGMPKDKVEKELKKLREIGEIFEPKSGHLSLS

SEQ ID NO: 1229 - protein, 68 aa, Vanderwaltozyma polyspora, formerly Kluyveromyces polysporus, strain CBS 2163
  Vpo VMA C-extein
CGERGNEMAEVLMEFPELFTEMNGKKEPIMKRTTLVANTSNMPVAAREASIYTGITLAEYFRDQGKHV

SEQ ID NO: 1230 - protein, 19 aa, Wiseana iridescent virus
  WIV RIR1 C-extein
CSEIILPTDENRTAVCCLA

SEQ ID NO: 1231 - protein, 73 aa, Zygosaccharomyces bailii, strain CBS 685
  Zba VMA C-extein
CGERGNEMAEVLMEFPELFTEKNGRKEPIMKRTTLVANTSNMPVAAREASIYTGITLAEYFRDQGKNISMIAD

SEQ ID NO: 1232 - protein, 73 aa, Zygosaccharomyces rouxii, strain CBS 688
  Zro VMA C-extein
CGERGNEMAEVLMEFPELFTEVNGHKEPIMKRTTLVANTSNMPVAAREASIYTGITLAEYFRDQGKNISMIAD

SEQ ID NO: 1233 - protein, 6 aa, Aquifex aeolicus strain VF5
  Aae RIR2 Casette
DELCHV

SEQ ID NO: 1234 - protein, 6 aa, Acidovorax avenae subsp. citrulli AAC00-1
  Aave Hyp-1721 Casette
ALFTFK

SEQ ID NO: 1235 - protein, 6 aa, Acidovorax avenae subsp. citrulli AAC00-1
  Aave RIR Casette
TNPCGE

SEQ ID NO: 1236 - protein, 6 aa, Aspergillus brevipes FRR2439
  Abr PRP8 Casette
ERASGF

SEQ ID NO: 1237 - protein, 6 aa, Acidothermus cellulolyticus 11B
  Ace RIR1 Casette
VSACFI

SEQ ID NO: 1238 - protein, 6 aa, Alkalilimnicola ehrlichei MLHE-1
  Aeh DnaB-1 Casette
MGKTTW

SEQ ID NO: 1239 - protein, 6 aa, Alkalilimnicola ehrlichei MLHE-1
  Aeh DnaB-2 Casette
LRESGA

SEQ ID NO: 1240 - protein, 6 aa, Alkalilimnicola ehrlichei MLHE-1
  Aeh Rir1 Casette
TNPCGE

SEQ ID NO: 1241 - protein, 6 aa, Acyrthosiphon pisum secondary endosymbiot phage 1
  AP-APSE1 dpol Casette
GKSCEN

SEQ ID NO: 1242 - protein, 6 aa, Aeropyrum pernix K1
  Ape APE0745 Casette
TTQSAF

SEQ ID NO: 1243 - protein, 6 aa, Acanthomoeba polyphaga Mimivirus
  APMV Pol Casette
YGDTDS

SEQ ID NO: 1244 - protein, 6 aa, Burkholderia cenocepacia
  Bce DnaB Casette
MGKTAF

SEQ ID NO: 1245 - protein, 6 aa, Batrachochytrium dendrobatidis JEL197
  Bde-JEL197 RPB2 Casette
GMVCPA

SEQ ID NO: 1246 - protein, 6 aa, B.subtilis M1918 (prophage)
  BsuP-M1918 RIR1 Casette
SNLCSE

SEQ ID NO: 1247 - protein, 6 aa, B.subtilis strain 168 Sp beta c2 prophage
  BsuP-SPBc2 RIR1 Casette
SNLCSE

SEQ ID NO: 1248 - protein, 6 aa, Clostridium botulinum phage C-St
  CbP-C-St RNR Casette
ASCCRL

SEQ ID NO: 1249 - protein, 6 aa, Clostridium botulinum phage D
  CbP-D RNR Casette
ASCCRL

SEQ ID NO: 1250 - protein, 6 aa, Coxiella burnetii
  Cbu DnaB Casette
LRESGA

SEQ ID NO: 1251 - protein, 6 aa, Chlorobium chlorochromatii CaD3
  Cch RIR1 Casette
SNPCSE

SEQ ID NO: 1252 - protein, 6 aa, Chlamydomonas eugametos (chloroplast)
  Ceu ClpP Casette
QPESSI

SEQ ID NO: 1253 - protein, 6 aa, Candida glabrata
  Cgl VMA Casette
YVGCGE

SEQ ID NO: 1254 - protein, 6 aa, Chilo iridescent virus
  CIV RIR1 Casette
SNLCSE

SEQ ID NO: 1255 - protein, 6 aa, Cryptococcus laurentii strain CBS139
  Cla PRP8 Casette
EKSSGF

SEQ ID NO: 1256 - protein, 6 aa, Filobasidiella neoformans (Cryptococcus neoformans) Serotype A, PHLS_8104
  Cne-A PRP8 (Fne-A PRP8) Casette
EKASGF

SEQ ID NO: 1257 - protein, 6 aa, Cryptococcus neoformans (Filobasidiella neoformans), Serotype AD, CBS132).
  Cne-AD PRP8 (Fne-AD PRP8) Casette
EKASGF

SEQ ID NO: 1258 - protein, 6 aa, Cryptococcus neoformans var. neoformans JEC21
  Cne-JEC21 PRP8 Casette
EKASGF

SEQ ID NO: 1259 - protein, 6 aa, Clostridium thermocellum
  Cth TerA Casette
NGKSEL

SEQ ID NO: 1260 - protein, 6 aa, Candida tropicalis (nucleus)
  Ctr VMA Casette
YVGCGE

SEQ ID NO: 1261 - protein, 6 aa, Chlorella virus NY2A infects Chlorella NC64A, which infects Paramecium bursaria
  CV-NY2A RIR1 Casette
SNLCNE

SEQ ID NO: 1262 - protein, 6 aa, Crocosphaera watsonii WH 8501 (Synechocystis sp. WH 8501)
  Cwa PEP Casette
GRTCHA

SEQ ID NO: 1263 - protein, 6 aa, Crocosphaera watsonii WH 8501 (Synechocystis sp. WH 8501)
  Cwa RIR1 Casette
VNLCTE

SEQ ID NO: 1264 - protein, 6 aa, Costelytra zealandica iridescent virus
  CZIV RIR1 Casette
SNLCSE

SEQ ID NO: 1265 - protein, 6 aa, Dictyostelium discoideum strain AX4 (nucleus)
  Ddi RPC2 Casette
GEACGL

SEQ ID NO: 1266 - protein, 6 aa, Deinococcus geothermalis DSM11300
  Dge DnaB Casette
MGKTAF

SEQ ID NO: 1267 - protein, 6 aa, Desulfitobacterium hafniense DCB-2
  Dha-DCB2 RIR1 Casette
TNPCGE

SEQ ID NO: 1268 - protein, 6 aa, Desulfitobacterium hafniense Y51
  Dha-Y51 RIR1 Casette
TNPCGE

SEQ ID NO: 1269 - protein, 6 aa, Debaryomyces hansenii CBS767
  Dhan GLT1 Casette
MRRCHL

SEQ ID NO: 1270 - protein, 6 aa, Debaryomyces hansenii CBS767
  Dhan VMA Casette
YIGCGE

SEQ ID NO: 1271 - protein, 6 aa, Desulfovibrio vulgaris subsp. vulgaris DP4
  Dvul ParB Casette
HEPCWY

SEQ ID NO: 1272 - protein, 6 aa, Emericella nidulans (anamorph: Aspergillus nidulans) FGSC A4
  Eni-FGSCA4 PRP8 Casette
EKASGF

SEQ ID NO: 1273 - protein, 6 aa, Ferroplasma acidarmanus, taxon:97393 and taxon 261390
  Fac-Fer1 RIR1 Casette
TNPCGE

SEQ ID NO: 1274 - protein, 6 aa, Ferroplasma acidarmanus
  Fac-Fer1 SufB (Fac Pps1) Casette
IEGCTA

SEQ ID NO: 1275 - protein, 6 aa, Frankia alni ACN14a
  Fal DnaB Casette
VGKSTL

SEQ ID NO: 1276 - protein, 6 aa, Guillardia theta (plastid)
  Gth DnaB Casette
ESGSIE

SEQ ID NO: 1277 - protein, 6 aa, Gloeobacter violaceus, PCC 7421
  Gvi DnaB Casette
MGKTAF

SEQ ID NO: 1278 - protein, 6 aa, Gloeobacter violaceus, PCC 7421
  Gvi RIR1-2 Casette
TNPCGE

SEQ ID NO: 1279 - protein, 6 aa, Heterosigma akashiwo virus 01
  HaV01 Pol Casette
YGDTDS

SEQ ID NO: 1280 - protein, 6 aa, Halorhodospira halophila SL1
  Hhal DnaB-1 Casette
MGKTTV

SEQ ID NO: 1281 - protein, 6 aa, Haloarcula marismortui ATCC 43049
  Hma CDC21 Casette
TGKSQM

SEQ ID NO: 1282 - protein, 6 aa, Haloarcula marismortui ATCC 43049
  Hma Pol-II Casette
RRNCDG

SEQ ID NO: 1283 - protein, 6 aa, Haloarcula marismortui ATCC 43049
  Hma PolB Casette
IMNSLY

SEQ ID NO: 1284 - protein, 6 aa, Haloarcula marismortui ATCC 43049
  Hma TopA Casette
GTKTRH

SEQ ID NO: 1285 - protein, 6 aa, Halobacterium salinarum NRC-1
  Hsa-NRC1 CDC21 Casette
TGKSQM

SEQ ID NO: 1286 - protein, 6 aa, Halobacterium salinarum NRC-1
  Hsa-NRC1 Pol-II Casette
RRNCDG

SEQ ID NO: 1287 - protein, 6 aa, Haloferax volcanii DS70
  Hvo PolB Casette
YGDTDS

SEQ ID NO: 1288 - protein, 6 aa, Haloquadratum walsbyi DSM 16790
  Hwa GyrB Casette
AGGSAK

SEQ ID NO: 1289 - protein, 6 aa, Haloquadratum walsbyi DSM 16790
  Hwa MCM-2 Casette
AGLTAA

SEQ ID NO: 1290 - protein, 6 aa, Haloquadratum walsbyi DSM 16790
  Hwa MCM-3 Casette
KMRSED

SEQ ID NO: 1291 - protein, 6 aa, Haloquadratum walsbyi DSM 16790
  Hwa MCM-4 Casette
EQQSIS

SEQ ID NO: 1292 - protein, 6 aa, Haloquadratum walsbyi DSM 16790
  Hwa MCM-1 Casette
TGKSAM

SEQ ID NO: 1293 - protein, 6 aa, Haloquadratum walsbyi DSM 16790
  Hwa Pol-II-1 Casette
RRNCDG

SEQ ID NO: 1294 - protein, 6 aa, Haloquadratum walsbyi DSM 16790
  Hwa Pol-II-2 Casette
RGGSMD

SEQ ID NO: 1295 - protein, 6 aa, Haloquadratum walsbyi DSM 16790
  Hwa PolB-1 Casette
GWNCDD

SEQ ID NO: 1296 - protein, 6 aa, Haloquadratum walsbyi DSM 16790
  Hwa PolB-3 Casette
YGDTDS

SEQ ID NO: 1297 - protein, 6 aa, Haloquadratum walsbyi DSM 16790
  Hwa RIR1-1 Casette
VFQSGG

SEQ ID NO: 1298 - protein, 6 aa, Haloquadratum walsbyi DSM 16790
  Hwa RIR1-2 Casette
PTGTTS

SEQ ID NO: 1299 - protein, 6 aa, Haloquadratum walsbyi DSM 16790
  Hwa rPol A'' Casette
TQMTMN

SEQ ID NO: 1300 - protein, 6 aa, Haloquadratum walsbyi DSM 16790
  Hwa Top6B Casette
REQSRG

SEQ ID NO: 1301 - protein, 6 aa, Invertebrate iridescent virus 6
  IIV6 RIR1 Casette
SNLCSE

SEQ ID NO: 1302 - protein, 6 aa, Kazachstania exigua, formerly Saccharomyces exiguus, strain CBS379
  Kex-CBS379 VMA Casette
YVGCGE

SEQ ID NO: 1303 - protein, 6 aa, Kluyveromyces lactis IFO1267
  Kla-IFO1267 VMA Casette
YVGCGE

SEQ ID NO: 1304 - protein, 6 aa, Kluyveromyces lactis NRRL Y-1140
  Kla-NRRLY1140 VMA Casette
YVGCGE

SEQ ID NO: 1305 - protein, 6 aa, Kineococcus radiotolerans SRS30216
  Kra DnaB Casette
ESGSIE

SEQ ID NO: 1306 - protein, 6 aa, Listonella pelagia phage phiHSIC
  LP-phiHSIC helicase Casette
ATGCGK

SEQ ID NO: 1307 - protein, 6 aa, Mycobacterium avium
  Mav DnaB Casette
VGKSTL

SEQ ID NO: 1308 - protein, 6 aa, Mycobacterium avium 104
  Mav-104 DnaB Casette
VGKSTL

SEQ ID NO: 1309 - protein, 6 aa, Mycobacterium avium subsp. paratuberculosis str. k10
  Mav-PT DnaB Casette
VGKSTL

SEQ ID NO: 1310 - protein, 6 aa, Mycobacterium bovis subsp. bovis AF2122/97
  Mbo-AF2122 DnaB Casette
ESGSLE

SEQ ID NO: 1311 - protein, 6 aa, Mycobacterium bovis subsp. bovis AF2122/97
  Mbo Pps1 Casette
VEGCTA

SEQ ID NO: 1312 - protein, 6 aa, Mycobacterium bovis subsp. bovis AF2122/97
  Mbo RecA Casette
KNKCSP

SEQ ID NO: 1313 - protein, 6 aa, Methylococcus capsulatus Bath, prophage MuMc02
  Mca MupF Casette
GFNCRC

SEQ ID NO: 1314 - protein, 6 aa, Methylococcus capsulatus Bath
  Mca RIR1 Casette
TNPCAE

SEQ ID NO: 1315 - protein, 6 aa, Mycobacterium chitae
  Mch RecA Casette
MFGSPE

SEQ ID NO: 1316 - protein, 6 aa, Methanoculleus marisnigri JR1
  Memar MCM2 Casette
EQQSIS

SEQ ID NO: 1317 - protein, 6 aa, Methanoculleus marisnigri JR1
  Memar Pol-II Casette
RRNCDG

SEQ ID NO: 1318 - protein, 6 aa, Mycobacterium fallax
  Mfa RecA Casette
MFGSPE

SEQ ID NO: 1319 - protein, 6 aa, Mycobacterium flavescens Fla0
  Mfl GyrA Casette
MRYTEA

SEQ ID NO: 1320 - protein, 6 aa, Mycobacterium flavescens, ATCC14474
  Mfl-ATCC14474 RecA Casette
MFGSPE

SEQ ID NO: 1321 - protein, 6 aa, Mycobacterium gastri
  Mga GyrA Casette
MRYTEA

SEQ ID NO: 1322 - protein, 6 aa, Mycobacterium gastri
  Mga RecA Casette
MFGSPE

SEQ ID NO: 1323 - protein, 6 aa, Mycobacterium gastri
  Mga SufB (Mga Pps1) Casette
QYESEV

SEQ ID NO: 1324 - protein, 6 aa, Methanospirillum hungateii JF-1
  Mhu Pol-II Casette
RRNCDG

SEQ ID NO: 1325 - protein, 6 aa, Methanococcus jannaschii (Methanocaldococcus jannaschii DSM 2661)
  Mja GF-6P Casette
IGHSRW

SEQ ID NO: 1326 - protein, 6 aa, Methanococcus jannaschii (Methanocaldococcus jannaschii DSM 2661)
  Mja Helicase Casette
PTLSAG

SEQ ID NO: 1327 - protein, 6 aa, Methanococcus jannaschii (Methanocaldococcus jannaschii DSM 2661)
  Mja Hyp-1 Casette
PAHCFT

SEQ ID NO: 1328 - protein, 6 aa, Methanococcus jannaschii (Methanocaldococcus jannaschii DSM 2661)
  Mja IF2 Casette
HGKTTL

SEQ ID NO: 1329 - protein, 6 aa, Methanococcus jannaschii (Methanocaldococcus jannaschii DSM 2661)
  Mja Klba Casette
HDGCSG

SEQ ID NO: 1330 - protein, 6 aa, Methanococcus jannaschii (Methanocaldococcus jannaschii DSM 2661)
  Mja PEP Casette
GLTCHA

SEQ ID NO: 1331 - protein, 6 aa, Methanococcus jannaschii (Methanocaldococcus jannaschii DSM 2661)
  Mja Pol-1 Casette
DFRSLY

SEQ ID NO: 1332 - protein, 6 aa, Methanococcus jannaschii (Methanocaldococcus jannaschii DSM 2661)
  Mja Pol-2 Casette
LANSVY

SEQ ID NO: 1333 - protein, 6 aa, Methanococcus jannaschii (Methanocaldococcus jannaschii DSM 2661)
  Mja r-Gyr Casette
LGLCTY

SEQ ID NO: 1334 - protein, 6 aa, Methanococcus jannaschii (Methanocaldococcus jannaschii DSM 2661)
  Mja RFC-1 Casette
VGKTTA

SEQ ID NO: 1335 - protein, 6 aa, Methanococcus jannaschii (Methanocaldococcus jannaschii DSM 2661)
  Mja RFC-2 Casette
LNASDE

SEQ ID NO: 1336 - protein, 6 aa, Methanococcus jannaschii (Methanocaldococcus jannaschii DSM 2661)
  Mja RFC-3 Casette
ILSCNY

SEQ ID NO: 1337 - protein, 6 aa, Methanococcus jannaschii (Methanocaldococcus jannaschii DSM 2661)
  Mja RNR-1 Casette
GGQTIF

SEQ ID NO: 1338 - protein, 6 aa, Methanococcus jannaschii (Methanocaldococcus jannaschii DSM 2661)
  Mja RNR-2 Casette
AESTAG

SEQ ID NO: 1339 - protein, 6 aa, Methanococcus jannaschii (Methanocaldococcus jannaschii DSM 2661)
  Mja rPol A' Casette
LCVCPP

SEQ ID NO: 1340 - protein, 6 aa, Methanococcus jannaschii (Methanocaldococcus jannaschii DSM 2661)
  Mja RtcB (Mja Hyp-2) Casette
DINCGV

SEQ ID NO: 1341 - protein, 6 aa, Methanococcus jannaschii (Methanocaldococcus jannaschii DSM 2661)
  Mja TFIIB Casette
MTYTIH

SEQ ID NO: 1342 - protein, 6 aa, Methanococcus jannaschii (Methanocaldococcus jannaschii DSM 2661)
  Mja UDP GD Casette
GGSCFP

SEQ ID NO: 1343 - protein, 6 aa, Methanopyrus kandleri AV19
  Mka CDC48 Casette
VGESEK

SEQ ID NO: 1344 - protein, 6 aa, Methanopyrus kandleri AV19
  Mka RFC Casette
LNASDE

SEQ ID NO: 1345 - protein, 6 aa, Methanopyrus kandleri AV19
  Mka RtcB Casette
DINCGV

SEQ ID NO: 1346 - protein, 6 aa, Methanopyrus kandleri AV19
  Mka VatB Casette
TNYCEA

SEQ ID NO: 1347 - protein, 6 aa, Mycobacterium kansasii
  Mkas GyrA Casette
MRYTEA

SEQ ID NO: 1348 - protein, 6 aa, Mycobacterium leprae, strain TN
  Mle DnaB Casette
VGKSTL

SEQ ID NO: 1349 - protein, 6 aa, Mycobacterium leprae, strain TN
  Mle RecA Casette
MFGSPE

SEQ ID NO: 1350 - protein, 6 aa, Bacteriophage Aaphi23
  MP-Aaphi23 MupF Casette
DFNCRC

SEQ ID NO: 1351 - protein, 6 aa, Mycobacteriophage Bethlehem
  MP-Be DnaB Casette
QDQTKN

SEQ ID NO: 1352 - protein, 6 aa, Mycobacteriophage Bethlehem
  MP-Be gp51 Casette
NHDSRA

SEQ ID NO: 1353 - protein, 6 aa, Mycobacteriophage Catera
  MP-Catera gp206 Casette
ELKTQN

SEQ ID NO: 1354 - protein, 6 aa, Mycobacteriophage CJW1
  MP-Mcjw1 DnaB Casette
NGKTEL

SEQ ID NO: 1355 - protein, 6 aa, Mycobacteriophage Omega
  MP-Omega DnaB Casette
EFKTAV

SEQ ID NO: 1356 - protein, 6 aa, Mycobacteriophage U2
  MP-U2 gp50 Casette
NHDSRA

SEQ ID NO: 1357 - protein, 6 aa, Mycobacterium shimodei
  Msh RecA Casette
MFGSPE

SEQ ID NO: 1358 - protein, 6 aa, Mycobacterium species KMS
  Msp-KMS DnaB Casette
MGKSTL

SEQ ID NO: 1359 - protein, 6 aa, Mycobacterium species KMS
  Msp-KMS GyrA Casette
MRYTEA

SEQ ID NO: 1360 - protein, 6 aa, Mycobacterium species MCS
  Msp-MCS DnaB Casette
MGKSTL

SEQ ID NO: 1361 - protein, 6 aa, Mycobacterium species MCS
  Msp-MCS GyrA Casette
MRYTEA

SEQ ID NO: 1362 - protein, 6 aa, Methanothermobacter thermautotrophicus (Methanobacterium thermoautotrophicum)
  Mth RIR1 Casette
TNPCGE

SEQ ID NO: 1363 - protein, 6 aa, Mycobacterium thermoresistibile
  Mthe RecA Casette
MFGSPE

SEQ ID NO: 1364 - protein, 6 aa, Mycobacterium tuberculosis strains H37Rv & CDC1551
  Mtu SufB (Mtu Pps1) Casette
VEGCTA

SEQ ID NO: 1365 - protein, 6 aa, Mycobacterium tuberculosis, CDC1551
  Mtu-CDC1551 DnaB Casette
ESGSLE

SEQ ID NO: 1366 - protein, 6 aa, Mycobacterium tuberculosis H37Rv
  Mtu-H37Rv DnaB Casette
ESGSLE

SEQ ID NO: 1367 - protein, 6 aa, Mycobacterium tuberculosis H37Rv,Also CDC1551
  Mtu-H37Rv RecA Casette
KNKCSP

SEQ ID NO: 1368 - protein, 6 aa, Mycobacterium tuberculosis So93/sub_species="Canetti"
  Mtu-So93 RecA Casette
KNKCSP

SEQ ID NO: 1369 - protein, 6 aa, Mycobacterium vanbaalenii PYR-1
  Mvan DnaB Casette
MGKSTL

SEQ ID NO: 1370 - protein, 6 aa, Nocardia farcinica IFM 10152
  Nfa DnaB Casette
ESGSLE

SEQ ID NO: 1371 - protein, 6 aa, Nocardia farcinica IFM 10152
  Nfa RIR1 Casette
PVSCFL

SEQ ID NO: 1372 - protein, 6 aa, Neosartorya fischeri
  Nfi PRP8 Casette
ERASGF

SEQ ID NO: 1373 - protein, 6 aa, Neosartorya glabra FRR2163
  Ngl-FR2163 PRP8 Casette
ERASGF

SEQ ID NO: 1374 - protein, 6 aa, Neosartorya glabra FRR1833
  Ngl-FRR1833 PRP8 Casette
ERASGF

SEQ ID NO: 1375 - protein, 6 aa, Natronomonas pharaonis DSM 2160
  Nph CDC21 Casette
TGKSQL

SEQ ID NO: 1376 - protein, 6 aa, Natronomonas pharaonis DSM 2160
  Nph PolB-1 Casette
DLKSLY

SEQ ID NO: 1377 - protein, 6 aa, Natronomonas pharaonis DSM 2160
  Nph PolB-2 Casette
IMNSLY

SEQ ID NO: 1378 - protein, 6 aa, Natronomonas pharaonis DSM 2160
  Nph rPol A'' Casette
TQMTMN

SEQ ID NO: 1379 - protein, 6 aa, Nostoc punctiforme
  Npu GyrB Casette
DIGCGM

SEQ ID NO: 1380 - protein, 6 aa, Neosartorya quadricincta, strain NRRL 4175
  Nqu PRP8 Casette
ERASGF

SEQ ID NO: 1381 - protein, 6 aa, Nocardioides species JS614
  Nsp-JS614 DnaB Casette
MGKSTL

SEQ ID NO: 1382 - protein, 6 aa, Nocardioides species JS614
  Nsp-JS614 TOPRIM Casette
FFHCFG

SEQ ID NO: 1383 - protein, 6 aa, Nostoc species PCC7120, (Anabaena sp. PCC7120)
  Nsp-PCC7120 RIR1 Casette
IRRSAG

SEQ ID NO: 1384 - protein, 6 aa, Pyrococcus abyssi
  Pab CDC21-1 Casette
VAKSQL

SEQ ID NO: 1385 - protein, 6 aa, Pyrococcus abyssi
  Pab CDC21-2 Casette
AGLTAA

SEQ ID NO: 1386 - protein, 6 aa, Pyrococcus abyssi
  Pab IF2 Casette
HGKTTL

SEQ ID NO: 1387 - protein, 6 aa, Pyrococcus abyssi
  Pab KlbA Casette
HDGCMG

SEQ ID NO: 1388 - protein, 6 aa, Pyrococcus abyssi
  Pab Lon Casette
PFQSGG

SEQ ID NO: 1389 - protein, 6 aa, Pyrococcus abyssi
  Pab Moaa Casette
CWYCFF

SEQ ID NO: 1390 - protein, 6 aa, Pyrococcus abyssi
  Pab Pol-II Casette
RRNCDG

SEQ ID NO: 1391 - protein, 6 aa, Pyrococcus abyssi
  Pab RFC-1 Casette
VGKTTA

SEQ ID NO: 1392 - protein, 6 aa, Pyrococcus abyssi
  Pab RFC-2 Casette
ILSCNY

SEQ ID NO: 1393 - protein, 6 aa, Pyrococcus abyssi
  Pab RIR1-1 Casette
GGGTGL

SEQ ID NO: 1394 - protein, 6 aa, Pyrococcus abyssi
  Pab RIR1-2 Casette
GAASGP

SEQ ID NO: 1395 - protein, 6 aa, Pyrococcus abyssi
  Pab RIR1-3 Casette
TNPCGE

SEQ ID NO: 1396 - protein, 6 aa, Pyrococcus abyssi
  Pab RtcB (Pab Hyp-2) Casette
DINCGV

SEQ ID NO: 1397 - protein, 6 aa, Pyrococcus abyssi
  Pab VMA Casette
SGKTVT

SEQ ID NO: 1398 - protein, 6 aa, Pyrococcus furiosus
  Pfu KlbA Casette
HDGCMG

SEQ ID NO: 1399 - protein, 6 aa, Pyrococcus furiosus
  Pfu RIR1-1 Casette
GGGTGL

SEQ ID NO: 1400 - protein, 6 aa, Pyrococcus furiosus
  Pfu RIR1-2 Casette
TNPCGE

SEQ ID NO: 1401 - protein, 6 aa, Pyrococcus furiosus
  Pfu VMA Casette
SGKTVT

SEQ ID NO: 1402 - protein, 6 aa, Pyrococcus horikoshii OT3
  Pho CDC21-1 Casette
VAKSQL

SEQ ID NO: 1403 - protein, 6 aa, Pyrococcus horikoshii OT3
  Pho CDC21-2 Casette
AGLTAA

SEQ ID NO: 1404 - protein, 6 aa, Pyrococcus horikoshii OT3
  Pho IF2 Casette
HGKTTL

SEQ ID NO: 1405 - protein, 6 aa, Pyrococcus horikoshii OT3
  Pho KlbA Casette
HDGCMG

SEQ ID NO: 1406 - protein, 6 aa, Pyrococcus horikoshii OT3
  Pho LHR Casette
AVVSST

SEQ ID NO: 1407 - protein, 6 aa, Pyrococcus horikoshii OT3
  Pho Lon Casette
PFQSGG

SEQ ID NO: 1408 - protein, 6 aa, Pyrococcus horikoshii OT3
  Pho Pol I Casette
LANSYY

SEQ ID NO: 1409 - protein, 6 aa, Pyrococcus horikoshii OT3
  Pho Pol-II Casette
RRNCDG

SEQ ID NO: 1410 - protein, 6 aa, Pyrococcus horikoshii OT3
  Pho r-Gyr Casette
AGLCTY

SEQ ID NO: 1411 - protein, 6 aa, Pyrococcus horikoshii OT3
  Pho RadA Casette
SGKTQL

SEQ ID NO: 1412 - protein, 6 aa, Pyrococcus horikoshii OT3
  Pho RFC Casette
VGKTTA

SEQ ID NO: 1413 - protein, 6 aa, Pyrococcus horikoshii OT3
  Pho RIR1 Casette
TNPCGE

SEQ ID NO: 1414 - protein, 6 aa, Pyrococcus horikoshii OT3
  Pho VMA Casette
SGKTVT

SEQ ID NO: 1415 - protein, 6 aa, Pelodictyon luteolum DSM 273
  Plut RIR1 Casette
SNPCSE

SEQ ID NO: 1416 - protein, 6 aa, Polaromonas naphthalenivorans CJ2
  Pna RIR1 Casette
TNPCGE

SEQ ID NO: 1417 - protein, 6 aa, Polaromonas species JS666
  Posp-JS666 RIR1 Casette
TNPCGE

SEQ ID NO: 1418 - protein, 6 aa, Pseudomonas aeruginosa phage phiEL
  PP-PhiEL Helicase Casette
SGKTFT

SEQ ID NO: 1419 - protein, 6 aa, Pseudomonas aeruginosa phage phiEL
  PP-PhiEL ORF11 Casette
QGKTVS

SEQ ID NO: 1420 - protein, 6 aa, Pseudomonas aeruginosa phage phiEL
  PP-PhiEL ORF39 Casette
AGKSLT

SEQ ID NO: 1421 - protein, 6 aa, Pseudomonas aeruginosa phage phiEL
  PP-PhiEL ORF40 Casette
FGKTYM

SEQ ID NO: 1422 - protein, 6 aa, Porphyra purpurea (chloroplast)
  Ppu DnaB Casette
ESGSIE

SEQ ID NO: 1423 - protein, 6 aa, Pyrococcus species GB-D
  Psp-GBD Pol Casette
LANSYY

SEQ ID NO: 1424 - protein, 6 aa, Pichia stipitis CBS 6054, taxon:322104
  Pst VMA Casette
YVGCGE

SEQ ID NO: 1425 - protein, 6 aa, Pseudomonas syringae pv. tomato str. DC3000
  Psy Fha Casette
GPCTGP

SEQ ID NO: 1426 - protein, 6 aa, Picrophilus torridus, DSM 9790
  Pto VMA Casette
SGKTVI

SEQ ID NO: 1427 - protein, 6 aa, Porphyra yezoensis chloroplast, cultivar U-51
  Pye DnaB Casette
ESGSIE

SEQ ID NO: 1428 - protein, 6 aa, Roseovarius species 217
  Rsp Rir1 Casette
TNPCGE

SEQ ID NO: 1429 - protein, 6 aa, Salmonella phage SETP12
  SaP-SETP12 dpol Casette
GKACEL

SEQ ID NO: 1430 - protein, 6 aa, Salmonella phage SETP3
  SaP-SETP3 dpol Casette
GKACEL

SEQ ID NO: 1431 - protein, 6 aa, Salmonella phage SETP3
  SaP-SETP3 Helicase Casette
SGKSST

SEQ ID NO: 1432 - protein, 6 aa, Salmonella phage SETP5
  SaP-SETP5 dpol Casette
GKACEL

SEQ ID NO: 1433 - protein, 6 aa, Streptomyces avermitilis MA-4680
  Sav Helicase Casette
SGKTMV

SEQ ID NO: 1434 - protein, 6 aa, Saccharomyces castellii, strain CBS4309
  Sca-CBS4309 VMA Casette
YVGCGE

SEQ ID NO: 1435 - protein, 6 aa, Saccharomyces cariocanus, strain="UFRJ 50791
  Scar VMA Casette
YVGCGE

SEQ ID NO: 1436 - protein, 6 aa, Saccharomyces cerevisiae (nucleus)
  Sce VMA Casette
YVGCGE

SEQ ID NO: 1437 - protein, 6 aa, Saccharomyces cerevisiae strain DH1-1A
  Sce-DH1-1A VMA Casette
YVGCGE

SEQ ID NO: 1438 - protein, 6 aa, Saccharomyces cerevisiae OUT7091
  Sce-OUT7091 VMA Casette
YVGCGE

SEQ ID NO: 1439 - protein, 6 aa, Saccharomyces cerevisiae OUT7112
  Sce-OUT7112 VMA Casette
YVGCGE

SEQ ID NO: 1440 - protein, 6 aa, Saccharomyces dairenensis, strain CBS 421
  Sda VMA Casette
YVGCGE

SEQ ID NO: 1441 - protein, 6 aa, Staphylococcus epidermidis RP62A
  Sep RIR1 Casette
SNLCTE

SEQ ID NO: 1442 - protein, 6 aa, Saccharomyces exiguus, strain="IFO1128"
  Sex-IFO1128 VMA Casette
YVGCGE

SEQ ID NO: 1443 - protein, 6 aa, Stigeoclonium helveticum, strain UTEX 441
  She RPB2 (RpoB) Casette
KIHSRS

SEQ ID NO: 1444 - protein, 6 aa, Shigella flexneri 5 str. 8401
  ShP-Sfv-5 Primase Casette
HGKTEV

SEQ ID NO: 1445 - protein, 6 aa, Staphylothermus marinus F1
  Smar 1471 Casette
AMATGH

SEQ ID NO: 1446 - protein, 6 aa, Staphylothermus marinus F1
  Smar MCM2 Casette
EQQTVS

SEQ ID NO: 1447 - protein, 6 aa, Saccharomyces pastorianus IFO11023
  Spa VMA Casette
YVGCGE

SEQ ID NO: 1448 - protein, 6 aa, Spirulina platensis, strain C1
  Spl DnaX Casette
IDECHM

SEQ ID NO: 1449 - protein, 6 aa, Salinibacter ruber DSM 13855
  Sru DnaB Casette
MGKTAF

SEQ ID NO: 1450 - protein, 6 aa, Salinibacter ruber DSM 13855
  Sru PolBc Casette
LINSFY

SEQ ID NO: 1451 - protein, 6 aa, Synechocystis species, strain PCC6803
  Ssp DnaX Casette
IDECHM

SEQ ID NO: 1452 - protein, 6 aa, Synechocystis species, strain PCC6803
  Ssp GyrB Casette
AGGSAK

SEQ ID NO: 1453 - protein, 6 aa, Synechococcus species JA-2-3B'a(2-13)
  Ssp-JA2 DnaB Casette
ESGSIE

SEQ ID NO: 1454 - protein, 6 aa, Synechococcus species JA-2-3B'a(2-13)
  Ssp-JA2 RIR1 Casette
LNPCGE

SEQ ID NO: 1455 - protein, 6 aa, Synechococcus species JA-3-3Ab
  Ssp-JA3 DnaB Casette
ESGSIE

SEQ ID NO: 1456 - protein, 6 aa, Synechococcus species JA-3-3Ab
  Ssp-JA3 RIR1 Casette
LNPCGE

SEQ ID NO: 1457 - protein, 6 aa, Staphylococcus phage Twort
  StP-Twort ORF6 Casette
GGKTEC

SEQ ID NO: 1458 - protein, 6 aa, Saccharomyces unisporus, strain CBS 398
  Sun VMA Casette
YVGCGE

SEQ ID NO: 1459 - protein, 6 aa, Thermoplasma acidophilum, ATCC 25905
  Tac-ATCC25905 VMA Casette
SGKTVI

SEQ ID NO: 1460 - protein, 6 aa, Thermoplasma acidophilum, DSM1728
  Tac-DSM1728 VMA Casette
SGKTVI

SEQ ID NO: 1461 - protein, 6 aa, Thermococcus aggregans
  Tag Pol-1 (Tsp-TY Pol-1) Casette
DFRSLY

SEQ ID NO: 1462 - protein, 6 aa, Thermococcus aggregans
  Tag Pol-2 (Tsp-TY Pol-2) Casette
LANSYY

SEQ ID NO: 1463 - protein, 6 aa, Trichodesmium erythraeum IMS101
  Ter DnaB-1 Casette
MGKTSF

SEQ ID NO: 1464 - protein, 6 aa, Trichodesmium erythraeum IMS101
  Ter DnaE-1 Casette
GVLCYQ

SEQ ID NO: 1465 - protein, 6 aa, Trichodesmium erythraeum IMS101
  Ter GyrB Casette
ASGSAK

SEQ ID NO: 1466 - protein, 6 aa, Trichodesmium erythraeum IMS101
  Ter Ndse-1 Casette
IRSCYD

SEQ ID NO: 1467 - protein, 6 aa, Trichodesmium erythraeum IMS101
  Ter Ndse-2 Casette
IFNTYG

SEQ ID NO: 1468 - protein, 6 aa, Trichodesmium erythraeum IMS101
  Ter Snf2 Casette
LGKTIQ

SEQ ID NO: 1469 - protein, 6 aa, Trichodesmium erythraeum IMS101
  Ter ThyX Casette
IGCSFD

SEQ ID NO: 1470 - protein, 6 aa, Thermococcus fumicolans
  Tfu Pol-1 Casette
DFRSLY

SEQ ID NO: 1471 - protein, 6 aa, Thermococcus fumicolans
  Tfu Pol-2 Casette
YADTDG

SEQ ID NO: 1472 - protein, 6 aa, Thermobifida fusca YX
  Tfus Hyp-2914 Casette
IGYSFG

SEQ ID NO: 1473 - protein, 6 aa, Thermobifida fusca YX
  Tfus RecA-1 Casette
SGKTTV

SEQ ID NO: 1474 - protein, 6 aa, Thermobifida fusca YX
  Tfus RecA-2 Casette
MFGSPE

SEQ ID NO: 1475 - protein, 6 aa, Torulaspora globosa, strain CBS 764
  Tgl VMA Casette
YVGCGE

SEQ ID NO: 1476 - protein, 6 aa, Thermococcus hydrothermalis
  Thy Pol-1 Casette
LANSYY

SEQ ID NO: 1477 - protein, 6 aa, Thermococcus hydrothermalis
  Thy Pol-2 Casette
YADTDG

SEQ ID NO: 1478 - protein, 6 aa, Thermococcus kodakaraensis KOD1
  Tko CDC21-1 Casette
AGLTAA

SEQ ID NO: 1479 - protein, 6 aa, Thermococcus kodakaraensis KOD1
  Tko CDC21-2 Casette
EQQTIS

SEQ ID NO: 1480 - protein, 6 aa, Thermococcus kodakaraensis KOD1
  Tko IF2 Casette
HGKTTL

SEQ ID NO: 1481 - protein, 6 aa, Thermococcus kodakaraensis KOD1
  Tko KlbA Casette
HNGCMG

SEQ ID NO: 1482 - protein, 6 aa, Thermococcus kodakaraensis KOD1
  Tko LHR Casette
AVVSST

SEQ ID NO: 1483 - protein, 6 aa, Pyrococcus/ Thermococcus kodakaraensis KOD1
  Tko Pol-1 (Pko Pol-1) Casette
DFRSLY

SEQ ID NO: 1484 - protein, 6 aa, Pyrococcus/Thermococcus kodakaraensis KOD1
  Tko Pol-2 (Pko Pol-2) Casette
LANSYY

SEQ ID NO: 1485 - protein, 6 aa, Thermococcus kodakaraensis KOD1
  Tko Pol-II Casette
RRNCDG

SEQ ID NO: 1486 - protein, 6 aa, Thermococcus kodakaraensis KOD1
  Tko r-Gyr Casette
AGLCTY

SEQ ID NO: 1487 - protein, 6 aa, Thermococcus kodakaraensis KOD1
  Tko RadA Casette
SGKTQL

SEQ ID NO: 1488 - protein, 6 aa, Thermococcus kodakaraensis KOD1
  Tko RIR1-1 Casette
GGGTGL

SEQ ID NO: 1489 - protein, 6 aa, Thermococcus kodakaraensis KOD1
  Tko RIR1-2 Casette
TNPCGE

SEQ ID NO: 1490 - protein, 6 aa, Thermococcus kodakaraensis KOD1
  Tko TopA Casette
KGYCSY

SEQ ID NO: 1491 - protein, 6 aa, Thermococcus litoralis
  Tli Pol-1 Casette
LANSYY

SEQ ID NO: 1492 - protein, 6 aa, Thermococcus litoralis
  Tli Pol-2 Casette
YADTDG

SEQ ID NO: 1493 - protein, 6 aa, Torulaspora pretoriensis, strain CBS 5080
  Tpr VMA Casette
YVGCGE

SEQ ID NO: 1494 - protein, 6 aa, Thermococcus species GE8
  Tsp-GE8 Pol-1 Casette
LANSYY

SEQ ID NO: 1495 - protein, 6 aa, Thermococcus species GE8
  Tsp-GE8 Pol-2 Casette
YADTDG

SEQ ID NO: 1496 - protein, 6 aa, Thermococcus species GT
  Tsp-GT Pol-1 Casette
LANSYY

SEQ ID NO: 1497 - protein, 6 aa, Thermococcus species GT
  Tsp-GT Pol-2 Casette
YADTDG

SEQ ID NO: 1498 - protein, 6 aa, Thermus thermophilus HB27
  Tth-HB27 DnaE-1 Casette
LRRSMG

SEQ ID NO: 1499 - protein, 6 aa, Thermus thermophilus HB27
  Tth-HB27 DnaE-2 Casette
FNKSHA

SEQ ID NO: 1500 - protein, 6 aa, Thermus thermophilus HB27
  Tth-HB27 RIR1-1 Casette
QGGTRR

SEQ ID NO: 1501 - protein, 6 aa, Thermus thermophilus HB27
  Tth-HB27 RIR1-2 Casette
TNPCGE

SEQ ID NO: 1502 - protein, 6 aa, Thermus thermophilus HB8
  Tth-HB8 DnaE-1 Casette
LRRSMG

SEQ ID NO: 1503 - protein, 6 aa, Thermus thermophilus HB8
  Tth-HB8 DnaE-2 Casette
FNKSHA

SEQ ID NO: 1504 - protein, 6 aa, Thermus thermophilus HB8
  Tth-HB8 RIR1-2 Casette
TNPCGE

SEQ ID NO: 1505 - protein, 6 aa, Thermococcus zilligii
  Tzi Pol Casette
LANSYY

SEQ ID NO: 1506 - protein, 6 aa, uncultured archaeon GZfos13E1
  Unc-ERS PFL Casette
CPYCHN

SEQ ID NO: 1507 - protein, 6 aa, uncultured archaeon GZfos9C4
  Unc-ERS RIR1 Casette
TNPCGE

SEQ ID NO: 1508 - protein, 6 aa, uncultured archaeon (Rice Cluster I)
  Unc-MetRFS MCM2 Casette
EQQSIS

SEQ ID NO: 1509 - protein, 6 aa, Vanderwaltozyma polyspora, formerly Kluyveromyces polysporus, strain CBS 2163
  Vpo VMA Casette
YVGCGE

SEQ ID NO: 1510 - protein, 6 aa, Wiseana iridescent virus
  WIV RIR1 Casette
SNLCSE

SEQ ID NO: 1511 - protein, 6 aa, Zygosaccharomyces bailii, strain CBS 685
  Zba VMA Casette
YVGCGE

SEQ ID NO: 1512 - protein, 6 aa, Zygosaccharomyces rouxii, strain CBS 688
  Zro VMA Casette
YVGCGE

SEQ ID NO: 1513 - protein, 6 aa, Artificial Sequence
  Synthetic Construct, consensus motif 1
GGKCGG

SEQ ID NO: 1514 - protein, 6 aa, Artificial Sequence
  Synthetic Construct, consensus motif 2
GGKSGG

SEQ ID NO: 1515 - protein, 6 aa, Artificial Sequence
  Synthetic Construct, consensus motif 3
GGKTGG

SEQ ID NO: 1516 - protein, 6 aa, Artificial Sequence
  Synthetic Construct, P77853-T134-1
PGATSP

SEQ ID NO: 1517 - protein, 6 aa, Artificial Sequence
  Synthetic Construct, P77853-T134-2
PGATVP

SEQ ID NO: 1518 - protein, 7 aa, Artificial Sequence
  Synthetic Construct, P77853-T134-3
PGAKSLG

SEQ ID NO: 1519 - protein, 6 aa, Artificial Sequence
  Synthetic Construct, P77853-T134-4
PGATSL

SEQ ID NO: 1520 - protein, 6 aa, Artificial Sequence
  Synthetic Construct, P77853-T134-5
PGASPL

SEQ ID NO: 1521 - protein, 6 aa, Artificial Sequence
  Synthetic Construct, P77853-T134-6
PGATGP

SEQ ID NO: 1522 - protein, 8 aa, Artificial Sequence
  Synthetic Construct, P77853-T134-7
PGAQRSLG

SEQ ID NO: 1523 - protein, 6 aa, Artificial Sequence
  Synthetic Construct, P77853-S158-1
NQPSIV

SEQ ID NO: 1524 - protein, 6 aa, Artificial Sequence
  Synthetic Construct, P77853-S158-2
NQASIV

SEQ ID NO: 1525 - protein, 6 aa, Artificial Sequence
  Synthetic Construct, P26222-S43-1
PNMSSA

SEQ ID NO: 1526 - protein, 6 aa, Artificial Sequence
  Synthetic Construct, P26222-S115-1
GNHSSG

SEQ ID NO: 1527 - protein, 6 aa, Artificial Sequence
  Synthetic Construct, P26222-S123-1
PSHSAY

SEQ ID NO: 1528 - protein, 6 aa, Artificial Sequence
  Synthetic Construct, P26222-S154-1
SLMSSC

SEQ ID NO: 1529 - protein, 6 aa, Artificial Sequence
  Synthetic Construct, P26222-S220-1
TNTSNY

SEQ ID NO: 1530 - protein, 6 aa, Artificial Sequence
  Synthetic Construct, P26222-S251-1
IDTSRN

SEQ ID NO: 1531 - protein, 6 aa, Artificial Sequence
  Synthetic Construct, P26222-S123-2
PSTSAY

SEQ ID NO: 1532 - protein, 6 aa, Artificial Sequence
  Synthetic Construct, P54583-S56-1
QIKSLG

SEQ ID NO: 1533 - protein, 6 aa, Artificial Sequence
  Synthetic Construct, P54583-C75-1
FETCNY

SEQ ID NO: 1534 - protein, 6 aa, Artificial Sequence
  Synthetic Construct, P54583-S192-1
AVLSVN

SEQ ID NO: 1535 - protein, 6 aa, Artificial Sequence
  Synthetic Construct, P54583-S237-1
LVYSAH

SEQ ID NO: 1536 - protein, 6 aa, Artificial Sequence
  Synthetic Construct, O77044-S84-1
AGYSSA

SEQ ID NO: 1537 - protein, 6 aa, Artificial Sequence
  Synthetic Construct, O77044-T303-1
MWGTLR

SEQ ID NO: 1538 - protein, 6 aa, Artificial Sequence
  Synthetic Construct, O77044-S325-1
LSASSY

SEQ ID NO: 1539 - protein, 6 aa, Artificial Sequence
  Synthetic Construct, O77044-T333-1
FAQTQI

SEQ ID NO: 1540 - protein, 6 aa, Artificial Sequence
  Synthetic Construct, O77044-S345-1
GGRSFV

SEQ ID NO: 1541 - protein, 6 aa, Artificial Sequence
  Synthetic Construct, O77044-C348-1
SFVCGF

SEQ ID NO: 1542 - protein, 6 aa, Artificial Sequence
  Synthetic Construct, O77044-S352-1
GFGSNP

SEQ ID NO: 1543 - protein, 6 aa, Artificial Sequence
  Synthetic Construct, O77044-T356-1
NPPTRP

SEQ ID NO: 1544 - protein, 6 aa, Artificial Sequence
  Synthetic Construct, O77044-S362-1
HHRSSS

SEQ ID NO: 1545 - protein, 6 aa, Artificial Sequence
  Synthetic Construct, O77044-S363-1
HRSSSC

SEQ ID NO: 1546 - protein, 6 aa, Artificial Sequence
  Synthetic Construct, O77044-S364-1
RSSSCP

SEQ ID NO: 1547 - protein, 6 aa, Artificial Sequence
  Synthetic Construct, O77044-T376-1
DWNTFN

SEQ ID NO: 1548 - protein, 6 aa, Artificial Sequence
  Synthetic Construct, O77044-S379-1
TFNSPD

SEQ ID NO: 1549 - protein, 6 aa, Artificial Sequence
  Synthetic Construct, O77044-S406-1
DDRSDY

SEQ ID NO: 1550 - protein, 6 aa, Artificial Sequence
  Synthetic Construct, O77044-T415-1
EVATDY

SEQ ID NO: 1551 - protein, 6 aa, Artificial Sequence
  Synthetic Construct, O30700-T309-1
NQVTEL

SEQ ID NO: 1552 - protein, 6 aa, Artificial Sequence
  Synthetic Construct, O30700-T360-1
SSVTFW

SEQ ID NO: 1553 - protein, 6 aa, Artificial Sequence
  Synthetic Construct, O30700-S215-1
LRESVW

SEQ ID NO: 1554 - protein, 6 aa, Artificial Sequence
  Synthetic Construct, O30700-T137-1
RFHTLV

SEQ ID NO: 1555 - protein, 6 aa, Artificial Sequence
  Synthetic Construct, O30700-S358-1
DLSSVT

SEQ ID NO: 1556 - protein, 6 aa, Artificial Sequence
  Synthetic Construct, O30700-T369-1
DNHTWL

SEQ ID NO: 1557 - protein, 6 aa, Artificial Sequence
  Synthetic Construct, O30700-T250-1
DYNTEV

SEQ ID NO: 1558 - protein, 6 aa, Artificial Sequence
  Synthetic Construct, O30700-S314-1
LDVSLY

SEQ ID NO: 1559 - protein, 6 aa, Artificial Sequence
  Synthetic Construct, O30700-S95-1
HYNSIV

SEQ ID NO: 1560 - protein, 6 aa, Artificial Sequence
  Synthetic Construct, O30700-S357-1
ADLSSV

SEQ ID NO: 1561 - protein, 6 aa, Artificial Sequence
  Synthetic Construct, P40942-T292-1
NIITEL

SEQ ID NO: 1562 - protein, 6 aa, Artificial Sequence
  Synthetic Construct, P40942-T263-1
GHQTHI

SEQ ID NO: 1563 - protein, 6 aa, Artificial Sequence
  Synthetic Construct, P40942-S198-1
MRNSPW

SEQ ID NO: 1564 - protein, 6 aa, Artificial Sequence
  Synthetic Construct, P40942-T122-1
RFHTLV

SEQ ID NO: 1565 - protein, 6 aa, Artificial Sequence
  Synthetic Construct, P40942-T233-1
DYNTDD

SEQ ID NO: 1566 - protein, 6 aa, Artificial Sequence
  Synthetic Construct, P40942-S350-1
DKYSWL

SEQ ID NO: 1567 - protein, 6 aa, Artificial Sequence
  Synthetic Construct, P40942-S297-1
LDMSIY

SEQ ID NO: 1568 - protein, 6 aa, Artificial Sequence
  Synthetic Construct, P40942-T129-1
HNQTPT

SEQ ID NO: 1569 - protein, 6 aa, Artificial Sequence
  Synthetic Construct, P40942-S179-1
DIKSWD

SEQ ID NO: 1570 - protein, 6 aa, Artificial Sequence
  Synthetic Construct, P40942-S346-1
WGISDK

SEQ ID NO: 1571 - protein, 6 aa, Artificial Sequence
  Synthetic Construct, O43097-T134-1
SGATDL

SEQ ID NO: 1572 - protein, 6 aa, Artificial Sequence
  Synthetic Construct, O43097-S47-1
YYYSWW

SEQ ID NO: 1573 - protein, 6 aa, Artificial Sequence
  Synthetic Construct, O43097-S50-1
SWWSDG

SEQ ID NO: 1574 - protein, 6 aa, Artificial Sequence
  Synthetic Construct, O43097-T126-1
NFGTYD

SEQ ID NO: 1575 - protein, 6 aa, Artificial Sequence
  Synthetic Construct, O43097-T152-1
GKTTRV

SEQ ID NO: 1576 - protein, 6 aa, Artificial Sequence
  Synthetic Construct, O43097-S158-1
NAPSID

SEQ ID NO: 1577 - protein, 6 aa, Artificial Sequence
  Synthetic Construct, O43097-T164-1
GTQTFD

SEQ ID NO: 1578 - protein, 6 aa, Artificial Sequence
  Synthetic Construct, O43097-S170-1
QYWSVR

SEQ ID NO: 1579 - protein, 6 aa, Artificial Sequence
  Synthetic Construct, O43097-T208-1
IVATEG

SEQ ID NO: 1580 - protein, 6 aa, Artificial Sequence
  Synthetic Construct, O43097-S213-1
GYFSSG

SEQ ID NO: 1581 - protein, 6 aa, Artificial Sequence
  Synthetic Construct, O43097-S103-1
NGNSYL

SEQ ID NO: 1582 - protein, 6 aa, Artificial Sequence
  Synthetic Construct, O43097-T111-1
YGWTRN

SEQ ID NO: 1583 - protein, 6 aa, Artificial Sequence
  Synthetic Construct, O43097-S130-1
YDPSSG

SEQ ID NO: 1584 - protein, 6 aa, Artificial Sequence
  Synthetic Construct, O43097-T151-1
LGKTTR

SEQ ID NO: 1585 - protein, 6 aa, Artificial Sequence
  Synthetic Construct, O43097-S214-1
YFSSGY

SEQ ID NO: 1586 - protein, 6 aa, Artificial Sequence
  Synthetic Construct, O68438-T788-1
IDHTDS

SEQ ID NO: 1587 - protein, 6 aa, Artificial Sequence
  Synthetic Construct, O68438-T793-1
SWSTNE

SEQ ID NO: 1588 - protein, 6 aa, Artificial Sequence
  Synthetic Construct, O68438-S790-1
HTDSWS

SEQ ID NO: 1589 - protein, 6 aa, Artificial Sequence
  Synthetic Construct, O68438-T797-1
NEITIN

SEQ ID NO: 1590 - protein, 6 aa, Artificial Sequence
  Synthetic Construct, O68438-S792-1
DSWSTN

SEQ ID NO: 1591 - protein, 6 aa, Artificial Sequence
  Synthetic Construct, O68438-S723-1
LDQSYV

SEQ ID NO: 1592 - protein, 6 aa, Artificial Sequence
  Synthetic Construct, O68438-T769-1
EDPTIT

SEQ ID NO: 1593 - protein, 6 aa, Artificial Sequence
  Synthetic Construct, O68438-T726-1
SYVTGY

SEQ ID NO: 1594 - protein, 6 aa, Artificial Sequence
  Synthetic Construct, O68438-S680-1
PWGSNS

SEQ ID NO: 1595 - protein, 6 aa, Artificial Sequence
  Synthetic Construct, O68438-S682-1
GSNSFI

SEQ ID NO: 1596 - protein, 6 aa, Artificial Sequence
  Synthetic Construct, O68438-S547-1
TPGSGG

SEQ ID NO: 1597 - protein, 6 aa, Artificial Sequence
  Synthetic Construct, O68438-S298-1
TNYSHP

SEQ ID NO: 1598 - protein, 6 aa, Artificial Sequence
  Synthetic Construct, O68438-S712-1
DGMSYL

SEQ ID NO: 1599 - protein, 6 aa, Artificial Sequence
  Synthetic Construct, O68438-S783-1
PQKCYI

SEQ ID NO: 1600 - protein, 6 aa, Artificial Sequence
  Synthetic Construct, P26222-S151-1
DLISLM

SEQ ID NO: 1601 - protein, 6 aa, Artificial Sequence
  Synthetic Construct, P26222-S155-1
LMSSCM

SEQ ID NO: 1602 - protein, 6 aa, Artificial Sequence
  Synthetic Construct, P26222-S180-1
AGSSQA

SEQ ID NO: 1603 - protein, 6 aa, Artificial Sequence
  Synthetic Construct, P26222-S191-1
AGHSAW

SEQ ID NO: 1604 - protein, 6 aa, Artificial Sequence
  Synthetic Construct, P26222-T217-1
GIATNT

SEQ ID NO: 1605 - protein, 6 aa, Artificial Sequence
  Synthetic Construct, P26222-T219-1
ATNTSN

SEQ ID NO: 1606 - protein, 6 aa, Artificial Sequence
  Synthetic Construct, P26222-S266-1
CDPSGR

SEQ ID NO: 1607 - protein, 6 aa, Artificial Sequence
  Synthetic Construct, P26222-T71-1
PQGTWF

SEQ ID NO: 1608 - protein, 6 aa, Artificial Sequence
  Synthetic Construct, P26222-T250-1
VIDTSR

SEQ ID NO: 1609 - protein, 6 aa, Artificial Sequence
  Synthetic Construct, P54583-T133-1
QGLTSL

SEQ ID NO: 1610 - protein, 6 aa, Artificial Sequence
  Synthetic Construct, P54583-S165-1
SGQSAL

SEQ ID NO: 1611 - protein, 6 aa, Artificial Sequence
  Synthetic Construct, P54583-S251-1
NGDSYW

SEQ ID NO: 1612 - protein, 6 aa, Artificial Sequence
  Synthetic Construct, P54583-T369-1
SGDTGG

SEQ ID NO: 1613 - protein, 6 aa, Artificial Sequence
  Synthetic Construct, P54583-S246-1
GVQSYN

SEQ ID NO: 1614 - protein, 6 aa, Artificial Sequence
  Synthetic Construct, P54583-S277-1
LVYSAH

SEQ ID NO: 1615 - protein, 6 aa, Artificial Sequence
  Synthetic Construct, P54583-T326-1
EFGTTL

SEQ ID NO: 1616 - protein, 6 aa, Artificial Sequence
  Synthetic Construct, P54583-T358-1
FQWTFW

SEQ ID NO: 1617 - protein, 6 aa, Artificial Sequence
  Synthetic Construct, P54583-T361-1
TFWSWN

SEQ ID NO: 1618 - protein, 6 aa, Artificial Sequence
  Synthetic Construct, P54583-S366-1
NPDSGD

SEQ ID NO: 1619 - protein, 6 aa, Artificial Sequence
  Synthetic Construct, P77853-S212-1
GYQSSG

SEQ ID NO: 1620 - protein, 6 aa, Artificial Sequence
  Synthetic Construct, P77853-S124-1
IVESWG

SEQ ID NO: 1621 - protein, 6 aa, Artificial Sequence
  Synthetic Construct, P77853-T113-1
GWSTNP

SEQ ID NO: 1622 - protein, 6 aa, Artificial Sequence
  Synthetic Construct, P77853-T199-1
NLGTID

SEQ ID NO: 1623 - protein, 6 aa, Artificial Sequence
  Synthetic Construct, P77853-T52-1
TGNTTM

SEQ ID NO: 1624 - protein, 6 aa, Artificial Sequence
  Synthetic Construct, P77853-S104-1
NGNSYL

SEQ ID NO: 1625 - protein, 6 aa, Artificial Sequence
  Synthetic Construct, P77853-S112-1
YGWSTN

SEQ ID NO: 1626 - protein, 6 aa, Artificial Sequence
  Synthetic Construct, P77853-S213-1
YQSSGS

SEQ ID NO: 1627 - protein, 6 aa, Artificial Sequence
  Synthetic Construct, P77853-S35-1
SNASGT

SEQ ID NO: 1628 - protein, 6 aa, Artificial Sequence
  Synthetic Construct, P77853-T145-1
DGGTYD

SEQ ID NO: 1629 - protein, 784 aa, Artificial Sequence
  Synthetic Construct, P77853-Tth-T134-1
MFLKKLSKLLLVVLLVAVYTQVNAQTSITLTSNASGTFDGYYYELWKDTGNTTMTVYTQGRFSCQWSNINNALFRTGKKYNQNWQSLGTIRITYSATYNPNGNSYLCIYGWSTNPLVEFYIVESWGNWRPPGACLAEGSLVLDAATGQRVPIEKVRPGMEVFSLGPDYRLYRVPVLEVLESGVREVVRLRTRSGRTLVLTPDHPLLTPEGWKPLCDLPLGTPIAVPAELPVACHLAPPEERVTLLALLLGDGNTKPSGRRGTRPNAFFYSKDPELLAAYRRCAEALGAKVKAYVHPTTGVVTLATLAPRPGAQDPVKRLVVEAGMVAKAEEKRVPEEVFRYRREALALFLGRLFSTDGSVEKKRISYSSASLGLAQDVAHLLLRLGITSQLRSRGPRAHEVLISGREDILRFAELIGPYLLGAKRERLAALEAEARRRLPGQGWHLRLVLPAVAYRVSEAKRRSGFSWSEAGRRVAVAGSCLSSGLNLKLPRRYLSRHRLSLLGEAFADPGLEALAEGQVLWDPIVAVEPAGKARTFDLRVPPFANFVSEDLVVHNTSPLGQVTIDGGTYDIYRTTRVNQPSIVGTATFDQYWSVRTSKRTSGTVTVTDHFRAWANRGLNLGTIDQITLCVEGYQSSGSANITQNTFSQGSSSGSSGGSSGSTTTTRIECENMSLSGPYVSRITNPFNGIALYANGDTARATVNFPASRNYNFRLRGCGNNNNLARVDLRIDGRTVGTFYYQGTYPWEAPIDNVYVSAGSHTVEITVTADNGTWDVYADYLVIQ

SEQ ID NO: 1630 - protein, 784 aa, Artificial Sequence
  Synthetic Construct, P77853-Tth-T134-2
MFLKKLSKLLLVVLLVAVYTQVNAQTSITLTSNASGTFDGYYYELWKDTGNTTMTVYTQGRFSCQWSNINNALFRTGKKYNQNWQSLGTIRITYSATYNPNGNSYLCIYGWSTNPLVEFYIVESWGNWRPPGACLAEGSLVLDAATGQRVPIEKVRPGMEVFSLGPDYRLYRVPVLEVLESGVREVVRLRTRSGRTLVLTPDHPLLTPEGWKPLCDLPLGTPIAVPAELPVAGHLAPPEERVTLLALLLGDGNTKLSGRRGTRPNAFFYSKDPELLAAYRRCAEALGAKVKAYVHPTTGVVTLATLAPRPGAQDPVKRLVVEAGMVAKAEEKRVPEEVFRYRREALALFLGRLFSTDGSVEKKRISYSSASLGLAQDVAHLLLRLGITSQLRSRGPRAHEVLISGREDILRFAELIGPYLLGAKRERLAALEAEARRRLPGQGWHLRLVLPAVAYRVSEAKRRSGFSWSEAGRRVAVAGSCLSSGLNLKLPRRYLSRHRLSLLGEAFADPGLEALAEGQVLWDPIVAVEPAGKARTFDLRVPPFANFVSEDLVVHNTSPLGQVTIDGGTYDIYRTTRVNQPSIVGTATFDQYWSVRTSKRTSGTVTVTDHFRAWANRGLNLGTIDQITLCVEGYQSSGSANITQNTFSQGSSSGSSGGSSGSTTTTRIECENMSLSGPYVSRITNPFNGIALYANGDTARATVNFPASRNYNFRLRGCGNNNNLARVDLRIDGRTVGTFYYQGTYPWEAPIDNVYVSAGSHTVEITVTADNGTWDVYADYLVIQ

SEQ ID NO: 1631 - protein, 784 aa, Artificial Sequence
  Synthetic Construct, P77853-Tth-T134-3
MFLKKLSKLLLVVLLVAVYTQVNAQTSITLTSNASGTFDGYYYELWKDTGNTTMTVYTQGRFSCQWSNINNALFRTGKKYNQNWQSLGTIRITYSATYNPNGNSYLCIYGWSTNPLVEFYIVESWGNWRPPGACLAEGSLVLDAATGQRVPIEKVRPGMEVFSLGPDYRLYRVPVLEVLESGVREVVRLRTRSGRTLVLTPDHPLLTPEGWKPLCDLPLGTPIAVPAELPVAGHLAPPEERVTLLALLLGDGNTKLSGRRGTRPNAFFYSKDPELLAAYRRCAEALGAKVKAYVHPTTGVVTLATLAPRLGAQDPVKRLVVEAGMVAKAEEKRVPEEVFRYRREALALFLGRLFSTDGSVEKKRISYSSASLGLAQDVAHLLLRLGITSQLRSRGPRAHEVLISGREDILRFAELIGPYLLGAKRERLAALEAEARRRLPGQGWHLRLVLPAVAYRASEAKRRSGFSWSEAGRRVAVAGSCLSSGLNLKLPRRYLSRHRLSLLGEAFADPGLEALAEGQVLWDPIVAVEPAGKARTFDLRVPPFANFVSEDLVVHNTSPLGQVTIDGGTYDIYRTTRVNQPSIVGTATFDQYWSVRTSKRTSGTVTVTDHFRAWANRGLNLGTIDQITLCVEGYQSSGSANITQNTFSQGSSSGSSGGSSGSTTTTRIECENMSLSGPYVSRITNPFNGIALYANGDTARATVNFPASRNYNFRLRGCGNNNNLARVDLRIDGRTVGTFYYQGTYPWEAPIDNVYVSAGSHTVEITVTADNGTWDVYADYLVIQ

SEQ ID NO: 1632 - protein, 784 aa, Artificial Sequence
  Synthetic Construct, P77853-Tth-T134-9
MFLKKLSKLLLVVLLVAVYTQVNAQTSITLTSNASGTFDGYYYELWKDTGNTTMTVYTQGRFSCQWSNINNALFRTGKKYNQNWQSLGTIRITYSATYNPNGNSYLCIYGWSTNPLVEFYIVESWGNWRPPGACLAEGSLVLDAATGQRVPIEKVRPGMEVFSLGPDYRLYRVPVLEVLESGVREVVRLRTRSGRTLVLTPDHPLLTPEGWKPLCDLPLGTPIAVPAELPVAGHLAPPEERVTLLALLLGDGNTKLSGRRGTRPNAFFYSKDPELLAAYRRCAEALGAKVKAYIHPTTGVVTLATLAPRPGAQDPVKRLVVEAGMVAKAEEKRVPEEVFRYRREALALYLGRLFSTDGSVEKKRISYSSASLGLAQDVAHLLLRLGITSQLRSRGPRAHEVLISGREDILRFAELIGPYLLGAKRERLAALEAEARRRLPGQGWHLRLVLPAVAYRVSEAKRRSGFSWSEAGRRVAVAGSCLSSGLNLKLPRRYLSRHRLSLLGEAFADPGLEALAEGQVLWDPIVAVEPAGKARTFDLRVPPFANFVSEDLVVHNTVPLGQVTIDGGTYDIYRTTRVNQPSIVGTATFDQYWSVRTSKRTSGTVTVTDHFRAWANRGLNLGTIDQITLCVEGYQSSGSANITQNTFSQGSSSGSSGGSSGSTTTTRIECENMSLSGPYVSRITNPFNGIALYANGDTARATVNFPASRNYNFRLRGCGNNNNLARVDLRIDGRTVGTFYYQGTYPWEAPIDNVYVSAGSHTVEITVTADNGTWDVYADYLVIQ

SEQ ID NO: 1633 - protein, 783 aa, Artificial Sequence
  Synthetic Construct, P77853-Tth-T134-12
MFLKKLSKLLLVVLLVAVYTQVNAQTSITLTSNASGTFDGYYYELWKDTGNTTMTVYTQGRFSCQWSNINNALFRTGKKYNQNWQSLGTIRITYSATYNPNGNSYLCIYGWSTNPLVEFYIVESWGNWRPPGACLAEGSLVLDAATGQRVPIEKVRPGMEVFSLGPDYILYRVPVLEVLESGVREVVRLRTRSGRTLVLTPDHPLLTPEGWKPLCDLPLGTPIAVPAELPVAGHLAPPEERVTLLALLLGDGNTKLSGRRGTRPNAFFYSKDPELLAAYRRCAEALGAKVKAYVHPTTGVVTLATLAPRPGAQDPVKRLVVEAGMVAKAEEKRVPEEVFRYRREALALFLGRLFSTDGSVEKKRISYSSASLGLAQDVAHLLLRLGITSQLRSRGPRAHEVLISGREDILRFAELIGPYLLGAKRERLAALEAEARRRLPGQGWHLRLVLPAVAYRVSEAKRRSGFSWSEAGRRVAVAGSCLSSGLNLKLPRRYLSRHRLSLLGEAFADPGLEALAEGQVLWDPIVAVEPAGKARTFDLRVPPFANFVSEDLVVHNKSLGQVTIDGGTYDIYRTTRVNQPSIVGTATFDQYWSVRTSKRTSGTVTVTDHFRAWANRGLNLGTIDQITLCVEGYQSSGSANITQNTFSQGSSSGSSGGSSGSTTTTRIECENMSLSGPYVSRITNPFNGIALYANGDTARATVNFPASRNYNFRLRGCGNNNNLARVDLRIDGRTVGTFYYQGTYPWEAPIDNVYVSAGSHTVEITVTADNGTWDVYADYLVIQ

SEQ ID NO: 1634 - protein, 784 aa, Artificial Sequence
  Synthetic Construct, P77853-Tth-T134-36
MFLKKLSKLLLVVLLVAVYTQVNAQTSITLTSNASGTFDGYYYELWKDTGNTTMTVYTQGRFSCQWSNINNALFRTGKKYNQNWQSLGTIRITYSATYNPNGNSYLCIYGWSTNPLVEFYIVESWGNWRPPGACLAEGSLVLDAATGQRVPIEKVRPGMEVFSLGPDYRLYRVPVLEVLESGVREVVRLRTRSGRTLVLTPDHPLLTPEGWKPLCDLPLGTPIAVPAELPVAGHLAPPEERVTLLALLLGDGNTKLSGRRGTRPNAFFYSKDPELLAAYRRCAEALGAKVKAYVHPTTGVVTLATLAPRPGAQDPVKRLVVEAGMVAKAEEKRVPEEVFRYRREALALFLGRLFSTDGSVEKKRISYSSASLGLAQDVAHLLLRLGITSQLRSRGPRAHEVLISGREDILRFAELIGPYLLGAKRERLAALEAEARRRLPGQGWHLRLVLPAVAYRVSEAKRRSGFSWSEAGRRVAVAGSCLSSGLNLKLPRRYLSRHRLSLLGEAFADPGLEALAEGQVLWDPIVAVEPAGKARTFDLRVPPFANFVSEDLVVHNTVPLGQVTIDGGTYDIYRTTRVNQPSIVGTATFDQYWSVRTSKRTSGTVTVTDHFRAWANRGLNLGTIDQITLCVEGYQSSGSANITQNTFSQGSSSGSSGGSSGSTTTTRIECENMSLSGPYVSRITNPFNGIALYANGDTARATVNFPASRNYNFRLRGCGNNNNLARVDLRIDGRTVGTFYYQGTYPWEAPIDNVYVSAGSHTVEITVTADNGTWDVYADYLVIQ

SEQ ID NO: 1635 - protein, 784 aa, Artificial Sequence; identical to SEQ ID NO: 1634
  Synthetic Construct, P77853-Tth-T134-42

SEQ ID NO: 1636 - protein, 783 aa, Artificial Sequence
  Synthetic Construct, P77853-Tth-T134-43
MFLKKLSKLLLVVLLVAVYTQVNAQTSITLTSNASGTFDGYYYELWKDTGNTTMTVYTQGRFSCQWSNINNALFRTGKKYNQNWQSLGTIRITYSATYNPNGNSYLCIYGWSTNPLVEFYIVESWGNWRPPGACLAEGSLVLDAATGQRVPIEKVRPGMEVFSLGPDYRLYRVPVLEVLESGVREVVRLRTRSGRTLVLTPDHLLLTPEGWKPLCDLPLGTPIAVPAELPVAGHLAPPEERVTLLALLLGDGNTKLSGRRGTRPNAFFYSKDPELLAAYRRCAEALGAKVKAYVHPTTGVVTLATLAPRPGAQDPVKRLVVEAGMVAKAEEKRVPEEVFRYRREALALFLGRLFSTDGSVEKKRISYSSASLGLAQDVAHLLLRLGITSQLRSRGPRAHEVLISGREDILRFAELIGPYLLGAKRERLAALEAEARRRLPGQGWHLRLVLPAVAYRVSEAKRRSGFSWSEAGRRVAVAGSCLSSGLNLKLPRRYLSRHRLSLLGEAFADPGLEALAEGQVLWDPIVAVEPAGKARTFDLRVPPFANFVSEDLVVHNTSLGQVTIDGGTYDIYRTTRVNQPSIVGTATFDQYWSVRTSKRTSGTVTVTDHFRAWANRGLNLGTIDQITLCVEGYQSSGSANITQNTFSQGSSSGSSGGSSGSTTTTRIECENMSLSGPYVSRITNPFNGIALYANGDTARATVNFPASRNYNFRLRGCGNNNNLARVDLRIDGRTVGTFYYQGTYPWEAPIDNVYVSAGSHTVEITVTADNGTWDVYADYLVIQ

SEQ ID NO: 1637 - protein, 783 aa, Artificial Sequence; identical to SEQ ID NO: 1636
  Synthetic Construct, P77853-Tth-T134-45

SEQ ID NO: 1638 - protein, 784 aa, Artificial Sequence
  Synthetic Construct, P77853-Tth-T134-48
MFLKKLSKLLLVVLLVAVYTQVNAQTSITLTSNASGTFDGYYYELWKDTGNTTMTVYTQGRFSCQWSNINNALFRTGKKYNQNWQSLGTIRITYSATYNPNGNSYLCIYGWSTNPLVEFYIVESWGNWRPPGACLAEGSLVSDAATGQRVPIEKVRPGMEVFSLGPDYRLYRVPVLEVLESGVREVVRLRTRSGRTLVLTPDHPLLTPEGWKPLCDLPLGTPIAVPAELPVAGHLAPPEERVTLLALLLGDGNTKLSGRRGTRPNAFFYSKDPELLAAYRRCAEALGAKVKAYVHPTTGVVTLATLAPRPGAQDPVKRHVVEAGMVAKAEEKRVPEEVFRYRREALALSLGRLFSTDGSVEKKRISYSSASLGLAQDVAHLLLRLGITSQLRSRGPRAHEVLISGREDILRFAELIGPYLLGAKRERLAALEAEARRRLPGQGWHLRLVLPAVAYRVSEAKRRSGFSWSEAGRRVAVAGSCLSSGLNLKLSRRYLSRHRLSLLGEAFADPGLEALAEGQVLWDPIVAVEPAGKARTFDLRVPPFANFVSEDLVVHNTSPLGQVTIDGGTYDIYRTTRVNQPSIVGTATFDQYWSVRTSKRTSGTVTVTDHFRAWANRGLNLGTIDQITLCVEGYQSSGSANITQNTFSQGSSSGSSGGSSGSTTTTRIECENMSLSGPYVSRITNPFNGIALYANGDTARATVNFPASRNYNFRLRGCGNNNNLARVDLRIDGRTVGTFYYQGTYPWEAPIDNVYVSAGSHTVEITVTADNGTWDVYADYLVIQ

SEQ ID NO: 1639 - protein, 783 aa, Artificial Sequence
  Synthetic Construct, P77853-Tth-T134-49
MFLKKLSKLLLVVLLVAVYTQVNAQTSITLTSNASGTFDGYYYELWKDTGNTTMTVYTQGRFSCQWSNINNALFRTGKKYNQNWQSLGTIRITYSATYNPNGNSYLCIYGWSTNPLVEFYIVESWGNWRPPGACLAEGSLVLDAATGQRVPIEKVRPGMEVFSLGPDYRLYRVPVLEVLESGVREVVRLRTRSGRTLVLTPDHPLLTPEGWKPLCDLPLGTPIAVPAELPVAGHLAPPEERVTLLALLLGDGNTKLSGRRGTRPIAFFYSKDPELLAAYRRCAEALGAKVKAYVHPTTGVVTLATLAPRPGAQDPVKRLVVEAGMVAKAEEKRVPEEVFRYRREALALFLGRLFSTDGSVEKKRISYSSASLGLAQDVAHLLLRLGITSQLRSRGPRAHEVLISGREDILRFAELIGPYLLGAKRERLAALEAEARRRLPGQGWHLRLVLPAVAYRVSEAKRRSGFSWSEAGRRVAVAGSCLSSGLNLKLPRRYLSRHRLSLLGEAFADPGLEALAEGQVLWDPIVAVEPAGKARTFDLRVPPFANFVSEDLVVHNSPLGQVTIDGGTYDIYRTTRVNQPSIVGTATFDQYWSVRTSKRTSGTVTVTDHFRAWANRGLNLGTIDQITLCVEGYQSSGSANITQNTFSQGSSSGSSGGSSGSTTTTRIECENMSLSGPYVSRITNPFNGIALYANGDTARATVNFPASRNYNFRLRGCGNNNNLARVDLRIDGRTVGTFYYQGTYPWEAPIDNVYVSAGSHTVEITVTADNGTWDVYADYLVIQ

SEQ ID NO: 1640 - protein, 783 aa, Artificial Sequence
  Synthetic Construct, P77853-Tth-T134-80
MFLKKLSKLLLVVLLVAVYTQVNAQTSITLTSNASGTFDGYYYELWKDTGNTTMTVYTQGRFSCQWSNINNALFRTGKKYNQNWQSLGTIRITYSATYNPNGNSYLCIYGWSTNPLVEFYIVESWGNWRPPGACLAEGSLVLDAATGQRVPIEKVRPGMEVFSLGPDYRLYRVPVLEVLESGVREVVRLRTRSGRTLVLTPDHPLLTPEGWKPLCDLPLGTPIAVPAELPVAGHLAPPEERGTLLALLLGDGNTKLSGRRGTRPNAFFYSKDPELLAAYRRCAEALGAKVKAYVHPTTGVVTLATLAPRPGAQDPVKRLVVEAGMVAKAEEKRVPEEVFRYRREALALFLGRLFSTDGSVEKKRISYSSASLGLAQDVAHLLLRLGITSQLRSRGPRAHEVLISGREDILRFAELIGPYLLGAKRERLAALEAEARRRLPGQGWHLRLVLPAVAYRVSEAKRRSGFSWSEAGRRVAVAGSCLSSGLNLKLPRRYLSRHRLSLLGEAFADPGLEALAEGQVLWDPIVAVEPAGKARTFDLRVPPFANFVSEDLVVHNTSLGQVTIDGGTYDIYRTTRVNQPSIVGTATFDQYWSVRTSKRTSGTVTVTDHFRAWANRGLNLGTIDQITLCVEGYQSSGSANITQNTFSQGSSSGSSGGSSGSTTTTRIECENMSLSGPYVSRITNPFNGIALYANGDTARATVNFPASRNYNFRLRGCGNNNNLARVDLRIDGRTVGTFYYQGTYPWEAPIDNVYVSAGSHTVEITVTADNGTWDVYADYLVIQ

SEQ ID NO: 1641 - protein, 784 aa, Artificial Sequence; identical to SEQ ID NO: 1634
  Synthetic Construct, P77853-Tth-T134-82

SEQ ID NO: 1642 - protein, 784 aa, Artificial Sequence
  Synthetic Construct, P77853-Tth-T134-83
MFLKKLSKLLLVVLLVAVYTQVNAQTSITLTSNASGTFDGYYYELWKDTGNTTMTVYTQGRFSCQWSNINNALFRTGKKYNQNWQSLGTIRITYSATYNPNGNSYLCIYGWSTNPLVEFYIVESWGNWRPPGACLAEGSLVLDAATGQRVPIEKVRPGMEVFSLGPDYRLYRVPVLEVLESGVREVVRLRTRSGRTLVLTPDHPLLTPEGWKPLCDLPLGTPIAVPAELPVAGHLAPPEERVTLLALLLGDGNTKLSGRRGTRPNAFFYSKDPELLAAYRRCAEALGAKVKAYVHPTTGVVTLATLAPRPGAQDPVKRLVVEAGMVAKAEEKRVPEEVFRYRREALALFLGRLFSTDGSVEKKRISYSSASLGLAQDVAHLLLRLGITSQLRSRGPRAHEVLISGREDILRFAELIGAYLLGAKRERLAALEAEARRRLPGQGWHLRLVLPAVAYRVSEAKRRSGFSWSEAGRRVAVAGSCLSSGLNLKLPRRYLSRHRLSLLGEAFADPGLEALAEGQVLWDPIVAVEPAGKARTFDLRVPPFANFVSEDLVVHNTSPLGQVTIDGGTYDIYRTTRVNQPSIVGTATFDQYWSVRTSKRTSGTVTVTDHFRAWANRGLNLGTIDQITLCVEGYQSSGSANITQNTFSQGSSSGSSGGSSGSTTTTRIECENMSLSGPYVSRITNPFNGIALYANGDTARATVNFPASRNYNFRLRGCGNNNNLARVDLRIDGRTVGTFYYQGTYPWEAPIDNVYVSAGSHTVEITVTADNGTWDVYADYLVIQ

SEQ ID NO: 1643 - protein, 784 aa, Artificial Sequence
  Synthetic Construct, P77853-Tth-T134-89
MFLKKLSKLLLVVLLVAVYTQVNAQTSITLTSNASGTFDGYYYELWKDTGNTTMTVYTQGRFSCQWSNINNALFRTGKKYNQNWQSLGTIRITYSATYNPNGNSYLCIYGWSTNPLVEFYIVESWGNWRPPGACLAEGSLVLDAATGQRVPIEKVRPGMEVFSLGPDYRLYRVPVLEVLESGVREVVRLRTRSGRTLVLTPDHPLLTPEGWKPLCDLPLGTPIAVPAELPVAGHLAPPEERVTLLALLLGDGNTKLSGRRGTRPNAFFYSKDPELLAAYRRCAEALGAKVKAYVHPTTGVATLATLAPRPGAQDPVKRLVVEAGMVAKAEEKRVPEEVFRYRREALALFLGRLFSTDGSVEKKRISYSSASLGLAQDVAHLLLRLGITSQLRSRGPRAHEVLISGREDILRFAELIGPYLLGAKRERLAALETEARRRLPGQGWHLRLVLPAVAYRVSEAKRRSGFSWSEAGRRVAVAGSCLSSGLNLKLPRRYLSRHRLSLLGEAFADPGLEALAEGQVLWDPIVAVEPAGKARTFDLRVPPFANFVSEDLVVHNTSPLGQVTIDGGTYDIYRTTRVNQPSIVGTATFDQYWSVRTSKRTSGTVTVTDHFRAWANRGLNLGTIDQITLCVEGYQSSGSANITQNTFSQGSSSGSSGGSSGSTTTTRIECENMSLSGPYVSRITNPFNGIALYANGDTARATVNFPASRNYNFRLRGCGNNNNLARVDLRIDGRTVGTFYYQGTYPWEAPIDNVYVSAGSHTVEITVTADNGTWDVYADYLVIQ

SEQ ID NO: 1644 - protein, 783 aa, Artificial Sequence
  Synthetic Construct, P77853-Tth-T134-91
MFLKKLSKLLLVVLLVAVYTQVNAQTSITLTSNASGTFDGYYYELWKDTGNTTMTVYTQGRFSCQWSNINNALFRTGKKYNQNWQSLGTIRITYSATYNPNGNSYLCIYGWSTNPLVEFYIVESWGNWRPPGACLAEGSLVLDAATGQRVPIEKVRPGMEVFSLGPDYRLYRVPVLEVLESGVREVVRLRTRSGRTLVLTPDHPLLTPEGWKPLCDLPLGTPIAVPAELPVAGHLAPPEERVTLLALLLGDGNTKLSGRRGTRPNAFFYSKDPELLAAYRRCAEALGAKVKAYVHPTTGVVTLATLAPRPGAQDPVKRLVVEAGMVAKAEEKRVPEEVFRYRREALALFLGRLFSTDGSVEKKRISYSSATLGLAQDVAHLLLRLGITSQLRSRGPRAHEVLISGREDILRFAELIGPYLLGAKRERLAALEAEARRRLPGQGWHLRLVLPAVAYRVSEAKRRSGFSWSEAGRRVAVAGSCLSSGLNLKLPRRYLSRHRLSLLGEAFADPGLEALAEGQVLWDPIVAVEPAGKARTFDLRVPPFANFVSEDLVVHNKSLGQVTIDGGTYDIYRTTRVNQPSIVGTATFDQYWSVRTSKRTSGTVTVTDHFRAWANRGLNLGTIDQITLCVEGYQSSGSANITQNTFSQGSSSGSSGGSSGSTTTTRIECENMSLSGPYVSRITNPFNGIALYANGDTARATVNFPASRNYNFRLRGCGNNNNLARVDLRIDGRTVGTFYYQGTYPWEAPIDNVYVSAGSHTVEITVTADNGTWDVYADYLVIQ

SEQ ID NO: 1645 - protein, 783 aa, Artificial Sequence
  Synthetic Construct, P77853-Tth-T134-95
MFLKKLSKLLLVVLLVAVYTQVNAQTSITLTSNASGTFDGYYYELWKDTGNTTMTVYTQGRFSCQWSNINNALFRTGKKYNQNWQSLGTIRITYSATYNPNGNSYLCIYGWSTNPLVEFYIVESWGNWRPPGACLAEGSLVLDAATGQRVPIEKVRPGMEVFSLGPDYRLYRVPVLEVLESGVREVVRLRTRSGRTLVLTPDHPLLTPEGWKPLCDLPLGTPIAVPAELPVAGHLAPPEERVTLLALLLGDGNTKLSGRRGTRPNASFYSKDPELLAAYRRCAEALGAKVKAYVHPTTGVVTLATLAPRPGAQDPVKRLVVEAGMVAKAEEKRVPEEVFRYRREALALFLGRLFSTDGSVEKKRISYSSASLGLAQDVAHLLLRLGIRSQLRSRGPRAHEVLISGREDILRFAELIGPYLLGAKRERLAALEAEARRRLPGQGWHLRLVLPAVAYRVSEAKRRSGFSWSEAGRRVAVAGSCLSSGLNLKLPRRYLSRHRLSLLGEAFADPGLEALAEGQVLWDPIVAVEPAGKARTFDLRVPPFANFVSEDLVVHNKSLGQVTIDGGTYDIYRTTRVNQPSIVGTATFDQYWSVRTSKRTSGTVTVTDHFRAWANRGLNLGTIDQITLCVEGYQSSGSANITQNTFSQGSSSGSSGGSSGSTTTTRIECENMSLSGPYVSRITNPFNGIALYANGDTARATVNFPASRNYNFRLRGCGNNNNLARVDLRIDGRTVGTFYYQGTYPWEAPIDNVYVSAGSHTVEITVTADNGTWDVYADYLVIQ

SEQ ID NO: 1646 - protein, 783 aa, Artificial Sequence
  Synthetic Construct, P77853-Tth-T134-98
MFLKKLSKLLLVVLLVAVYTQVNAQTSITLTSNASGTFDGYYYELWKDTGNTTMTVYTQGRFSCQWSNINNALFRTGKKYNQNWQSLGTIRITYSATYNPNGNSYLCIYGWSTNPLVEFYIVESWGNWRPPGACLAEGSLVLDAATGQRVPIEKVRPGMEVFSLGPDYRLYRVPVSEVLESGVREVVRLRTRSGRTLVLTPDHLLLTPEGWKPLCDLPLGTPIAVPAELPVAGHLAPPEERVTLLALLLGDGNTKLSGRRGTRPNAFFYSKDPELLAAYRRCAEALGAKVKAYVHPTTGVVTLATLAPRPGAQDPVKRLVVEAGMVAKAEEKRVPEEVFRYRREALALFLGRLFSTDGSVEKKRISYSSASLGLAQDVAHLLLRLGITSQLRSRGPRAHEVLISGREDILRFAELIGPYLLGAKRERLAALEAEARRRLPGQGWHLRLVLPAVAYRVSEAKRRSGFSWSEAGRRVAVAGSCLSSGLNLKLPRRYLSRHRLSLLGEAFADPGLEALAEGQVLWDPIVAVEPAGKARTFDLRVPPFANFVSEDLVVHNTSLGQVTIDGGTYDIYRTTRVNQPSIVGTATFDQYWSVRTSKRTSGTVTVTDHFRAWANRGLNLGTIDQITLCVEGYQSSGSANITQNTFSQGSSSGSSGGSSGSTTTTRIECENMSLSGPYVSRITNPFNGIALYANGDTARATVNFPASRNYNFRLRGCGNNNNLARVDLRIDGRTVGTFYYQGTYPWEAPIDNVYVSAGSHTVEITVTADNGTWDVYADYLVIQ

SEQ ID NO: 1647 - protein, 784 aa, Artificial Sequence; identical to SEQ ID NO: 1634
  Synthetic Construct, P77853-Tth-T134-100

SEQ ID NO: 1648 - protein, 784 aa, Artificial Sequence
  Synthetic Construct, P77853-Tth-T134-108
MFLKKLSKLLLVVLLVAVYTQVNAQTSITLTSNASGTFDGYYYELWKDTGNTTMTVYTQGRFSCQWSNINNALFRTGKKYNQNWQSLGTIRITYSATYNPNGNSYLCIYGWSTNPLVEFYIVESWGNWRPPGACLAEGSLVLDAATGQRVPIEKVRPGMEVFSLGPDYRLYRVPVLEVLESGVREVVRLRTRSGRTLVLTPDHPLLTPEGWKPLCDLPLGTPIAVPAEVPVAGHLAPPEERVTLLALLLGDGNTKLSGRRGTRPNAFFYSKDPELLAAYRRCAEASGAKVKAYVHPTTGVVTLATLAPRPGAQDPVKRLVVEAGMVAKAEEKRVPEEVFRYRREALALFLGRLFSTDGSVEKKRISYSSASLGLAQDVAHLLLRLGITSQLRSIGPRAHEVLISGREDILRFAELIGPYLLGAKRERLAALEAEARRRLPGQGWHLRLVLPAVAYRVSEAKRRSGFSWSEAGRRVAVAGSCLSSGLNLKLPRRYLSRHRLSLLGEAFADPGLEALAEGQVLWDPIVAVEPAGKARTFDLRVPPFANFVSEDLVVHNTGPLGQVTIDGGTYDIYRTTRVNQPSIVGTATFDQYWSVRTSKRTSGTVTVTDHFRAWANRGLNLGTIDQITLCVEGYQSSGSANITQNTFSQGSSSGSSGGSSGSTTTTRIECENMSLSGPYVSRITNPFNGIALYANGDTARATVNFPASRNYNFRLRGCGNNNNLARVDLRIDGRTVGTFYYQGTYPWEAPIDNVYVSAGSHTVEITVTADNGTWDVYADYLVIQ

SEQ ID NO: 1649 - protein, 784 aa, Artificial Sequence
  Synthetic Construct, P77853-Tth-T134-110
MFLKKLSKLLLVVLLVAVYTQVNAQTSITLTSNASGTFDGYYYELWKDTGNTTMTVYTQGRFSCQWSNINNALFRTGKKYNQNWQSLGTIRITYSATYNPNGNSYLCIYGWSTNPLVEFYIVESWGNWRPPGACLAEGSLVLDAATGQRVPIEKVRPGMEVFSLGPDYRLYRVPVLEVLESGVREVVRLRTRSGRTLVLTPDHPLLTPEGWKPLCDLPLGTPIAVPAELPVAGHLAPPEERVTLLALLLGDGNTKLSGRRGTRPNAFFYSKDPELLAAYRRCAEALGAKVKAYVHPTTGVVTLATLAPRPGAQDPVKRLVVEAGMVAKAEEKRVPEEVFRYRREALALFLGRLFSTDGSVEKKRISYSSASLGLAQDVAHLLLRLGITSQLRSRGPRAHEVLISGREDILRFAELIGPYLLGAKRERLAALEAEARRRLPGQGWHLRLVPPAVAYRVSEAKRRSGFSWSEAGRRVAVAGSCLSSGLNLKLPRRYLSRHRLSLLGEAFADPGLEALAEGQVLWDPIVAVEPAGKARTFDLRVPPFANFVSEDLVVHNTSPLGQVTIDGGTYDIYRTTRVNQPSIVGTATFDQYWSVRTSKRTSGTVTVTDHFRAWANRGLNLGTIDQITLCVEGYQSSGSANITQNTFSQGSSSGSSGGSSGSTTTTRIECENMSLSGPYVSRITNPFNGIALYANGDTARATVNFPASRNYNFRLRGCGNNNNLARVDLRIDGRTVGTFYYQGTYPWEAPIDNVYVSAGSHTVEITVTADNGTWDVYADYLVIQ

SEQ ID NO: 1650 - protein, 783 aa, Artificial Sequence
  Synthetic Construct, P77853-Tth-T134-119
MFLKKLSKLLLVVLLVAVYTQVNAQTSITLTSNASGTFDGYYYELWKDTGNTTMTVYTQGRFSCQWSNINNALFRTGKKYNQNWQSLGTIRITYSATYNPNGNSYLCIYGWSTNPLVEFYIVESWGNWRPPGACLAEGSLVLDAATGQRVPIEKVRPGMEVFSLGPDYRLYRVPVLEVLESGVREVVRLRTRSGRTLVLTPDHTLLTPEGWKPLCDLPLGTPIAVPAELPVAGHLAPPEERVTLLALLLGDGNTKLSGRRGTRPNAFFHSKDPELLAAYRRCAEALGAKVKAYVHPTTGVVTLATLAPRPGAQDPVKRLVVEAGMVAKAEEKRVPEEVFRYRREALALFLGRLFSTDGSVEKKRISYSSASLGLAQDVAHLLLRLGITSQLRSRGPRAHEVLISGREDILRFAELIGPYLLGAKRERLAALEAEARRRLPGQGWHLRLVLPAVAYRVSEAKRRSGFSWSEAGRRVAVAGSCLSSGLNLKLPRRYLSRHRLSLLGEAFADPGLEALAEGQVLWDPIVAVEPAGKARTFDLRVPPFANFVSEDLVVHNTSLGQVTIDGGTYDIYRTTRVNQPSIVGTATFDQYWSVRTSKRTSGTVTVTDHFRAWANRGLNLGTIDQITLCVEGYQSSGSANITQNTFSQGSSSGSSGGSSGSTTTTRIECENMSLSGPYVSRITNPFNGIALYANGDTARATVNFPASRNYNFRLRGCGNNNNLARVDLRIDGRTVGTFYYQGTYPWEAPIDNVYVSAGSHTVEITVTADNGTWDVYADYLVIQ

SEQ ID NO: 1651 - protein, 783 aa, Artificial Sequence
  Synthetic Construct, P77853-Tth-T134-121
MFLKKLSKLLLVVLLVAVYTQVNAQTSITLTSNASGTFDGYYYELWKDTGNTTMTVYTQGRFSCQWSNINNALFRTGKKYNQNWQSLGTIRITYSATYNPNGNSYLCIYGWSTNPLVEFYIVESWGNWRPPGACLAEGSLVLDAATGQRVPIEKVRPGMEVFSLGPDYRLYRVPVLEVLESGVREVVRLRTRSGRTLVLTPDHTLLTPEGWKPLCDLPLGTPIAVPAELPVAGHLAPPEERVTLLALLLGDGNTKLSGRRGTRPNAFFYSKDPELLAAYRRCAEALGAKVKAYVHPTTGVVTLATLAPRPGAQDPVKRLVVEAGMVAKAEEKRVPEEVFRYRREALALFLGRLFSSDGSVEKKRISYSSASLGLAQDVAHLLLRLGITSQLRSRGPRAHEVLISGREDILRFAELIGPYLLGAKRERLAALEAEARRRLPGQGWHLRLVLPAVAYRVSEAKRRSGFSWSEAGRRVAVAGSCLSSGLNLKLPRRYLSRHRLSLLGEAFADPGLEALAEGQVLWDPIVAVEPAGKARTFDLRVPPFANFVSEDLVVHNTSLGQVTIDGGTYDIYRTTRVNQPSIVGTATFDQYWSVRTSKRTSGTVTVTDHFRAWANRGLNLGTIDQITLCVEGYQSSGSANITQNTFSQGSSSGSSGGSSGSTTTTRIECENMSLSGPYVSRITNPFNGIALYANGDTARATVNFPASRNYNFRLRGCGNNNNLARVDLRIDGRTVGTFYYQGTYPWEAPIDNVYVSAGSHTVEITVTADNGTWDVYADYLVIQ

SEQ ID NO: 1652 - protein, 783 aa, Artificial Sequence
  Synthetic Construct, P77853-Tth-T134-122
MFLKKLSKLLLVVLLVAVYTQVNAQTSITLTSNASGTFDGYYYELWKDTGNTTMTVYTQGRFSCQWSNINNALFRTGKKYNQNWQSLGTIRITYSATYNPNGNSYLCIYGWSTNPLVEFYIVESWGNWRPPGACLAEGSLVLGAATGQRVPIEKVRPGMEVFSLGPDYRLYRVPVLEVLESGVREVVRLRTRSGRTLVLTPDHQLLTPEGWKPLCDLPLGTPIAVPAELPVAGHLAPPEERVTLLALLLGDGNTKLSGRRGTRPNAFFYSKDPELLAAYRRCAEALGAKVKAYVHPTTGVVTLATLAPRPGAQDPVKRLVVEAGMVAKAEEKRVPEEVFRYRREALALFLGRLFSTDGSVEKKRISYSSASLGLAQDVAHLLLRLGITSQLRSRGPRAHEVLISGREDILRFAELIGPYLLGAKRERLAALEAEARRRLPGQGWHLRLVLPAVAYRVSEAKRRSGFSWSEAGRRVAVAGSCLSSGLNLKLPRRYLSRHRLSLLGEAFADPGLEALAEGQVLWDPIVAVEPAGKARTFDLRVPPFANFVSEDLVVHNTSLGQVTIDGGTYDIYRTTRVNQPSIVGTATFDQYWSVRTSKRTSGTVTVTDHFRAWANRGLNLGTIDQITLCVEGYQSSGSANITQNTFSQGSSSGSSGGSSGSTTTTRIECENMSLSGPYVSRITNPFNGIALYANGDTARATVNFPASRNYNFRLRGCGNNNNLARVDLRIDGRTVGTFYYQGTYPWEAPIDNVYVSAGSHTVEITVTADNGTWDVYADYLVIQ

SEQ ID NO: 1653 - protein, 783 aa, Artificial Sequence
  Synthetic Construct, P77853-Tth-T134-144
MFLKKLSKLLLVVLLVAVYTQVNAQTSITLTSNASGTFDGYYYELWKDTGNTTMTVYTQGRFSCQWSNINNALFRTGKKYNQNWQSLGTIRITYSATYNPNGNSYLCIYGWSTNPLVEFYIVESWGNWRPPGACLAEGSLVLDAATGQRVPIEKVRPGMEVFSLGPDYRLYRVPVLEVLESGVREVVRLRTRSGRTLVLTPDHPLLTPEGWKPLCDLPLGTPIAVPAELPVAGHLAPPEERVTLLALLLGDGNTKLSGRRGTRPNAFFYSKDPELLAAYRRCAEALGAKVKAYVHPTTGVVTLATLAPRPGAQDPVKRLVVEAGMVAKAEEKRVPEEVFRYRREALALFLGRLFSTDGSVEKKRISYSSASLGLAQDVAHLLLRLGITSQLRSRGPRAHEVLISGREDILRFAELIGPYLLGAKRERLAALEAEASRRLPGQGWHLRLVLPAVAYRVSEAKRRSGFSWSEAGRRVAVAGSCLSSGLNLKLPRRYLSRHRLSLLGEAFADPGLEALAEGQVLWDPIVAVEPAGKARTFDLRVPPFANFVSEDLVVHNSPLGQVTIDGGTYDIYRTTRVNQPSIVGTATFDQYWSVRTSKRTSGTVTVTDHFRAWANRGLNLGTIDQITLCVEGYQSSGSANITQNTFSQGSSSGSSGGSSGSTTTTRIECENMSLSGPYVSRITNPFNGIALYANGDTARATVNFPASRNYNFRLRGCGNNNNLARVDLRIDGRTVGTFYYQGTYPWEAPIDNVYVSAGSHTVEITVTADNGTWDVYADYLVIQ

SEQ ID NO: 1654 - protein, 783 aa, Artificial Sequence
  Synthetic Construct, P77853-Tth-T134-153
MFLKKLSKLLLVVLLVAVYTQVNAQTSITLTSNASGTFDGYYYELWKDTGNTTMTVYTQGRFSCQWSNINNALFRTGKKYNQNWQSLGTIRITYSATYNPNGNSYLCIYGWSTNPLVEFYIVESWGNWRPPGACLAEGSLVLDAATGQRVPIEKVRPGMEVFSLGPDYRLYRVPVLEVLESGVREVVRLRTRSGRTLVLTPDHLLLTPEGWKPLCDLPLGTPIAVPAELPVAGHLAPPEERVTLLALLLGDGNTKLSGRRGTRPNAFFYGKDPELLAAYRRCAEALGAKVKAYVHPTTGVVTLATLAPRPGAQDPVKRLVVEAGMVAKAEEKRVPEEVFRYRREALALFLGRLFSTDGSVEKKRISYSSASLGLAQDVAHLLLRLGITSQLRSRGPRAHEVLISGREDILRFAELIGPYLLGAKRERLAALEAEARRRLPGQGWHLRLVLPAVAYRVSEAKRRSGFSWSEAGRRVAVAGSCLSSGLNLKLPRRYLSRHRLSLLGEAFADPGLEALAEGQVLWDPIVAVEPAGRARTFDLRVPPYANFVSEDLVVHNTSLGQVTIDGGTYDIYRTTRVNQPSIVGTATFDQYWSVRTSKRTSGTVTVTDHFRAWANRGLNLGTIDQITLCVEGYQSSGSANITQNTFSQGSSSGSSGGSSGSTTTTRIECENMSLSGPYVSRITNPFNGIALYANGDTARATVNFPASRNYNFRLRGCGNNNNLARVDLRIDGRTVGTFYYQGTYPWEAPIDNVYVSAGSHTVEITVTADNGTWDVYADYLVIQ

SEQ ID NO: 1655 - protein, 784 aa, Artificial Sequence
  Synthetic Construct, P77853-Tth-T134-167
MFLKKLSKLLLVVLLVAVYTQVNAQTSITLTSNASGTFDGYYYELWKDTGNTTMTVYTQGRFSCQWSNINNALFRTGKKYNQNWQSLGTIRITYSATYNPNGNSYLCIYGWSTNPLVEFYIVESWGNWRPPGACLAEGSLVLDAATGQRVPIEKVRQGMEVFSLGPDYRLYRVPVLEVLESGVREVVRLRTRSGRTLVLTPDHPLLTPEGWKPLCDLPLGTPIAVPAELPVAGHLAPPEERVTLLALLLGDGNTKLSGRRGTRPNAFFYSKDPELLAAYRRCAEALGAKVKAYVHPTTGVVTLATLAPRPGAQDPVKRLVVEAGMVAKAEEKRVPEEVFRYRREALALFLGRLFSTDGSVEKKRISYSSASLGLAQDVAHLLLRLGITSQLRSRGPRAHEVLISGREDILRFAELIGPYLLGAKRERLAALEAEARRRLPGQGWHLRLVLPAVAYRVSEAKRRSGFSWSEAGRRVAVAGSCLSSGLNLKLPRRYLSRHRLSLLGEAFADPGLEALAEGQVLWDPIVAVEPAGKARTFDLRVPPFANFVSEDLVVHNNVPLGQVTIDGGTYDIYRTTRVNQPSIVGTATFDQYWSVRTSKRTSGTVTVTDHFRAWANRGLNLGTIDQITLCVEGYQSSGSANITQNTFSQGSSSGSSGGSSGSTTTTRIECENMSLSGPYVSRITNPFNGIALYANGDTARATVNFPASRNYNFRLRGCGNNNNLARVDLRIDGRTVGTFYYQGTYPWEAPIDNVYVSAGSHTVEITVTADNGTWDVYADYLVIQ

SEQ ID NO: 1656 - protein, 783 aa, Artificial Sequence
  Synthetic Construct, P77853-Tth-T134-168
MFLKKLSKLLLVVLLVAVYTQVNAQTSITLTSNASGTFDGYYYELWKDTGNTTMTVYTQGRFSCQWSNINNALFRTGKKYNQNWQSLGTIRITYSATYNPNGNSYLCIYGWSTNPLVEFYIVESWGNWRPPGACLAEGSLVLDAATGQRVPIEKVRPGMEVFSLGPDYRLYRVPVLEVLESGVREVVRLRTRSGRTLVLTPDHLLLTPEGWKPLCDLPLETPIAVPAELPVAGHLAPPEERVTLLALLLGDGNTKLSGRRGTRPNAFFYSKDPELLAAYRRCAEALGAKVKAYVHPTTGVVTLATLAPRPGAQDPVKRLVVEAGMVAKAEEKRVPEEVFRYRREALALFLGRLFSTDGSVEKKRISYSSASLGLAQDVAHLLLRLGITSQLRSRGPRAHEVLISGREDILRFAELIGPYLLGAKRERLAALEAEARRRLPGQGWHLRLVLPAVAYRVSEAKRRSGFSWSEAGRRVAVAGSCLSSGLNLKLPRRYLSRHRLSLLGEAFADPGLEALAEGQVFWDPIVAVEPAGKARTFDLRVPPFANFVSEDLVVHNTSLGQVTIDGGTYDIYRTTRVNQPSIVGTATFDQYWSVRTSKRTSGTVTVTDHFRAWANRGLNLGTIDQITLCVEGYQSSGSANITQNTFSQGSSSGSSGGSSGSTTTTRIECENMSLSGPYVSRITNPFNGIALYANGDTARATVNFPASRNYNFRLRGCGNNNNLARVDLRIDGRTVGTFYYQGTYPWEAPIDNVYVSAGSHTVEITVTADNGTWDVYADYLVIQ

SEQ ID NO: 1657 - protein, 784 aa, Artificial Sequence
  Synthetic Construct, P77853-Tth-T134-173
MFLKKLSKLLLVVLLVAVYTQVNAQTSITLTSNASGTFDGYYYELWKDTGNTTMTVYTQGRFSCQWSNINNALFRTGKKYNQNWQSLGTIRITYSATYNPNGNSYLCIYGWSTNPLVEFYIVESWGNWRPPGACLAEGSLVLDAATGQRVPIEKVRPGMEVFSLGPDYRLYRVPVLEVLESGVREVVRLRTRSGRTLVLTPDHPLLTPEGWKPLCDLPLGTPIAVPAELHVAGHLAPPEERVTLLALLLGDGNTKLSGRRGTRPNAFFYSKDPELLAAYRRCAEALGAKVKAYVHPTTGVVTLATLAPRPGAQDPVKRLVVEAGMVAKAEEKRVPEEVFRYRREALALFLGRLFSTDGSVEKKRISYSSASLGLAQDVAHLLLRLGITSQLRSRGPRAHEVLISGREDILRFAELIGPYLLGAKRERLAALEAEARRRLPGQGWHLRLVLPAVAYRVSEAKRRSGFSWSEAGRRVAVAGSCLSSGLNLKLPRRYLSRHRLSLLGEAFADPGLEALAEGQVLWDPIVAVEPAGKARTFDLRVPPFANFVSEDLVVHNTSPLGQVTIDGGTYDIYRTTRVNQPSIVGTATFDQYWSVRTSKRTSGTVTVTDHFRAWANRGLNLGTIDQITLCVEGYQSSGSANITQNTFSQGSSSGSSGGSSGSTTTTRIECENMSLSGPYVSRITNPFNGIALYANGDTARATVNFPASRNYNFRLRGCGNNNNLARVDLRIDGRTVGTFYYQGTYPWEAPIDNVYVSAGSHTVEITVTADNGTWDVYADYLVIQ

SEQ ID NO: 1658 - protein, 783 aa, Artificial Sequence
  Synthetic Construct, P77853-Tth-T134-174
MFLKKLSKLLLVVLLVAVYTQVNAQTSITLTSNASGTFDGYYYELWKDTGNTTMTVYTQGRFSCQWSNINNALFRTGKKYNQNWQSLGTIRITYSATYNPNGNSYLCIYGWSTNPLVEFYIVESWGNWRPPGACLAEGSLVLDAATGQRVPIEKVRPGMEVFSLGPDYRLYRVPVLEVLESGVREVVRLRTRSGRTLVLTPDHPLLTPEGWKPLCDLPLGTPIAVPAELPVAGHLAPPEERVTLLALLLGDGNTKLSGRRGTRPNAFFYSKDPELLAAYRRCAEALGAKVKAYVHPTTGVVTLATLAPRPGAQDPVKRLVVEAGMVAKAEEKRVPEEVFRYRREALALFLGRLFSTDGSVEKKRISYSSASLGLAQDVAHLLLRLGITSQLRSRGPRAHEVLISGREDILRFAELIGPYLLGAKRERLAALEAEARRRLPGQGWHLRLVLPAVAYRVSEAKRRSGFSWSEAGRRVAVAGSCLSSGLNLKLPRRYLSRHRLSLLGEAFADPGLEALAEGQVLWDPIVAVEPAGKARTFDLRVPPFANFVSEDLVVHNKSLGQVTIDGGTYDIYRTTRVNQPSIVGTATFDQYWSVRTSKRTSGTVTVTDHFRAWANRGLNLGTIDQITLCVEGYQSSGSANITQNTFSQGSSSGSSGGSSGSTTTTRIECENMSLSGPYVSRITNPFNGIALYANGDTARATVNFPASRNYNFRLRGCGNNNNLARVDLRIDGRTVGTFYYQGTYPWEAPIDNVYVSAGSHTVEITVTADNGTWDVYADYLVIQ

SEQ ID NO: 1659 - protein, 784 aa, Artificial Sequence; identical to SEQ ID NO: 1630
  Synthetic Construct, P77853-Tth-T134-175

SEQ ID NO: 1660 - protein, 784 aa, Artificial Sequence
  Synthetic Construct, P77853-Tth-T134-180
MFLKKLSKLLLVVLLVAVYTQVNAQTSITLTSNASGTFDGYYYELWKDTGNTTMTVYTQGRFSCQWSNINNALFRTGKKYNQNWQSLGTIRITYSATYNPNGNSYLCIYGWSTNPLVEFYIVESWGNWRPPGACLAEGSLVLDAATGQRVPIEKVRPGMEVFSLGPDYRLYRVPVLEVLESGVREVVRLRTRSGRTLVLTPDHPLLTPEGWKPLCDLPLGTPIAVPAELPVAGHLAPPEERVTLLALLLGDGNTKLSGRRGTRPNAFFYSKDPELLAAYRRCAEALGAKVKAYVHPTTGVVTLATLAPRPGAQDPVKRLVVEAGMVAKAEEKRVPEEVFRYRREALALFLGRLFSTDGSVEKKRISYSSASLGLAQDVAHLLLRLGITSQLRSRGPRAHEVLISGREDILRFAELIGPYLLGAKRERLAALEAEARRRLPGQGWHLRLVLPAVAYRVSEAKRRSGFSWSEAGRRVAVAGSCLSSGLNLKLPRRYLSRHRLSLLGEAFADPGLEALAEGQVLWDPIVAVEPAGKARTFDLRVPPFANFVSEDLVVHNTSPMGQVTIDGGTYDIYRTTRVNQPSIVGTATFDQYWSVRTSKRTSGTVTVTDHFRAWANRGLNLGTIDQITLCVEGYQSSGSANITQNTFSQGSSSGSSGGSSGSTTTTRIECENMSLSGPYVSRITNPFNGIALYANGDTARATVNFPASRNYNFRLRGCGNNNNLARVDLRIDGRTVGTFYYQGTYPWEAPIDNVYVSAGSHTVEITVTADNGTWDVYADYLVIQ

SEQ ID NO: 1661 - protein, 784 aa, Artificial Sequence
  Synthetic Construct, P77853-Tth-T134-190
MFLKKLSKLLLVVLLVAVYTQVNAQTSITLTSNASGTFDGYYYELWKDTGNTTMTVYTQGRFSCQWSNINNALFRTGKKYNQNWQSLGTIRITYSATYNPNGNSYLCIYGWSTNPLVEFYIVESWGNWRPPGACLAEGSLVLGAATGQRVPIEKVRPGMEVFSLGPDYRLYRVPVLEVLESGVREVVRLRTRSGRTLVLTPDHPLLTPEGWKPLCDLPLGTPIAVPAELPVAGHLAPPEERVTLLALLLGDGNTKLSGRRGTRPNAFFYSKDPELLAAYRRCAEALGAKVKAYVHPTTGVVTLATLAPRPGAQDPVKRLVVEAGMVAKAEEKRVPEEVFRYRREALALFLGRLFSTDGSVEKKRISYSSASLGLAQDVAHLLLRLGITSQLRSRGPRAHEVLISGREDILRFAELIGPYLLGAKRERLAALEAEARRRLPGQGWHLRLVLPAVAYIVSEAKRRSGFSWSEAGRRVVVAGSCLSSGLNLKLPRRYLSRHRLSLLGEAFADPGLEALAEGQVLWDPIVAVEPAGKARTFDLRVPPFANFVSEDLVVHNQRSLGQVTIDGGTYDIYRTTRVNQPSIVGTATFDQYWSVRTSKRTSGTVTVTDHFRAWANRGLNLGTIDQITLCVEGYQSSGSANITQNTFSQGSSSGSSGGSSGSTTTTRIECENMSLSGPYVSRITNPFNGIALYANGDTARATVNFPASRNYNFRLRGCGNNNNLARVDLRIDGRTVGTFYYQGTYPWEAPIDNVYVSAGSHTVEITVTADNGTWDVYADYLVIQ

SEQ ID NO: 1662 - protein, 784 aa, Artificial Sequence; identical to SEQ ID NO: 1630
  Synthetic Construct, P77853-Tth-T134-191

SEQ ID NO: 1663 - protein, 784 aa, Artificial Sequence
  Synthetic Construct, P77853-Tth-T134-193
MFLKKLSKLLLVVLLVAVYTQVNAQTSITLTSNASGTFDGYYYELWKDTGNTTMTVYTQGRFSCQWSNINNALFRTGKKYNQNWQSLGTIRITYSATYNPNGNSYLCIYGWSTNPLVEFYIVESWGNWRPPGACLAEGSLVLDAATGQRVPIEKVRPGMEVFSLGPDYRLYRVPVLEVLESGVREVVRLRTRSGRTLVLTPDHPLLTPEGWKPLCDLPLGTPIAVPAELPVAGHLAPPEERVTLLALLLGDGNTKLSGRRGTRPNAFFYSKDPELLAAYRRCAEALGTKVKAYVHPTTGVVTLATLAPRPGAQDPVKRLVVEAGMVAKAEEKRVPEEVFRYRREALALFLGRLFSTDGSVEKKRISYSSASLGLAQDVAHLLLRLGITSQLRSRGPRAHEVLISGREDILRFAELIGPYLLGAKRERLAALEAEARRRLPGQGWHLRLVLPAVAYRVSEAKRRSGFSWSEAGRRVAVAGSCLSSGLNLKLPRRYLSRHRLSLLGEAFADPGLEALAEGQVLWDPIVAVEPAGKARTFDLRVPPFANFVSEDLVVHNTVPLGQVTIDGGTYDIYRTTRVNQPSIVGTATFDQYWSVRTSKRTSGTVTVTDHFRAWANRGLNLGTIDQITLCVEGYQSSGSANITQNTFSQGSSSGSSGGSSGSTTTTRIECENMSLSGPYVSRITNPFNGIALYANGDTARATVNFPASRNYNFRLRGCGNNNNLARVDLRIDGRTVGTFYYQGTYPWEAPIDNVYVSAGSHTVEITVTADNGTWDVYADYLVIQ

SEQ ID NO: 1664 - protein, 784 aa, Artificial Sequence
  Synthetic Construct, P77853-Tth-T134-194
MFLKKLSKLLLVVLLVAVYTQVNAQTSITLTSNASGTFDGYYYELWKDTGNTTMTVYTQGRFSCQWSNINNALFRTGKKYNQNWQSLGTIRITYSATYNPNGNSYLCIYGWSTNPLVEFYIVESWGNWRPPGACLAEGSLVLDAATGQRVPIEKVRPGMEVFSLGPDYRLYRVPVLEVLESGVREVVRLRTRSGRTLVLTPDHPLLTPEGWKPLCDLPLGTPIAVPAELPVAGHLAPPEERVTLLALLLGDGNTKLSGRRGTRPNAFFYSKDPELLAAYRRCAEALGAKVKAYVHPTTGVVTLATLAPRPGAQDPVKRLVVEAGMVAKAEEKRVPEEVFRYRREALALFLGRLFSTDGSVEKKRISYSSASLGLAQDVAHLLLRLGITSQLRSRGPRAHEVLISGREDILRFAEIIGPYLLGAKRERLAALEAEARRRLPGQGWHLRLVLPAVAYRVSEAKRRSGFSWSEAGRRVAVAGSCLSSGLNLKLPRRYLSRHRLSLLGEAFADPGLEALAEGQVLWDPIVAVEPAGKARTFDLRVPPFANFVSEDLVVHNNVPLGQVTIDGGTYDIYRTTRVNQPSIVGTATFDQYWSVRTSKRTSGTVTVTDHFRAWANRGLNLGTIDQITLCVEGYQSSGSANITQNTFSQGSSSGSSGGSSGSTTTTRIECENMSLSGPYVSRITNPFNGIALYANGDTARATVNFPASRNYNFRLRGCGNNNNLARVDLRIDGRTVGTFYYQGTYPWEAPIDNVYVSAGSHTVEITVTADNGTWDVYADYLVIQ

SEQ ID NO: 1665 - protein, 784 aa, Artificial Sequence
  Synthetic Construct, P77853-Tth-T134-195
MFLKKLSKLLLVVLLVAVYTQVNAQTSITLTSNASGTFDGYYYELWKDTGNTTMTVYTQGRFSCQWSNINNALFRTGKKYNQNWQSLGTIRITYSATYNPNGNSYLCIYGWSTNPLVEFYIVESWGNWRPPGACLAEGSLVLDAATGQRVPIEKVRPGMEVFSLGPDYRLYRVPVLEVLESGVREVVRLRTRSGRTLVLTPDHPLLTPEGWKPLCDLPLGTPIAVPAELPVAGHLAPPEERVTLLALLLGDGNTKLSGRRGTRPNAFFYSKDPELLAAYRRCAEALGAKVKAYVHPTTGVVTLASLAPRPGAQDPVKRLVVEAGMVAKAEEKRVPEEVFRYRREALALFLGRLFSTDGSVEKKRISYSSASLGLAQDVAHLLLRLGITSQLRSRGPRAHEVLISGREDILRFAELIGPYLLGAKRERLAALEAEARRRLPGQGWHLRLVLPAVAYRVSEAKRRSGFSWSEAGRRVAVAGSCLSSGLNLKLPRRYLSRHRLSLLGEAFADPGLEVLAEGQVLWDPIVAVEPAGKARTFDLRVPPFANFVSEDLVVHNTSPLGQVTIDGGTYDIYRTTRVNQPSIVGTATFDQYWSVRTSKRTSGTVTVTDHFRAWANRGLNLGTIDQITLCVEGYQSSGSANITQNTFSQGSSSGSSGGSSGSTTTTRIECENMSLSGPYVSRITNPFNGIALYANGDTARATVNFPASRNYNFRLRGCGNNNNLARVDLRIDGRTVGTFYYQGTYPWEAPIDNVYVSAGSHTVEITVTADNGTWDVYADYLVIQ

SEQ ID NO: 1666 - protein, 783 aa, Artificial Sequence
  Synthetic Construct, P77853-Tth-T134-218
MFLKKLSKLLLVVLLVAVYTQVNAQTSITLTSNASGTFDGYYYELWKDTGNTTMTVYTQGRFSCQWSNINNALFRTGKKYNQNWQSLGTIRITYSATYNPNGNSYLCIYGWSTNPLVEFYIVESWGNWRPPGACLAEGSLVLDAATGQRVPIEKVRPGMEVFSLGPDYRLYRVPVLEVLESGVREVVRLRTRSGRTLVLTPDHPLLTPEGWKPLCDLPLGTPIAVPAELPVAGHLAPPEERVTLLALLLGDGNTKLSGRRGTRPNAFFYSKDPELLAAYRRCAEALGAKVKAYVHPTTGVVTLATLAPRPGAQDPVKRLVVEAGMVAKAEEKRVPEEVFRYRREALALFLGRLFSTDGSVEKKRISYSSASLGLAQDVAHLLLRLGITSQLRSRGPRAHEVLISGREDILRFAELIGPYLLGAKRERLAALEAEARRRLPGQGWHLRLVLPAVAYRLSEAKRRSGFSWSEAGRRVTVAGSCLSSGLNLKLPRRYLSRHRLSLLGEAFADPGLEALAEGQVLWDPIVAVEPAGKARTFDLRVPPFANFVSEDLVVHNKSLGQVTIDGGTYDIYRTTRVNQPSIVGTATFDQYWSVRTSKRTSGTVTVTDHFRAWANRGLNLGTIDQITLCVEGYQSSGSANITQNTFSQGSSSGSSGGSSGSTTTTRIECENMSLSGPYVSRITNPFNGIALYANGDTARATVNFPASRNYNFRLRGCGNNNNLARVDLRIDGRTVGTFYYQGTYPWEAPIDNVYVSAGSHTVEITVTADNGTWDVYADYLVIQ

SEQ ID NO: 1667 - protein, 783 aa, Artificial Sequence
  Synthetic Construct, P77853-Tth-T134-219
MFLKKLSKLLLVVLLVAVYTQVNAQTSITLTSNASGTFDGYYYELWKDTGNTTMTVYTQGRFSCQWSNINNALFRTGKKYNQNWQSLGTIRITYSATYNPNGNSYLCIYGWSTNPLVEFYIVESWGNWRPPGACLAEGSLVLDAATGQRVPIEKVRPGMEVFSLGPDYRLYRVPVLEVLESGVREVVRLRTRSGRTLVLTPDHLLLTPEGWEPLCDLPLGTPIAVPAELPVAGHFAPPEERVTLLALLLGDGNTKLSGRRGTRPNAFFYSKDPELLAAHRRCAEALGAKVKAYVHPTTGVVTLATLAPRPGAQDPVKRLVVEAGMVAKAEEKRVPEEVFRYRREALALFLGRLFSTDGSVEKKRISYSSASLGLAQDVAHLLLRLGITSQLRSRGPRAHEVLISGREDILRFAELIGPYLLGAKRERLAALEAEARRRLPGQGWHLRLVLPAVAYRVSEAKRRSGFSWSEAGRRVAVAGSCLSSGLNLKLPRRYLSRHRLSLLGEAFADPGLEALAEGQVLWDPIVAVEPAGKARTFDLRVPPFANFVSEDLVVHNTSLGQVTIDGGTYDIYRTTRVNQPSIVGTATFDQYWSVRTSKRTSGTVTVTDHFRAWANRGLNLGTIDQITLCVEGYQSSGSANITQNTFSQGSSSGSSGGSSGSTTTTRIECENMSLSGPYVSRITNPFNGIALYANGDTARATVNFPASRNYNFRLRGCGNNNNLARVDLRIDGRTVGTFYYQGTYPWEAPIDNVYVSAGSHTVEITVTADNGTWDVYADYLVIQ

SEQ ID NO: 1668 - protein, 783 aa, Artificial Sequence; identical to SEQ ID NO: 1658
  Synthetic Construct, P77853-Tth-T134-225

SEQ ID NO: 1669 - protein, 783 aa, Artificial Sequence
  Synthetic Construct, P77853-Tth-T134-238
MFLKKLSKLLLVVLLVAVYTQVNAQTSITLTSNASGTFDGYYYELWKDTGNTTMTVYTQGRFSCQWSNINNALFRTGKKYNQNWQSLGTIRITYSATYNPNGNSYLCIYGWSTNPLVEFYIVESWGNWRPPGACLAEGSLVLDAATGQRVPIEKVRPGMEVFSLGPDYRLYRVPVLEVLESGVREVVRLRTRSGRTLVLTPDHPLLTPEGWKPLCDLPLGTPIAVPAELPVAGHLAPPEERATLLALLLGDGNTKLSGRRGTRPNAFFYSKDPELLAAYRRCAEALGAKVKAYVHPTTGVVTLATLAPRPGAQDPVKRLVVEAGMVAKAEEKRVPEEVFRYRREALALFLGRLFSTDGSVEKKRISYSSASLGLAQDVAHLLLRLGITSQLRSRGPRAHEVLISGREDILRFAELIGPYLLGAKRERLAALEAEARRRLPGQGWHLRLVLPAVAYRVSEAKRRSGFSWSEAGRRVAVAGSCLSSGLNLKLPRRYLSRHRLSLLGEAFADPGLEALAEGQVLWDPIVAVEPAGKARTFDLRVPPFANFVSEDLVVHNTSLGQVTIDGGTYDIYRTTRVNQPSIVGTATFDQYWSVRTSKRTSGTVTVTDHFRAWANRGLNLGTIDQITLCVEGYQSSGSANITQNTFSQGSSSGSSGGSSGSTTTTRIECENMSLSGPYVSRITNPFNGIALYANGDTARATVNFPASRNYNFRLRGCGNNNNLARVDLRIDGRTVGTFYYQGTYPWEAPIDNVYVSAGSHTVEITVTADNGTWDVYADYLVIQ

SEQ ID NO: 1670 - protein, 783 aa, Artificial Sequence
  Synthetic Construct, P77853-Tth-T134-248
MFLKKLSKLLLVVLLVAVYTQVNAQTSITLTSNASGTFDGYYYELWKDTGNTTMTVYTQGHFSCQWSNINNALFRTGKKYNQNWQSLGTIRITYSATYNPNGNSYLCIYGWSTNPLVEFYIVESWGNWRPPGACLAEGSLVLDAATGQRVPIEKVRPGMEVFSLGPDYRLYRVPVLEVLESGAREVVRLRTRSGRTLVLTPDHPLLTPEGWKPLCDLPLGTPIAVPAELPVAGHLAPPEERVTLLALLLGDGNTKLSGRRGTRPNAFFYSKDPELLAAYRRCAEALGAKVKAYVHPTTGVVTLATLAPRPGAQDPVKRLVVEAGMVAKAEEKRVPEEVFRYRREALALFLGRLFSTDGSVEKKRISYSSASLGLAHDVAHLLLRLGITSQLRSRGPRAHEVLISGREDILRFAELIGPYLLGAKRERLAALEAEARRRLPGQGWHLRLVLPAVAYRVSEAKRRSGFSWSEAGRRVAVAGSCLSSGLNLKLPRRYLSRHRLSLLGEAFADPGLEALAEGQVLWDPIVAVEPAGKARTFDLRVPPFANFVSEDLVVHNTSLGQVTIDGGTYDIYRTTRVNQPSIVGTATFDQYWSVRTSKRTSGTVTVTDHFRAWANRGLNLGTIDQITLCVEGYQSSGSANITQNTFSQGSSSGSSGGSSGSTTTTRIECENMSLSGPYVSRITNPFNGIALYANGDTARATVNFPASRNYNFRLRGCGNNNNLARVDLRIDGRTVGTFYYQGTYPWEAPIDNVYVSAGSHTVEITVTADNGTWDVYADYLVIQ

SEQ ID NO: 1671 - protein, 783 aa, Artificial Sequence; identical to SEQ ID NO: 1636
  Synthetic Construct, P77853-Tth-T134-249

SEQ ID NO: 1672 - protein, 783 aa, Artificial Sequence
  Synthetic Construct, P77853-Tth-S158-2
MFLKKLSKLLLVVLLVAVYTQVNAQTSITLTSNASGTFDGYYYELWKDTGNTTMTVYTQGRFSCQWSNINNALFRTGKKYNQNWQSLGTIRITYSATYNPNGNSYLCIYGWSTNPLVEFYIVESWGNWRPPGATSLGQVTIDGGTYDIYRTTRVNQPCLAEGSLVLDAATGQRVPIEKVRPGMEVFSLGPDYRLYRVPVLEVLESGVREVVRLRTRSGRTLVLTPDHPLLTPEGWKPLCDLPLGTPIAVPAELPVAGHLAPPEERVTLLALLLGDGNTKLPGRRGTRPNAFFYSKDPELLAAYRRCAEALGAKVKAYVHPTTGVVTLATLAPRPGAQDPVKRLVVEAGMVAKAEEKRVPEEVFRYRREALALFLGRLFSTDGSVEKKRISYSSASLGLAQDDAHLLLRLGITSQLRSRGPRAHEVLISGREDILRFAELIGPYLLGAKRERLAALEAEARRRLPGQGWHLRLVLPAVAYRVSEAKRRSGFSWSEAGRRVAVAGSCLSSGLNLKLPRRYLSRHRLSLLGEAFADPGLEALAEGQVLWDPIVAVEPAGKARTFDLRVPPFANFVSEDLVVHNSIVGTATFDQYWSVRTSKRTSGTVTVTDHFRAWANRGLNLGTIDQITLCVEGYQSSGSANITQNTFSQGSSSGSSGGSSGSTTTTRIECENMSLSGPYVSRITNPFNGIALYANGDTARATVNFPASRNYNFRLRGCGNNNNLARVDLRIDGRTVGTFYYQGTYPWEAPIDNVYVSAGSHTVEITVTADNGTWDVYADYLVIQ

SEQ ID NO: 1673 - protein, 783 aa, Artificial Sequence
  Synthetic Construct, P77853-Tth-S158-4
MFLKKLSKLLLVVLLVAVYTQVNAQTSITLTSNASGTFDGYYYELWKDTGNTTMTVYTQGRFSCQWSNINNALFRTGKKYNQNWQSLGTIRITYSATYNPNGNSYLCIYGWSTNPLVEFYIVESWGNWRPPGATSLGQVTIDGGTYDIYRTTRVNQPCLAEGSLVLDAATGQRVPIEKVRPGMEVFSLGPDYRLYRVPVLEVLESGVREVVRLRTRSGRTLVLTPDHPLLTPEGWKPLCDLPLGTPIAVPAELPVAGHLAPPEERVTLLALLLGDGNTKLSGRRGTRPNAFFYSKDPELLAAYRRCAEALGAKVKAYVHPTTGVVTLATLAPRPGAQDPVKRLVVEAGMVAKAEEKRVPEEVFRYRREALALFLGRLFSTDGSVEKKRISYSSASLGLAQDVAHLLLRLGITSQLRSRGPRAHEVLISGREDILRFAELIGPYLLGAKRERLAALEAEARRRLPGQGWHLRLVLPAVAYRVSEAKRRSGFSWSEAGRRVAVAGSCLSSGLNLKLPRRYLSRHRLSLLGEAFADPGLEALAEGQVLWNPIVAVEPAGKARTFDLRVPPFANFVSEDLVVHNSIVGTATFDQYWSVRTSKRTSGTVTVTDHFRAWANRGLNLGTIDQITLCVEGYQSSGSANITQNTFSQGSSSGSSGGSSGSTTTTRIECENMSLSGPYVSRITNPFNGIALYANGDTARATVNFPASRNYNFRLRGCGNNNNLARVDLRIDGRTVGTFYYQGTYPWEAPIDNVYVSAGSHTVEITVTADNGTWDVYADYLVIQ

SEQ ID NO: 1674 - protein, 783 aa, Artificial Sequence
  Synthetic Construct, P77853-Tth-S158-7
MFLKKLSKLLLVVLLVAVYTQVNAQTSITLTSNASGTFDGYYYELWKDTGNTTMTVYTQGRFSCQWSNINNALFRTGKKYNQNWQSLGTIRITYSATYNPNGNSYLCIYGWSTNPLVEFYIVESWGNWRPPGATSLGQVTIDGGTYDIYRTTRVNQPCLAEGSLVLDAATGQRVPIEKVRPGMEVFSLGPDYRLYRVPVLEVLESGVREVVRLRTRSGRTLVLTPDHPLLTPEGWKPLCDLPLGTPIAVPAELPVAGHLAPPEERVTLLALLLGDGNTKLSGRRGTRPNAFFYSKDPELLAAYRRCAEALGAKVKAYVHPTTGVVTLATLAPRPGAQDPVKRLVVEAGMVAKAEEKRVPEEVFRYRREALALFLGRLFSTDGSVEKKRISYSSASLGLAQDVAHLLLRLGITSQLRSRGPRAHEVLISGREDILRFAELIGPYLLGAKRERLAALEAEARRRLPGQGWHLRLVLPAVAYRVSEAKRRSGFSWSEAGRRVAVAGSCLSSGLNLKLPRRYLSRHRLSLLGEAFADPGLEALAGGQVLWDPIVAVEPAGKARTFDLRVPPFANFVSEDLVVHNSIVGTATFDQYWSVRTSKRTSGTVTVTDHFRAWANRGLNLGTIDQITLCVEGYQSSGSANITQNTFSQGSSSGSSGGSSGSTTTTRIECENMSLSGPYVSRITNPFNGIALYANGDTARATVNFPASRNYNFRLRGCGNNNNLARVDLRIDGRTVGTFYYQGTYPWEAPIDNVYVSAGSHTVEITVTADNGTWDVYADYLVIQ

SEQ ID NO: 1675 - protein, 783 aa, Artificial Sequence
  Synthetic Construct, P77853-Tth-S158-19
MFLKKLSKLLLVVLLVAVYTQVNAQTSITLTSNASGTFDGYYYELWKDTGNTTMTVYTQGRFSCQWSNINNALFRTGKKYNQNWQSLGTIRITYSATYNPNGNSYLCIYGWSTNPLVEFYIVESWGNWRPPGATSLGQVTIDGGTYDIYRTTRVNQPCLAEGSLVLDAATGQRVPIEKVRPGMEVFSLGPDYRLYRVPVLEVLESGVGEVVRLRTRSGRTLVLTPDHPLLTPEGWKPLCDLPLGTPIAVPAELPVAGHLAPPEERVTLLALLLGDGNTKLSGRRGTRPIAFFYSKDPELLAAYRRCAEALGAKVKAYVHPTTGVVTLATLAPRPGAQDPVKRLVVEAGMVAKAEEKRVPEEVFRYRREALALFLGRLFSTDGSVEKKRISYSSASLGLAQDVAHLLLRLGITSQLRSRGPRAHEVLISGREDILRFAELIGPYLLGAKRERLAALEAEARRRLPGQGWHLRLVLPAVAYRVSEAKRRSGFSWSEAGRRVAVAGSCLSSGLNLKLPRRYLSRHRLSLLGEAFADPGLEALAEGQVLWDPIVAVEPAGKARTFDLRVPPFANFVSEDLVVHNSIVGTATFDQYWSVRTSKRTSGTVTVTDHFRAWANRGLNLGTIDQITLCVEGYQSSGSANITQNTFSQGSSSGSSGGSSGSTTTTRIECENMSLSGPYVSRITNPFNGIALYANGDTARATVNFPASRNYNFRLRGCGNNNNLARVDLRIDGRTVGTFYYQGTYPWEAPIDNVYVSAGSHTVEITVTADNGTWDVYADYLVIQ

SEQ ID NO: 1676 - protein, 783 aa, Artificial Sequence
  Synthetic Construct, P77853-Tth-S158-20
MFLKKLSKLLLVVLLVAVYTQVNAQTSITLTSNASGTFDGYYYELWKDTGNTTMTVYTQGRFSCQWSNINNALFRTGKKYNQNWQSLGTIRITYSATYNPNGNSYLCIYGWSTNPLVEFYIVESWGNWRPPGATSLGQVTIDGGTYDIYRTTRVNQACLAEGSLVLDAATGQRVPIEKVRPGMEVFSLGPDYRLYRVPVLEVLESGVREVVRLRTRSGRTLVLTPDHPLLTPEGWKPLCDLPLGTPIAVPAELPVAGHLAPPEERVTLLALLLGDGNTKLSGRRGTRPNAFFYSKDPELLAAYRRCAEALGAKVKAYVHPTTGVVTLATLAPRPGAQDPVKRLVVEAGMVAKAEEKRVPEEVFRYRREALALFLGRLFSTDGSVEKKRISYSSASLGLAQDVAHLLLRLGITSQLRSRGPRAHEVLISGREDILRFAELIGPYLLGAKRERLAALEAEARRRLPGQGWHLRLVLPAVAYRVSEAKRRSGFSWSEAGRRVAVAGSCLSSGLNLKLPRRYLSRHRLSLLGEAFADPGLEALAEGQVLWDPIVAVEPAGKARTFDLRVPPFANFVSEDLVVHNSIVGTATFDQYWSVRTSKRTSGTVTVTDHFRAWANRGLNLGTIDQITLCVEGYQSSGSANITQNTFSQGSSSGSSGGSSGSTTTTRIECENMSLSGPYVSRITNPFNGIALYANGDTARATVNFPASRNYNFRLRGCGNNNNLARVDLRIDGRTVGTFYYQGTYPWEAPIDNVYVSAGSHTVEITVTADNGTWDVYADYLVIQ

SEQ ID NO: 1677 - protein, 783 aa, Artificial Sequence
  Synthetic Construct, P77853-Tth-S158-21
MFLKKLSKLLLVVLLVAVYTQVNAQTSITLTSNASGTFDGYYYELWKDTGNTTMTVYTQGRFSCQWSNINNALFRTGKKYNQNWQSLGTIRITYSATYNPNGNSYLCIYGWSTNPLVEFYIVESWGNWRPPGATSLGQVTIDGGTYDIYRTTRVNQPCLAEGSLVLDAATGQRVPIEKVRPGMEVFSLGPDYRLYRVPVLEVLESGVREVVRLRTRSGRTLVLTPDHPLLTPEGWKPLCDLPLGTPIAVPAELPVAGHLAPPEERVTLLALLLGDGNTKLSGRRGTRPNAFFYSKDPELLAAYRRCGEALGAKVKAYVHPTTGVVTLATLAPRPGAQDPVKRLVVEAGMVAKAEEKRVPEEVFRYRREALALFLGRLFSTDGSVEKKRISYSSASLGLAQDVAHLLLRLGITSQLRSRGPRAHEVLISGREDILRFAELIGPYLLGAKRERLAALEAEARRRLPGQGWHLRLVLPAVAYRVSEAKRRSGFSWSEAGRRVAVAGSCLSSGLNLKLPRRYLSQHRLSLLGEAFADPGLEALAEGQVLWDPIVAVEPAGKARTFDLRVPPFANFVSEDLVVHNSIVGTATFDQYWSVRTSKRTSGTVTVTDHFRAWANRGLNLGTIDQITLCVEGYQSSGSANITQNTFSQGSSSGSSGGSSGSTTTTRIECENMSLSGPYVSRITNPFNGIALYANGDTARATVNFPASRNYNFRLRGCGNNNNLARVDLRIDGRTVGTFYYQGTYPWEAPIDNVYVSAGSHTVEITVTADNGTWDVYADYLVIQ

SEQ ID NO: 1678 - protein, 783 aa, Artificial Sequence
  Synthetic Construct, P77853-Tth-S158-25
MFLKKLSKLLLVVLLVAVYTQVNAQTSITLTSNASGTFDGYYYELWKDTGNTTMTVYTQGRFSCQWSNINNALFRTGKKYNQNWQSLGTIRITYSATYNPNGNSYLCIYGWSTNPLVEFYIVESWGNWRPPGATSLGQVTIDGGTYDIYRTTRVNQPCLAEGSLVLDAATGQRVPIEKVRPGMEVFSLGPDYRLYRVPVLEVLESGVGEVVRLRTRSGRTLVLTPDHPLLTPEGWKPLCDLPLGTPIAVPAELPVAGHLAPPEERVTLLALLLGDGNTKLSGRRGTRPNAFFYSKDPELLAAYRRCAEALGAKVKAYVHPTTGVVTLATLAPRPGAQDPVKRLVVEAGMVAKAEEKRVPEEVFRYRREALALFLGRLFSTDGSVEKKRISYSSASLGLAQDVAHLLLRLGITSQLRSRGPRAHEVLISGREDILRFAELIGPYLLGAKRERLAALEAEARRRLPGQGWHLRLVLPAVAYRVSEAKRRSGFSWSEAGRRVAVAGSCLSSGLNLKLPRRYLSRHRLSLLGEAFADPGLEALAEGQVLWDPIVAVEPAGKARTFDLRVPPFANFVSEDLVVHNSIVGTATFDQYWSVRTSKRTSGTVTVTDHFRAWANRGLNLGTIDQITLCVEGYQSSGSANITQNTFSQGSSSGSSGGSSGSTTTTRIECENMSLSGPYVSRITNPFNGIALYANGDTARATVNFPASRNYNFRLRGCGNNNNLARVDLRIDGRTVGTFYYQGTYPWEAPIDNVYVSAGSHTVEITVTADNGTWDVYADYLVIQ

SEQ ID NO: 1679 - protein, 783 aa, Artificial Sequence
  Synthetic Construct, P77853-Tth-S158-38
MFLKKLSKLLLVVLLVAVYTQVNAQTSITLTSNASGTFDGYYYELWKDTGNTTMTVYTQGRFSCQWSNINNALFRTGKKYNQNWQSLGTIRITYSATYNPNGNSYLCIYGWSTNPLVEFYIVESWGNWRPPGATSLGQVTIDGGTYDIYRTTRVNQPCLAEGSLVLDAATGQRVPIEKVRPGMEVFSLGPDYRLYRVPVLEVLESGVSEVVRLRTRSGRTLVLTPDHPLLTPEGWKPLCDLPLGTPIAVPAELPVAGHLAPPEERVTLLALLLGDGNTKLSGRRGTRPNAFFYSKDPELLAAYRRCAEALGAKVKAYVHPTTGVVTLATLAPRPGAQDPVKRLVVEAGMVAKAEEKRVPEEVFRYRREALALFLGRLFSTDGSVEKKRISYSSASLGLAQDVAHLLLRLGITSQLRSRGPRAHEVLISGREDILRFAELIGPYLLGAKRERLAALEAEARRRLPGQGWHLRLVLPAVAYRVSEAKRRSGFSWSEAGRRVAVAGSCLSSGLNLKLPRRYLSRHRLSLLGEAFADPGLEALAEGQVLWDPIVAVEPAGKARTFDLRVPPFANFVSEDLVVHNSIVGTATFDQYWSVRTSKRTSGTVTVTDHFRAWANRGLNLGTIDQITLCVEGYQSSGSANITQNTFSQGSSSGSSGGSSGSTTTTRIECENMSLSGPYVSRITNPFNGIALYANGDTARATVNFPASRNYNFRLRGCGNNNNLARVDLRIDGRTVGTFYYQGTYPWEAPIDNVYVSAGSHTVEITVTADNGTWDVYADYLVIQ

SEQ ID NO: 1680 - protein, 783 aa, Artificial Sequence
  Synthetic Construct, P77853-Tth-S158-39
MFLKKLSKLLLVVLLVAVYTQVNAQTSITLTSNASGTFDGYYYELWKDTGNTTMTVYTQGRFSCQWSNINNALFRTGKKYNQNWQSLGTIRITYSATYNPNGNSYLCIYGWSTNPLVEFYIVESWGNWRPPGATSLGQVTIDGGTYDIYRTTRVNQPCLAEGSLVLDAATGQRVPIEKVRPGMEVFSLGPDYRLYRVPVLEVLESGVGEVVRLRTRSGRTLVLTPDHPLLTPEGWKPLCDLPLGTPIAVPAELPVAGHLAPPEERVTLLALLLGDGNTKLSGRRGTRPNAFFYSKDPELLAAYRRCAEALGAKVKAYVHPTTGVVTLATLAPRPGAQDPVKRLVVEAGMVAKAEEKRVPEEVFRYRREALALFLGRLSSTDGSVERKRISYSSASLGLAQDVAHLLLRLGITSQLRSRGPRAHEVLISGREDILRFAELIGPYLLGAKRERLAALEAEARRRLPGQGWHLRLVLPAVAYRVSEAKRRSGFSWSEAGQRVAVAGSCLSSGLNLKLPRRYLSRHRLSLLGEAFADPGLEALAEGQVLWDPIVAVEPAGKARTFDLRVPPFANFVSEDLVVHNSIVGTATFDQYWSVRTSKRTSGTVTVTDHFRAWANRGLNLGTIDQITLCVEGYQSSGSANITQNTFSQGSSSGSSGGSSGSTTTTRIECENMSLSGPYVSRITNPFNGIALYANGDTARATVNFPASRNYNFRLRGCGNNNNLARVDLRIDGRTVGTFYYQGTYPWEAPIDNVYVSAGSHTVEITVTADNGTWDVYADYLVIQ

SEQ ID NO: 1681 - protein, 783 aa, Artificial Sequence; identical to SEQ ID NO: 1679
  Synthetic Construct, P77853-Tth-S158-42

SEQ ID NO: 1682 - protein, 783 aa, Artificial Sequence
  Synthetic Construct, P77853-Tth-S158-107
MFLKKLSKLLLVVLLVAVYTQVNAQTSITLTSNASGTFDGYYYELWKDTGNTTMTVYTQGRFSCQWSNINNALFRTGKKYNQNWQSLGTIRITYSATYNPNGNSYLCIYGWSTNPLVEFYIVESWGNWRPPGATSLGQVTIDGGTYDIYRTTRVNQPCLAEGSLVLDAATGQRVPIEKVRPGMEVFSLGPDYRLYRVPVLEVLESGVREVVRLRTRSGRTLVLTPDHPLLTPEGWKPLCDLPLGTPIAVPAELPVAGHLAPPEERVTLLALLLGDGNTKLSGRRGTRPNAFFYSKDPELLAAYRRCAEALGAKVKAYAHPTTGVVTLATLAPRPGAQDPVKRLVVEAGMVAKAEEKRVPEEVFRYRREALALFLGRLFSTDGSVEKKRISYSSASLGLAQDVAHLLLRLGITSQLRSRGPRAHEVLISGREDILRFAELIGPYLLGAKRERLAALEAEARRRLPGQGWHLRLVLPAVAYRASEAKRRSGFSWSEAGRRVAVAGSCLSSGLNLKLPRRYLSRHRLSLLGEAFADPGLEALAEGQVLWDPIVAVEPAGKARTFDLRVPPFANFVSEDLVVHNSIVGTATFDQYWSVRTSKRTSGTVTVTDHFRAWANRGLNLGTIDQITLCVEGYQSSGSANITQNTFSQGSSSGSSGGSSGSTTTTRIECENMSLSGPYVSRITNPFNGIALYANGDTARATVNFPASRNYNFRLRGCGNNNNLARVDLRIDGRTVGTFYYQGTYPWEAPIDNVYVSAGSHTVEITVTADNGTWDVYADYLVIQ

SEQ ID NO: 1683 - protein, 783 aa, Artificial Sequence
  Synthetic Construct, P77853-Tth-S158-111
MFLKKLSKLLLVVLLVAVYTQVNAQTSITLTSNASGTFDGYYYELWKDTGNTTMTVYTQGRFSCQWSNINNALFRTGKKYNQNWQSLGTIRITYSATYNPNGNSYLCIYGWSTNPLVEFYIIESWGNWRPPGATSLGQVTIDGGTYDIYRTTRVNQPCLAEGSLVLDAATGQRVPIEKVRPGMEVFSLGPDYRLYRVPVLEVLESGVREVVRLRTRSGRTLVLTPDHPLLTPEGWKPLCDLPLGTPIAVPAELPVAGHLAPPEERVTLLALLLGDGNTKLSGRRGTRPNAFFYSKDPELLAAYRRCAEALGAKVKAYVHPTTGVVTLATLAPRPGAQDPVKRLVVEAGMVAKAEEKRVPEEVFRYRREALALFLGRLFSTDGSVEKKRISYSSASLGLAQDVAHLLLRLGISSQLRSRGPRAHEVLISGREDILQFAELIGPYLLGAKRERLAALEAEARRRLPGQGWHLRLVLPAVAYRVSQAKRRTGFSWSEAGRRVAVAGSCLSSELNLKLPRRYLSRHRLSLLGEAFADPGLEALAEGQVLWDPIVAVEPAGKARTFDLRVPPFANFVSEDLVVHNSIVGTATFDQYWSVRTSKRTSGTVTVTDHFRAWANRGLNLGTIDQITLCVEGYQSSGSANITQNTFSQGSSSGSSGGSSGSTTTTRIECENMSLSGPYVSRITNPFNGIALYANGDTARATVNFPASRNYNFRLRGCGNNNNLARVDLRIDGRTVGTFYYQGTYPWEAPIDNVYVSAGSHTVEITVTADNGTWDVYADYLVIQ

SEQ ID NO: 1684 - protein, 783 aa, Artificial Sequence; identical to SEQ ID NO: 1683
  Synthetic Construct, P77853-Tth-S158-112

SEQ ID NO: 1685 - protein, 783 aa, Artificial Sequence
  Synthetic Construct, P77853-Tth-S158-113
MFLKKLSKLLLVVLLVAVYTQVNAQTSITLTSNASGTFDGYYYELWKDTGNTTMTVYTQGRFSCQWSNINNALFRTGKKYNQNWQSLGTIRITYSATYNPNGNSYLCIYGWSTNPLVEFYIVESWGNWRPPGATSLGQVTIDGGTYDIYRTTRVNQPCLAEGSLVLDAATGQRVPIEKVRPGMEVFSLGPDYRLYRVPVLEVLESGVREVVRLRTRSGRTLVLTPDHPLLTPEGWKPLCDLPLGTPIAVPAELPVAGHLAPPEERVTLLALLLGDGNTKLSGRRGTRPNAFFYSKDPELLAAYRRCAEALGAKVKAYVHPTTGVVTLATLAPRPGAQDPVKRLVVEAGMVAKAEEKRVPEEVFRYRREALVLFLGRLFSTDGSVEKKRISYSSASLGLAQDVAHLLLRLGITSQLRSRGPRAHEVLISGREDILRFAELIGPYLLGAKRERLAALEAEARRRLPGQGWHLRLVLPAVAYRVSEAKRRSGFSWSEAGRRVAVAGSCLSSGLNLKLPRRYLSRRRLSLLGEAFADPGLEALAEGQVLWDPIVAVEPAGKARTFDLRVPPFANFVSEDLVVHNSIVGTATFDQYWSVRTSKRTSGTVTVTDHFRAWANRGLNLGTIDQITLCVEGYQSSGSANITQNTFSQGSSSGSSGGSSGSTTTTRIECENMSLSGPYVSRITNPFNGIALYANGDTARATVNFPASRNYNFRLRGCGNNNNLARVDLRIDGRTVGTFYYQGTYPWEAPIDNVYVSAGSHTVEITVTADNGTWDVYADYLVIQ

SEQ ID NO: 1686 - protein, 783 aa, Artificial Sequence
  Synthetic Construct, P77853-Tth-S158-115
MFLKKLSKLLLVVLLVAVYTQVNAQTSITLTSNASGTFDGYYYELWKDTGNTTMTVYTQGRFSCQWSNINNALFRTGKKYNQNWQSLGTIRITYSATYNPNGNSYLCIYGWSTNPLVEFYIVESWGNWRPPGATSLGQVTIDGGTYDIYRTTRVNQPCLAEGSLVLDAATGQRVPIEKVRPGMEVFSLGPDYRLYRVPVLEVLESGVREVVRLRTRSGRTLVLTPDHPLLTPEGWKPLCDLPLGTPIAVPAELPVAGHLAPPEERVTLLALLLGDGNTKLSGRRGTRPNAFFYSKDPELLAAYRRCAEALGAKVKAYVHPTTGVVTLATLAPRPGAQDPVKRLVVEAGMVAKAEEKRVPEEVFRYRREALALFLGRLFSTDGSVEKKRISYSSASLGLAQDVAHLLLRLGITSQLRSRGPRAHEVLISGREDILRFAELIGPYLLGAKRERLAALEAEARRRLPGQGWHLRLALPAVAYRVSEAKRRSGFSWSEAGRRVAVAGSCLSSGLNLKLPRRYLSRHRLSLLGEAFADPGLEALAEGQVLWDPIVAVESAGKARTFDLRVPPFANFVSEDLVVHNSIVGTATFDQYWSVRTSKRTSGTVTVTDHFRAWANRGLNLGTIDQITLCVEGYQSSGSANITQNTFSQGSSSGSSGGSSGSTTTTRIECENMSLSGPYVSRITNPFNGIALYANGDTARATVNFPASRNYNFRLRGCGNNNNLARVDLRIDGRTVGTFYYQGTYPWEAPIDNVYVSAGSHTVEITVTADNGTWDVYADYLVIQ

SEQ ID NO: 1687 - protein, 783 aa, Artificial Sequence
  Synthetic Construct, P77853-Tth-S158-128
MFLKKLSKLLLVVLLVAVYTQVNAQTSITLTSNASGTFDGYYYELWKDTGNTTMTVYTQGRFSCQWSNINNALFRTGKKYNQNWQSLGTIRITYSATYNPNGNSYLCIYGWSTNPLVEFYIVESWGNWRPPGATSLGQVTIDGGTYDIYRTTRVNQPCLAEGSLVLDAATGQRVPIEKVRPGMEVFSLGPDYRLYRVPVLEVLESGVREVVRLRTRSGRTLVLTPDHPLLTPEGWKPLCDLPPGTPIAVPAELPVAGHLAPPEERVTLLALLLGDGNTKLSGRRGTRPNAFFYSKDPELLAAYRRCAEALGAKVKAYVHPTTGVVTLATLAPRPGAQDPVKRLVVEAGMVAKAEEKRVPEEVFRYRREALALFLGRLFSTDGSVERKRISYSSASLGLAQDVAHLLLRLGITSQLRSRGPRAHEVLISGREDILRFAELIGPYLLGAKRERLAALEAEARRRLPGQGWHLRLVLPAVAYRVSEAKRRSGFSWSEAGRRVAVTGSCLSSGLNLKLPRRYLSRHRLSLLGEAFADPGLEALAEGQVLWDPIVAVEPAGKARTFDLRVPPFANFVSEDLVVHNSIVGTATFDQYWSVRTSKRTSGTVTVTDHFRAWANRGLNLGTIDQITLCVEGYQSSGSANITQNTFSQGSSSGSSGGSSGSTTTTRIECENMSLSGPYVSRITNPFNGIALYANGDTARATVNFPASRNYNFRLRGCGNNNNLARVDLRIDGRTVGTFYYQGTYPWEAPIDNVYVSAGSHTVEITVTADNGTWDVYADYLVIQ

SEQ ID NO: 1688 - protein, 783 aa, Artificial Sequence
  Synthetic Construct, P77853-Tth-S158-131
MFLKKLSKLLLVVLLVAVYTQVNAQTSITLTSNASGTFDGYYYELWKDTGNTTMTVYTQGRFSCQWSNINNALFRTGKKYNQNWQSLGTIRITYSATYNPNGNSYLCIYGWSTNPLVEFYIVESWGNWRPPGATSLGQVTIDGGTYDIYRTTRVNQPCLAEGSLVLDAATGQRVPIEKVRPGMEVFSLGPDYRLYRVPVLEVLESGVREVVRLRTRSGRTLVLTPDHPLLTPEGWKPLCDLPLGTPIAVPAELPVAGHLAPPEERVTLLALLLGDGNTKLSGRRGTRPNAFFYSKDPELLAAYRRCAEALGAKVKAYVHPTTGVVTLATLAPRPGAQDPVKRLVVEAGMVAKAEEKRVPEEVFRYRREALAIFLGRLFSTDGSVEKKRISYSSAGLGLAQDVAHLLLRLGITSQLRSRGPRAHEVLISGREDILRFAELIGPYLLGAKRERLAALEAEARRRLPGQGWHLRLVLPAVAYRVSEAKRRSGFSWSEAGRRVAVAGSCLSSGLNLKLPRRYLSRHRLSLLGEAFADPGLEALAEGQVLWDPIVAVEPAGKARTFDLRVPPFANFVSEDLVVHNSIVGTATFDQYWSVRTSKRTSGTVTVTDHFRAWANRGLNLGTIDQITLCVEGYQSSGSANITQNTFSQGSSSGSSGGSSGSTTTTRIECENMSLSGPYVSRITNPFNGIALYANGDTARATVNFPASRNYNFRLRGCGNNNNLARVDLRIDGRTVGTFYYQGTYPWEAPIDNVYVSAGSHTVEITVTADNGTWDVYADYLVIQ

SEQ ID NO: 1689 - protein, 783 aa, Artificial Sequence
  Synthetic Construct, P77853-Tth-S158-132
MFLKKLSKLLLVVLLVAVYTQVNAQTSITLTSNASGTFDGYYYELWKDTGNTTMTVYTQGRFSCQWSNINNALFRTGKKYNQNWQSLGTIRITYSATYNPNGNSYLCIYGWSTNPLVEFYIVESWGNWRPPGATSLGQVTIDGGTYDIYRTTRVNQPCLAEGSLVLDAATGQRVPIEKVRPGMEVFSLGPDYRLYRVPVLEVLESGVSEVVRLRTRSGRTLVLTPDHPLLTPEGWKPLCDLPLGTPIAVPAELPVAGHLAPPEERVTLLALLLGDGNTKLSGRRGTRPNAFFYSKDPELLAAYRRCAEALGAKVKAYVHPTTGVVTLATLAPRPGAQDPVKRLVVEAGMVAKAEEKRVPEEVFRYRREALALFLGRLFSTDGSVEKKRISYSSASLGLAQDVAHLLLRLGITSQLRSRGPRAHEVLISGREDILRFAELIGPYLLGAKRERLAALEAEARRRLPGQGWHLRLVLPAVAYRVSEAKRRSGFSWSEAGRRVAVAGPCLSSGLNLKLPRRYLSRHRLSLLGEAFADPELEALAEGQVLWDPIVAVEPAGKARTFDLRVPPFANFVSEDLVVHNSIVGTATFDQYWSVRTSKRTSGTVTVTDHFRAWANRGLNLGTIDQITLCVEGYQSSGSANITQNTFSQGSSSGSSGGSSGSTTTTRIECENMSLSGPYVSRITNPFNGIALYANGDTARATVNFPASRNYNFRLRGCGNNNNLARVDLRIDGRTVGTFYYQGTYPWEAPIDNVYVSAGSHTVEITVTADNGTWDVYADYLVIQ

SEQ ID NO: 1690 - protein, 783 aa, Artificial Sequence
  Synthetic Construct, P77853-Tth-S158-137
MFLKKLSKLLLVVLLVAVYTQVNAQTSITLTSNASGTFDGYYYELWKDTGNTTMTVYTQGRFSCQWSNINNALFRTGKKYNQNWQSLGTIRITYSATYNPNGNSYLCIYGWSTNPLVEFYIVESWGNWRPPGATSLGQVTIDGGTYDIYRTTRVNQPCLAEGSLVLDAATGQRVPIEKVRPGMEVFSLGPDYRLYRVPVLEVLESGVREVVRLRTRSGRTLVLTPDHPLLTPEGWKPLCDLPLGTPIAVPAELPVAGHLAPPEERVTLLALLLGDGNTKLSGRRGTRPNAFFYSKDPELLAAYRRCAEALGAKVKAYVHPTTGVVTLATLAPRPGAQDPVKRLVVEAGMVAKAEEKRVPEEVFRYRREALALFLGRLFSTDGSVEKKRISYSSASLGLAQDVAHLLLRLGITSQLRSRGPRAHEVLISGREDILRFAELIGPYLLGAKRERLAALEAEARRRLPRQGWHLRLVLPAVAYRVSEAKRRSGFSWSEAGRRVAVAGSCLSSGLNLKLPRRYLSRHRLSLLGEAFADPGLEALAEGQVHWDPIVAVEPAGKARTFDLRVPPFANFVSEDLVVHNSIVGTATFDQYWSVRTSKRTSGTVTVTDHFRAWANRGLNLGTIDQITLCVEGYQSSGSANITQNTFSQGSSSGSSGGSSGSTTTTRIECENMSLSGPYVSRITNPFNGIALYANGDTARATVNFPASRNYNFRLRGCGNNNNLARVDLRIDGRTVGTFYYQGTYPWEAPIDNVYVSAGSHTVEITVTADNGTWDVYADYLVIQ

SEQ ID NO: 1691 - protein, 783 aa, Artificial Sequence
  Synthetic Construct, P77853-Tth-S158-138
MFLKKLSKLLLVVLLVAVYTQVNAQTSITLTSNASGTFDGYYYELWKDTGNTTMTVYTQGRFSCQWSNINNALFRTGKKYNQNWQSLGTIRITYSATYNPNGNSYLCIYGWSTNPLVEFYIVESWGNWRPPGATSLGQVTIDGGTYDIYRTTRVNQPCLAEGSLVLDAATGQRVPIEKVRPGMEVFSLGPDYRLYRVPVLEVLESGVGEVVRLRTRSGRTLVLTPDHPLLTPEGWKPLCDLPLGTPIAVPAELPVAGHLAPPEERVTLLALLLGDGNTKLSGRRGTRPNAFFYSKDPELLAAYRRCAEALGAKVKAYVHPTTGVVTLATLAPRPGAQDPVKRLVVEAGMVAKAEEKRVPEEVFRYRREALALFLGRLFSTDGSVEKKRISYSSASLGLGQDVAHLLLRLGITSQLRSRGPRAHEVLISGREDILRFAELIGPYLLGAKRERLAALEAEARRRLPGQGWHLRLVLPAVAYRVSEAKRRSGFSWSEAGRRVAVAGSCLSSGLNLKLPRRYLSRHRLSLLGEAFADPGLEALAEGQVLWDPIVAVEPAGKARTFDLRVPPFANFVSEDLVVHNSIVGTATFDQYWSVRTSKRTSGTVTVTDHFRAWANRGLNLGTIDQITLCVEGYQSSGSANITQNTFSQGSSSGSSGGSSGSTTTTRIECENMSLSGPYVSRITNPFNGIALYANGDTARATVNFPASRNYNFRLRGCGNNNNLARVDLRIDGRTVGTFYYQGTYPWEAPIDNVYVSAGSHTVEITVTADNGTWDVYADYLVIQ

SEQ ID NO: 1692 - protein, 897 aa, Artificial Sequence
  Synthetic Construct, P77853-PspPol-S63
MFLKKLSKLLLVVLLVAVYTQVNAQTSITLTSNASGTFDGYYYELWKDTGNTTMTVYTQGRFSILPEEWVPLIKNGKVKIFRIGDFVDGLMKANQGKVKKTGDTEVLEVAGIHAFSFDRKSKKARVMAVKAVIRHRYSGNVYRIVLNSGRKITITEGHSLFVYRNGDLVEATGEDVKIGDLLAVPRSVNLPEKRERLNIVELLLNLSPEETEDIILTIPVKGRKNFFKGMLRTLRWIFGEEKRVRTASRYLRHLENLGYIRLRKIGYDIIDKEGLEKYRTLYEKLVDVVRYNGNKREYLVEFNAVRDVISLMPEEELKEWRIGTRNGFRMGTFVDIDEDFAKLLGYYVSEGSARKWKNQTGGWSYTVRLYNENDEVLDDMEHLAKKFFGKVKRGKNYVEIPKKMAYIIFESLCGTLAENKRVPEVIFTSSKGVRWAFLEGYFIGDGDVHPSKRVRLSTKSELLVNGLVLLLNSLGVSAIKLGYDSGVYRVYVNEELKFTEYRKKKNVYHSHIVPKDILKETFGKVFQKNISYKKFRELVENGKLDREKAKRIEWLLNGDIVLDRVVEIKREYYDGYVYDLSVDEDENFLAGFGFLYAHNSCQWSNINNALFRTGKKYNQNWQSLGTIRITYSATYNPNGNSYLCIYGWSTNPLVEFYIVESWGNWRPPGATSLGQVTIDGGTYDIYRTTRVNQPSIVGTATFDQYWSVRTSKRTSGTVTVTDHFRAWANRGLNLGTIDQITLCVEGYQSSGSANITQNTFSQGSSSGSSGGSSGSTTTTRIECENMSLSGPYVSRITNPFNGIALYANGDTARATVNFPASRNYNFRLRGCGNNNNLARVDLRIDGRTVGTFYYQGTYPWEAPIDNVYVSAGSHTVEITVTADNGTWDVYADYLVIQ

SEQ ID NO: 1693 - protein, 897 aa, Artificial Sequence
  Synthetic Construct, P77853-PspPol-S67
MFLKKLSKLLLVVLLVAVYTQVNAQTSITLTSNASGTFDGYYYELWKDTGNTTMTVYTQGRFSCQWSILPEEWVPLIKNGKVKIFRIGDFVDGLMKANQGKVKKTGDTEVLEVAGIHAFSFDRKSKKARVMAVKAVIRHRYSGNVYRIVLNSGRKITITEGHSLFVYRNGDLVEATGEDVKIGDLLAVPRSVNLPEKRERLNIVELLLNLSPEETEDIILTIPVKGRKNFFKGMLRTLRWIFGEEKRVRTASRYLRHLENLGYIRLRKIGYDIIDKEGLEKYRTLYEKLVDVVRYNGNKREYLVEFNAVRDVISLMPEEELKEWRIGTRNGFRMGTFVDIDEDFAKLLGYYVSEGSARKWKNQTGGWSYTVRLYNENDEVLDDMEHLAKKFFGKVKRGKNYVEIPKKMAYIIFESLCGTLAENKRVPEVIFTSSKGVRWAFLEGYFIGDGDVHPSKRVRLSTKSELLVNGLVLLLNSLGVSAIKLGYDSGVYRVYVNEELKFTEYRKKKNVYHSHIVPKDILKETFGKVFQKNISYKKFRELVENGKLDREKAKRIEWLLNGDIVLDRVVEIKREYYDGYVYDLSVDEDENFLAGFGFLYAHNSNINNALFRTGKKYNQNWQSLGTIRITYSATYNPNGNSYLCIYGWSTNPLVEFYIVESWGNWRPPGATSLGQVTIDGGTYDIYRTTRVNQPSIVGTATFDQYWSVRTSKRTSGTVTVTDHFRAWANRGLNLGTIDQITLCVEGYQSSGSANITQNTFSQGSSSGSSGGSSGSTTTTRIECENMSLSGPYVSRITNPFNGIALYANGDTARATVNFPASRNYNFRLRGCGNNNNLARVDLRIDGRTVGTFYYQGTYPWEAPIDNVYVSAGSHTVEITVTADNGTWDVYADYLVIQ

SEQ ID NO: 1694 - protein, 897 aa, Artificial Sequence
  Synthetic Construct, P77853-PspPol-S86
MFLKKLSKLLLVVLLVAVYTQVNAQTSITLTSNASGTFDGYYYELWKDTGNTTMTVYTQGRFSCQWSNINNALFRTGKKYNQNWQSILPEEWVPLIKNGKVKIFRIGDFVDGLMKANQGKVKKTGDTEVLEVAGIHAFSFDRKSKKARVMAVKAVIRHRYSGNVYRIVLNSGRKITITEGHSLFVYRNGDLVEATGEDVKIGDLLAVPRSVNLPEKRERLNIVELLLNLSPEETEDIILTIPVKGRKNFFKGMLRTLRWIFGEEKRVRTASRYLRHLENLGYIRLRKIGYDIIDKEGLEKYRTLYEKLVDVVRYNGNKREYLVEFNAVRDVISLMPEEELKEWRIGTRNGFRMGTFVDIDEDFAKLLGYYVSEGSARKWKNQTGGWSYTVRLYNENDEVLDDMEHLAKKFFGKVKRGKNYVEIPKKMAYIIFESLCGTLAENKRVPEVIFTSSKGVRWAFLEGYFIGDGDVHPSKRVRLSTKSELLVNGLVLLLNSLGVSAIKLGYDSGVYRVYVNEELKFTEYRKKKNVYHSHIVPKDILKETFGKVFQKNISYKKFRELVENGKLDREKAKRIEWLLNGDIVLDRVVEIKREYYDGYVYDLSVDEDENFLAGFGFLYAHNSLGTIRITYSATYNPNGNSYLCIYGWSTNPLVEFYIVESWGNWRPPGATSLGQVTIDGGTYDIYRTTRVNQPSIVGTATFDQYWSVRTSKRTSGTVTVTDHFRAWANRGLNLGTIDQITLCVEGYQSSGSANITQNTFSQGSSSGSSGGSSGSTTTTRIECENMSLSGPYVSRITNPFNGIALYANGDTARATVNFPASRNYNFRLRGCGNNNNLARVDLRIDGRTVGTFYYQGTYPWEAPIDNVYVSAGSHTVEITVTADNGTWDVYADYLVIQ

SEQ ID NO: 1695 - protein, 897 aa, Artificial Sequence
  Synthetic Construct, P77853-PspPol-S95
MFLKKLSKLLLVVLLVAVYTQVNAQTSITLTSNASGTFDGYYYELWKDTGNTTMTVYTQGRFSCQWSNINNALFRTGKKYNQNWQSLGTIRITYSILPEEWVPLIKNGKVKIFRIGDFVDGLMKANQGKVKKTGDTEVLEVAGIHAFSFDRKSKKARVMAVKAVIRHRYSGNVYRIVLNSGRKITITEGHSLFVYRNGDLVEATGEDVKIGDLLAVPRSVNLPEKRERLNIVELLLNLSPEETEDIILTIPVKGRKNFFKGMLRTLRWIFGEEKRVRTASRYLRHLENLGYIRLRKIGYDIIDKEGLEKYRTLYEKLVDVVRYNGNKREYLVEFNAVRDVISLMPEEELKEWRIGTRNGFRMGTFVDIDEDFAKLLGYYVSEGSARKWKNQTGGWSYTVRLYNENDEVLDDMEHLAKKFFGKVKRGKNYVEIPKKMAYIIFESLCGTLAENKRVPEVIFTSSKGVRWAFLEGYFIGDGDVHPSKRVRLSTKSELLVNGLVLLLNSLGVSAIKLGYDSGVYRVYVNEELKFTEYRKKKNVYHSHIVPKDILKETFGKVFQKNISYKKFRELVENGKLDREKAKRIEWLLNGDIVLDRVVEIKREYYDGYVYDLSVDEDENFLAGFGFLYAHNSATYNPNGNSYLCIYGWSTNPLVEFYIVESWGNWRPPGATSLGQVTIDGGTYDIYRTTRVNQPSIVGTATFDQYWSVRTSKRTSGTVTVTDHFRAWANRGLNLGTIDQITLCVEGYQSSGSANITQNTFSQGSSSGSSGGSSGSTTTTRIECENMSLSGPYVSRITNPFNGIALYANGDTARATVNFPASRNYNFRLRGCGNNNNLARVDLRIDGRTVGTFYYQGTYPWEAPIDNVYVSAGSHTVEITVTADNGTWDVYADYLVIQ

SEQ ID NO: 1696 - protein, 897 aa, Artificial Sequence
  Synthetic Construct, P77853-PspPol-S112
MFLKKLSKLLLVVLLVAVYTQVNAQTSITLTSNASGTFDGYYYELWKDTGNTTMTVYTQGRFSCQWSNINNALFRTGKKYNQNWQSLGTIRITYSATYNPNGNSYLCIYGWSILPEEWVPLIKNGKVKIFRIGDFVDGLMKANQGKVKKTGDTEVLEVAGIHAFSFDRKSKKARVMAVKAVIRHRYSGNVYRIVLNSGRKITITEGHSLFVYRNGDLVEATGEDVKIGDLLAVPRSVNLPEKRERLNIVELLLNLSPEETEDIILTIPVKGRKNFFKGMLRTLRWIFGEEKRVRTASRYLRHLENLGYIRLRKIGYDIIDKEGLEKYRTLYEKLVDVVRYNGNKREYLVEFNAVRDVISLMPEEELKEWRIGTRNGFRMGTFVDIDEDFAKLLGYYVSEGSARKWKNQTGGWSYTVRLYNENDEVLDDMEHLAKKFFGKVKRGKNYVEIPKKMAYIIFESLCGTLAENKRVPEVIFTSSKGVRWAFLEGYFIGDGDVHPSKRVRLSTKSELLVNGLVLLLNSLGVSAIKLGYDSGVYRVYVNEELKFTEYRKKKNVYHSHIVPKDILKETFGKVFQKNISYKKFRELVENGKLDREKAKRIEWLLNGDIVLDRVVEIKREYYDGYVYDLSVDEDENFLAGFGFLYAHNSTNPLVEFYIVESWGNWRPPGATSLGQVTIDGGTYDIYRTTRVNQPSIVGTATFDQYWSVRTSKRTSGTVTVTDHFRAWANRGLNLGTIDQITLCVEGYQSSGSANITQNTFSQGSSSGSSGGSSGSTTTTRIECENMSLSGPYVSRITNPFNGIALYANGDTARATVNFPASRNYNFRLRGCGNNNNLARVDLRIDGRTVGTFYYQGTYPWEAPIDNVYVSAGSHTVEITVTADNGTWDVYADYLVIQ

SEQ ID NO: 1697 - protein, 897 aa, Artificial Sequence
  Synthetic Construct, P77853-PspPol-S124
MFLKKLSKLLLVVLLVAVYTQVNAQTSITLTSNASGTFDGYYYELWKDTGNTTMTVYTQGRFSCQWSNINNALFRTGKKYNQNWQSLGTIRITYSATYNPNGNSYLCIYGWSTNPLVEFYIVESILPEEWVPLIKNGKVKIFRIGDFVDGLMKANQGKVKKTGDTEVLEVAGIHAFSFDRKSKKARVMAVKAVIRHRYSGNVYRIVLNSGRKITITEGHSLFVYRNGDLVEATGEDVKIGDLLAVPRSVNLPEKRERLNIVELLLNLSPEETEDIILTIPVKGRKNFFKGMLRTLRWIFGEEKRVRTASRYLRHLENLGYIRLRKIGYDIIDKEGLEKYRTLYEKLVDVVRYNGNKREYLVEFNAVRDVISLMPEEELKEWRIGTRNGFRMGTFVDIDEDFAKLLGYYVSEGSARKWKNQTGGWSYTVRLYNENDEVLDDMEHLAKKFFGKVKRGKNYVEIPKKMAYIIFESLCGTLAENKRVPEVIFTSSKGVRWAFLEGYFIGDGDVHPSKRVRLSTKSELLVNGLVLLLNSLGVSAIKLGYDSGVYRVYVNEELKFTEYRKKKNVYHSHIVPKDILKETFGKVFQKNISYKKFRELVENGKLDREKAKRIEWLLNGDIVLDRVVEIKREYYDGYVYDLSVDEDENFLAGFGFLYAHNSWGNWRPPGATSLGQVTIDGGTYDIYRTTRVNQPSIVGTATFDQYWSVRTSKRTSGTVTVTDHFRAWANRGLNLGTIDQITLCVEGYQSSGSANITQNTFSQGSSSGSSGGSSGSTTTTRIECENMSLSGPYVSRITNPFNGIALYANGDTARATVNFPASRNYNFRLRGCGNNNNLARVDLRIDGRTVGTFYYQGTYPWEAPIDNVYVSAGSHTVEITVTADNGTWDVYADYLVIQ

SEQ ID NO: 1698 - protein, 897 aa, Artificial Sequence
  Synthetic Construct, P77853-PspPol-S178
MFLKKLSKLLLVVLLVAVYTQVNAQTSITLTSNASGTFDGYYYELWKDTGNTTMTVYTQGRFSCQWSNINNALFRTGKKYNQNWQSLGTIRITYSATYNPNGNSYLCIYGWSTNPLVEFYIVESWGNWRPPGATSLGQVTIDGGTYDIYRTTRVNQPSIVGTATFDQYWSVRTSKRTSILPEEWVPLIKNGKVKIFRIGDFVDGLMKANQGKVKKTGDTEVLEVAGIHAFSFDRKSKKARVMAVKAVIRHRYSGNVYRIVLNSGRKITITEGHSLFVYRNGDLVEATGEDVKIGDLLAVPRSVNLPEKRERLNIVELLLNLSPEETEDIILTIPVKGRKNFFKGMLRTLRWIFGEEKRVRTASRYLRHLENLGYIRLRKIGYDIIDKEGLEKYRTLYEKLVDVVRYNGNKREYLVEFNAVRDVISLMPEEELKEWRIGTRNGFRMGTFVDIDEDFAKLLGYYVSEGSARKWKNQTGGWSYTVRLYNENDEVLDDMEHLAKKFFGKVKRGKNYVEIPKKMAYIIFESLCGTLAENKRVPEVIFTSSKGVRWAFLEGYFIGDGDVHPSKRVRLSTKSELLVNGLVLLLNSLGVSAIKLGYDSGVYRVYVNEELKFTEYRKKKNVYHSHIVPKDILKETFGKVFQKNISYKKFRELVENGKLDREKAKRIEWLLNGDIVLDRVVEIKREYYDGYVYDLSVDEDENFLAGFGFLYAHNSGTVTVTDHFRAWANRGLNLGTIDQITLCVEGYQSSGSANITQNTFSQGSSSGSSGGSSGSTTTTRIECENMSLSGPYVSRITNPFNGIALYANGDTARATVNFPASRNYNFRLRGCGNNNNLARVDLRIDGRTVGTFYYQGTYPWEAPIDNVYVSAGSHTVEITVTADNGTWDVYADYLVIQ

SEQ ID NO: 1699 - protein, 783 aa, Artificial Sequence
  Synthetic Construct, P77853-Tth-S158-30
MFLKKLSKLLLVVLLVAVYTQVNAQTSITLTSNASGTFDGYYYELWKDTGNTTMTVYTQGRFSCQWSNINNALFRTGKKYNQNWQSLGTIRITYSATYNPNGNSYLCIYGWSTNPLVEFYIVESWGNWRPPGATSLGQVTIDGGTYDIYRTTRVNQPCLAEGSLVLDAATGQRVPIEKVRPGMEVFSLGPDYRLYRVPVLEVLESGVREVVRLRTRSGRTLVLTPDHPLLTPEGWKPLCDLPLGTPIAVPAELPVAGHLAPPEERVTLLALLLGDGNTKLSGRRGTRPNAFFYSKDPELLAAYRRCAEALGAKVKAYVHPTTGVVTLATLAPRPGAQDPVKRLVVEAGMVAKAEEKRVPEEVFRYRREALALFLGRLFSTDGSVEKKRISYSSASLGLAQDVAHLLLRLGITSQLRSRGPRAHEVLISGREDILRFAELIGPYLLGAKRERLAALEAEARRRLPGQGWHLRLVLPAVAYRVSEAKRRSGFSWSEAGRRVAVAGSCLSSGLNLKLPRRYLSRHRLSMLGEAFADPGLEALAEGQVLWDPIVAVEPAGKARTFDLRVPPFANFVSEDLVVHNSIVGTATFDQYWSVRTSKRTSGTVTVTDHFRAWANRGLNLGTIDQITLCVEGYQSSGSANITQNTFSQGSSSGSSGGSSGSTTTTRIECENMSLSGPYVSRITNPFNGIALYANGDTARATVNFPASRNYNFRLRGCGNNNNLARVDLRIDGRTVGTFYYQGTYPWEAPIDNVYVSAGSHTVEITVTADNGTWDVYADYLVIQ

SEQ ID NO: 1700 - protein, 783 aa, Artificial Sequence
  Synthetic Construct, P77853-Tth-S158-30-38
MFLKKLSKLLLVVLLVAVYTQVNAQTSITLTSNASGTFDGYYYELWKDTGNTTMTVYTQGRFSCQWSNINNALFRTGKKYNQNWQSLGTIRITYSATYNPNGNSYLCIYGWSTNPLVEFYIVESWGNWRPPGATSLGQVTIDGGTYDIYRTTRVNQPCLAEGSLVLDAATGQRVPIEKVRPGMEVFSLGPDYRLYRVPVLEVLESGVGEVVRLRTRSGRTLVLTPDHPLLTPEGWKPLCDLPLGTPIAVPAELPVAGHLAPPEERVTLLALLLGDGNTKLSGRRGTRPNAFFYSKDPELLAAYRRCAEALGAKVKAYVHPTTGVVTLATLAPRPGAQDPVKRLVVEAGMVAKAEEKRVPEEVFRYRREALALFLGRLFSTDGSVEKKRISYSSASLGLAQDVAHLLLRLGITSQLRSRGPRAHEVLISGREDILRFAELIGPYLLGAKRERLAALEAEARRRLPGQGWHLRLVLPAVAYRVSEAKRRSGFSWSEAGRRVAVAGSCLSSGLNLKLPRRYLSRHRLSMLGEAFADPGLEALAEGQVLWDPIVAVEPAGKARTFDLRVPPFANFVSEDLVVHNSIVGTATFDQYWSVRTSKRTSGTVTVTDHFRAWANRGLNLGTIDQITLCVEGYKSSGSANITQNTFSQGSSSGSSGGSSGSTTTTRIECENMSLSGPYVSRITNPFNGIALYANGDTARATVNFPASRNYNFRLRGCGNNNNLARVDLRIDGRTVGTFYYQGTYPWEAPIDNVYVSAGSHTVEITVTADNGTWDVYADYLVIQ

SEQ ID NO: 1701 - protein, 783 aa, Artificial Sequence
  Synthetic Construct, P77853-Tth-S158-30-103
MFLKKLSKLLLVVLLVAVYTQVNAQTSITLTSNASGTFDGYYYELWKDTGNTTMTVYTQGRFSCQWSNINNALFRTGKKYNQNWQSLGTIRITYSATYNPNGNSYLCIYGWSTNPLVEFYIVESWGNWRPPGATSLGQVTIDGGTYDIYRTTRVNQPCLAEGSLVLDAATGQRVPIEKVRPGMEVFSLGPDYRLYRVPVLEVLESGVGEVVRLRTRSGRTLVLTPDHPLLTPEGWKPLCDLPLGTPIAVPAELPVAGHLAPPEERVTLLALLLGDGNTKLSGRRGTRPNAFFYSKDPELLAAYRRCAEALGAKVKAYVHPTTGVVTLATLAPRPGAQDPVKRLVVEAGMVAKAEEKRVPEEVFRYRREALALFLGRLFSTDGSVEKKRISYSSASLGLAQDVAHLLLRLGITSQLRSRGPRAHEVLISGREDILRFAELIGPYLLGAKRERLAALEAEARRRLPGQGWHLRLVLPAVAYRVSEAKRRSGFSWSEAGRRVAVAGSCLSSGLNLKLPRRYLSRHRLSMLGEAFADPGLEALAEGQVLWDPIVAVEPAGKARTFDLRVPPFANFVSEDLVVHNSIVGTATFDQYWSVRTSKRTSGTVTVTDHFRAWANRGLNLGTIDQITLCVEGYQSSGSANITQNTFSQGSSSGSSGGSSGSTTTARIECENMSLSGPYVSRITNPFNGIALYANGDTARATVNFPASRNYNFRLRGCGNNNNLARVDLRIDGRTVGTFYYQGTYPWEAPIDNVYVSAGSHTVEITVTADNGTWDVYADYLVIQ

SEQ ID NO: 1702 - protein, 783 aa, Artificial Sequence
  Synthetic Construct, P77853-Tth-S158-30-108/205/345
MFLKKLSKLLLVVLLVAVYTQVNAQTSITLTSNASGTFDGYYYELWKDTGNTTMTVYTQGRFSCQWSNINNALFRTGKKYNQNWQSLGTIRITYSATYNPNGNSYLCIYGWSTNPLVEFYIVESWGNWRPPGATSLGQVTIDGGTYDIYRTTRVNQPCLAEGSLVLDAATGQRVPIEKVRPGMEVFSLGPDYRLYRVPVLEVLESGVGEVVRLRTRSGRTLVLTPDHPLLTPEGWKPLCDLPLGTPIAVPAELPVAGHLAPPEERVTLLALLLGDGNTKLSGRRGTRPNAFFYSKDPELLAAYRRCAEALGAKVKAYVHPTTGVVTLATLAPRPGAQDPVKRLVVEAGMVAKAEEKRVPEEVFRYRREALALFLGRLFSTDGSVEKKRISYSSASLGLAQDVAHLLLRLGITSQLRSRGPRAHKVLISGREDILRFAELIGPYLLGAKRERLAALEAEARRRLPGQGWHLRLVLPAVAYRVSEAKRRSGFSWSEAGRRVAVAGSCLSSGLNLKLPRRYLSRHRLSLLGEAFADPGLEALAEGQVLWDPIVAVEPAGKARTFDLRVPPFANFVSEDLVVHNSIVGTATFDQYWSVRTSKRTSGTVTVTDHFRAWANRGLNLGTIDQITLCVEGYQSSGSANITQNTFSQGSSSGSSGGSSGSTTTTRIECENMSLSGPYVSRITNPFNGIALYANGDTARATVNFPASRNYNFRLRGCGNNNNLARVDLRIDGRTVGTFYYQGTYPWEAPIDNVYVSAGSHTVEITVTADNGTWDVYADYLVIQ

SEQ ID NO: 1703 - protein, 783 aa, Artificial Sequence
  Synthetic Construct, P77853-Tth-S158-30-133
MFLKKLSKLLLVVLLVAVYTQVNAQTSITLTSNASGTFDGYYYELWKDTGNTTMTVYTQGRFSCQWSNINNALFRTGKKYNQNWQSLGTIRITYSATYNPNGNSYLCIYGWSTNPLVEFYIVESWGNWRPPGATSLGQVTIDGGTYDIYRTTRVNQPCLAEGSLVLDAATGQRVPIEKVRPGMEVFSLGPDYRLYRVPVLEVLESGVGEVVRLRTRSGRTLVLTPDHPLLTPEGWKPLCDLPLGTPIAVPAELPVAGHLAPPEERVTLLALLLGDGNTKLSGRRGTRPNAFFYSKDPELLAAYRRCAEALGAKVKAYVHPTTGVVTLATLAPRPGAQDPVKRLVVEAGMVAKAEEKRVPEEVFRYRREALALFLGRLFSTDGSVEKKRISYSSASLGLAQDVAHLLLRLGITSQLRSRGPRAHEVLISGRKDILRFAELIGPYLLGAKRERLAALEAEARRRLPGQGWHLRLVLPAVAYRVSEAKRRSGFSWSEAGRRVAVAGSCLSSGLNLKLPRRYLSRHRMSMLGEAFADPGLEALAEGQVLWDPIVAVEPAGKARTFDLRVPPFANFVSEDLVVHNSIVGTATFDQYWSVRTSKRTSGTVTVTDHFRAWANRGLNLGTIDQITLCVEGYQSSGSANITQNTFSQGSSSGSSGGSSGSTTTTRIECENMSLSGPYVSRITNPFNGIALYANGDTARATVNFPASRNYNFRLRGCGNNNNLARVDLRIDGRTVGTFYYQGTYPWEAPIDNVYVSAGSHTVEITVTADNGTWDVYADYLVIQ

SEQ ID NO: 1704 - protein, 783 aa, Artificial Sequence
  Synthetic Construct, P77853-Tth-S158-30-209
MFLKKLSKLLLVVLLVAVYTQVNAQTSITLTSNASGTFDGYYYELWKDTGNTTMTVYTQGRFSCQWSNINNALFRTGKKYNQNWQSLGTIRITYSATYNPNGNSYLCIYGWSTNPLVEFYIVESWGNWRPPGATSLGQVTIDGGTYDIYRTTRVNQPCLAEGSLVLDAATGQRVPIEKVRPGMEVFSLGPDYRLYRVPVLEVLESGVGEVVRLRTRSGRTLVLTPDHPLLTPEGWKPLCDLPLGTPIAVPAELPVAGHLAPPEERVTLLALLLGDGNTKLSGRRGTRPNAFFYSKDPELLAAYRRCAEALGAKVKAYVHPTTGVVTLATLAPRPGAQDPVKRLVVEAGMVAKAEEKRVPEEVFRYRREALALFLGRLFSTDGSVEKKRISYSSASLGLAQDVAHLLLRLGITSQLRSRGPRAHKVLISGREDILRFAELIGPYLLGAKRERLAALEAEARRRLPGQGWHLRLVLPAVAYRVSEAKRRSGFSWSEAGRRVAVAGSCLSSGLNLKLPRRYLSRHRLSLLGEAFADPGLEALAEGQVLWDPIVAVEPAGKARTFDLRVPPFANFVSEDLVVHNSIVGTATFDQYWSVRTSKRTSGTVTVTDHFRAWANRGLNLGTIDQITLCVEGYQSSGSANITQNTSSQGSSSGSSGGSSGSTTTTRIECENMSLSGPYVSRITSPFNGIALYANGDTARATVNFPASRNYNFRLRGCGNNNNLARVDLRIDGRTVGTFYYQGTYPWEAPIDNVYVSAGSHTVEITVTADNGTWDVYADYLVIQ

SEQ ID NO: 1705 - protein, 783 aa, Artificial Sequence
  Synthetic Construct, P77853-Tth-S158-30-217
MFLKKLSKLLLVVLLVAVYTQVNAQTSITLTSNASGTFDGYYYELWKDTGNTTMTVYTQGRFSCQWSNINNALFRTGKKYNQNWQSLGTIRITYSATYNPNGNSYLCIYGWSTNPLVEFYIVESWGNWRPPGATSLGQVTIDGGTYDIYRTTRVNQPCLAEGSLVLDAATGQRVPIVKVRPGMEVFSLGPDYRLYRVPVLEVLESGVGEVVRLRTRSGRTLVLTPDHPLLTPEGWKPLCDLPLGTPIAVPAELPVAGHLAPPEERVTLLALLLGDGNTKLSGRRGTRPNAFFYSKDPELLAAYRRCAEALGAKVKAYVHPTTGVVTLATLAPRPGAQDPVKRLVVEAGMVAKAEEKRVPEEVFRYRREALALFLGRLFSTDGSVEKKRISYSSASLGLAQDVAHLLLRLGITSQLRSRGPRAHEVLISGREDILRFAELIGPYLLGAKRERLAALEAEARRRLPGQGWHLRLVLPAVAYRVSEAKRRSGFSWSEAGRRVAVAGSCLSSGLNLKLPRRYLSRHRLSMLGEAFADPGLEALAEGQVLWDPIVAVEPAGKARTFDLRVPPFANFVSEDLVVHNSIVGTATFDQYWSVRTSKRTSGTVTVTDHFRAWANRGLNLGTIDQITLCVEGYQSSGSANITQNTFSQGSSSGSSGGSSGSTTTTRIECENMSLSGPYVSRITNPFNGIALYANGDTARATVNFPASRNYNFRLRGCGNNNNLARVDLRIDGRTVGTFYYQGTYPWEAPIDNVYVSAGSHTVEITVTADNGTWDVYADYLVIQ

SEQ ID NO: 1706 - protein, 783 aa, Artificial Sequence
  Synthetic Construct, P77853-Tth-S158-30-218/219
MFLKKLSKLLLVVLLVAVYTQVNAQTSITLTSNASGTFDGYYYELWKDTGNTTMTVYTQGRFSCQWSNINNALFRTGKKYNQNWQSLGTIRITYSATYNPNGNSYLCIYGWSTNPLVEFYIVESWGNWRPPGATSLGQVTIDGGTYDIYRTTRVNQPCLAEGSLVLDAATGQRVPIEKVRPGMEVFSLGPDYRLYRVPVLEVLESGVGEVVRLRTRSGRTLVLTPDHPLLTPEGWKPLCDLPLGTPIAVPAELPVAGHLAPPEERVTLLALLLGDGNTKLSGRRGTRPNAFFYSKDPELLAAYRRCAEALGAKVKAYVHPTTGVVTLATLAPRPGAQDPVKRLVVEAGMVAKAEEKRVPEEVFRYRREALALFLGRLFSTDGSVEKKRISYSSASLGLAQDVAHLLLRLGITSQLRSRGPRAHEVLISGREDILRFAELIGPYLLGAKRERLAALEAEARRRLPGQGWHLRLVLPAVAYRVSEAKRRSGFSWSEAGRRVAVAGSCLSSGLNLKLPRRYLSRHRLSMLGEAFADPGLEALAEGQVLWDPIVAVEPAGKARTFDLRVPPFANFVSEDLVVHNSIVGTATFDQYWSVRTSKRTSGTVTVTDHFRAWANRGLNLGTIDQITLCVEGYQSSGSANITQNTFSQGSSSGSSGGSSGSTTTTRIECENMSLSGPYVSRITNPFNGIALYANGDTARATVNFPASRNYNFRLRGCGNNNNLARVDLRIDGRTVGTFYYQGTYPWEAPIDNVYVSAGSHTVEITVTADNGTWDVYADYLVIQ

SEQ ID NO: 1707 - protein, 783 aa, Artificial Sequence
  Synthetic Construct, P77853-Tth-S158-30-460
MFLKKLSKLLLVVLLVAVYTQVNAQTSITLTSNASGKFDGYYYELWKDTGNTTMTVYTQGRFSCQWSNINNALFRTGKKYNQNWQSLGTIRITYSATYNPNGNSYLCIYGWSTNPLVEFYIVESWGNWRPPGATSLGQVTIDGGTYDIYRTTRVNQPCLAEGSLVLDAATGQRVPIEKVRPGMEVFSLGPDYRLYRVPVLEVLESGVGEVVRLRTRSGRTLVLTPDHPLLTPEGWKPLCDLPLGTPIAVPAELPVAGHLAPPEERVTLLALLLGDGNTKLSGRRGTRPNAFFYSKDPELLAAYRRCAEALGAKVKAYVHPTTGVVTLATLAPRPGAQDPVKRLVVEAGMVAKAEEKRVPEEVFRYRREALALFLGRLFSTDGSVEKKRISYSSASLGLAQDVAHLLLRLGITSQLRSRGPRAHEVLISGREDILRFAELIGPYLLGAKRERLAALEAEARRRLPGQGWHLRLVLPAVAYRVSEAKRRSGFSWSEAGRRVAVAGSCLSSGLNLKLPRRYLSRHRLSMLGEAFADPGLEALAEGQVLWDPIVAVEPAGKARTFDLRVPPFANFVSEDLVVHNSIVGTATFDQYWSVRTSKRTSGTVTVTDHFRAWANRGLNLGTIDQITLCVEGYQSSGSANITQNTFSQGSSSGSSGGSSGSTTTTRIECENMSLSGPYVSRITNPFNGIALYANGDTARATVNFPASRNYNFRLRGCGNNNNLARVDLRIDGRTVGTFYYQGTYPWEAPIDNVYVSAGSHTVEITVTADNGTWDVYADYLVIQ

SEQ ID NO: 1708 - protein, 783 aa, Artificial Sequence
  Synthetic Construct, P77853-Tth-S158-m69
MFLKKLSKLLLVVLLVAVYTQVNAQTSITLTSNASGTFDGYYYELWKDTGNTTMTVYTQGRFSCQWSNINNALFRTGKKYNQNWQSLGTIRITYSATYNPNGNSYLCIYGWSTNPLVEFYIVESWGNWRPPGATSLGQVTIDGGTYDIYRTTRVNQPCLAEGSLVLDAATGQRVPIEKVRPGMEVFSLGPDYRLYRVPVLEVLESGVSEVVRLRTRSGRTLVLTPDHPLLTPEGWKPLCDLPLGTPIAVPAELPVAGHLAPPEERVTLLALLLGDGNTKLSGRRGTRPNAFFYSKDPELLAAYRRCAEALGAKVKAYVHPTTGVVTLATLAPRPGAQDPVKRLVVEAGMVAKAEEKRVPEEVFRYRREALALFLGRLFSTDGSVEKKRISYSSASLGLAQDVAHLLLRLGITSQLRSRGPRAHEVLISGREDILRFAELIGPYLLGAKRERLAALEAEARRRLPGQGWHLRLVLPAVAYRVSEAKRLSGFSWSEAGRRVAVAGSCLSSGLNLKLPRRYLSRHRLSMLGEAFADPGLEALAEGQVLWDPIVAVEPAGKARTFDLRVPPFANFVSEDLVVHNSIVGTATFDQYWSVRTSKRTSGTVTVTDHFRAWANRGLNLGTIDQITLCVEGYQSSGSANITQNTFSQGSSSGSSGGSSGSTTTTRIECENMSLSGPYVSRITNPFNGIALYANGDTARATVNFPASRNYNFRLRGCGNNNNLARVDLRIDGRTVGTFYYQGTYPWEAPIDNVYVSAGSHTVEITVTADNGTWDVYADYLVIQ

SEQ ID NO: 1709 - protein, 783 aa, Artificial Sequence
  Synthetic Construct, P77853-Tth-S158-m70
MFLKKLSKLLLVVLLVAVYTQVNAQTSITLTSNASGTFDGYYYELWKDTGNTTMTVYTQGRFSCQWSNINNALFRTGKKYNQNWQSLGTIRITYSATYNPNGNSYLCIYGWSTNPLVEFYIVESWGNWRPPGATSLGQVTIDGGTYDIYRTTRVNQPCLAEGSLVLDAATGQRVPIEKVRPGMEVFSLGPDYRLYRVPVLEVLESGVREVVRLRTRSGRTLVLTPDHPLLTPEGWKPLCDLPLGTPIAVPAELPVAGHLAPPEERVTLLALLLGDGNTKLSGRRGTRPNAFFYSKDPELLAAYRRCAEALGAKVKAYVHPTTGVVTLATLAPRPGAQDPVRRLVVEAGMVAKAEEKRVPEEVFRYRREALALFLGRLFSTDGSVEKKRISYSSASLGLAQDVAHLLLRLGITSQLRSRGPRAHEVLISCREDILRFAELIGPYLLGAKRERLAALEAEARRRLPGQGWHLRLVLPAVAYRVSEAKRRSGFSWSEAGRRVAVAGSCLSSGLNLKLPRRYLSRHRLSMLGEAFADPGLEALAEGQVLWDPIVAVEPAGKARTFDLRVPPFANFVSEDLVVHNSIVGTATFDQYWSVRTSKRTSGTVTVTDHFRAWANRGLNLGTIDQITLCVEGYQSSGSANITQNTFSQGSSSGSSGGSSGSTTTTRIECENMSLSGPYVSRITNPFNGIALYANGDTARATVNFPASRNYNFRLRGCGNNNNLARVDLRIDGRTVGTFYYQGTYPWEAPIDNVYVSAGSHTVEITVTADNGTWDVYADYLVIQ

SEQ ID NO: 1710 - protein, 783 aa, Artificial Sequence
  Synthetic Construct, P77853-Tth-S158-m79
MFLKKLSKLLLVVLLVAVYTQVNAQTSITLTSNASGTFDGYYYELWKDTGNTTMTVYTQGRFSCQWSNINNALFRTGKKYNQNWQSLGTIRITYSATYNPNGNSYLCIYGWSTNPLVEFYIVESWGNWRPPGATSLGQVTIDGGTYDIYRTTRVNQPCLAEGSLVLDAATGQRVPIEKVRPGMEVFSLGPDYRLYQVPVLEVLESGVGEVVRLRTRSGRTLVLTPDHPLLTPEGWKPLCDLPLGTPIAVPAELPVAGHLAPPEERVTPLALLLGDGNTKLSGRRGTRPNAFFYSKDPELLAAYRRCAEALGAKVKAYVHPTTGVVTLATLAPRPGAQDPVKRLVVEAGMVAKAEEKRVPEEVFRYRREALALFLGRLFSTDGSVEKKRISYSSASLGLAQDVAHLLLRLGITSQLRSRGPRAHEVLISGREDILRFAELIGPYLLGAKRERLAALEAEARRRLPGQGWHLRLVLPAVAYRVSEAKRRSGFSWSEAGRRVAVAGSCLSSGLNLKLPRRYLSRHRLSMLGEAFADPGLEALAEGQVLWDPIVAVEPAGKARTFDLRVPPFANFVSEDLVVHNSIVGTATFDQYWSVRTSKRTSGTVTVTDHFRAWANRGLNLGTIDQITLCVEGYQSSGSANITQNTFSQGSSSGSSGGSSGSTTTTRIECENMSLSGPYVSRITNPFNGIALYANGDTARATVNFPASRNYNFRLRGCGNNNNLARVDLRIDGRTVGTFYYQGTYPWEAPIDNVYVSAGSHTVEITVTADNGTWDVYADYLVIQ

SEQ ID NO: 1711 - protein, 784 aa, Artificial Sequence
  Synthetic Construct, P77853-Tth-T134-100-101
MFLKKLSKLLLVVLLVAVYTQVNAQTSITLTSNASGTFDGYYYELWKDTGNTTMTVYTQGRFSCQWSNINNALFRTGKKYNQNWQSLGTIRITYSATYNPNGNSYLCIYGWSTNPLVEFYIVESWGNWRPPGACLAEGSLVLDAATGQRVPIEKVRPGMEVFSLGPDYRLYRVPVLEVLESGVREVVRLRTRSGRTLVLTPDHPLLTPEGWKPLCDLPLGTPIAVPAELPVAGHLAPPEERVTLLALLLGDGNTKLSGRRGTRPNAFFYSKNPELLAAYRRCAEALGAKVKAYVHPTTGVVTLATLAPRPGAQDPVKRLVVEAGMVAKAEEKRVPEEVFRYRREALALFLGRLFSTDGSVEKKRISYSSASLGLAQDVAHLLLRLGITSQLRSRGPRAHEVLISGREDILRFAELIGPYLLGAKRERLAALEAEARRRLPGQGWHLRLVLPAVAYRVGEAERRSGFSWSEAGRRVAVAGSCLSSGLNLKLPRRYLSRHRLSLLGEAFADPGLEALAEGQVLWDPIVAVEPAGKARTFDLRVPPFANFVSEDLVVHNTVPLGQVTIDGGTYDIYRTTRVNQPSIVGTATFDQYWSVRTSKRTSGTVTVTDHFRAWANRGLNLGTIDQITLCVEGYQSSGSANITQNTFSQGSSSGSSGGSSGSTTTTRIECENMSLSGPYVSRITNPFNGIALYANGDTARATVNFPASRNYNFRLRGCGNNNNLARVDLRIDGRTVGTFYYQGTYPWEAPIDNVYVSAGSHTVEITVTADNGTWDVYADYLVIQ

SEQ ID NO: 1712 - protein, 784 aa, Artificial Sequence
  Synthetic Construct, P77853-Tth-T134-100-119/157
MFLKKLSKLLLVVLLVAVYTQVNAQTSITLTSNASGTFDGYYYELWKDTGNTTMTVYTQGRFSCQWSNINNALFRTGKKYNQNWQSLGTIRITYSATYNPNGNSYLCIYGWSTNPLVEFYIVESWGNWRPPGACLAEGSLVLDAATGQRVPIEKVRPGMEVFSLGPDYILYRVPVLEVLESGVREVVRLRTRSGRTLVLTPDHPLLTPEGWKPLCDLPLGTPIAVPAELPVAGHLAPPEERVTLLALLLGDGNTKLSGRRGTRPNAFFYSKDPELLAAYRRCAEALGAKVKAYVHPTTGVVTHATLAPRPGAQDPVKRLVVEAGMVAKAEEKRVPEEVFRYRREALALFLGRLFSTDGSVEKKRISYSSASLGLAQDVAHLLPRLGITSQLRSRGPRAHEVLISGREDILRFAELIGPYLLGAKRERLAALEAEARRRLPGQGWHLRLVLPAVAYRVSEAKRRSGFLWSEAGRRAAVAGSCLSSGLNLKLPRRYLSRHRLSLLGEAFADPGLEALAEGQVLWDPIVAVEPAGKARTFDLRVPPFANFVSEDLVVHNTVPLGQVTIDGGTYDIYRTTRVNQPSIVGTATFDQYWSVRTSKRTSGTVTVTDHFRAWANRGLNLGTIDQITLCVEGYQSSGSANITQNTFSQGSSSGSSGGSSGSTTTTRIECENMSLSGPYVSRITNPFNGIALYANGDTARATVNFPASRNYNFRLRGCGNNNNLARVDLRIDGRTVGTFYYQGTYPWEAPIDNVYVSAGSHTVEITVTADNGTWDVYADYLVIQ

SEQ ID NO: 1713 - protein, 546 aa, Artificial Sequence
  Synthetic Construct, P26222-mTth004-S43-1
MNDSPFYVNPNMCLAEGSLVLDAATGQRVPIEKVRPGMEVFSLGPDYRLYRVPVLEVLESGVREVVRLRTRSGRTLVLTPDHPLLTPEGWKPLCDLPLGTPIAVPDSEGNVLWDPIVAVEPAGKARTFDLRVPPFANFVSEDLVVHNSSAEWVRNNPNDPRTPVIRDRIASVPQGTWFAHHNPGQITGQVDALMSAAQAAGKIPILVVYNAPGRDCGNHSSGGAPSHSAYRSWIDEFAAGLKNRPAYIIVEPDLISLMSSCMQHVQQEVLQTMAYAGKALKAGSSQARIYFDAGHSAWHSPAQMASWLQQADISNSAHGIATNTSNYRWTADEVAYAKAVLSAIGNPSLRAVIDTSRNGNGPAGNEWCDPSGRAIGTPSTTNTGDPMIDAFLWIKLPGEADGCIAGAGQFVPQAAYEMAIAAGGTNPNPNPNPTPTPTPTPTPPPGSSGACTATYTIANEWNDGFQATVTVTANQNITGWTVTWTFTDGQTITNALNADVSTSGSSVTARNVGHNGTLSQGASTEFGFVGSKGNSNSVPTLTCAAS

SEQ ID NO: 1714 - protein, 546 aa, Artificial Sequence
  Synthetic Construct, P26222-mTth005-S43-1
MNDSPFYVNPNMCLAEGSLVLDAATGQRVPIEKVRPGMEVFSLGPDYRLYRVPVLEVLESGVREVVRLRTRSGRTLVLTPDHPLLTPEGWKPLCDLPLGTPIAVPSSDGLVLWDPIVAVEPAGKARTFDLRVPPFANFVSEDLVVHNSSAEWVRNNPNDPRTPVIRDRIASVPQGTWFAHHNPGQITGQVDALMSAAQAAGKIPILVVYNAPGRDCGNHSSGGAPSHSAYRSWIDEFAAGLKNRPAYIIVEPDLISLMSSCMQHVQQEVLQTMAYAGKALKAGSSQARIYFDAGHSAWHSPAQMASWLQQADISNSAHGIATNTSNYRWTADEVAYAKAVLSAIGNPSLRAVIDTSRNGNGPAGNEWCDPSGRAIGTPSTTNTGDPMIDAFLWIKLPGEADGCIAGAGQFVPQAAYEMAIAAGGTNPNPNPNPTPTPTPTPTPPPGSSGACTATYTIANEWNDGFQATVTVTANQNITGWTVTWTFTDGQTITNALNADVSTSGSSVTARNVGHNGTLSQGASTEFGFVGSKGNSNSVPTLTCAAS

SEQ ID NO: 1715 - protein, 546 aa, Artificial Sequence
  Synthetic Construct, P26222-mTth008-S43-1
MNDSPFYVNPNMCLAEGSLVLDAATGQRVPIEKVRPGMEVFSLGPDYRLYRVPVLEVLESGVREVVRLRTRSGRTLVLTPDHPLLTPEGWKPLCDLPLGTPIAVPQEGVGVLWDPIVAVEPAGKARTFDLRVPPFANFVSEDLVVHNSSAEWVRNNPNDPRTPVIRDRIASVPQGTWFAHHNPGQITGQVDALMSAAQAAGKIPILVVYNAPGRDCGNHSSGGAPSHSAYRSWIDEFAAGLKNRPAYIIVEPDLISLMSSCMQHVQQEVLQTMAYAGKALKAGSSQARIYFDAGHSAWHSPAQMASWLQQADISNSAHGIATNTSNYRWTADEVAYAKAVLSAIGNPSLRAVIDTSRNGNGPAGNEWCDPSGRAIGTPSTTNTGDPMIDAFLWIKLPGEADGCIAGAGQFVPQAAYEMAIAAGGTNPNPNPNPTPTPTPTPTPPPGSSGACTATYTIANEWNDGFQATVTVTANQNITGWTVTWTFTDGQTITNALNADVSTSGSSVTARNVGHNGTLSQGASTEFGFVGSKGNSNSVPTLTCAAS

SEQ ID NO: 1716 - protein, 546 aa, Artificial Sequence
  Synthetic Construct, P26222-mTth001-S115-1
MNDSPFYVNPNMSSAEWVRNNPNDPRTPVIRDRIASVPQGTWFAHHNPGQITGQVDALMSAAQAAGKIPILVVYNAPGRDCGNHCLAEGSLVLDAATGQRVPIEKVRPGMEVFSLGPDYRLYRVPVLEVLESGVREVVRLRTRSGRTLVLTPDHPLLTPEGWKPLCDLPLGTPIAVPGTDGDVLWDPIVAVEPAGKARTFDLRVPPFANFVSEDLVVHNSSGGAPSHSAYRSWIDEFAAGLKNRPAYIIVEPDLISLMSSCMQHVQQEVLQTMAYAGKALKAGSSQARIYFDAGHSAWHSPAQMASWLQQADISNSAHGIATNTSNYRWTADEVAYAKAVLSAIGNPSLRAVIDTSRNGNGPAGNEWCDPSGRAIGTPSTTNTGDPMIDAFLWIKLPGEADGCIAGAGQFVPQAAYEMAIAAGGTNPNPNPNPTPTPTPTPTPPPGSSGACTATYTIANEWNDGFQATVTVTANQNITGWTVTWTFTDGQTITNALNADVSTSGSSVTARNVGHNGTLSQGASTEFGFVGSKGNSNSVPTLTCAAS

SEQ ID NO: 1717 - protein, 546 aa, Artificial Sequence
  Synthetic Construct, P26222-mTth002-S115-1
MNDSPFYVNPNMSSAEWVRNNPNDPRTPVIRDRIASVPQGTWFAHHNPGQITGQVDALMSAAQAAGKIPILVVYNAPGRDCGNHCLAEGSLVLDAATGQRVPIEKVRPGMEVFSLGPDYRLYRVPVLEVLESGVREVVRLRTRSGRTLVLTPDHPLLTPEGWKPLCDLPLGTPIAVPGPDQKVLWDPIVAVEPAGKARTFDLRVPPFANFVSEDLVVHNSSGGAPSHSAYRSWIDEFAAGLKNRPAYIIVEPDLISLMSSCMQHVQQEVLQTMAYAGKALKAGSSQARIYFDAGHSAWHSPAQMASWLQQADISNSAHGIATNTSNYRWTADEVAYAKAVLSAIGNPSLRAVIDTSRNGNGPAGNEWCDPSGRAIGTPSTTNTGDPMIDAFLWIKLPGEADGCIAGAGQFVPQAAYEMAIAAGGTNPNPNPNPTPTPTPTPTPPPGSSGACTATYTIANEWNDGFQATVTVTANQNITGWTVTWTFTDGQTITNALNADVSTSGSSVTARNVGHNGTLSQGASTEFGFVGSKGNSNSVPTLTCAAS

SEQ ID NO: 1718 - protein, 546 aa, Artificial Sequence
  Synthetic Construct, P26222-mTth004-S115-1
MNDSPFYVNPNMSSAEWVRNNPNDPRTPVIRDRIASVPQGTWFAHHNPGQITGQVDALMSAAQAAGKIPILVVYNAPGRDCGNHCLAEGSLVLDAATGQRVPIEKVRPGMEVFSLGPDYRLYRVPVLEVLESGVREVVRLRTRSGRTLVLTPDHPLLTPEGWKPLCDLPLGTPIAVPDSEGNVLWDPIVAVEPAGKARTFDLRVPPFANFVSEDLVVHNSSGGAPSHSAYRSWIDEFAAGLKNRPAYIIVEPDLISLMSSCMQHVQQEVLQTMAYAGKALKAGSSQARIYFDAGHSAWHSPAQMASWLQQADISNSAHGIATNTSNYRWTADEVAYAKAVLSAIGNPSLRAVIDTSRNGNGPAGNEWCDPSGRAIGTPSTTNTGDPMIDAFLWIKLPGEADGCIAGAGQFVPQAAYEMAIAAGGTNPNPNPNPTPTPTPTPTPPPGSSGACTATYTIANEWNDGFQATVTVTANQNITGWTVTWTFTDGQTITNALNADVSTSGSSVTARNVGHNGTLSQGASTEFGFVGSKGNSNSVPTLTCAAS

SEQ ID NO: 1719 - protein, 546 aa, Artificial Sequence
  Synthetic Construct, P26222-mTth007-S123-1
MNDSPFYVNPNMSSAEWVRNNPNDPRTPVIRDRIASVPQGTWFAHHNPGQITGQVDALMSAAQAAGKIPILVVYNAPGRDCGNHSSGGAPSHCLAEGSLVLDAATGQRVPIEKVRPGMEVFSLGPDYRLYRVPVLEVLESGVREVVRLRTRSGRTLVLTPDHPLLTPEGWKPLCDLPLGTPIAVPGETNGVLWDPIVAVEPAGKARTFDLRVPPFANFVSEDLVVHNSAYRSWIDEFAAGLKNRPAYIIVEPDLISLMSSCMQHVQQEVLQTMAYAGKALKAGSSQARIYFDAGHSAWHSPAQMASWLQQADISNSAHGIATNTSNYRWTADEVAYAKAVLSAIGNPSLRAVIDTSRNGNGPAGNEWCDPSGRAIGTPSTTNTGDPMIDAFLWIKLPGEADGCIAGAGQFVPQAAYEMAIAAGGTNPNPNPNPTPTPTPTPTPPPGSSGACTATYTIANEWNDGFQATVTVTANQNITGWTVTWTFTDGQTITNALNADVSTSGSSVTARNVGHNGTLSQGASTEFGFVGSKGNSNSVPTLTCAAS

SEQ ID NO: 1720 - protein, 545 aa, Artificial Sequence
  Synthetic Construct, P26222-mTth002-S154-1
MNDSPFYVNPNMSSAEWVRNNPNDPRTPVIRDRIASVPQGTWFAHHNPGQITGQVDALMSAAQAAGKIPILVVYNAPGRDCGNHSSGGAPSHSAYRSWIDEFAAGLKNRPAYIIVEPDLISLMCLAEGSLVLDAATGQRVPIEKVRPGMEVFSLGPDYRLYRVPVLEVLESGVREVVRLRTRSGRTLVLTPDHPLLTPEGWKPLCDLPLGTPIAVPGPDQKVLWDPIVAVEPAGKARTFDLRVPPFANFVSEDLVVHNSSCMQHVQQEVLQTMAYAGKALKAGSSQARIYFDAGHSAWHSPAQMASWLQQADISNSAHGIATNTSNYRWTADEVAYAKAVLSAIGNPSLRAVIDTSRNGNGPAGNEWCDPSGRAIGTPSTTNTGDPMIDAFLWIKLPGEADGCIAGAGQFVPQAAYEMAIAAGGTNPNPNPNPTPTPTPTPTPPPGSSGACTATYTIANEWNDGFQATVTVTANQNITGWTVTWTFTDGQTITNAAMLTFRRQVRLARRATSGIMVLSPRAPAQSLALSAQREIQIASPLSRAPP

SEQ ID NO: 1721 - protein, 546 aa, Artificial Sequence
  Synthetic Construct, P26222-mTth003-S154-1
MNDSPFYVNPNMSSAEWVRNNPNDPRTPVIRDRIASVPQGTWFAHHNPGQITGQVDALMSAAQAAGKIPILVVYNAPGRDCGNHSSGGAPSHSAYRSWIDEFAAGLKNRPAYIIVEPDLISLMCLAEGSLVLDAATGQRVPIEKVRPGMEVFSLGPDYRLYRVPVLEVLESGVREVVRLRTRSGRTLVLTPDHPLLTPEGWKPLCDLPLGTPIAVPEPGKGVLWDPIVAVEPAGKARTFDLRVPPFANFVSEDLVVHNSSCMQHVQQEVLQTMAYAGKALKAGSSQARIYFDAGHSAWHSPAQMASWLQQADISNSAHGIATNTSNYRWTADEVAYAKAVLSAIGNPSLRAVIDTSRNGNGPAGNEWCDPSGRAIGTPSTTNTGDPMIDAFLWIKLPGEADGCIAGAGQFVPQAAYEMAIAAGGTNPNPNPNPTPTPTPTPTPPPGSSGACTATYTIANEWNDGFQATVTVTANQNITGWTVTWTFTDGQTITNALNADVSTSGSSVTARNVGHNGTLSQGASTEFGFVGSKGNSNSVPTLTCAAS

SEQ ID NO: 1722 - protein, 546 aa, Artificial Sequence
  Synthetic Construct, P26222-mTth004-S154-1
MNDSPFYVNPNMSSAEWVRNNPNDPRTPVIRDRIASVPQGTWFAHHNPGQITGQVDALMSAAQAAGKIPILVVYNAPGRDCGNHSSGGAPSHSAYRSWIDEFAAGLKNRPAYIIVEPDLISLMCLAEGSLVLDAATGQRVPIEKVRPGMEVFSLGPDYRLYRVPVLEVLESGVREVVRLRTRSGRTLVLTPDHPLLTPEGWKPLCDLPLGTPIAVPDSEGNVLWDPIVAVEPAGKARTFDLRVPPFANFVSEDLVVHNSSCMQHVQQEVLQTMAYAGKALKAGSSQARIYFDAGHSAWHSPAQMASWLQQADISNSAHGIATNTSNYRWTADEVAYAKAVLSAIGNPSLRAVIDTSRNGNGPAGNEWCDPSGRAIGTPSTTNTGDPMIDAFLWIKLPGEADGCIAGAGQFVPQAAYEMAIAAGGTNPNPNPNPTPTPTPTPTPPPGSSGACTATYTIANEWNDGFQATVTVTANQNITGWTVTWTFTDGQTITNALNADVSTSGSSVTARNVGHNGTLSQGASTEFGFVGSKGNSNSVPTLTCAAS

SEQ ID NO: 1723 - protein, 546 aa, Artificial Sequence
  Synthetic Construct, P26222-mTth005-S154-1
MNDSPFYVNPNMSSAEWVRNNPNDPRTPVIRDRIASVPQGTWFAHHNPGQITGQVDALMSAAQAAGKIPILVVYNAPGRDCGNHSSGGAPSHSAYRSWIDEFAAGLKNRPAYIIVEPDLISLMCLAEGSLVLDAATGQRVPIEKVRPGMEVFSLGPDYRLYRVPVLEVLESGVREVVRLRTRSGRTLVLTPDHPLLTPEGWKPLCDLPLGTPIAVPSSDGLVLWDPIVAVEPAGKARTFDLRVPPFANFVSEDLVVHNSSCMQHVQQEVLQTMAYAGKALKAGSSQARIYFDAGHSAWHSPAQMASWLQQADISNSAHGIATNTSNYRWTADEVAYAKAVLSAIGNPSLRAVIDTSRNGNGPAGNEWCDPSGRAIGTPSTTNTGDPMIDAFLWIKLPGEADGCIAGAGQFVPQAAYEMAIAAGGTNPNPNPNPTPTPTPTPTPPPGSSGACTATYTIANEWNDGFQATVTVTANQNITGWTVTWTFTDGQTITNALNADVSTSGSSVTARNVGHNGTLSQGASTEFGFVGSKGNSNSVPTLTCAAS

SEQ ID NO: 1724 - protein, 546 aa, Artificial Sequence
  Synthetic Construct, P26222-mTth008-S154-1
MNDSPFYVNPNMSSAEWVRNNPNDPRTPVIRDRIASVPQGTWFAHHNPGQITGQVDALMSAAQAAGKIPILVVYNAPGRDCGNHSSGGAPSHSAYRSWIDEFAAGLKNRPAYIIVEPDLISLMCLAEGSLVLDAATGQRVPIEKVRPGMEVFSLGPDYRLYRVPVLEVLESGVREVVRLRTRSGRTLVLTPDHPLLTPEGWKPLCDLPLGTPIAVPQEGVGVLWDPIVAVEPAGKARTFDLRVPPFANFVSEDLVVHNSSCMQHVQQEVLQTMAYAGKALKAGSSQARIYFDAGHSAWHSPAQMASWLQQADISNSAHGIATNTSNYRWTADEVAYAKAVLSAIGNPSLRAVIDTSRNGNGPAGNEWCDPSGRAIGTPSTTNTGDPMIDAFLWIKLPGEADGCIAGAGQFVPQAAYEMAIAAGGTNPNPNPNPTPTPTPTPTPPPGSSGACTATYTIANEWNDGFQATVTVTANQNITGWTVTWTFTDGQTITNALNADVSTSGSSVTARNVGHNGTLSQGASTEFGFVGSKGNSNSVPTLTCAAS

SEQ ID NO: 1725 - protein, 546 aa, Artificial Sequence
  Synthetic Construct, P26222-mTth007-S220-1
MNDSPFYVNPNMSSAEWVRNNPNDPRTPVIRDRIASVPQGTWFAHHNPGQITGQVDALMSAAQAAGKIPILVVYNAPGRDCGNHSSGGAPSHSAYRSWIDEFAAGLKNRPAYIIVEPDLISLMSSCMQHVQQEVLQTMAYAGKALKAGSSQARIYFDAGHSAWHSPAQMASWLQQADISNSAHGIATNTCLAEGSLVLDAATGQRVPIEKVRPGMEVFSLGPDYRLYRVPVLEVLESGVREVVRLRTRSGRTLVLTPDHPLLTPEGWKPLCDLPLGTPIAVPGETNGVLWDPIVAVEPAGKARTFDLRVPPFANFVSEDLVVHNSNYRWTADEVAYAKAVLSAIGNPSLRAVIDTSRNGNGPAGNEWCDPSGRAIGTPSTTNTGDPMIDAFLWIKLPGEADGCIAGAGQFVPQAAYEMAIAAGGTNPNPNPNPTPTPTPTPTPPPGSSGACTATYTIANEWNDGFQATVTVTANQNITGWTVTWTFTDGQTITNALNADVSTSGSSVTARNVGHNGTLSQGASTEFGFVGSKGNSNSVPTLTCAAS

SEQ ID NO: 1726 - protein, 546 aa, Artificial Sequence
  Synthetic Construct, P26222-mTth001-S251-1
MNDSPFYVNPNMSSAEWVRNNPNDPRTPVIRDRIASVPQGTWFAHHNPGQITGQVDALMSAAQAAGKIPILVVYNAPGRDCGNHSSGGAPSHSAYRSWIDEFAAGLKNRPAYIIVEPDLISLMSSCMQHVQQEVLQTMAYAGKALKAGSSQARIYFDAGHSAWHSPAQMASWLQQADISNSAHGIATNTSNYRWTADEVAYAKAVLSAIGNPSLRAVIDTCLAEGSLVLDAATGQRVPIEKVRPGMEVFSLGPDYRLYRVPVLEVLESGVREVVRLRTRSGRTLVLTPDHPLLTPEGWKPLCDLPLGTPIAVPGTDGDVLWDPIVAVEPAGKARTFDLRVPPFANFVSEDLVVHNSRNGNGPAGNEWCDPSGRAIGTPSTTNTGDPMIDAFLWIKLPGEADGCIAGAGQFVPQAAYEMAIAAGGTNPNPNPNPTPTPTPTPTPPPGSSGACTATYTIANEWNDGFQATVTVTANQNITGWTVTWTFTDGQTITNALNADVSTSGSSVTARNVGHNGTLSQGASTEFGFVGSKGNSNSVPTLTCAAS

SEQ ID NO: 1727 - protein, 546 aa, Artificial Sequence
  Synthetic Construct, P26222-mTth002-S251-1
MNDSPFYVNPNMSSAEWVRNNPNDPRTPVIRDRIASVPQGTWFAHHNPGQITGQVDALMSAAQAAGKIPILVVYNAPGRDCGNHSSGGAPSHSAYRSWIDEFAAGLKNRPAYIIVEPDLISLMSSCMQHVQQEVLQTMAYAGKALKAGSSQARIYFDAGHSAWHSPAQMASWLQQADISNSAHGIATNTSNYRWTADEVAYAKAVLSAIGNPSLRAVIDTCLAEGSLVLDAATGQRVPIEKVRPGMEVFSLGPDYRLYRVPVLEVLESGVREVVRLRTRSGRTLVLTPDHPLLTPEGWKPLCDLPLGTPIAVPGPDQKVLWDPIVAVEPAGKARTFDLRVPPFANFVSEDLVVHNSRNGNGPAGNEWCDPSGRAIGTPSTTNTGDPMIDAFLWIKLPGEADGCIAGAGQFVPQAAYEMAIAAGGTNPNPNPNPTPTPTPTPTPPPGSSGACTATYTIANEWNDGFQATVTVTANQNITGWTVTWTFTDGQTITNALNADVSTSGSSVTARNVGHNGTLSQGASTEFGFVGSKGNSNSVPTLTCAAS

SEQ ID NO: 1728 - protein, 546 aa, Artificial Sequence
  Synthetic Construct, P26222-mTth005-S251-1
MNDSPFYVNPNMSSAEWVRNNPNDPRTPVIRDRIASVPQGTWFAHHNPGQITGQVDALMSAAQAAGKIPILVVYNAPGRDCGNHSSGGAPSHSAYRSWIDEFAAGLKNRPAYIIVEPDLISLMSSCMQHVQQEVLQTMAYAGKALKAGSSQARIYFDAGHSAWHSPAQMASWLQQADISNSAHGIATNTSNYRWTADEVAYAKAVLSAIGNPSLRAVIDTCLAEGSLVLDAATGQRVPIEKVRPGMEVFSLGPDYRLYRVPVLEVLESGVREVVRLRTRSGRTLVLTPDHPLLTPEGWKPLCDLPLGTPIAVPSSDGLVLWDPIVAVEPAGKARTFDLRVPPFANFVSEDLVVHNSRNGNGPAGNEWCDPSGRAIGTPSTTNTGDPMIDAFLWIKLPGEADGCIAGAGQFVPQAAYEMAIAAGGTNPNPNPNPTPTPTPTPTPPPGSSGACTATYTIANEWNDGFQATVTVTANQNITGWTVTWTFTDGQTITNALNADVSTSGSSVTARNVGHNGTLSQGASTEFGFVGSKGNSNSVPTLTCAAS

SEQ ID NO: 1729 - protein, 546 aa, Artificial Sequence
  Synthetic Construct, P26222-mTth007-S251-1
MNDSPFYVNPNMSSAEWVRNNPNDPRTPVIRDRIASVPQGTWFAHHNPGQITGQVDALMSAAQAAGKIPILVVYNAPGRDCGNHSSGGAPSHSAYRSWIDEFAAGLKNRPAYIIVEPDLISLMSSCMQHVQQEVLQTMAYAGKALKAGSSQARIYFDAGHSAWHSPAQMASWLQQADISNSAHGIATNTSNYRWTADEVAYAKAVLSAIGNPSLRAVIDTCLAEGSLVLDAATGQRVPIEKVRPGMEVFSLGPDYRLYRVPVLEVLESGVREVVRLRTRSGRTLVLTPDHPLLTPEGWKPLCDLPLGTPIAVPGETNGVLWDPIVAVEPAGKARTFDLRVPPFANFVSEDLVVHNSRNGNGPAGNEWCDPSGRAIGTPSTTNTGDPMIDAFLWIKLPGEADGCIAGAGQFVPQAAYEMAIAAGGTNPNPNPNPTPTPTPTPTPPPGSSGACTATYTIANEWNDGFQATVTVTANQNITGWTVTWTFTDGQTITNALNADVSTSGSSVTARNVGHNGTLSQGASTEFGFVGSKGNSNSVPTLTCAAS

SEQ ID NO: 1730 - protein, 546 aa, Artificial Sequence
  Synthetic Construct, P26222-mTth008-S251-1
MNDSPFYVNPNMSSAEWVRNNPNDPRTPVIRDRIASVPQGTWFAHHNPGQITGQVDALMSAAQAAGKIPILVVYNAPGRDCGNHSSGGAPSHSAYRSWIDEFAAGLKNRPAYIIVEPDLISLMSSCMQHVQQEVLQTMAYAGKALKAGSSQARIYFDAGHSAWHSPAQMASWLQQADISNSAHGIATNTSNYRWTADEVAYAKAVLSAIGNPSLRAVIDTCLAEGSLVLDAATGQRVPIEKVRPGMEVFSLGPDYRLYRVPVLEVLESGVREVVRLRTRSGRTLVLTPDHPLLTPEGWKPLCDLPLGTPIAVPQEGVGVLWDPIVAVEPAGKARTFDLRVPPFANFVSEDLVVHNSRNGNGPAGNEWCDPSGRAIGTPSTTNTGDPMIDAFLWIKLPGEADGCIAGAGQFVPQAAYEMAIAAGGTNPNPNPNPTPTPTPTPTPPPGSSGACTATYTIANEWNDGFQATVTVTANQNITGWTVTWTFTDGQTITNALNADVSTSGSSVTARNVGHNGTLSQGASTEFGFVGSKGNSNSVPTLTCAAS

SEQ ID NO: 1731 - protein, 547 aa, Artificial Sequence
  Synthetic Construct, P26222-mTth010-S251-1
MNDSPFYVNPNMSSAEWVRNNPNDPRTPVIRDRIASVPQGTWFAHHNPGQITGQVDALMSAAQAAGKIPILVVYNAPGRDCGNHSSGGAPSHSAYRSWIDEFAAGLKNRPAYIIVEPDLISLMSSCMQHVQQEVLQTMAYAGKALKAGSSQARIYFDAGHSAWHSPAQMASWLQQADISNSAHGIATNTSNYRWTADEVAYAKAVLSAIGNPSLRAVIDTCLAEGSLVLDAATGQRVPIEKVRPGMEVFSLGPDYRLYRVPVLEVLESGVREVVRLRTRSGRTLVLTPDHPLLTPEGWKPLCDLPLGTPIAVRDVETGEVLWDPIVAVEPAGKARTFDLRVPPFANFVSEDLVVHNSRNGNGPAGNEWCDPSGRAIGTPSTTNTGDPMIDAFLWIKLPGEADGCIAGAGQFVPQAAYEMAIAAGGTNPNPNPNPTPTPTPTPTPPPGSSGACTATYTIANEWNDGFQATVTVTANQNITGWTVTWTFTDGQTITNALNADVSTSGSSVTARNVGHNGTLSQGASTEFGFVGSKGNSNSVPTLTCAAS

SEQ ID NO: 1732 - protein, 546 aa, Artificial Sequence
  Synthetic Construct, P26222-mTth002-S123-1
MNDSPFYVNPNMSSAEWVRNNPNDPRTPVIRDRIASVPQGTWFAHHNPGQITGQVDALMSAAQAAGKIPILVVYNAPGRDCGNHSSGGAPSTCLAEGSLVLDAATGQRVPIEKVRPGMEVFSLGPDYRLYRVPVLEVLESGVREVVRLRTRSGRTLVLTPDHPLLTPEGWKPLCDLPLGTPIAVPGPDQKVLWDPIVAVEPAGKARTFDLRVPPFANFVSEDLVVHNSAYRSWIDEFAAGLKNRPAYIIVEPDLISLMSSCMQHVQQEVLETMAYAGKALKAGSSQARIYFDAGHSAWHSPAQMASWLQQADISNSAHGIATNTSNYRWTADEVAYAKAVLSAIGNPSLRAVIDTSRNGNGPAGNEWCDPSGRAIGTPSTTNTGDPMIDAFLWIKLPGEADGCIAGAGQFVPQAAYEMAIAAGGTNPNPNPNPTPTPTPTPTPPPGSSGACTATYTIANEWNDGFQATVTVTANQNITGWTVTWTFTDGQTITNAWNADVSTSGSSVTARNVGHNGTLSQGASTEFGFVGSKGNSNSVPTLTCAAS

SEQ ID NO: 1733 - protein, 547 aa, Artificial Sequence
  Synthetic Construct, P26222-mTth010-S115-1
MNDSPFYVNPNMSSAEWVRNNPNDPRTPVIRDRIASVPQGTWFAHHNPGQITGQVDALMSAAQAAGKIPILVVYNAPGRDCGNHCLAEGSLVLDAATGQRVPIEKVRPGMEVFSLGPDYRLYRVPVLEVLESGVREVVRLRTRSGRTLVLTPDHPLLTPEGWKPLCDLPLGTPIAVRDVETGEVLWDPIVAVEPAGKARTFDLRVPPFANFVSEDLVVHNSSGGAPSHSAYRSWIDEFAAGLKNRPAYIIVEPDLISLMSSCMQHVQQEVLETMAYAGKALKAGSSQARIYFDAGHSAWHSPAQMASWLQQADISNSAHGIATNTSNYRWTADEVAYAKAVLSAIGNPSLRAVIDTSRNGNGPAGNEWCDPSGRAIGTPSTTNTGDPMIDAFLWIKLPGEADGCIAGAGQFVPQAAYEMAIAAGGTNPNPNPNPTPTPTPTPTPPPGSSGACTATYTIANEWNDGFQATVTVTANQNITGWTVTWTFTDGQTITNAWNADVSTSGSSVTARNVGHNGTLSQGASTEFGFVGSKGNSNSVPTLTCAAS

SEQ ID NO: 1734 - protein, 547 aa, Artificial Sequence
  Synthetic Construct, P26222-mTth010-S154-1
MNDSPFYVNPNMSSAEWVRNNPNDPRTPVIRDRIASVPQGTWFAHHNPGQITGQVDALMSAAQAAGKIPILVVYNAPGRDCGNHSSGGAPSHSAYRSWIDEFAAGLKNRPAYIIVEPDLISLMCLAEGSLVLDAATGQRVPIEKVRPGMEVFSLGPDYRLYRVPVLEVLESGVREVVRLRTRSGRTLVLTPDHPLLTPEGWKPLCDLPLGTPIAVRDVETGEVLWDPIVAVEPAGKARTFDLRVPPFANFVSEDLVVHNSSCMQHVQQEVLETMAYAGKALKAGSSQARIYFDAGHSAWHSPAQMASWLQQADISNSAHGIATNTSNYRWTADEVAYAKAVLSAIGNPSLRAVIDTSRNGNGPAGNEWCDPSGRAIGTPSTTNTGDPMIDAFLWIKLPGEADGCIAGAGQFVPQAAYEMAIAAGGTNPNPNPNPTPTPTPTPTPPPGSSGACTATYTIANEWNDGFQATVTVTANQNITGWTVTWTFTDGQTITNAWNADVSTSGSSVTARNVGHNGTLSQGASTEFGFVGSKGNSNSVPTLTCAAS

SEQ ID NO: 1735 - protein, 547 aa, Artificial Sequence
  Synthetic Construct, P26222-mTth010-S154-2
MNDSPFYVNPNMSSAEWVRNNPNDPRTPVIRDRIASVPQGTWFAHHNPGQITGQVDALMSAAQAAGKIPILVVYNAPGRDCGNHSSGGAPSHSAYRSWIDEFAAGLKNRPAYIIVEPDLISLMCLAEGSLVLDAATGQRVPIEKVRPGMEVFSLGPDYRLYRVPVLEVLESGVREVVRLSTRSGRTLVLTPNHPLLTPEGWKPLCDLPLGTPIAVRDVETGEVLWDPIVAVEPAGKARTFDLRVPPFANFVSEDLVVHNSSCMQHVQQEVLETMAYAGKALKAGSSQARIYFDAGHSAWHSPAQMASWLQQADISNSAHGIATNTSNYRWTADEVAYAKAVLSAIGNPSLRAVIDTSRNGNGPAGNEWCDPSGRAIGTPSTTNTGDPMIDAFLWIKLPGEADGCIAGAGQFVPQAAYEMAIAAGGTNPNPNPNPTPTPTPTPTPPPGSSGACTATYTIANEWNDGFQATVTVTANQNITGWTVTWTFTDGQTITNAWNADVSTSGSSVTARNVGHNGTLSQGASTEFGFVGSKGNSNSVPTLTCAAS

SEQ ID NO: 1736 - protein, 547 aa, Artificial Sequence
  Synthetic Construct, P26222-mTth010-S154-3
MNDSPFYVNPNMSSAEWVRNNPNDPRTPVIRDRIASVPQGTWFAHHNPGQITGQVDALMSAAQAAGKIPILVVYNAPGRDCGNHSSGGAPSHSAYRSWIDEFAAGLKNRPAYIIVEPDLISLMCLAEGSLVLDAATGQRVPIEKVRPGMEVFSLGPDYRLYRVPVMEVLESGVREVVRLRTRSGRTLVLTPDHPLLTPEGWKPLCDLPLGTPIAVRDVETGEVLWDPIVAVEPAGKARTFDLRVPPFANFVSEDLVVHNSSCMQHVQQEVLETMAYAGKALKAGSSQARIYFDAGHSAWHSPAQMASWLQQADISNSAHGIATNTSNYRWTADEVAYAKAVLSAIGNPSLRAVIDTSRNGNGPAGNEWCDPSGRAIGTPSTTNTGDPMIDAFLWIKLPGEADGCIAGAGQFVPQAAYEMAIAAGGTNPNPNPNPTPTPTPTPTPPPGSSGACTATYTIANEWNDGFQATVTVTANQNITGWTVTWTFTDGQTITNAWNADVSTSGSSVTARNVGHNGTLSQGASTEFGFVGSKGNSNSVPTLTCAAS

SEQ ID NO: 1737 - protein, 547 aa, Artificial Sequence
  Synthetic Construct, P26222-mTth010-S154-4
MNDSPFYVNPNMSSAEWVRNNPNDPRTPVIRDRIASVPQGTWFAHHNPGQITGQVDALMSAAQAAGKIPILVVYNAPGRDCGNHSSGGAPSHSAYRSWIDEFAAGLKNRPAYIIVEPDLISLMCLAEGSLVLDAATGQRVPIEKVRPGMEVFSLGPDYRLYRVPVLEVLESGVREVVRLRTRSGRTLVLTANHPLLTPEGWKPLCDLPLGTPIAVRDVETGEVLWDPIVAVEPAGKARTFDLRVPPFANFVSEDLVVHNSSCMQHVQQEVLETMAYAGKALKAGSSQARIYFDAGHSAWHSPAQMASWLQQADISNSAHGIATNTSNYRWTADEVAYAKAVLSAIGNPSLRAVIDTSRNGNGPAGNEWCDPSGRAIGTPSTTNTGDPMIDAFLWIKLPGEADGCIAGAGQFVPQAAYEMAIAAGGTNPNPNPNPTPTPTPTPTPPPGSSGACTATYTIANEWNDGFQATVTVTANQNITGWTVTWTFTDGQTITNAWNADVSTSGSSVTARNVGHNGTLSQGASTEFGFVGSKGNSNSVPTLTCAAS

SEQ ID NO: 1738 - protein, 547 aa, Artificial Sequence; identical to SEQ ID NO: 1737
  Synthetic Construct, P26222-mTth010-S154-5

SEQ ID NO: 1739 - protein, 945 aa, Artificial Sequence
  Synthetic Construct, P54583-Tth-S56-1
MAGGGYWHTSGREILDANNVPVRIAGINWFGFETCNYVVHGLWSRDYRSMLDQIKCLAEGSLVLDAATGQRVPIEKVRPGMEVFSLGPDYRLYRVPVLEVLESGVREVVRLRTRSGRTLVLTPDHPLLTPEGWKPLCDLPLGTPIAVPAELPVAGHLAPPEERVTLLALLLGDGNTKLSGRRGTRPNAFFYSKDPELLAAYRRCAEALGAKVKAYVHPTTGVVTLATLAPRPGAQDPVKRLVVEAGMVAKAEEKRVPEEVFRYRREALALFLGRLFSTDGSVEKKRISYSSASLGLAQDVAHLLLRLGITSQLRSRGPRAHEVLISGREDILRFAELIGPYLLGAKRERLAALEAEARRRLPGQGWHLRLVLPAVAYRVSEAKRRSGFSWSEAGRRVAVAGSCLSSGLNLKLPRRYLSRHRLSLLGEAFADPGLEALAEGQVLWDPIVAVEPAGKARTFDLRVPPFANFVSEDLVVHNSLGYNTIRLPYSDDILKPGTMPNSINFYQMNQDLQGLTSLQVMDKIVAYAGQIGLRIILDRHRPDCSGQSALWYTSSVSEATWISDLQALAQRYKGNPTVVGFDLHNEPHDPACWGCGDPSIDWRLAAERAGNAVLSVNPNLLIFVEGVQSYNGDSYWWGGNLQGAGQYPVVLNVPNRLVYSAHDYATSVYPQTWFSDPTFPNNMPGIWNKNWGYLFNQNIAPVWLGEFGTTLQSTTDQTWLKTLVQYLRPTAQYGADSFQWTFWSWNPDSGDTGGILKDDWQTVDTVKDGYLAPIKSSIFDPVGASASPSSQPSPSVSPSPSPSPSASRTPTPTPTPTASPTPTLTPTATPTPTASPTPSPTAASGARCTASYQVNSDWGNGFTVTVAVTNSGSVATKTWTVSWTFGGNQTITNSWNAAVTQNGQSVTARNMSYNNVIQPGQNTTFGFQASYTGSNAAPTVACAAS

SEQ ID NO: 1740 - protein, 658 aa, Artificial Sequence
  Synthetic Construct, P54583-mTth010-S56-1
MAGGGYWHTSGREILDANNVPVRIAGINWFGFETCNYVVHGLWSRDYRSMLDQIKCLAEGSLVLDAATGQRVPIEKVRPGMEVFSLGPDYRLYRVPVLEVLESGVREVVRLRTRSGRTLVLTPDHPLLTPEGWKPLCDLPLGTPIAVRDVETGEVLWDPIVAVEPAGKARTFDLRVPPFANFVSEDLVVHNSLGYNTIRLPYSDDILKPGTMPNSINFYQMNQDLQGLTSLQVMDKIVAYAGQIGLRIILDRHRPDCSGQSALWYTSSVSEATWISDLQALAQRYKGNPTVVGFDLHNEPHDPACWGCGDPSIDWRLAAERAGNAVLSVNPNLLIFVEGVQSYNGDSYWWGGNLQGAGQYPVVLNVPNRLVYSAHDYATSVYPQTWFSDPTFPNNMPGIWNKNWGYLFNQNIAPVWLGEFGTTLQSTTDQTWLKTLVQYLRPTAQYGADSFQWTFWSWNPDSGDTGGILKDDWQTVDTVKDGYLAPIKSSIFDPVGASASPSSQPSPSVSPSPSPSPSASRTPTPTPTPTASPTPTLTPTATPTPTASPTPSPTAASGARCTASYQVNSDWGNGFTVTVAVTNSGSVATKTWTVSWTFGGNQTITNSWNAAVTQNGQSVTARNMSYNNVIQPGQNTTFGFQASYTGSNAAPTVACAAS

SEQ ID NO: 1741 - protein, 945 aa, Artificial Sequence
  Synthetic Construct, P54583-Tth-C75-1
MAGGGYWHTSGREILDANNVPVRIAGINWFGFETCLAEGTRVLDAATGQRVPIEKVRPGMEVFSLGPDYRLYRVPVLEVLESGVREVVRLRTRSGRTLVLTPDHPLLTPEGWKPLCDLPLGTPIAVPAELPVAGHLAPPEERVTLLALLLGDGNTKLSGRRGTRPNAFFYSKDPELLAAYRRCAEALGAKVKAYVHPTTGVVTLATLAPRPGAQDPVKRLVVEAGMVAKAEEKRVPEEVFRYRREALALFLGRLFSTDGSVEKKRISYSSASLGLAQDVAHLLLRLGITSQLRSRGPRAHEVLISGREDILRFAELIGPYLLGAKRERLAALEAEARRRLPGQGWHLRLVLPAVAYRVSEAKRRSGFSWSEAGRRVAVAGSCLSSGLNLKLPRRYLSRHRLSLLGEAFADPGLEALAEGQVLWDPIVAVEPAGKARTFDLRVPPFANFVSEGVVVHNCNYVVHGLWSRDYRSMLDQIKSLGYNTIRLPYSDDILKPGTMPNSINFYQMNQDLQGLTSLQVMDKIVAYAGQIGLRIILDRHRPDCSGQSALWYTSSVSEATWISDLQALAQRYKGNPTVVGFDLHNEPHDPACWGCGDPSIDWRLAAERAGNAVLSVNPNLLIFVEGVQSYNGDSYWWGGNLQGAGQYPVVLNVPNRLVYSAHDYATSVYPQTWFSDPTFPNNMPGIWNKNWGYLFNQNIAPVWLGEFGTTLQSTTDQTWLKTLVQYLRPTAQYGADSFQWTFWSWNPDSGDTGGILKDDWQTVDTVKDGYLAPIKSSIFDPVGASASPSSQPSPSVSPSPSPSPSASRTPTPTPTPTASPTPTLTPTATPTPTASPTPSPTAASGARCTASYQVNSDWGNGFTVTVAVTNSGSVATKTWTVSWTFGGNQTITNSWNAAVTQNGQSVTARNMSYNNVIQPGQNTTFGFQASYTGSNAAPTVACAAS

SEQ ID NO: 1742 - protein, 945 aa, Artificial Sequence
  Synthetic Construct, P54583-Tth-S192-1
MAGGGYWHTSGREILDANNVPVRIAGINWFGFETCNYVVHGLWSRDYRSMLDQIKSLGYNTIRLPYSDDILKPGTMPNSINFYQMNQDLQGLTSLQVMDKIVAYAGQIGLRIILDRHRPDCSGQSALWYTSSVSEATWISDLQALAQRYKGNPTVVGFDLHNEPHDPACWGCGDPSIDWRLAAERAGNAVLCLAEGSLVLDAATGQRVPIEKVRPGMEVFSLGPDYRLYRVPVLEVLESGVREVVRLRTRSGRTLVLTPDHPLLTPEGWKPLCDLPLGTPIAVPAELPVAGHLAPPEERVTLLALLLGDGNTKLSGRRGTRPNAFFYSKDPELLAAYRRCAEALGAKVKAYVHPTTGVVTLATLAPRPGAQDPVKRLVVEAGMVAKAEEKRVPEEVFRYRREALALFLGRLFSTDGSVEKKRISYSSASLGLAQDVAHLLLRLGITSQLRSRGPRAHEVLISGREDILRFAELIGPYLLGAKRERLAALEAEARRRLPGQGWHLRLVLPAVAYRVSEAKRRSGFSWSEAGRRVAVAGSCLSSGLNLKLPRRYLSRHRLSLLGEAFADPGLEALAEGQVLWDPIVAVEPAGKARTFDLRVPPFANFVSEDLVVHNSVNPNLLIFVEGVQSYNGDSYWWGGNLQGAGQYPVVLNVPNRLVYSAHDYATSVYPQTWFSDPTFPNNMPGIWNKNWGYLFNQNIAPVWLGEFGTTLQSTTDQTWLKTLVQYLRPTAQYGADSFQWTFWSWNPDSGDTGGILKDDWQTVDTVKDGYLAPIKSSIFDPVGASASPSSQPSPSVSPSPSPSPSASRTPTPTPTPTASPTPTLTPTATPTPTASPTPSPTAASGARCTASYQVNSDWGNGFTVTVAVTNSGSVATKTWTVSWTFGGNQTITNSWNAAVTQNGQSVTARNMSYNNVIQPGQNTTFGFQASYTGSNAAPTVACAAS

SEQ ID NO: 1743 - protein, 945 aa, Artificial Sequence
  Synthetic Construct, P54583-Tth-S237-1
MAGGGYWHTSGREILDANNVPVRIAGINWFGFETCNYVVHGLWSRDYRSMLDQIKSLGYNTIRLPYSDDILKPGTMPNSINFYQMNQDLQGLTSLQVMDKIVAYAGQIGLRIILDRHRPDCSGQSALWYTSSVSEATWISDLQALAQRYKGNPTVVGFDLHNEPHDPACWGCGDPSIDWRLAAERAGNAVLSVNPNLLIFVEGVQSYNGDSYWWGGNLQGAGQYPVVLNVPNRLVYCLAEGSLVLDAATGQRVPIEKVRPGMEVFSLGPDYRLYRVPVLEVLESGVREVVRLRTRSGRTLVLTPDHPLLTPEGWKPLCDLPLGTPIAVPAELPVAGHLAPPEERVTLLALLLGDGNTKLSGRRGTRPNAFFYSKDPELLAAYRRCAEALGAKVKAYVHPTTGVVTLATLAPRPGAQDPVKRLVVEAGMVAKAEEKRVPEEVFRYRREALALFLGRLFSTDGSVEKKRISYSSASLGLAQDVAHLLLRLGITSQLRSRGPRAHEVLISGREDILRFAELIGPYLLGAKRERLAALEAEARRRLPGQGWHLRLVLPAVAYRVSEAKRRSGFSWSEAGRRVAVAGSCLSSGLNLKLPRRYLSRHRLSLLGEAFADPGLEALAEGQVLWDPIVAVEPAGKARTFDLRVPPFANFVSEDLVVHNSAHDYATSVYPQTWFSDPTFPNNMPGIWNKNWGYLFNQNIAPVWLGEFGTTLQSTTDQTWLKTLVQYLRPTAQYGADSFQWTFWSWNPDSGDTGGILKDDWQTVDTVKDGYLAPIKSSIFDPVGASASPSSQPSPSVSPSPSPSPSASRTPTPTPTPTASPTPTLTPTATPTPTASPTPSPTAASGARCTASYQVNSDWGNGFTVTVAVTNSGSVATKTWTVSWTFGGNQTITNSWNAAVTQNGQSVTARNMSYNNVIQPGQNTTFGFQASYTGSNAAPTVACAAS

SEQ ID NO: 1744 - protein, 658 aa, Artificial Sequence
  Synthetic Construct, P54583-mTth010-S237-1
MAGGGYWHTSGREILDANNVPVRIAGINWFGFETCNYVVHGLWSRDYRSMLDQIKSLGYNTIRLPYSDDILKPGTMPNSINFYQMNQDLQGLTSLQVMDKIVAYAGQIGLRIILDRHRPDCSGQSALWYTSSVSEATWISDLQALAQRYKGNPTVVGFDLHNEPHDPACWGCGDPSIDWRLAAERAGNAVLSVNPNLLIFVEGVQSYNGDSYWWGGNLQGAGQYPVVLNVPNRLVYCLAEGSLVLDAATGQRVPIEKVRPGMEVFSLGPDYRLYRVPVLEVLESGVREVVRLRTRSGRTLVLTPDHPLLTPEGWKPLCDLPLGTPIAVRDVETGEVLWDPIVAVEPAGKARTFDLRVPPFANFVSEDLVVHNSAHDYATSVYPQTWFSDPTFPNNMPGIWNKNWGYLFNQNIAPVWLGEFGTTLQSTTDQTWLKTLVQYLRPTAQYGADSFQWTFWSWNPDSGDTGGILKDDWQTVDTVKDGYLAPIKSSIFDPVGASASPSSQPSPSVSPSPSPSPSASRTPTPTPTPTASPTPTLTPTATPTPTASPTPSPTAASGARCTASYQVNSDWGNGFTVTVAVTNSGSVATKTWTVSWTFGGNQTITNSWNAAVTQNGQSVTARNMSYNNVIQPGQNTTFGFQASYTGSNAAPTVACAAS

SEQ ID NO: 1745 - protein, 658 aa, Artificial Sequence
  Synthetic Construct, P54583-mTth010-S56-2
MAGGGYWHTSGREILDANNVPVRIAGINWFGFETCNYVVHGLWSRDYRSMLDQIKCLAEGSLVLDAATGQRVPIEKVRPGMEVFSLGPDYRLYRVPVLEVLESGVREVVRLRTRSGRTLVSTPDHPLLTPEGWKPLCDLPLGTPIAVRDVETGEVLWDPIVAVEPAGKARTFDLRVPPFANFVSEDLVVHNSLGYNTIRLPYSDDILKPGTMPNSINFYQMNQDLQGLTSLQVMDKIVAYAGQIGLRIILDRHRPDCSGQSALWYTSSVSEATWISDLQALAQRYKGNPTVVGFDLHNEPHDPACWGCGDPSIDWRLAAERAGNAVLSVNPNLLIFVEGVQSYNGDSYWWGGNLQGAGQYPVVLNVPNRLVYSAHDYATSVYPQTWFSDPTFPNNMPGIWNKNWGYLFNQNIAPVWLGEFGTTLQSTTDQTWLKTLVQYLRPTAQYGADSFQWTFWSWNPDSGDTGGILKDDWQTVDTVKDGYLAPIKSSIFDPVGASASPSSQPSPSVSPSPSPSPSASRTPTPTPTPTASPTPTLTPTATPTPTASPTPSPTAASGARCTASYQVNSDWGNGFTVTVAVTNSGSVATKTWTVSWTFGGNQTITNSWNAAVTQNGQSVTARNMSYNNVIQPGQNTTFGFQASYTGSNAAPTVACAAS

SEQ ID NO: 1746 - protein, 658 aa, Artificial Sequence
  Synthetic Construct, P54583-mTth010-S56-3
MAGGGYWHTSGREILDANNVPVRIAGINWFGFETCNYVVHGLWSRDYRSMLDQIKCLAEGSLVLDAATGQRVPIEKVRPGMEVFSLGPDYRLYRVPVLEVLESGVREVVRLRTRSGRTLVLTPDHPLLTPEGWKPLCDLPLGTPIAVRDVETGEVLWDLIVAVEPAGKARTFDLRVPPFANFVSEDLVVHNSLGYNTIRLPYSDDILKPGTMPNSINFYQMNQDLQGLTSLQVMDKIVAYAGQIGLRIILDRHRPDCSGQSALWYTSSVSEATWISDLQALAQRYKGNPTVVGFDLHNEPHDPACWGCGDPSIDWRLAAERAGNAVLSVNPNLLIFVEGVQSYNGDSYWWGGNLQGAGQYPVVLNVPNRLVYSAHDYATSVYPQTWFSDPTFPNNMPGIWNKNWGYLFNQNIAPVWLGEFGTTLQSTTDQTWLKTLVQYLRPTAQYGADSFQWTFWSWNPDSGDTGGILKDDWQTVDTVKDGYLAPIKSSIFDPVGASASPSSQPSPSVSPSPSPSPSASRTPTPTPTPTASPTPTLTPTATPTPTASPTPSPTAASGARCTASYQVNSDWGNGFTVTVAVTNSGSVATKTWTVSWTFGGNQTITNSWNAAVTQNGQSVTARNMSYNNVIQPGQNTTFGFQASYTGSNAAPTVACAAS

SEQ ID NO: 1747 - protein, 658 aa, Artificial Sequence
  Synthetic Construct, P54583-mTth010-S56-4
MAGGGYWHTSGREILDANNVPVRIAGINWFGFETCNYVVHGLWSRDYRSMLDQIKCLAEGSLVLDAATGQRVPIEKVRPGMEVFSLGPDYRLYRVPVLEVLESGVREVVCLRTRSGRTLVLTPDHPLLTPEGWKPLCDLPLGTPIAVRDVETGEVLWDPIVAVEPAGKARTFDLRVPPFANFVSEDLVVHNSLGYNTIRLPYSDDILKPGTMPNSINFYQMNQDLQGLTSLQVMDKIVAYAGQIGLRIILDRHRPDCSGQSALWYTSSVSEATWISDLQALAQRYKGNPTVVGFDLHNEPHDPACWGCGDPSIDWRLAAERAGNAVLSVNPNLLIFVEGVQSYNGDSYWWGGNLQGAGQYPVVLNVPNRLVYSAHDYATSVYPQTWFSDPTFPNNMPGIWNKNWGYLFNQNIAPVWLGEFGTTLQSTTDQTWLKTLVQYLRPTAQYGADSFQWTFWSWNPDSGDTGGILKDDWQTVDTVKDGYLAPIKSSIFDPVGASASPSSQPSPSVSPSPSPSPSASRTPTPTPTPTASPTPTLTPTATPTPTASPTPSPTAASGARCTASYQVNSDWGNGFTVTVAVTNSGSVATKTWTVSWTFGGNQTITNSWNAAVTQNGQSVTARNMSYNNVIQPGQNTTFGFQASYTGSNAAPTVACAAS

SEQ ID NO: 1748 - protein, 658 aa, Artificial Sequence; identical to SEQ ID NO: 1747
  Synthetic Construct, P54583-mTth010-S56-5

SEQ ID NO: 1749 - protein, 658 aa, Artificial Sequence
  Synthetic Construct, P54583-mTth010-S56-6
MAGGGYWHTSGREILDANNVSVRIAGINWFGFETCNYVVHGLWSRDYRSMLDQIKCLAEGSLVLDAATGQRVPIEKVRPGMKVFSLGPDYRLYRVPVLEVLESGVREVVRLRTRSGRTLVLTPDHPLLTPEGWKPLCDLPLGTPIAVRDVETGEVLWDPIVAVEPAGKARTFDLRVPPFANFVSEDLVVHNSLGYNTIRLPYSDDILKPGTMPNSINFYQMNQDLQGLTSLQVMDKIVAYAGQIGLRIILDRHRPDCSGQSALWYTSSVSEATWISDLQALAQRYKGNPTVVGFDLHNEPHDPACWGCGDPSIDWRLAAERAGNAVLSVNPNLLIFVEGVQSYNGDSYWWGGNLQGAGQYPVVLNVPNRLVYSAHDYATSVYPQTWFSDPTFPNNMPGIWNKNWGYLFNQNIAPVWLGEFGTTLQSTTDQTWLKTLVQYLRPTAQYGADSFQWTFWSWNPDSGDTGGILKDDWQTVDTVKDGYLAPIKSSIFDPVGASASPSSQPSPSVSPSPSPSPSASRTPTPTPTPTASPTPTLTPTATPTPTASPTPSPTAASGARCTASYQVNSDWGNGFTVTVAVTNSGSVATKTWTVSWTFGGNQTITNSWNAAVTQNGQSVTARNMSYNNVIQPGQNTTFGFQASYTGSNAAPTVACAAS

SEQ ID NO: 1750 - protein, 658 aa, Artificial Sequence
  Synthetic Construct, P54583-mTth010-S56-7
MAGGGYWHTSGREILDANNVPVRIAGINWFGFETCNYVVHGLWSRDYRSMLDQIKCLAEGSLVLDAATGQRVPIEKVRPGMEVFSLGPDYRLYRVPVLEVLESGVREVVRLRTRSGRTLVLTPDHPLLTPEGWKPLCDLPVGTPIAVRDVETGEVLWDPIVAVEPAGKARTFDLRVPPFANFVSEDLVVHNSLGYNTIRLPYSDDILKPGTMPNSINFYQMNQDLQGLTSLQVMDKIVAYAGQIGLRIILDRHRPDCSGQSALWYTSSVSEATWISDLQALAQRYKGNPTVVGFDLHNEPHDPACWGCGDPSIDWRLAAERAGNAVLSVNPNLLIFVEGVQSYNGDSYWWGGNLQGAGQYPVVLNVPNRLVYSAHDYATSVYPQTWFSDPTFPNNMPGIWNKNWGYLFNQNIAPVWLGEFGTTLQSTTDQTWLKTLVQYLRPTAQYGADSFQWTFWSWNPDSGDTGGILKDDWQTVDTVKDGYLAPIKSSIFDPVGASASPSSQPSPSVSPSPSPSPSASRTPTPTPTPTASPTPTLTPTATPTPTASPTPSPTAASGARCTASYQVNSDWGNGFTVTVAVTNSGSVATKTWTVSWTFGGNQTITNSWNAAVTQNGQSVTARNMSYNNVIQPGQNTTFGFQASYTGSNAAPTVACAAS

SEQ ID NO: 1751 - protein, 658 aa, Artificial Sequence
  Synthetic Construct, P54583-mTth010-S237-2
MAGGGYWHTSGREILDANNVPVRIAGINWFGFETCNYVVHGLWSRDYRSMLDQIKSLGYNTIRLPYSDDILKPGTMPNSINFYQMNQDLQGLTSLQVMDKIVAYAGQIGLRIILDRHRPDCSGQSALWYTSSVSEATWISDLQALAQRYKGNPTVVGFDLHNEPHDPACWGCGDPSIDWRLAAERAGNAVLSVNPNLLIFVEGVQSYNGDSYWWGGNLQGAGQYPVVLNVPNRLVYCLAEGSLVLDAATGQRVPIEKVRPGMEVFSLGPDYRLYRVPVLEVLESGVREVVRLRTRSGRTLVLTPDHPLLAPEGWKPLCDLPLGTPIAVRDVETGEVLWDPIVAVEPAGKARTFDLRVPPFANFVSEDLVVHNSAHDYATSVYPQTWFSDPTFPNNMPGIWNKNWGYLFNQNIAPVWLGEFGTTLQSTTDQTWLKTLVQYLRPTAQYGADSFQWTFWSWNPDSGDTGGILKDDWQTVDTVKDGYLAPIKSSIFDPVGASASPSSQPSPSVSPSPSPSPSASRTPTPTPTPTASPTPTLTPTATPTPTASPTPSPTAASGARCTASYQVNSDWGNGFTVTVAVTNSGSVATKTWTVSWTFGGNQTITNSWNAAVTQNGQSVTARNMSYNNVIQPGQNTTFGFQASYTGSNAAPTVACAAS

SEQ ID NO: 1752 - protein, 658 aa, Artificial Sequence
  Synthetic Construct, P54583-mTth010-S237-3
MAGGGYWHTSGREILDANNVPVRIAGINWFGFETCNYVVHGLWSRDYRSMLDQIKSLGYNTIRLPYSDDILKPGTMPNSINFYQMNQDLQGLTSLQVMDKIVAYAGQIGLRIILDRHRPDCSGQSALWYTSSVSEATWISDLQALAQRYKGNPTVVGFDLHNEPHDPACWGCGDPSIDWRLAAERAGNAVLSVNPNLLIFVEGVQSYNGDSYWWGGNLQGAGQYPVVLNVPNRLVYCLAEGSLVLDAATGQRVPIEKVRPGMEVFSLGPDYRLYRVPVLEVLESGVREVVRLRTRSGRTLVLTPDHPLLSPEGWKPLCDLPLGTPIAVRDVETGEVLWDPIVAVEPAGKARTFDLRVPPFANFVSEDLVVHNSAHDYATSVYPQTWFSDPTFPNNMPGIWNKNWGYLFNQNIAPVWLGEFGTTLQSTTDQTWLKTLVQYLRPTAQYGADSFQWTFWSWNPDSGDTGGILKDDWQTVDTVKDGYLAPIKSSIFDPVGASASPSSQPSPSVSPSPSPSPSASRTPTPTPTPTASPTPTLTPTATPTPTASPTPSPTAASGARCTASYQVNSDWGNGFTVTVAVTNSGSVATKTWTVSWTFGGNQTITNSWNAAVTQNGQSVTARNMSYNNVIQPGQNTTFGFQASYTGSNAAPTVACAAS

SEQ ID NO: 1753 - protein, 945 aa, Artificial Sequence
  Synthetic Construct, P54583-Tth-T154-1
MAGGGYWHTSGREILDANNVPVRIAGINWFGFETCNYVVHGLWSRDYRSMLDQIKSLGYNTIRLPYSDDILKPGTMPNSINFYQMNQDLQGLTSLQVMDKIVAYAGQIGLRIILDRHRPDCSGQSALWYTSSVSEATWISDLQALAQRYKGNPCLAEGSLVLDAATGQRVPIEKVRPGMEVFSLGPDYRLYRVPVLEVLESGVREVVRLRTRSGRTLVLTPDHPLLTPEGWKPLCDLPLGTPIAVPAELPVAGHLAPPEERVTLLALLLGDGNTKLSGRRGTRPNAFFYSKDPELLAAYRRCAEALGAKVKAYVHPTTGVVTLATLAPRPGAQDPVKRLVVEAGMVAKAEEKRVPEEVFRYRREALALFLGRLFSTDGSVEKKRISYSSASLGLAQDVAHLLLRLGITSQLRSRGPRAHEVLISGREDILRFAELIGPYLLGAKRERLAALEAEARRRLPGQGWHLRLVLPAVAYRVSEAKRRSGFSWSEAGRRVAVAGSCLSSGLNLKLPRRYLSRHRLSLLGEAFADPGLEALAEGQVLWDPIVAVEPAGKARTFDLRVPPFANFVSEDLVVHNTVVGFDLHNEPHDPACWGCGDPSIDWRLAAERAGNAVLSVNPNLLIFVEGVQSYNGDSYWWGGNLQGAGQYPVVLNVPNRLVYSAHDYATSVYPQTWFSDPTFPNNMPGIWNKNWGYLFNQNIAPVWLGEFGTTLQSTTDQTWLKTLVQYLRPTAQYGADSFQWTFWSWNPDSGDTGGILKDDWQTVDTVKDGYLAPIKSSIFDPVGASASPSSQPSPSVSPSPSPSPSASRTPTPTPTPTASPTPTLTPTATPTPTASPTPSPTAASGARCTASYQVNSDWGNGFTVTVAVTNSGSVATKTWTVSWTFGGNQTITNSWNAAVTQNGQSVTARNMSYNNVIQPGQNTTFGFQASYTGSNAAPTVACAAS

SEQ ID NO: 1754 - protein, 945 aa, Artificial Sequence
  Synthetic Construct, P54583-Tth-S135-1
MAGGGYWHTSGREILDANNVPVRIAGINWFGFETCNYVVHGLWSRDYRSMLDQIKSLGYNTIRLPYSDDILKPGTMPNSINFYQMNQDLQGLTCLAEGSLVLDAATGQRVPIEKVRPGMEVFSLGPDYRLYRVPVLEVLESGVREVVRLRTRSGRTLVLTPDHPLLTPEGWKPLCDLPLGTPIAVPAELPVAGHLAPPEERVTLLALLLGDGNTKLSGRRGTRPNAFFYSKDPELLAAYRRCAEALGAKVKAYVHPTTGVVTLATLAPRPGAQDPVKRLVVEAGMVAKAEEKRVPEEVFRYRREALALFLGRLFSTDGSVEKKRISYSSASLGLAQDVAHLLLRLGITSQLRSRGPRAHEVLISGREDILRFAELIGPYLLGAKRERLAALEAEARRRLPGQGWHLRLVLPAVAYRVSEAKRRSGFSWSEAGRRVAVAGSCLSSGLNLKLPRRYLSRHRLSLLGEAFADPGLEALAEGQVLWDPIVAVEPAGKARTFDLRVPPFANFVSEDLVVHNSLQVMDKIVAYAGQIGLRIILDRHRPDCSGQSALWYTSSVSEATWISDLQALAQRYKGNPTVVGFDLHNEPHDPACWGCGDPSIDWRLAAERAGNAVLSVNPNLLIFVEGVQSYNGDSYWWGGNLQGAGQYPVVLNVPNRLVYSAHDYATSVYPQTWFSDPTFPNNMPGIWNKNWGYLFNQNIAPVWLGEFGTTLQSTTDQTWLKTLVQYLRPTAQYGADSFQWTFWSWNPDSGDTGGILKDDWQTVDTVKDGYLAPIKSSIFDPVGASASPSSQPSPSVSPSPSPSPSASRTPTPTPTPTASPTPTLTPTATPTPTASPTPSPTAASGARCTASYQVNSDWGNGFTVTVAVTNSGSVATKTWTVSWTFGGNQTITNSWNAAVTQNGQSVTARNMSYNNVIQPGQNTTFGFQASYTGSNAAPTVACAAS

SEQ ID NO: 1755 - protein, 945 aa, Artificial Sequence
  Synthetic Construct, P54583-Tth-S134-1
MAGGGYWHTSGREILDANNVPVRIAGINWFGFETCNYVVHGLWSRDYRSMLDQIKSLGYNTIRLPYSDDILKPGTMPNSINFYQMNQDLQGLTSLQVMDKIVAYAGQIGLRIILDRHRPDCSGQSALWYTSSVCLAEGSLVLDAATGQRVPIEKVRPGMEVFSLGPDYRLYRVPVLEVLESGVREVVRLRTRSGRTLVLTPDHPLLTPEGWKPLCDLPLGTPIAVPAELPVAGHLAPPEERVTLLALLLGDGNTKLSGRRGTRPNAFFYSKDPELLAAYRRCAEALGAKVKAYVHPTTGVVTLATLAPRPGAQDPVKRLVVEAGMVAKAEEKRVPEEVFRYRREALALFLGRLFSTDGSVEKKRISYSSASLGLAQDVAHLLLRLGITSQLRSRGPRAHEVLISGREDILRFAELIGPYLLGAKRERLAALEAEARRRLPGQGWHLRLVLPAVAYRVSEAKRRSGFSWSEAGRRVAVAGSCLSSGLNLKLPRRYLSRHRLSLLGEAFADPGLEALAEGQVLWDPIVAVEPAGKARTFDLRVPPFANFVSEDLVVHNSEATWISDLQALAQRYKGNPTVVGFDLHNEPHDPACWGCGDPSIDWRLAAERAGNAVLSVNPNLLIFVEGVQSYNGDSYWWGGNLQGAGQYPVVLNVPNRLVYSAHDYATSVYPQTWFSDPTFPNNMPGIWNKNWGYLFNQNIAPVWLGEFGTTLQSTTDQTWLKTLVQYLRPTAQYGADSFQWTFWSWNPDSGDTGGILKDDWQTVDTVKDGYLAPIKSSIFDPVGASASPSSQPSPSVSPSPSPSPSASRTPTPTPTPTASPTPTLTPTATPTPTASPTPSPTAASGARCTASYQVNSDWGNGFTVTVAVTNSGSVATKTWTVSWTFGGNQTITNSWNAAVTQNGQSVTARNMSYNNVIQPGQNTTFGFQASYTGSNAAPTVACAAS

SEQ ID NO: 1756 - protein, 945 aa, Artificial Sequence; identical to SEQ ID NO: 1739
  Synthetic Construct, P54583-Tth-S96-1

SEQ ID NO: 1757 - protein, 945 aa, Artificial Sequence; identical to SEQ ID NO: 1754
  Synthetic Construct, P54583-Tth-S94-1

SEQ ID NO: 1758 - protein, 945 aa, Artificial Sequence
  Synthetic Construct, P54583-Tth-T93-1
MAGGGYWHTSGREILDANNVPVRIAGINWFGFETCNYVVHGLWSRDYRSMLDQIKSLGYNTIRLPYSDDILKPGTMPNSINFYQMNQDLQGLCLAEGSLVLDAATGQRVPIEKVRPGMEVFSLGPDYRLYRVPVLEVLESGVREVVRLRTRSGRTLVLTPDHPLLTPEGWKPLCDLPLGTPIAVPAELPVAGHLAPPEERVTLLALLLGDGNTKLSGRRGTRPNAFFYSKDPELLAAYRRCAEALGAKVKAYVHPTTGVVTLATLAPRPGAQDPVKRLVVEAGMVAKAEEKRVPEEVFRYRREALALFLGRLFSTDGSVEKKRISYSSASLGLAQDVAHLLLRLGITSQLRSRGPRAHEVLISGREDILRFAELIGPYLLGAKRERLAALEAEARRRLPGQGWHLRLVLPAVAYRVSEAKRRSGFSWSEAGRRVAVAGSCLSSGLNLKLPRRYLSRHRLSLLGEAFADPGLEALAEGQVLWDPIVAVEPAGKARTFDLRVPPFANFVSEDLVVHNTSLQVMDKIVAYAGQIGLRIILDRHRPDCSGQSALWYTSSVSEATWISDLQALAQRYKGNPTVVGFDLHNEPHDPACWGCGDPSIDWRLAAERAGNAVLSVNPNLLIFVEGVQSYNGDSYWWGGNLQGAGQYPVVLNVPNRLVYSAHDYATSVYPQTWFSDPTFPNNMPGIWNKNWGYLFNQNIAPVWLGEFGTTLQSTTDQTWLKTLVQYLRPTAQYGADSFQWTFWSWNPDSGDTGGILKDDWQTVDTVKDGYLAPIKSSIFDPVGASASPSSQPSPSVSPSPSPSPSASRTPTPTPTPTASPTPTLTPTATPTPTASPTPSPTAASGARCTASYQVNSDWGNGFTVTVAVTNSGSVATKTWTVSWTFGGNQTITNSWNAAVTQNGQSVTARNMSYNNVIQPGQNTTFGFQASYTGSNAAPTVACAAS

SEQ ID NO: 1759 - protein, 945 aa, Artificial Sequence
  Synthetic Construct, P54583-Tth-S67-1
MAGGGYWHTSGREILDANNVPVRIAGINWFGFETCNYVVHGLWSRDYRSMLDQIKSLGYNTIRLPYCLAEGSLVLDAATGQRVPIEKVRPGMEVFSLGPDYRLYRVPVLEVLESGVREVVRLRTRSGRTLVLTPDHPLLTPEGWKPLCDLPLGTPIAVPAELPVAGHLAPPEERVTLLALLLGDGNTKLSGRRGTRPNAFFYSKDPELLAAYRRCAEALGAKVKAYVHPTTGVVTLATLAPRPGAQDPVKRLVVEAGMVAKAEEKRVPEEVFRYRREALALFLGRLFSTDGSVEKKRISYSSASLGLAQDVAHLLLRLGITSQLRSRGPRAHEVLISGREDILRFAELIGPYLLGAKRERLAALEAEARRRLPGQGWHLRLVLPAVAYRVSEAKRRSGFSWSEAGRRVAVAGSCLSSGLNLKLPRRYLSRHRLSLLGEAFADPGLEALAEGQVLWDPIVAVEPAGKARTFDLRVPPFANFVSEDLVVHNSDDILKPGTMPNSINFYQMNQDLQGLTSLQVMDKIVAYAGQIGLRIILDRHRPDCSGQSALWYTSSVSEATWISDLQALAQRYKGNPTVVGFDLHNEPHDPACWGCGDPSIDWRLAAERAGNAVLSVNPNLLIFVEGVQSYNGDSYWWGGNLQGAGQYPVVLNVPNRLVYSAHDYATSVYPQTWFSDPTFPNNMPGIWNKNWGYLFNQNIAPVWLGEFGTTLQSTTDQTWLKTLVQYLRPTAQYGADSFQWTFWSWNPDSGDTGGILKDDWQTVDTVKDGYLAPIKSSIFDPVGASASPSSQPSPSVSPSPSPSPSASRTPTPTPTPTASPTPTLTPTATPTPTASPTPSPTAASGARCTASYQVNSDWGNGFTVTVAVTNSGSVATKTWTVSWTFGGNQTITNSWNAAVTQNGQSVTARNMSYNNVIQPGQNTTFGFQASYTGSNAAPTVACAAS

SEQ ID NO: 1760 - protein, 945 aa, Artificial Sequence
  Synthetic Construct, P54583-Tth-T61-1
MAGGGYWHTSGREILDANNVPVRIAGINWFGFETCNYVVHGLWSRDYRSMLDQIKSLGYNCLAEGSLVLDAATGQRVPIEKVRPGMEVFSLGPDYRLYRVPVLEVLESGVREVVRLRTRSGRTLVLTPDHPLLTPEGWKPLCDLPLGTPIAVPAELPVAGHLAPPEERVTLLALLLGDGNTKLSGRRGTRPNAFFYSKDPELLAAYRRCAEALGAKVKAYVHPTTGVVTLATLAPRPGAQDPVKRLVVEAGMVAKAEEKRVPEEVFRYRREALALFLGRLFSTDGSVEKKRISYSSASLGLAQDVAHLLLRLGITSQLRSRGPRAHEVLISGREDILRFAELIGPYLLGAKRERLAALEAEARRRLPGQGWHLRLVLPAVAYRVSEAKRRSGFSWSEAGRRVAVAGSCLSSGLNLKLPRRYLSRHRLSLLGEAFADPGLEALAEGQVLWDPIVAVEPAGKARTFDLRVPPFANFVSEDLVVHNTIRLPYSDDILKPGTMPNSINFYQMNQDLQGLTSLQVMDKIVAYAGQIGLRIILDRHRPDCSGQSALWYTSSVSEATWISDLQALAQRYKGNPTVVGFDLHNEPHDPACWGCGDPSIDWRLAAERAGNAVLSVNPNLLIFVEGVQSYNGDSYWWGGNLQGAGQYPVVLNVPNRLVYSAHDYATSVYPQTWFSDPTFPNNMPGIWNKNWGYLFNQNIAPVWLGEFGTTLQSTTDQTWLKTLVQYLRPTAQYGADSFQWTFWSWNPDSGDTGGILKDDWQTVDTVKDGYLAPIKSSIFDPVGASASPSSQPSPSVSPSPSPSPSASRTPTPTPTPTASPTPTLTPTATPTPTASPTPSPTAASGARCTASYQVNSDWGNGFTVTVAVTNSGSVATKTWTVSWTFGGNQTITNSWNAAVTQNGQSVTARNMSYNNVIQPGQNTTFGFQASYTGSNAAPTVACAAS

SEQ ID NO: 1761 - protein, 945 aa, Artificial Sequence
  Synthetic Construct, P54583-Tth-S10-1
MAGGGYWHTCLAEGSLVLDAATGQRVPIEKVRPGMEVFSLGPDYRLYRVPVLEVLESGVREVVRLRTRSGRTLVLTPDHPLLTPEGWKPLCDLPLGTPIAVPAELPVAGHLAPPEERVTLLALLLGDGNTKLSGRRGTRPNAFFYSKDPELLAAYRRCAEALGAKVKAYVHPTTGVVTLATLAPRPGAQDPVKRLVVEAGMVAKAEEKRVPEEVFRYRREALALFLGRLFSTDGSVEKKRISYSSASLGLAQDVAHLLLRLGITSQLRSRGPRAHEVLISGREDILRFAELIGPYLLGAKRERLAALEAEARRRLPGQGWHLRLVLPAVAYRVSEAKRRSGFSWSEAGRRVAVAGSCLSSGLNLKLPRRYLSRHRLSLLGEAFADPGLEALAEGQVLWDPIVAVEPAGKARTFDLRVPPFANFVSEDLVVHNSGREILDANNVPVRIAGINWFGFETCNYVVHGLWSRDYRSMLDQIKSLGYNTIRLPYSDDILKPGTMPNSINFYQMNQDLQGLTSLQVMDKIVAYAGQIGLRIILDRHRPDCSGQSALWYTSSVSEATWISDLQALAQRYKGNPTVVGFDLHNEPHDPACWGCGDPSIDWRLAAERAGNAVLSVNPNLLIFVEGVQSYNGDSYWWGGNLQGAGQYPVVLNVPNRLVYSAHDYATSVYPQTWFSDPTFPNNMPGIWNKNWGYLFNQNIAPVWLGEFGTTLQSTTDQTWLKTLVQYLRPTAQYGADSFQWTFWSWNPDSGDTGGILKDDWQTVDTVKDGYLAPIKSSIFDPVGASASPSSQPSPSVSPSPSPSPSASRTPTPTPTPTASPTPTLTPTATPTPTASPTPSPTAASGARCTASYQVNSDWGNGFTVTVAVTNSGSVATKTWTVSWTFGGNQTITNSWNAAVTQNGQSVTARNMSYNNVIQPGQNTTFGFQASYTGSNAAPTVACAAS

SEQ ID NO: 1762 - protein, 945 aa, Artificial Sequence
  Synthetic Construct, P54583-Tth-S393-1
MAGGGYWHTSGREILDANNVPVRIAGINWFGFETCNYVVHGLWSRDYRSMLDQIKSLGYNTIRLPYSDDILKPGTMPNSINFYQMNQDLQGLTSLQVMDKIVAYAGQIGLRIILDRHRPDCSGQSALWYTSSVSEATWISDLQALAQRYKGNPTVVGFDLHNEPHDPACWGCGDPSIDWRLAAERAGNAVLSVNPNLLIFVEGVQSYNGDSYWWGGNLQGAGQYPVVLNVPNRLVYSAHDYATSVYPQTWFSDPTFPNNMPGIWNKNWGYLFNQNIAPVWLGEFGTTLQSTTDQTWLKTLVQYLRPTAQYGADSFQWTFWSWNPDSGDTGGILKDDWQTVDTVKDGYLAPIKCLAEGSLVLDAATGQRVPIEKVRPGMEVFSLGPDYRLYRVPVLEVLESGVREVVRLRTRSGRTLVLTPDHPLLTPEGWKPLCDLPLGTPIAVPAELPVAGHLAPPEERVTLLALLLGDGNTKLSGRRGTRPNAFFYSKDPELLAAYRRCAEALGAKVKAYVHPTTGVVTLATLAPRPGAQDPVKRLVVEAGMVAKAEEKRVPEEVFRYRREALALFLGRLFSTDGSVEKKRISYSSASLGLAQDVAHLLLRLGITSQLRSRGPRAHEVLISGREDILRFAELIGPYLLGAKRERLAALEAEARRRLPGQGWHLRLVLPAVAYRVSEAKRRSGFSWSEAGRRVAVAGSCLSSGLNLKLPRRYLSRHRLSLLGEAFADPGLEALAEGQVLWDPIVAVEPAGKARTFDLRVPPFANFVSEDLVVHNSSIFDPVGASASPSSQPSPSVSPSPSPSPSASRTPTPTPTPTASPTPTLTPTATPTPTASPTPSPTAASGARCTASYQVNSDWGNGFTVTVAVTNSGSVATKTWTVSWTFGGNQTITNSWNAAVTQNGQSVTARNMSYNNVIQPGQNTTFGFQASYTGSNAAPTVACAAS

SEQ ID NO: 1763 - protein, 945 aa, Artificial Sequence; identical to SEQ ID NO: 1762
  Synthetic Construct, P54583-Tth-S353-1

SEQ ID NO: 1764 - protein, 945 aa, Artificial Sequence
  Synthetic Construct, P54583-Tth-S330-1
MAGGGYWHTSGREILDANNVPVRIAGINWFGFETCNYVVHGLWSRDYRSMLDQIKSLGYNTIRLPYSDDILKPGTMPNSINFYQMNQDLQGLTSLQVMDKIVAYAGQIGLRIILDRHRPDCSGQSALWYTSSVSEATWISDLQALAQRYKGNPTVVGFDLHNEPHDPACWGCGDPSIDWRLAAERAGNAVLSVNPNLLIFVEGVQSYNGDSYWWGGNLQGAGQYPVVLNVPNRLVYSAHDYATSVYPQTWFSDPTFPNNMPGIWNKNWGYLFNQNIAPVWLGEFGTTLQCLAEGSLVLDAATGQRVPIEKVRPGMEVFSLGPDYRLYRVPVLEVLESGVREVVRLRTRSGRTLVLTPDHPLLTPEGWKPLCDLPLGTPIAVPAELPVAGHLAPPEERVTLLALLLGDGNTKLSGRRGTRPNAFFYSKDPELLAAYRRCAEALGAKVKAYVHPTTGVVTLATLAPRPGAQDPVKRLVVEAGMVAKAEEKRVPEEVFRYRREALALFLGRLFSTDGSVEKKRISYSSASLGLAQDVAHLLLRLGITSQLRSRGPRAHEVLISGREDILRFAELIGPYLLGAKRERLAALEAEARRRLPGQGWHLRLVLPAVAYRVSEAKRRSGFSWSEAGRRVAVAGSCLSSGLNLKLPRRYLSRHRLSLLGEAFADPGLEALAEGQVLWDPIVAVEPAGKARTFDLRVPPFANFVSEDLVVHNSTTDQTWLKTLVQYLRPTAQYGADSFQWTFWSWNPDSGDTGGILKDDWQTVDTVKDGYLAPIKSSIFDPVGASASPSSQPSPSVSPSPSPSPSASRTPTPTPTPTASPTPTLTPTATPTPTASPTPSPTAASGARCTASYQVNSDWGNGFTVTVAVTNSGSVATKTWTVSWTFGGNQTITNSWNAAVTQNGQSVTARNMSYNNVIQPGQNTTFGFQASYTGSNAAPTVACAAS

SEQ ID NO: 1765 - protein, 945 aa, Artificial Sequence
  Synthetic Construct, P54583-Tth-S321-1
MAGGGYWHTSGREILDANNVPVRIAGINWFGFETCNYVVHGLWSRDYRSMLDQIKSLGYNTIRLPYSDDILKPGTMPNSINFYQMNQDLQGLTSLQVMDKIVAYAGQIGLRIILDRHRPDCSGQSALWYTSSVSEATWISDLQALAQRYKGNPTVVGFDLHNEPHDPACWGCGDPSIDWRLAAERAGNAVLSVNPNLLIFVEGVQSYNGDSYWWGGNLQGAGQYPVVLNVPNRLVYSAHDYATSVYPQTWFSDPTFPNNMPGIWNKNWGYLFNQNIAPVWLGEFGTTLQSTTDQTWLKTLVQYLRPTAQYGADSFQWTFWCLAEGSLVLDAATGQRVPIEKVRPGMEVFSLGPDYRLYRVPVLEVLESGVREVVRLRTRSGRTLVLTPDHPLLTPEGWKPLCDLPLGTPIAVPAELPVAGHLAPPEERVTLLALLLGDGNTKLSGRRGTRPNAFFYSKDPELLAAYRRCAEALGAKVKAYVHPTTGVVTLATLAPRPGAQDPVKRLVVEAGMVAKAEEKRVPEEVFRYRREALALFLGRLFSTDGSVEKKRISYSSASLGLAQDVAHLLLRLGITSQLRSRGPRAHEVLISGREDILRFAELIGPYLLGAKRERLAALEAEARRRLPGQGWHLRLVLPAVAYRVSEAKRRSGFSWSEAGRRVAVAGSCLSSGLNLKLPRRYLSRHRLSLLGEAFADPGLEALAEGQVLWDPIVAVEPAGKARTFDLRVPPFANFVSEDLVVHNSWNPDSGDTGGILKDDWQTVDTVKDGYLAPIKSSIFDPVGASASPSSQPSPSVSPSPSPSPSASRTPTPTPTPTASPTPTLTPTATPTPTASPTPSPTAASGARCTASYQVNSDWGNGFTVTVAVTNSGSVATKTWTVSWTFGGNQTITNSWNAAVTQNGQSVTARNMSYNNVIQPGQNTTFGFQASYTGSNAAPTVACAAS

SEQ ID NO: 1766 - protein, 945 aa, Artificial Sequence
  Synthetic Construct, P54583-Tth-S314-1
MAGGGYWHTSGREILDANNVPVRIAGINWFGFETCNYVVHGLWSRDYRSMLDQIKSLGYNTIRLPYSDDILKPGTMPNSINFYQMNQDLQGLTSLQVMDKIVAYAGQIGLRIILDRHRPDCSGQSALWYTSSVSEATWISDLQALAQRYKGNPTVVGFDLHNEPHDPACWGCGDPSIDWRLAAERAGNAVLSVNPNLLIFVEGVQSYNGDSYWWGGNLQGAGQYPVVLNVPNRLVYSAHDYATSVYPQTWFSDPTFPNNMPGIWNKNWGYLFNQNIAPVWLGEFGTTLQSTTDQTWLKTLVQYLRPTAQYGADCLAEGSLVLDAATGQRVPIEKVRPGMEVFSLGPDYRLYRVPVLEVLESGVREVVRLRTRSGRTLVLTPDHPLLTPEGWKPLCDLPLGTPIAVPAELPVAGHLAPPEERVTLLALLLGDGNTKLSGRRGTRPNAFFYSKDPELLAAYRRCAEALGAKVKAYVHPTTGVVTLATLAPRPGAQDPVKRLVVEAGMVAKAEEKRVPEEVFRYRREALALFLGRLFSTDGSVEKKRISYSSASLGLAQDVAHLLLRLGITSQLRSRGPRAHEVLISGREDILRFAELIGPYLLGAKRERLAALEAEARRRLPGQGWHLRLVLPAVAYRVSEAKRRSGFSWSEAGRRVAVAGSCLSSGLNLKLPRRYLSRHRLSLLGEAFADPGLEALAEGQVLWDPIVAVEPAGKARTFDLRVPPFANFVSEDLVVHNSFQWTFWSWNPDSGDTGGILKDDWQTVDTVKDGYLAPIKSSIFDPVGASASPSSQPSPSVSPSPSPSPSASRTPTPTPTPTASPTPTLTPTATPTPTASPTPSPTAASGARCTASYQVNSDWGNGFTVTVAVTNSGSVATKTWTVSWTFGGNQTITNSWNAAVTQNGQSVTARNMSYNNVIQPGQNTTFGFQASYTGSNAAPTVACAAS

SEQ ID NO: 1767 - protein, 945 aa, Artificial Sequence; identical to SEQ ID NO: 1743
  Synthetic Construct, P54583-Tth-S277-1

SEQ ID NO: 1768 - protein, 945 aa, Artificial Sequence; identical to SEQ ID NO: 1764
  Synthetic Construct, P54583-Tth-S290-1

SEQ ID NO: 1769 - protein, 945 aa, Artificial Sequence
  Synthetic Construct, P54583-Tth-C465-1
MAGGGYWHTSGREILDANNVPVRIAGINWFGFETCNYVVHGLWSRDYRSMLDQIKSLGYNTIRLPYSDDILKPGTMPNSINFYQMNQDLQGLTSLQVMDKIVAYAGQIGLRIILDRHRPDCSGQSALWYTSSVSEATWISDLQALAQRYKGNPTVVGFDLHNEPHDPACWGCGDPSIDWRLAAERAGNAVLSVNPNLLIFVEGVQSYNGDSYWWGGNLQGAGQYPVVLNVPNRLVYSAHDYATSVYPQTWFSDPTFPNNMPGIWNKNWGYLFNQNIAPVWLGEFGTTLQSTTDQTWLKTLVQYLRPTAQYGADSFQWTFWSWNPDSGDTGGILKDDWQTVDTVKDGYLAPIKSSIFDPVGASASPSSQPSPSVSPSPSPSPSASRTPTPTPTPTASPTPTLTPTATPTPTASPTPSPTAASGARCLAEGSLVLDAATGQRVPIEKVRPGMEVFSLGPDYRLYRVPVLEVLESGVREVVRLRTRSGRTLVLTPDHPLLTPEGWKPLCDLPLGTPIAVPAELPVAGHLAPPEERVTLLALLLGDGNTKLSGRRGTRPNAFFYSKDPELLAAYRRCAEALGAKVKAYVHPTTGVVTLATLAPRPGAQDPVKRLVVEAGMVAKAEEKRVPEEVFRYRREALALFLGRLFSTDGSVEKKRISYSSASLGLAQDVAHLLLRLGITSQLRSRGPRAHEVLISGREDILRFAELIGPYLLGAKRERLAALEAEARRRLPGQGWHLRLVLPAVAYRVSEAKRRSGFSWSEAGRRVAVAGSCLSSGLNLKLPRRYLSRHRLSLLGEAFADPGLEALAEGQVLWDPIVAVEPAGKARTFDLRVPPFANFVSEDLVVHNCTASYQVNSDWGNGFTVTVAVTNSGSVATKTWTVSWTFGGNQTITNSWNAAVTQNGQSVTARNMSYNNVIQPGQNTTFGFQASYTGSNAAPTVACAAS

SEQ ID NO: 1770 - protein, 856 aa, Artificial Sequence
  Synthetic Construct, O77044-Tth-S84-1
SAYDYKQVLRDSLLFYEAQRSGRLPADQKVTWRKDSALNDQGDQGQDLTGGYFDAGDFVKFGFPMAYTATVLAWGLIDFEAGYCLAEGSLVLDAATGQRVPIEKVRPGMEVFSLGPDYRLYRVPVLEVLESGVREVVRLRTRSGRTLVLTPDHPLLTPEGWKPLCDLPLGTPIAVPAELPVAGHLAPPEERVTLLALLLGDGNTKLSGRRGTRPNAFFYSKDPELLAAYRRCAEALGAKVKAYVHPTTGVVTLATLAPRPGAQDPVKRLVVEAGMVAKAEEKRVPEEVFRYRREALALFLGRLFSTDGSVEKKRISYSSASLGLAQDVAHLLLRLGITSQLRSRGPRAHEVLISGREDILRFAELIGPYLLGAKRERLAALEAEARRRLPGQGWHLRLVLPAVAYRVSEAKRRSGFSWSEAGRRVAVAGSCLSSGLNLKLPRRYLSRHRLSLLGEAFADPGLEALAEGQVLWDPIVAVEPAGKARTFDLRVPPFANFVSEDLVVHNSSAGALDDGRKAVKWATDYFIKAHTSQNEFYGQVGQGDADHAFWGRPEDMTMARPAYKIDTSRPGSDLAGETAAALAAASIVFRNVDGTYSNNLLTHARQLFDFANNYRGKYSDSITDARNFYASADYRDELVWAAAWLYRATNDNTYLNTAESLYDEFGLQNWGGGLNWDSKVSGVQVLLAKLTNKQAYKDTVQSYVNYLINNQQKTPKGLLYIDMWGTLRHAANAAFIMLEAAELGLSASSYRQFAQTQIDYALGDGGRSFVCGFGSNPPTRPHHRSSSCPPAPATCDWNTFNSPDPNYHVLSGALVGGPDQNDNYVDDRSDYVHNEVATDYNAGFQSALAALVALGY

SEQ ID NO: 1771 - protein, 856 aa, Artificial Sequence
  Synthetic Construct, O77044-Tth-T303-1
SAYDYKQVLRDSLLFYEAQRSGRLPADQKVTWRKDSALNDQGDQGQDLTGGYFDAGDFVKFGFPMAYTATVLAWGLIDFEAGYSSAGALDDGRKAVKWATDYFIKAHTSQNEFYGQVGQGDADHAFWGRPEDMTMARPAYKIDTSRPGSDLAGETAAALAAASIVFRNVDGTYSNNLLTHARQLFDFANNYRGKYSDSITDARNFYASADYRDELVWAAAWLYRATNDNTYLNTAESLYDEFGLQNWGGGLNWDSKVSGVQVLLAKLTNKQAYKDTVQSYVNYLINNQQKTPKGLLYIDMWGCLAEGSLVLDAATGQRVPIEKVRPGMEVFSLGPDYRLYRVPVLEVLESGVREVVRLRTRSGRTLVLTPDHPLLTPEGWKPLCDLPLGTPIAVPAELPVAGHLAPPEERVTLLALLLGDGNTKLSGRRGTRPNAFFYSKDPELLAAYRRCAEALGAKVKAYVHPTTGVVTLATLAPRPGAQDPVKRLVVEAGMVAKAEEKRVPEEVFRYRREALALFLGRLFSTDGSVEKKRISYSSASLGLAQDVAHLLLRLGITSQLRSRGPRAHEVLISGREDILRFAELIGPYLLGAKRERLAALEAEARRRLPGQGWHLRLVLPAVAYRVSEAKRRSGFSWSEAGRRVAVAGSCLSSGLNLKLPRRYLSRHRLSLLGEAFADPGLEALAEGQVLWDPIVAVEPAGKARTFDLRVPPFANFVSEDLVVHNTLRHAANAAFIMLEAAELGLSASSYRQFAQTQIDYALGDGGRSFVCGFGSNPPTRPHHRSSSCPPAPATCDWNTFNSPDPNYHVLSGALVGGPDQNDNYVDDRSDYVHNEVATDYNAGFQSALAALVALGY

SEQ ID NO: 1772 - protein, 856 aa, Artificial Sequence
  Synthetic Construct, O77044-Tth-S325-1
SAYDYKQVLRDSLLFYEAQRSGRLPADQKVTWRKDSALNDQGDQGQDLTGGYFDAGDFVKFGFPMAYTATVLAWGLIDFEAGYSSAGALDDGRKAVKWATDYFIKAHTSQNEFYGQVGQGDADHAFWGRPEDMTMARPAYKIDTSRPGSDLAGETAAALAAASIVFRNVDGTYSNNLLTHARQLFDFANNYRGKYSDSITDARNFYASADYRDELVWAAAWLYRATNDNTYLNTAESLYDEFGLQNWGGGLNWDSKVSGVQVLLAKLTNKQAYKDTVQSYVNYLINNQQKTPKGLLYIDMWGTLRHAANAAFIMLEAAELGLSACLAEGSLVLDAATGQRVPIEKVRPGMEVFSLGPDYRLYRVPVLEVLESGVREVVRLRTRSGRTLVLTPDHPLLTPEGWKPLCDLPLGTPIAVPAELPVAGHLAPPEERVTLLALLLGDGNTKLSGRRGTRPNAFFYSKDPELLAAYRRCAEALGAKVKAYVHPTTGVVTLATLAPRPGAQDPVKRLVVEAGMVAKAEEKRVPEEVFRYRREALALFLGRLFSTDGSVEKKRISYSSASLGLAQDVAHLLLRLGITSQLRSRGPRAHEVLISGREDILRFAELIGPYLLGAKRERLAALEAEARRRLPGQGWHLRLVLPAVAYRVSEAKRRSGFSWSEAGRRVAVAGSCLSSGLNLKLPRRYLSRHRLSLLGEAFADPGLEALAEGQVLWDPIVAVEPAGKARTFDLRVPPFANFVSEDLVVHNSSYRQFAQTQIDYALGDGGRSFVCGFGSNPPTRPHHRSSSCPPAPATCDWNTFNSPDPNYHVLSGALVGGPDQNDNYVDDRSDYVHNEVATDYNAGFQSALAALVALGY

SEQ ID NO: 1773 - protein, 856 aa, Artificial Sequence
  Synthetic Construct, O77044-Tth-T333-1
SAYDYKQVLRDSLLFYEAQRSGRLPADQKVTWRKDSALNDQGDQGQDLTGGYFDAGDFVKFGFPMAYTATVLAWGLIDFEAGYSSAGALDDGRKAVKWATDYFIKAHTSQNEFYGQVGQGDADHAFWGRPEDMTMARPAYKIDTSRPGSDLAGETAAALAAASIVFRNVDGTYSNNLLTHARQLFDFANNYRGKYSDSITDARNFYASADYRDELVWAAAWLYRATNDNTYLNTAESLYDEFGLQNWGGGLNWDSKVSGVQVLLAKLTNKQAYKDTVQSYVNYLINNQQKTPKGLLYIDMWGTLRHAANAAFIMLEAAELGLSASSYRQFAQCLAEGSLVLDAATGQRVPIEKVRPGMEVFSLGPDYRLYRVPVLEVLESGVREVVRLRTRSGRTLVLTPDHPLLTPEGWKPLCDLPLGTPIAVPAELPVAGHLAPPEERVTLLALLLGDGNTKLSGRRGTRPNAFFYSKDPELLAAYRRCAEALGAKVKAYVHPTTGVVTLATLAPRPGAQDPVKRLVVEAGMVAKAEEKRVPEEVFRYRREALALFLGRLFSTDGSVEKKRISYSSASLGLAQDVAHLLLRLGITSQLRSRGPRAHEVLISGREDILRFAELIGPYLLGAKRERLAALEAEARRRLPGQGWHLRLVLPAVAYRVSEAKRRSGFSWSEAGRRVAVAGSCLSSGLNLKLPRRYLSRHRLSLLGEAFADPGLEALAEGQVLWDPIVAVEPAGKARTFDLRVPPFANFVSEDLVVHNTQIDYALGDGGRSFVCGFGSNPPTRPHHRSSSCPPAPATCDWNTFNSPDPNYHVLSGALVGGPDQNDNYVDDRSDYVHNEVATDYNAGFQSALAALVALGY

SEQ ID NO: 1774 - protein, 856 aa, Artificial Sequence
  Synthetic Construct, O77044-Tth-S345-1
SAYDYKQVLRDSLLFYEAQRSGRLPADQKVTWRKDSALNDQGDQGQDLTGGYFDAGDFVKFGFPMAYTATVLAWGLIDFEAGYSSAGALDDGRKAVKWATDYFIKAHTSQNEFYGQVGQGDADHAFWGRPEDMTMARPAYKIDTSRPGSDLAGETAAALAAASIVFRNVDGTYSNNLLTHARQLFDFANNYRGKYSDSITDARNFYASADYRDELVWAAAWLYRATNDNTYLNTAESLYDEFGLQNWGGGLNWDSKVSGVQVLLAKLTNKQAYKDTVQSYVNYLINNQQKTPKGLLYIDMWGTLRHAANAAFIMLEAAELGLSASSYRQFAQTQIDYALGDGGRCLAEGSLVLDAATGQRVPIEKVRPGMEVFSLGPDYRLYRVPVLEVLESGVREVVRLRTRSGRTLVLTPDHPLLTPEGWKPLCDLPLGTPIAVPAELPVAGHLAPPEERVTLLALLLGDGNTKLSGRRGTRPNAFFYSKDPELLAAYRRCAEALGAKVKAYVHPTTGVVTLATLAPRPGAQDPVKRLVVEAGMVAKAEEKRVPEEVFRYRREALALFLGRLFSTDGSVEKKRISYSSASLGLAQDVAHLLLRLGITSQLRSRGPRAHEVLISGREDILRFAELIGPYLLGAKRERLAALEAEARRRLPGQGWHLRLVLPAVAYRVSEAKRRSGFSWSEAGRRVAVAGSCLSSGLNLKLPRRYLSRHRLSLLGEAFADPGLEALAEGQVLWDPIVAVEPAGKARTFDLRVPPFANFVSEDLVVHNSFVCGFGSNPPTRPHHRSSSCPPAPATCDWNTFNSPDPNYHVLSGALVGGPDQNDNYVDDRSDYVHNEVATDYNAGFQSALAALVALGY

SEQ ID NO: 1775 - protein, 856 aa, Artificial Sequence
  Synthetic Construct, O77044-Tth-C348-1
SAYDYKQVLRDSLLFYEAQRSGRLPADQKVTWRKDSALNDQGDQGQDLTGGYFDAGDFVKFGFPMAYTATVLAWGLIDFEAGYSSAGALDDGRKAVKWATDYFIKAHTSQNEFYGQVGQGDADHAFWGRPEDMTMARPAYKIDTSRPGSDLAGETAAALAAASIVFRNVDGTYSNNLLTHARQLFDFANNYRGKYSDSITDARNFYASADYRDELVWAAAWLYRATNDNTYLNTAESLYDEFGLQNWGGGLNWDSKVSGVQVLLAKLTNKQAYKDTVQSYVNYLINNQQKTPKGLLYIDMWGTLRHAANAAFIMLEAAELGLSASSYRQFAQTQIDYALGDGGRSFVCLAEGSLVLDAATGQRVPIEKVRPGMEVFSLGPDYRLYRVPVLEVLESGVREVVRLRTRSGRTLVLTPDHPLLTPEGWKPLCDLPLGTPIAVPAELPVAGHLAPPEERVTLLALLLGDGNTKLSGRRGTRPNAFFYSKDPELLAAYRRCAEALGAKVKAYVHPTTGVVTLATLAPRPGAQDPVKRLVVEAGMVAKAEEKRVPEEVFRYRREALALFLGRLFSTDGSVEKKRISYSSASLGLAQDVAHLLLRLGITSQLRSRGPRAHEVLISGREDILRFAELIGPYLLGAKRERLAALEAEARRRLPGQGWHLRLVLPAVAYRVSEAKRRSGFSWSEAGRRVAVAGSCLSSGLNLKLPRRYLSRHRLSLLGEAFADPGLEALAEGQVLWDPIVAVEPAGKARTFDLRVPPFANFVSEDLVVHNCGFGSNPPTRPHHRSSSCPPAPATCDWNTFNSPDPNYHVLSGALVGGPDQNDNYVDDRSDYVHNEVATDYNAGFQSALAALVALGY

SEQ ID NO: 1776 - protein, 856 aa, Artificial Sequence
  Synthetic Construct, O77044-Tth-S352-1
SAYDYKQVLRDSLLFYEAQRSGRLPADQKVTWRKDSALNDQGDQGQDLTGGYFDAGDFVKFGFPMAYTATVLAWGLIDFEAGYSSAGALDDGRKAVKWATDYFIKAHTSQNEFYGQVGQGDADHAFWGRPEDMTMARPAYKIDTSRPGSDLAGETAAALAAASIVFRNVDGTYSNNLLTHARQLFDFANNYRGKYSDSITDARNFYASADYRDELVWAAAWLYRATNDNTYLNTAESLYDEFGLQNWGGGLNWDSKVSGVQVLLAKLTNKQAYKDTVQSYVNYLINNQQKTPKGLLYIDMWGTLRHAANAAFIMLEAAELGLSASSYRQFAQTQIDYALGDGGRSFVCGFGCLAEGSLVLDAATGQRVPIEKVRPGMEVFSLGPDYRLYRVPVLEVLESGVREVVRLRTRSGRTLVLTPDHPLLTPEGWKPLCDLPLGTPIAVPAELPVAGHLAPPEERVTLLALLLGDGNTKLSGRRGTRPNAFFYSKDPELLAAYRRCAEALGAKVKAYVHPTTGVVTLATLAPRPGAQDPVKRLVVEAGMVAKAEEKRVPEEVFRYRREALALFLGRLFSTDGSVEKKRISYSSASLGLAQDVAHLLLRLGITSQLRSRGPRAHEVLISGREDILRFAELIGPYLLGAKRERLAALEAEARRRLPGQGWHLRLVLPAVAYRVSEAKRRSGFSWSEAGRRVAVAGSCLSSGLNLKLPRRYLSRHRLSLLGEAFADPGLEALAEGQVLWDPIVAVEPAGKARTFDLRVPPFANFVSEDLVVHNSNPPTRPHHRSSSCPPAPATCDWNTFNSPDPNYHVLSGALVGGPDQNDNYVDDRSDYVHNEVATDYNAGFQSALAALVALGY

SEQ ID NO: 1777 - protein, 856 aa, Artificial Sequence
  Synthetic Construct, O77044-Tth-T356-1
SAYDYKQVLRDSLLFYEAQRSGRLPADQKVTWRKDSALNDQGDQGQDLTGGYFDAGDFVKFGFPMAYTATVLAWGLIDFEAGYSSAGALDDGRKAVKWATDYFIKAHTSQNEFYGQVGQGDADHAFWGRPEDMTMARPAYKIDTSRPGSDLAGETAAALAAASIVFRNVDGTYSNNLLTHARQLFDFANNYRGKYSDSITDARNFYASADYRDELVWAAAWLYRATNDNTYLNTAESLYDEFGLQNWGGGLNWDSKVSGVQVLLAKLTNKQAYKDTVQSYVNYLINNQQKTPKGLLYIDMWGTLRHAANAAFIMLEAAELGLSASSYRQFAQTQIDYALGDGGRSFVCGFGSNPPCLAEGSLVLDAATGQRVPIEKVRPGMEVFSLGPDYRLYRVPVLEVLESGVREVVRLRTRSGRTLVLTPDHPLLTPEGWKPLCDLPLGTPIAVPAELPVAGHLAPPEERVTLLALLLGDGNTKLSGRRGTRPNAFFYSKDPELLAAYRRCAEALGAKVKAYVHPTTGVVTLATLAPRPGAQDPVKRLVVEAGMVAKAEEKRVPEEVFRYRREALALFLGRLFSTDGSVEKKRISYSSASLGLAQDVAHLLLRLGITSQLRSRGPRAHEVLISGREDILRFAELIGPYLLGAKRERLAALEAEARRRLPGQGWHLRLVLPAVAYRVSEAKRRSGFSWSEAGRRVAVAGSCLSSGLNLKLPRRYLSRHRLSLLGEAFADPGLEALAEGQVLWDPIVAVEPAGKARTFDLRVPPFANFVSEDLVVHNTRPHHRSSSCPPAPATCDWNTFNSPDPNYHVLSGALVGGPDQNDNYVDDRSDYVHNEVATDYNAGFQSALAALVALGY

SEQ ID NO: 1778 - protein, 856 aa, Artificial Sequence
  Synthetic Construct, O77044-Tth-S362-1
SAYDYKQVLRDSLLFYEAQRSGRLPADQKVTWRKDSALNDQGDQGQDLTGGYFDAGDFVKFGFPMAYTATVLAWGLIDFEAGYSSAGALDDGRKAVKWATDYFIKAHTSQNEFYGQVGQGDADHAFWGRPEDMTMARPAYKIDTSRPGSDLAGETAAALAAASIVFRNVDGTYSNNLLTHARQLFDFANNYRGKYSDSITDARNFYASADYRDELVWAAAWLYRATNDNTYLNTAESLYDEFGLQNWGGGLNWDSKVSGVQVLLAKLTNKQAYKDTVQSYVNYLINNQQKTPKGLLYIDMWGTLRHAANAAFIMLEAAELGLSASSYRQFAQTQIDYALGDGGRSFVCGFGSNPPTRPHHRCLAEGSLVLDAATGQRVPIEKVRPGMEVFSLGPDYRLYRVPVLEVLESGVREVVRLRTRSGRTLVLTPDHPLLTPEGWKPLCDLPLGTPIAVPAELPVAGHLAPPEERVTLLALLLGDGNTKLSGRRGTRPNAFFYSKDPELLAAYRRCAEALGAKVKAYVHPTTGVVTLATLAPRPGAQDPVKRLVVEAGMVAKAEEKRVPEEVFRYRREALALFLGRLFSTDGSVEKKRISYSSASLGLAQDVAHLLLRLGITSQLRSRGPRAHEVLISGREDILRFAELIGPYLLGAKRERLAALEAEARRRLPGQGWHLRLVLPAVAYRVSEAKRRSGFSWSEAGRRVAVAGSCLSSGLNLKLPRRYLSRHRLSLLGEAFADPGLEALAEGQVLWDPIVAVEPAGKARTFDLRVPPFANFVSEDLVVHNSSSCPPAPATCDWNTFNSPDPNYHVLSGALVGGPDQNDNYVDDRSDYVHNEVATDYNAGFQSALAALVALGY

SEQ ID NO: 1779 - protein, 856 aa, Artificial Sequence
  Synthetic Construct, O77044-Tth-S363-1
SAYDYKQVLRDSLLFYEAQRSGRLPADQKVTWRKDSALNDQGDQGQDLTGGYFDAGDFVKFGFPMAYTATVLAWGLIDFEAGYSSAGALDDGRKAVKWATDYFIKAHTSQNEFYGQVGQGDADHAFWGRPEDMTMARPAYKIDTSRPGSDLAGETAAALAAASIVFRNVDGTYSNNLLTHARQLFDFANNYRGKYSDSITDARNFYASADYRDELVWAAAWLYRATNDNTYLNTAESLYDEFGLQNWGGGLNWDSKVSGVQVLLAKLTNKQAYKDTVQSYVNYLINNQQKTPKGLLYIDMWGTLRHAANAAFIMLEAAELGLSASSYRQFAQTQIDYALGDGGRSFVCGFGSNPPTRPHHRSCLAEGSLVLDAATGQRVPIEKVRPGMEVFSLGPDYRLYRVPVLEVLESGVREVVRLRTRSGRTLVLTPDHPLLTPEGWKPLCDLPLGTPIAVPAELPVAGHLAPPEERVTLLALLLGDGNTKLSGRRGTRPNAFFYSKDPELLAAYRRCAEALGAKVKAYVHPTTGVVTLATLAPRPGAQDPVKRLVVEAGMVAKAEEKRVPEEVFRYRREALALFLGRLFSTDGSVEKKRISYSSASLGLAQDVAHLLLRLGITSQLRSRGPRAHEVLISGREDILRFAELIGPYLLGAKRERLAALEAEARRRLPGQGWHLRLVLPAVAYRVSEAKRRSGFSWSEAGRRVAVAGSCLSSGLNLKLPRRYLSRHRLSLLGEAFADPGLEALAEGQVLWDPIVAVEPAGKARTFDLRVPPFANFVSEDLVVHNSSCPPAPATCDWNTFNSPDPNYHVLSGALVGGPDQNDNYVDDRSDYVHNEVATDYNAGFQSALAALVALGY

SEQ ID NO: 1780 - protein, 856 aa, Artificial Sequence
  Synthetic Construct, O77044-Tth-S364-1
SAYDYKQVLRDSLLFYEAQRSGRLPADQKVTWRKDSALNDQGDQGQDLTGGYFDAGDFVKFGFPMAYTATVLAWGLIDFEAGYSSAGALDDGRKAVKWATDYFIKAHTSQNEFYGQVGQGDADHAFWGRPEDMTMARPAYKIDTSRPGSDLAGETAAALAAASIVFRNVDGTYSNNLLTHARQLFDFANNYRGKYSDSITDARNFYASADYRDELVWAAAWLYRATNDNTYLNTAESLYDEFGLQNWGGGLNWDSKVSGVQVLLAKLTNKQAYKDTVQSYVNYLINNQQKTPKGLLYIDMWGTLRHAANAAFIMLEAAELGLSASSYRQFAQTQIDYALGDGGRSFVCGFGSNPPTRPHHRSSCLAEGSLVLDAATGQRVPIEKVRPGMEVFSLGPDYRLYRVPVLEVLESGVREVVRLRTRSGRTLVLTPDHPLLTPEGWKPLCDLPLGTPIAVPAELPVAGHLAPPEERVTLLALLLGDGNTKLSGRRGTRPNAFFYSKDPELLAAYRRCAEALGAKVKAYVHPTTGVVTLATLAPRPGAQDPVKRLVVEAGMVAKAEEKRVPEEVFRYRREALALFLGRLFSTDGSVEKKRISYSSASLGLAQDVAHLLLRLGITSQLRSRGPRAHEVLISGREDILRFAELIGPYLLGAKRERLAALEAEARRRLPGQGWHLRLVLPAVAYRVSEAKRRSGFSWSEAGRRVAVAGSCLSSGLNLKLPRRYLSRHRLSLLGEAFADPGLEALAEGQVLWDPIVAVEPAGKARTFDLRVPPFANFVSEDLVVHNSCPPAPATCDWNTFNSPDPNYHVLSGALVGGPDQNDNYVDDRSDYVHNEVATDYNAGFQSALAALVALGY

SEQ ID NO: 1781 - protein, 856 aa, Artificial Sequence
  Synthetic Construct, O77044-Tth-T376-1
SAYDYKQVLRDSLLFYEAQRSGRLPADQKVTWRKDSALNDQGDQGQDLTGGYFDAGDFVKFGFPMAYTATVLAWGLIDFEAGYSSAGALDDGRKAVKWATDYFIKAHTSQNEFYGQVGQGDADHAFWGRPEDMTMARPAYKIDTSRPGSDLAGETAAALAAASIVFRNVDGTYSNNLLTHARQLFDFANNYRGKYSDSITDARNFYASADYRDELVWAAAWLYRATNDNTYLNTAESLYDEFGLQNWGGGLNWDSKVSGVQVLLAKLTNKQAYKDTVQSYVNYLINNQQKTPKGLLYIDMWGTLRHAANAAFIMLEAAELGLSASSYRQFAQTQIDYALGDGGRSFVCGFGSNPPTRPHHRSSSCPPAPATCDWNCLAEGSLVLDAATGQRVPIEKVRPGMEVFSLGPDYRLYRVPVLEVLESGVREVVRLRTRSGRTLVLTPDHPLLTPEGWKPLCDLPLGTPIAVPAELPVAGHLAPPEERVTLLALLLGDGNTKLSGRRGTRPNAFFYSKDPELLAAYRRCAEALGAKVKAYVHPTTGVVTLATLAPRPGAQDPVKRLVVEAGMVAKAEEKRVPEEVFRYRREALALFLGRLFSTDGSVEKKRISYSSASLGLAQDVAHLLLRLGITSQLRSRGPRAHEVLISGREDILRFAELIGPYLLGAKRERLAALEAEARRRLPGQGWHLRLVLPAVAYRVSEAKRRSGFSWSEAGRRVAVAGSCLSSGLNLKLPRRYLSRHRLSLLGEAFADPGLEALAEGQVLWDPIVAVEPAGKARTFDLRVPPFANFVSEDLVVHNTFNSPDPNYHVLSGALVGGPDQNDNYVDDRSDYVHNEVATDYNAGFQSALAALVALGY

SEQ ID NO: 1782 - protein, 856 aa, Artificial Sequence
  Synthetic Construct, O77044-Tth-S379-1
SAYDYKQVLRDSLLFYEAQRSGRLPADQKVTWRKDSALNDQGDQGQDLTGGYFDAGDFVKFGFPMAYTATVLAWGLIDFEAGYSSAGALDDGRKAVKWATDYFIKAHTSQNEFYGQVGQGDADHAFWGRPEDMTMARPAYKIDTSRPGSDLAGETAAALAAASIVFRNVDGTYSNNLLTHARQLFDFANNYRGKYSDSITDARNFYASADYRDELVWAAAWLYRATNDNTYLNTAESLYDEFGLQNWGGGLNWDSKVSGVQVLLAKLTNKQAYKDTVQSYVNYLINNQQKTPKGLLYIDMWGTLRHAANAAFIMLEAAELGLSASSYRQFAQTQIDYALGDGGRSFVCGFGSNPPTRPHHRSSSCPPAPATCDWNTFNCLAEGSLVLDAATGQRVPIEKVRPGMEVFSLGPDYRLYRVPVLEVLESGVREVVRLRTRSGRTLVLTPDHPLLTPEGWKPLCDLPLGTPIAVPAELPVAGHLAPPEERVTLLALLLGDGNTKLSGRRGTRPNAFFYSKDPELLAAYRRCAEALGAKVKAYVHPTTGVVTLATLAPRPGAQDPVKRLVVEAGMVAKAEEKRVPEEVFRYRREALALFLGRLFSTDGSVEKKRISYSSASLGLAQDVAHLLLRLGITSQLRSRGPRAHEVLISGREDILRFAELIGPYLLGAKRERLAALEAEARRRLPGQGWHLRLVLPAVAYRVSEAKRRSGFSWSEAGRRVAVAGSCLSSGLNLKLPRRYLSRHRLSLLGEAFADPGLEALAEGQVLWDPIVAVEPAGKARTFDLRVPPFANFVSEDLVVHNSPDPNYHVLSGALVGGPDQNDNYVDDRSDYVHNEVATDYNAGFQSALAALVALGY

SEQ ID NO: 1783 - protein, 856 aa, Artificial Sequence
  Synthetic Construct, O77044-Tth-S406-1
SAYDYKQVLRDSLLFYEAQRSGRLPADQKVTWRKDSALNDQGDQGQDLTGGYFDAGDFVKFGFPMAYTATVLAWGLIDFEAGYSSAGALDDGRKAVKWATDYFIKAHTSQNEFYGQVGQGDADHAFWGRPEDMTMARPAYKIDTSRPGSDLAGETAAALAAASIVFRNVDGTYSNNLLTHARQLFDFANNYRGKYSDSITDARNFYASADYRDELVWAAAWLYRATNDNTYLNTAESLYDEFGLQNWGGGLNWDSKVSGVQVLLAKLTNKQAYKDTVQSYVNYLINNQQKTPKGLLYIDMWGTLRHAANAAFIMLEAAELGLSASSYRQFAQTQIDYALGDGGRSFVCGFGSNPPTRPHHRSSSCPPAPATCDWNTFNSPDPNYHVLSGALVGGPDQNDNYVDDRCLAEGSLVLDAATGQRVPIEKVRPGMEVFSLGPDYRLYRVPVLEVLESGVREVVRLRTRSGRTLVLTPDHPLLTPEGWKPLCDLPLGTPIAVPAELPVAGHLAPPEERVTLLALLLGDGNTKLSGRRGTRPNAFFYSKDPELLAAYRRCAEALGAKVKAYVHPTTGVVTLATLAPRPGAQDPVKRLVVEAGMVAKAEEKRVPEEVFRYRREALALFLGRLFSTDGSVEKKRISYSSASLGLAQDVAHLLLRLGITSQLRSRGPRAHEVLISGREDILRFAELIGPYLLGAKRERLAALEAEARRRLPGQGWHLRLVLPAVAYRVSEAKRRSGFSWSEAGRRVAVAGSCLSSGLNLKLPRRYLSRHRLSLLGEAFADPGLEALAEGQVLWDPIVAVEPAGKARTFDLRVPPFANFVSEDLVVHNSDYVHNEVATDYNAGFQSALAALVALGY

SEQ ID NO: 1784 - protein, 856 aa, Artificial Sequence
  Synthetic Construct, O77044-Tth-T415-1
SAYDYKQVLRDSLLFYEAQRSGRLPADQKVTWRKDSALNDQGDQGQDLTGGYFDAGDFVKFGFPMAYTATVLAWGLIDFEAGYSSAGALDDGRKAVKWATDYFIKAHTSQNEFYGQVGQGDADHAFWGRPEDMTMARPAYKIDTSRPGSDLAGETAAALAAASIVFRNVDGTYSNNLLTHARQLFDFANNYRGKYSDSITDARNFYASADYRDELVWAAAWLYRATNDNTYLNTAESLYDEFGLQNWGGGLNWDSKVSGVQVLLAKLTNKQAYKDTVQSYVNYLINNQQKTPKGLLYIDMWGTLRHAANAAFIMLEAAELGLSASSYRQFAQTQIDYALGDGGRSFVCGFGSNPPTRPHHRSSSCPPAPATCDWNTFNSPDPNYHVLSGALVGGPDQNDNYVDDRSDYVHNEVACLAEGSLVLDAATGQRVPIEKVRPGMEVFSLGPDYRLYRVPVLEVLESGVREVVRLRTRSGRTLVLTPDHPLLTPEGWKPLCDLPLGTPIAVPAELPVAGHLAPPEERVTLLALLLGDGNTKLSGRRGTRPNAFFYSKDPELLAAYRRCAEALGAKVKAYVHPTTGVVTLATLAPRPGAQDPVKRLVVEAGMVAKAEEKRVPEEVFRYRREALALFLGRLFSTDGSVEKKRISYSSASLGLAQDVAHLLLRLGITSQLRSRGPRAHEVLISGREDILRFAELIGPYLLGAKRERLAALEAEARRRLPGQGWHLRLVLPAVAYRVSEAKRRSGFSWSEAGRRVAVAGSCLSSGLNLKLPRRYLSRHRLSLLGEAFADPGLEALAEGQVLWDPIVAVEPAGKARTFDLRVPPFANFVSEDLVVHNTDYNAGFQSALAALVALGY

SEQ ID NO: 1785 - DNA, 2352 bp, Artificial Sequence
  Synthetic Construct, P77853-Tth-T134-1 DNA
atgttccttaagaaactgtctaagttgctgctcgtcgtgctccttgttgccgtttacacacaggtcaacgcgcaaacaagcattactctgacatccaacgcatccggtacgtttgacggttactattacgaactctggaaggatactggcaatacaacaatgacggtctacactcaaggtcgcttttcctgccagtggtcgaacatcaataacgcgttgtttaggaccgggaagaaatacaaccagaattggcagtctcttggcacaatccggatcacgtactctgcgacttacaacccaaacgggaactcctacttgtgtatctatggctggtctaccaacccattggtcgagttctacatcgttgagtcctgggggaactggagaccgcctggtgcctgcctggccgagggctcgctcgtcttggacgcggctaccgggcagagggtccctatcgaaaaggtgcgtccggggatggaagttttctccttgggacctgattacagactgtatcgggtgcccgttttggaggtccttgagagcggggttagggaagttgtgcgcctcagaactcggtcagggagaacgctggtgttgacaccagatcacccgcttttgacccccgaaggttggaaacctctttgtgacctcccgcttggaactccaattgcagtccccgcagaactgcctgtggcgtgccacttggccccacctgaagaacgtgttacgctcctggctcttctgttgggggatgggaacacaaagccgtcgggtcggagaggtacacgtcctaatgccttcttctacagcaaagaccccgaattgctcgcggcttatcgccggtgtgcagaagccttgggtgcaaaggtgaaagcatacgtccacccgactacgggggtggttacactcgcaaccctcgctccacgtcctggagctcaagatcctgtcaaacgcctcgttgtcgaggcgggaatggttgctaaagccgaagagaagagggtcccggaggaggtgtttcgttaccggcgtgaggcgttggcccttttcttgggccgtttgttctcgacagacggctctgttgaaaagaagaggatctcttattcaagtgccagtttgggactggcccaggatgtcgcacatctcttgctgcgccttggaattacatctcaactccgttcgagagggccacgggctcacgaggttcttatatcgggccgcgaggatattttgcggtttgctgaacttatcggaccctacctcttgggggccaagagggagagacttgcagcgctggaagctgaggcccgcaggcgtttgcctggacagggatggcacttgcggcttgttcttcctgccgtggcgtacagagtgagcgaggctaaaaggcgctcgggattttcgtggagtgaagccggtcggcgcgtcgcagttgcgggatcgtgtttgtcatctggactcaacctcaaattgcccagacgctacctttctcggcaccggttgtcgctgctcggtgaggcttttgccgaccctgggctggaagcgctcgcggaaggccaagtgctctgggaccctattgttgctgtcgaaccggccggtaaggcgagaacattcgacttgcgcgttccaccctttgcaaacttcgtgagcgaggacctggtggtgcataacacgtcccccttgggccaagtgacaatcgatggcgggacctacgacatctataggacgacacgcgtcaaccagccttccattgtggggacagccacgttcgatcagtactggagcgtgcgcacctctaagcggacttcaggaacagtgaccgtgaccgatcacttccgcgcctgggcgaaccggggcctgaacctcggcacaatagaccaaattacattgtgcgtggagggttaccaaagctctggatcagccaacatcacccagaacaccttctctcagggctcttcttccggcagttcgggtggctcatccggctccacaacgactactcgcatcgagtgtgagaacatgtccttgtccggaccctacgttagcaggatcaccaatccctttaatggtattgcgctgtacgccaacggagacacagcccgcgctaccgttaacttccccgcaagtcgcaactacaatttccgcctgcggggttgcggcaacaacaataatcttgcccgtgtggacctgaggatcgacggacggaccgtcgggaccttttattaccagggcacatacccctgggaggccccaattgacaatgtttatgtcagtgcggggagtcatacagtcgaaatcactgttactgcggataacggcacatgggacgtgtatgccgactacctggtgatacag

SEQ ID NO: 1786 - DNA, 2352 bp, Artificial Sequence
  Synthetic Construct, P77853-Tth-T134-2 DNA
atgttccttaagaaactgtctaagttgctgctcgtcgtgctccttgttgccgtttacacacaggtcaacgcgcaaacaagcattactctgacatccaacgcatccggtacgtttgacggttactattacgaactctggaaggatactggcaatacaacaatgacggtctacactcaaggtcgcttttcctgccagtggtcgaacatcaataacgcgttgtttaggaccgggaagaaatacaaccagaattggcagtctcttggcacaatccggatcacgtactctgcgacttacaacccaaacgggaactcctacttgtgtatctatggctggtctaccaacccattggtcgagttctacatcgttgagtcctgggggaactggagaccgcctggtgcctgcctggccgagggctcgctcgtcttggacgcggctaccgggcagagggtccctatcgaaaaggtgcgtccggggatggaagttttctcattgggacctgattacagactgtatcgggtgcccgttttggaggtccttgagagcggggttagggaagttgtgcgcctcagaactcggtcagggagaacgctggtgttgacaccagatcacccgcttttgacccccgaaggttggaaacctctttgtgacctcccgcttggaactccaattgcagtccccgcagaactgcctgtggcgggccacttggccccacctgaagaacgtgttacgctcctggctcttctgttgggggatgggaacacaaagctgtcgggtcggagaggtacacgtcctaatgccttcttctacagcaaagaccccgaattgctcgcggcttatcgccggtgtgcagaagccttgggtgcaaaggtgaaagcatacgtccacccgactacgggggtggttacactcgcaaccctcgctccacgtcctggagctcaagatcctgtcaaacgcctcgttgtcgaggcgggaatggttgctaaagccgaagagaagagggtcccggaggaggtgtttcgttaccggcgtgaggcgttggcccttttcttgggccgtttgttctcgacagacggctctgttgaaaagaagaggatctcttattcaagtgccagtttgggactggcccaggatgtcgcacatctcttgctgcgccttggaattacatctcaactccgttcgagagggccacgggctcacgaggttcttatatcgggccgcgaggatattttgcggtttgctgaacttatcggaccctacctcttgggggccaagagggagagacttgcagcgctggaagctgaggcccgcaggcgtttgcctggacagggatggcacttgcggcttgttcttcctgccgtggcgtacagagtgagcgaggctaaaaggcgctcgggattttcgtggagtgaagccggtcggcgcgtcgcagttgcgggatcgtgtttgtcatctggactcaacctcaaattgcccagacgctacctttctcggcaccggttgtcgctgctcggtgaggcttttgccgaccctgggctggaagcgctcgcggaaggccaagtgctctgggaccctattgttgctgtcgaaccggccggtaaggcgagaacattcgacttgcgcgttccaccctttgcaaacttcgtgagcgaggacctggtggtgcataacacgtcccccctgggccaagtgacaatcgatggcgggacctacgacatctataggacgacacgcgtcaaccagccttccattgtggggacagccacgttcgatcagtactggagcgtgcgcacctctaagcggacttcaggaacagtgaccgtgaccgatcacttccgcgcctgggcgaaccggggcctgaacctcggcacaatagaccaaattacattgtgcgtggagggttaccaaagctctggatcagccaacatcacccagaacaccttctctcagggctcttcttccggcagttcgggtggctcatccggctccacaacgactactcgcatcgagtgtgagaacatgtccttgtccggaccctacgttagcaggatcaccaatccctttaatggtattgcgctgtacgccaacggagacacagcccgcgctaccgttaacttccccgcaagtcgcaactacaatttccgcctgcggggttgcggcaacaacaataatcttgcccgtgtggacctgaggatcgacggacggaccgtcgggaccttttattaccagggcacatacccctgggaggccccaattgacaatgtttatgtcagtgcggggagtcatacagtcgaaatcactgttactgcggataacggcacatgggacgtgtatgccgactacctggtgatacag

SEQ ID NO: 1787 - DNA, 2352 bp, Artificial Sequence
  Synthetic Construct, P77853-Tth-T134-3 DNA
atgttccttaagaaactgtctaagttgctgctcgtcgtgctccttgttgccgtttacacacaggtcaacgcgcaaacaagcattactctgacatccaacgcatccggtacgtttgacggttactattacgaactctggaaggatactggcaatacaacaatgacggtctacactcaaggtcgcttttcctgccagtggtcgaacatcaataacgcgttgtttaggaccgggaagaaatacaaccagaattggcagtctcttggcacaatccggatcacgtactctgcgacttacaacccaaacgggaactcctacttgtgtatctatggctggtctaccaacccattggtcgagttctacatcgttgagtcctgggggaactggagaccgcctggtgcctgcctggccgagggctcgctcgtcttggacgcggctaccgggcagagggtccctatcgaaaaggtgcgtccggggatggaagttttctccttgggacctgattacagactgtatcgggtgcccgttttggaggtccttgagagcggggttagggaagttgtgcgcctcagaactcggtcagggagaacgctggtgttgacaccagatcacccgcttttgacccccgaaggttggaaacctctttgtgacctcccgcttggaactccaattgcagtccccgcagaactgcctgtggcgggccacttggccccacctgaagaacgtgttacgctcctggctcttctgttgggggatgggaacacaaagctgtcgggtcggagaggtacacgtcctaatgccttcttctacagcaaagaccccgaattgctcgcggcttatcgccggtgtgcagaagccttgggtgcaaaggtgaaagcatacgtccacccgactacgggggtggttacactcgcaaccctcgctccacgtcttggagctcaagatcctgtcaaacgcctcgttgtcgaggcgggaatggttgctaaagccgaagagaagagggtcccggaggaggtgtttcgttaccggcgtgaggcgttggcccttttcttgggccgtttgttctcgacagacggctctgttgaaaagaagaggatctcttattcaagtgccagtttgggactggcccaggatgtcgcacatctcttgctgcgccttggaattacatctcaactccgttcgagagggccacgggctcacgaggttcttatatcgggccgcgaggatattttgcggtttgctgaacttatcggaccctacctcttgggggccaagagggagagacttgcagcgctggaagctgaggcccgcaggcgtttgcctggacagggatggcacttgcggcttgttcttcctgccgtggcgtacagagcgagcgaggctaaaaggcgctcgggattttcgtggagtgaagccggtcggcgcgtcgcagttgcgggatcgtgtttgtcatctggactcaacctcaaattgcccagacgctacctttctcggcaccggttgtcgctgctcggtgaggcttttgccgaccctgggctggaagcgctcgcggaaggccaagtgctctgggaccctattgttgctgtcgaaccggccggtaaggcgagaacattcgacttgcgcgttccaccctttgcaaacttcgtgagcgaggacctggtggtgcataacacgtcccccctgggccaagtgacaatcgatggcgggacctacgacatctataggacgacacgcgtcaaccagccttccattgtggggacagccacgttcgatcagtactggagcgtgcgcacctctaagcggacttcaggaacagtgaccgtgaccgatcacttccgcgcctgggcgaaccggggcctgaacctcggcacaatagaccaaattacattgtgcgtggagggttaccaaagctctggatcagccaacatcacccagaacaccttctctcagggctcttcttccggcagttcgggtggctcatccggctccacaacgactactcgcatcgagtgtgagaacatgtccttgtccggaccctacgttagcaggatcaccaatccctttaatggtattgcgctgtacgccaacggagacacagcccgcgctaccgttaacttccccgcaagtcgcaactacaatttccgcctgcggggttgcggcaacaacaataatcttgcccgtgtggacctgaggatcgacggacggaccgtcgggaccttttattaccagggcacatacccctgggaggccccaattgacaatgtttatgtcagtgcggggagtcatacagtcgaaatcactgttactgcggataacggcacatgggacgtgtatgccgactacctggtgatacag

SEQ ID NO: 1788 - DNA, 2352 bp, Artificial Sequence
  Synthetic Construct, P77853-Tth-T134-9 DNA
atgttccttaagaaactgtctaagttgctgctcgtcgtgctccttgttgccgtttacacacaggtcaacgcgcaaacaagcattactctgacatccaacgcatccggtacgtttgacggttactattacgaactctggaaggatactggcaatacaacaatgacggtctacactcaaggtcgcttttcctgccagtggtcgaacatcaataacgcgttgtttaggaccgggaagaaatacaaccagaattggcagtctcttggcacaatccggatcacgtactctgcgacttacaacccaaacgggaactcctacttgtgtatctatggctggtctaccaacccattggtcgagttctacatcgttgagtcctgggggaactggagaccgcctggtgcctgcctggccgagggctcgctcgtcttggacgcggctaccgggcagagggtccctatcgaaaaggtgcgtccggggatggaagttttctccttgggacctgattacagactgtatcgggtgcccgttttggaggtccttgagagcggggttagggaagttgtgcgcctcagaactcggtcagggagaacgctggtgttgacaccagatcacccgcttttgacccccgaaggttggaaacctctttgtgacctcccgcttggaactccaattgcagtccccgcagaactgcctgtggcgggccacttggccccacctgaagaacgtgttacgctcctggctcttctgttgggggatgggaacacaaagctgtcgggtcggagaggtacacgtcctaatgccttcttctacagcaaagaccccgaattgctcgcggcttatcgccggtgtgcagaagccttgggtgcaaaggtgaaagcatacatccacccgactacgggggtggttacactcgcaaccctcgctccacgtcctggagctcaagatcctgtcaaacgcctcgttgtcgaggcgggaatggttgctaaagccgaagagaagagggtcccggaggaggtgtttcgataccggcgtgaggcgttggccctttacttgggccgtttgttctcgacagacggctctgttgaaaagaagaggatctcttattcaagtgccagtttgggactggcccaggatgtcgcacatctcttgctgcgccttggaattacatctcaactccgttcgagagggccacgggctcacgaggttcttatatcgggccgcgaggatattttgcggtttgctgaacttatcggaccctacctcttgggggccaagagggagagacttgcagcgctggaagctgaggcccgcaggcgtttgcctggacagggatggcacttgcggcttgttcttcctgccgtggcgtacagagtgagcgaggctaaaaggcgctcgggattttcgtggagtgaagccggtcggcgcgtcgcagttgcgggatcgtgtttgtcatctggactcaacctcaaattgcccagacgctacctttctcggcaccggctgtcgctgctcggtgaggcttttgccgaccctgggctggaagcgctcgcggaaggccaagtgctctgggaccctattgttgctgtcgaaccggccggtaaggcgagaacatttgacttgcgcgttccaccctttgcaaacttcgtgagcgaggacctggtggtgcataacaccgtccccctgggccaagtgacaatcgatggcgggacctacgacatctataggacgacacgcgtcaaccagccttccattgtggggacagccacgttcgatcagtactggagcgtgcgcacctctaagcggacttcaggaacagtgaccgtgaccgatcacttccgcgcctgggcgaaccggggcctgaacctcggcacaatagaccaaattacattgtgcgtggagggttaccaaagctctggatcagccaacatcacccagaacaccttctctcagggctcttcttccggcagttcgggtggctcatccggctccacaacgactactcgcatcgagtgtgagaacatgtccttgtccggaccctacgttagcaggatcaccaatccctttaatggtattgcgctgtacgccaacggagacacagcccgcgctaccgttaacttccccgcaagtcgcaactacaatttccgcctgcggggttgcggcaacaacaataatcttgcccgtgtggacctgaggatcgacggacggaccgtcgggaccttttattaccagggcacatacccctgggaggccccaattgacaatgtttatgtcagtgcggggagtcatacagtcgaaatcactgttactgcggataacggcacatgggacgtgtatgccgactacctggtgatacag

SEQ ID NO: 1789 - DNA, 2349 bp, Artificial Sequence
  Synthetic Construct, P77853-Tth-T134-12 DNA
atgttccttaagaaactgtctaagttgctgctcgtcgtgctccttgttgccgtttacacacaggtcaacgcgcaaacaagcattactctgacatccaacgcatccggtacgtttgacggttactattacgaactctggaaggatactggcaatacaacaatgacggtctacactcaaggtcgcttttcctgccagtggtcgaacatcaataacgcgttgtttaggaccgggaagaaatacaaccagaattggcagtctcttggcacaatccggatcacgtactctgcgacttacaacccaaacgggaactcctacttgtgtatctatggctggtctaccaacccattggtcgagttctacatcgttgagtcctgggggaactggagaccgcctggtgcctgcctggccgagggctcgctcgtcttggacgcggctaccgggcagagggtccctatcgaaaaggtgcgtccggggatggaagttttctccttgggacctgattacatactgtatcgggtgcccgttttggaggtccttgagagcggggttagggaagttgtgcgcctcagaactcggtcagggagaacgctggtgttgacaccagatcacccgcttttgacccccgaaggttggaaacctctttgtgacctcccgcttggaactccaattgcagtccccgcagaactgcctgtggcgggccacttggccccacctgaagaacgtgttacgctcctggctcttctgttgggggatgggaacacaaagctgtcgggtcggagaggtacacgtcctaatgccttcttctacagcaaagaccccgaattgctcgcggcttatcgccggtgtgcagaagccttgggtgcaaaggtgaaagcatacgtccacccgactacgggggtggttacactcgcaaccctcgctccacgtcctggagctcaagatcctgtcaaacgcctcgttgtcgaggcgggaatggttgctaaagccgaagagaagagggtcccggaggaggtgtttcgttaccggcgtgaggcgttggcccttttcttgggccgtttgttctcgacagacggctctgttgaaaagaagaggatctcttattcaagtgccagtttgggactggcccaggatgtcgcacatctcttgctgcgccttggaattacatctcaactccgttcgagagggccacgggctcacgaggttcttatatcgggccgcgaggatattttgcggtttgctgaacttatcggaccctacctcttgggggccaagagggagagacttgcagcgctggaagctgaggcccgcaggcgtttgcctggacagggatggcacttgcggcttgttcttcctgccgtggcgtacagagtgagcgaggctaaaaggcgctcgggattttcgtggagtgaagccggtcggcgcgtcgcagttgcgggatcgtgtttgtcatctggactcaacctcaaattgcccagacgctacctttctcggcaccggttgtcgctgctcggtgaggcttttgccgaccctgggctggaagcgctcgcggaaggccaagtgctctgggaccctattgttgctgtcgaaccggccggtaaggcgagaacattcgacttgcgcgttccaccctttgcaaacttcgtgagcgaggacctggtggtgcataacaagtccctgggccaagtgacaatcgatggcgggacctacgacatctataggacgacacgcgtcaaccagccttccattgtggggacagccacgttcgatcagtactggagcgtgcgcacctctaagcggacttcaggaacagtgaccgtgaccgatcacttccgcgcctgggcgaaccggggcctgaacctcggcacaatagaccaaattacattgtgcgtggagggttaccaaagctctggatcagccaacatcacccagaacaccttctctcagggctcttcttccggcagttcgggtggctcatccggctccacaacgactactcgcatcgagtgtgagaacatgtccttgtccggaccctacgttagcaggatcaccaatccctttaatggtattgcgctgtacgccaacggagacacagcccgcgctaccgttaacttccccgcaagtcgcaactacaatttccgcctgcggggttgcggcaacaacaataatcttgcccgtgtggacctgaggatcgacggacggaccgtcgggaccttttattaccagggcacatacccctgggaggccccaattgacaatgtttatgtcagtgcggggagtcatacagtcgaaatcactgttactgcggataacggcacatgggacgtgtatgccgactacctggtgatacag

SEQ ID NO: 1790 - DNA, 2352 bp, Artificial Sequence
  Synthetic Construct, P77853-Tth-T134-36 DNA
atgttccttaagaaactgtctaagttgctgctcgtcgtgctccttgttgccgtttacacacaggtcaacgcgcaaacaagcattactctgacatccaacgcatccggtacgtttgacggttactattacgaactctggaaggatactggcaatacaacaatgacggtctacactcaaggtcgcttttcctgccagtggtcgaacatcaataacgcgttgtttaggaccgggaagaaatacaaccagaattggcagtctcttggcacaatccggatcacgtactctgcgacttacaacccaaacgggaactcctacttgtgtatctatggctggtctaccaacccattggtcgagttctacatcgttgagtcctgggggaactggagaccgcctggtgcctgcctggccgagggctcgctcgtcttggacgcggctaccgggcagagggtccctatcgaaaaggtgcgtccggggatggaagttttctccttgggacctgattacagactgtatcgggtgcccgttttggaggtccttgagagcggggttagggaagttgtgcgcctcagaactcggtcagggagaacgctggtgttgacaccagatcacccgcttttgacccccgaaggttggaaacctctttgtgacctcccgcttggaactccaattgcagtccccgcagaactgcctgtggcgggccacttggccccacctgaagaacgtgttacgctcctggctcttctgttgggggatgggaacacaaagctgtcgggtcggagaggcacacgtcctaatgccttcttctacagcaaagaccccgaattgctcgcggcttatcgccggtgtgcagaagccttgggtgcaaaggtgaaagcatacgtccacccgactacgggggtggttacactcgcaaccctcgctccacgtcctggagctcaagatcctgtcaaacgcctcgttgtcgaggcgggaatggttgctaaagccgaagagaagagggtcccggaggaggtgtttcgttaccggcgtgaggcgttggcccttttcttgggccgtttgttctcgacagacggctctgttgaaaagaagaggatctcttattcaagtgccagtttgggactggcccaggatgtcgcacatctcttgctgcgccttggaattacatctcaactccgttcgagagggccacgggctcacgaggttcttatatcgggccgcgaggatattttgcggtttgctgaacttatcggaccctacctcttgggggccaagagggagagacttgcagcgctggaagctgaggcccgcaggcgtttgcctggacagggatggcacttgcggcttgttcttcctgccgtggcgtacagagtgagcgaggctaaaaggcgctcgggattttcgtggagtgaagccggtcggcgcgtcgcagttgcgggatcgtgtttgtcatctggactcaacctcaaattgcccagacgctacctttctcggcaccggttgtcgctgctcggtgaggcttttgccgaccctgggctggaagcgctcgcggaaggccaagtgctctgggaccctattgttgctgtcgaaccggccggtaaggcgagaacattcgacttgcgcgttccaccctttgcaaacttcgtgagcgaggacctggtggtgcataacaccgtccccctgggccaagtgacaatcgatggcgggacctacgacatctataggacgacacgcgtcaaccagccttccattgtggggacagccacgttcgatcagtactggagcgtgcgcacctctaagcggacttcaggaacagtgaccgtgaccgatcacttccgcgcctgggcgaaccggggcctgaacctcggcacaatagaccaaattacattgtgcgtggagggttaccaaagctctggatcagccaacatcacccagaacaccttctctcagggctcttcttccggcagttcgggtggctcatccggctccacaacgactactcgcatcgagtgtgagaacatgtccttgtccggaccctacgttagcaggatcaccaatccctttaatggtattgcgctgtacgccaacggagacacagcccgcgctaccgttaacttccccgcaagtcgcaactacaatttccgcctgcggggttgcggcaacaacaataatcttgcccgtgtggacctgaggatcgacggacggaccgtcgggaccttttattaccagggcacatacccctgggaggccccaattgacaatgtttatgtcagtgcggggagtcatacagtcgaaatcactgttactgcggataacggcacatgggacgtgtatgccgactacctggtgatacag

SEQ ID NO: 1791 - DNA, 2341 bp, Artificial Sequence
  Synthetic Construct, P77853-Tth-T134-42 DNA
atgttccttaagaaactgtctaagttgctgctcgtcgtgctccttgttgccgtttacacacaggtcaacgcgcaaacaagcattactctgacatccaacgcatccggtacgtttgacggttactattacgaactctggaaggatactggcaatacaacaatgacggtctacactcaaggtcgcttttcctgccagtggtcgaacatcaataacgcgttgtttaggaccgggaagaaatacaaccagaattggcagtctcttggcacaatccggatcacgtactctgcgacttacaacccaaacgggaactcctacttgtgtatctatggctggtctaccaacccattggtcgagttctacatcgttgagtcctgggggaactggagaccgcctggtgcctgcctggccgagggctcgctcgtcttggacgcggctaccgggcagagggtccctatcgaaaaggtgcgtccggggatggaagttttctccttgggacctgactacagactgtatcgggtgcccgttttggaggtccttgagagcggggttagggaagttgtgcgcctcagaactcggtcagggagaacgctggtgttgacaccagatcacccgcttttgacccccgaaggttggaaacctctttgtgacctcccgcttggaactccaattgcagtccccgcagaactgcctgtggcgggccacttggccccacctgaagaacgtgttacgctcctggctcttctgttgggggatgggaacacaaagctgtcgggtcggagaggtacacgtcctaatgccttcttctacagcaaagaccccgaattgctcgcggcttatcgccggtgtgcagaagccttgggtgcaaaggtgaaagcatacgtccacccgactacgggggtggttacactcgcaaccctcgctccacgtcctggagctcaagatcctgtcaaacgcctcgttgtcgaggcgggaatggttgctaaagccgaagagaagagggtcccggaggaggtgtttcgttaccggcgtgaggcgttggcccttttcttgggccgtttgttctcgacagacggctctgttgaaaagaagaggatctcttattcaagtgccagtttgggactggcccaggatgtcgcacatctcttgctgcgccttggaattacatctcaactccgttcgagagggccacgggctcacgaggttcttatatcgggccgcgaggatattttgcggtttgctgaacttatcggaccctacctcttgggggccaagagggagagacttgcagcgctggaagctgaggcccgcaggcgtttgcctggacagggatggcacttgcggcttgttcttcctgccgtggcgtacagagtgagcgaggctaaaaggcgctcgggattttcgtggagtgaagccggtcggcgcgtcgcagttgcgggatcgtgtttgtcatctggactcaacctcaaattgcccagacgctacctttctcggcaccggttgtcgctgctcggtgaggcttttgccgaccctgggctggaagcgctcgcggaaggccaagtgctctgggaccctattgttgctgtcgaaccggccggtaaggcgagaacattcgacttgcgcgttccaccctttgcaaacttcgtgagcgaggacctggtggtgcataacaccgtccccctgggccaagtgacaatcgatggcgggacctacgacatctataggacgacacgcgtcaaccagccttccattgtggggacagccacgttcgatcagtactggagcgtgcgcacctctaagcggacttcaggaacagtgaccgtgaccgatcacttccgcgcctgggcgaaccggggcctgaacctcggcacaatagaccaaattacattgtgcgtggagggttaccaaagctctggatcagccaacatcacccagaacaccttctctcagggctcttcttccggcagttcgggtggctcatccggctccacaacgactactcgcatcgagtgtgagaacatgtccttgtccggaccctacgttagcaggatcaccaatccctttaatggtattgcgctgtacgccaacggagacacagcccgcgctaccgttaacttccccgcaagtcgcaactacaatttccgcctgcggggttgcggcaacaacaataatcttgcccgtgtggacctgaggatcgacggacggaccgtcgggaccttttattaccagggcacatacccctgggaggccccaattgacaatgtttatgtcagtgcggggagtcatacagtcgaaatcactgttactgcggataacggcacatgggacgtgtatgccgactacc

SEQ ID NO: 1792 - DNA, 2349 bp, Artificial Sequence
  Synthetic Construct, P77853-Tth-T134-43 DNA
atgttccttaagaaactgtctaagttgctgctcgtcgtgctccttgttgccgtttacacacaggtcaacgcgcaaacaagcattactctgacatccaacgcatccggtacgtttgacggttactattacgaactctggaaggatactggcaatacaacaatgacggtctacactcaaggtcgcttttcctgccagtggtcgaacatcaataacgcgttgtttaggaccgggaagaaatacaaccagaattggcagtctcttggcacaatccggatcacgtactctgcgacttacaacccaaacgggaactcctacttgtgtatctatggctggtctaccaacccattggtcgagttctacatcgttgagtcctgggggaactggagaccgcctggtgcctgcctggccgagggctcgctcgtcttggacgcggctaccgggcagagggtccctatcgaaaaggtgcgtccggggatggaagttttctccttgggacctgattacagactgtatcgggtgcccgttttggaggtccttgagagcggggttagggaagttgtgcgcctcagaactcggtcagggagaacgctggtgttgacaccagatcacctgcttttgacccccgaaggttggaaacctctttgtgacctcccgcttggaactccaattgcagtccccgcagaactgcctgtggcgggccacttggccccacctgaagaacgtgttacgctcctggctcttctgttgggggatgggaacacaaagctgtcgggtcggagaggtacacgtcctaatgccttcttctacagcaaagaccccgaattgctcgcggcttatcgccggtgtgcagaagccttgggtgcaaaggtgaaagcatacgtccacccgactacgggggtggttacactcgcaaccctcgctccacgtcctggagctcaagatcctgtcaaacgcctcgttgtcgaggcgggaatggttgctaaagccgaagagaagagggtcccggaggaggtgtttcgttaccggcgtgaggcgttggcccttttcttgggccgtttgttctcgacagacggctctgttgaaaagaagaggatctcttattcaagtgccagtttgggactggcccaggatgtcgcacatctcttgctgcgccttggaattacatctcaactccgttcgagagggccacgggctcacgaggttcttatatcgggccgcgaggatattttgcggtttgctgaacttatcggaccctacctcttgggggccaagagggagagacttgcagcgctggaagctgaggcccgcaggcgtttgcctggacagggatggcacttgcggcttgttcttcctgccgtggcgtacagagtgagcgaggctaaaaggcgctcgggattttcgtggagtgaagccggtcggcgcgtcgcagttgcgggatcgtgtttgtcatctggactcaacctcaaattgcccagacgctacctttctcggcaccggttgtcgctgctcggtgaggcttttgccgaccctgggctggaagcgctcgcggaaggccaagtgctctgggaccctattgttgctgtcgaaccggccggtaaggcgagaacattcgacttgcgcgttccaccctttgcaaacttcgtgagcgaggacctggtggtgcataacacgtccctgggccaagtgacaatcgatggcgggacctacgacatctataggacgacacgcgtcaaccagccttccattgtggggacagccacgttcgatcagtactggagcgtgcgcacctctaagcggacttcaggaacagtgaccgtgaccgatcacttccgcgcctgggcgaaccggggcctgaacctcggcacaatagaccaaattacattgtgcgtggagggttaccaaagctctggatcagccaacatcacccagaacaccttctctcagggctcttcttccggcagttcgggtggctcatccggctccacaacgactactcgcatcgagtgtgagaacatgtccttgtccggaccctacgttagcaggatcaccaatccctttaatggtattgcgctgtacgccaacggagacacagcccgcgctaccgttaacttccccgcaagtcgcaactacaatttccgcctgcggggttgcggcaacaacaataatcttgcccgtgtggacctgaggatcgacggacggaccgtcgggaccttttattaccagggcacatacccctgggaggccccaattgacaatgtttatgtcagtgcggggagtcatacagtcgaaatcactgttactgcggataacggcacatgggacgtgtatgccgactacctggtgatacag

SEQ ID NO: 1793 - DNA, 2349 bp, Artificial Sequence
  Synthetic Construct, P77853-Tth-T134-45 DNA
atgttccttaagaaactgtctaagttgctgctcgtcgtgctccttgttgccgtttacacacaggtcaacgcgcaaacaagcattactctgacatccaacgcatccggtacgtttgacggttactattacgaactctggaaggatactggcaatacaacaatgacggtctacactcaaggtcgcttttcctgccagtggtcgaacatcaataacgcgttgtttaggaccgggaagaaatacaaccagaattggcagtctcttggcacaatccggatcacgtactctgcgacttacaacccaaacgggaactcctacttgtgtatctatggctggtctaccaacccattggtcgagttctacatcgttgagtcctgggggaactggagaccgcctggtgcctgcctggccgagggctcgctcgtcttggacgcggctaccgggcagagggtccctatcgaaaaggtgcgtccggggatggaagttttctccttgggacctgattacagactgtatcgtgtgcccgttttggaggtccttgagagcggggttagggaagttgtgcgcctcagaactcggtcagggagaacgctggtgttgacaccagatcacctgcttttgacccccgaaggttggaaacctctttgtgacctcccgcttggaactccaattgcagtccccgcagaactgcctgtggcgggccacttggccccacctgaagaacgtgttacgctcctggctcttctgttgggggatgggaacacaaagctgtcgggtcggagaggtacacgtcctaatgccttcttctacagcaaagaccccgaattgctcgcggcttatcgccggtgtgcagaagccttgggtgcaaaggtgaaagcatacgtccacccgactacgggggtggttacactcgcaaccctcgctccacgtcctggagctcaagatcctgtcaaacgcctcgttgtcgaggcgggaatggttgctaaagccgaagagaagagggtcccggaggaggtgtttcgttaccggcgtgaggcgttggcccttttcttgggccgtttgttctcgacagacggctctgttgaaaagaagaggatctcttattcaagtgccagtttgggactggcccaggatgtcgcacatctcttgctgcgccttggaattacatctcaactccgttcgagagggccacgggctcacgaggttcttatatcgggccgcgaggatattttgcggtttgctgaacttatcggaccctacctcttgggggccaagagggagagacttgcagcgctggaagctgaggcccgcaggcgtttgcctggacagggatggcacttgcggcttgttcttcctgccgtggcgtacagagtgagcgaggctaaaaggcgctcgggattttcgtggagtgaagccggtcggcgcgtcgcagttgcgggatcgtgtttgtcatctggactcaacctcaaattgcccagacgctacctttctcggcaccggttgtcgctgctcggtgaggcttttgccgaccctgggctggaagcgctcgcggaaggccaagtgctctgggaccctattgttgctgtcgaaccggccggtaaggcgagaacattcgacttgcgcgttccaccctttgcaaacttcgtgagcgaggacctggtggtgcataacacgtccctgggccaagtgacaatcgatggcgggacctacgacatctataggacgacacgcgtcaaccagccttccattgtggggacagccacgttcgatcagtactggagcgtgcgcacctctaagcggacttcaggaacagtgaccgtgaccgatcacttccgcgcctgggcgaaccggggcctgaacctcggcacaatagaccaaattacattgtgcgtggagggttaccaaagctctggatcagccaacatcacccagaacaccttctctcagggctcttcttccggcagttcgggtggctcatccggctccacaacgactactcgcatcgagtgtgagaacatgtccttgtccggaccctacgttagcaggatcaccaatccctttaatggtattgcgctgtacgccaacggagacacagcccgcgctaccgttaacttccccgcaagtcgcaactacaatttccgcctgcggggttgcggcaacaacaataatcttgcccgtgtggacctgaggatcgacggacggaccgtcgggaccttttattaccagggcacatacccctgggaggccccaattgacaatgtttatgtcagtgcggggagtcatacagtcgaaatcactgttactgcggataacggcacatgggacgtgtatgccgactacctggtgatacag

SEQ ID NO: 1794 - DNA, 2352 bp, Artificial Sequence
  Synthetic Construct, P77853-Tth-T134-48 DNA
atgttccttaagaaactgtctaagttgctgctcgtcgtgctccttgttgccgtttacacacaggtcaacgcgcaaacaagcattactctgacatccaacgcatccggtacgtttgacggttactattacgaactctggaaggatactggcaatacaacaatgacggtctacactcaaggtcgcttttcctgccagtggtcgaacatcaataacgcgttgtttaggaccgggaagaaatacaaccagaattggcagtctcttggcacaatccggatcacgtactctgcgacttacaacccaaacgggaactcctacttgtgtatctatggctggtctaccaacccattggtcgagttctacatcgttgagtcctgggggaactggagaccgcctggtgcctgcctggccgagggctcgctcgtctcggacgcggctaccgggcagagggtccctatcgaaaaggtgcgtccggggatggaagttttctccttgggacctgattacagactgtatcgggtgcccgttttggaggtccttgagagcggggttagggaagttgtgcgcctcagaactcggtcagggagaacgctggtgttgacaccagatcacccgcttttgacccccgaaggttggaaacctctttgtgacctcccgcttggaactccaattgcagtccccgcagaactgcctgtggcgggccacttggccccacctgaagaacgtgttacgctcctggctcttctgttgggggatgggaacacaaagctgtcgggtcggagaggtacacgtcctaatgccttcttctacagcaaagaccccgaattgctcgcggcttatcgccggtgtgcagaagccttgggtgcaaaggtgaaagcatacgtccacccgactacgggggtggttacactcgcaaccctcgctccacgtcctggagctcaagatcctgtcaaacgccacgttgtcgaggcgggaatggttgctaaagccgaagagaagagggtcccggaggaggtgtttcgttaccggcgtgaggcgttggccctttccttgggccgtttgttctcgacagacggctctgttgaaaagaagaggatctcttattcaagtgccagtttgggactggcccaggatgtcgcacatctcttgctgcgccttggaattacatctcaactccgttcgagagggccacgggctcacgaggttcttatatcgggccgcgaggatattttgcggtttgctgaacttatcggaccctacctcttgggggccaagagggagagacttgcagcgctggaagctgaggcccgcaggcgtttgcctggacagggatggcacttgcggcttgttcttcctgccgtggcgtacagagtgagcgaggctaaaaggcgctcgggattttcgtggagtgaagccggtcggcgcgtcgcagttgcgggatcgtgtttgtcatctggactcaacctcaaattgtccagacgctacctttctcggcaccggttgtcgctgctcggtgaggcttttgccgaccctgggctggaagcgctcgcggaaggccaagtgctctgggaccctattgttgctgtcgaaccggccggtaaggcgagaacattcgacttgcgcgttccaccctttgcaaacttcgtgagcgaggacctggtggtgcataacacgtcccccttgggccaagtgacaatcgatggcgggacctacgacatctataggacgacacgcgtcaaccagccttccattgtggggacagccacgttcgatcagtactggagcgtgcgcacctctaagcggacttcaggaacagtgaccgtgaccgatcacttccgcgcctgggcgaaccggggcctgaacctcggcacaatagaccaaattacattgtgcgtggagggttaccaaagctctggatcagccaacatcacccagaacaccttctctcagggctcttcttccggcagttcgggtggctcatccggctccacaacgactactcgcatcgagtgtgagaacatgtccttgtccggaccctacgttagcaggatcaccaatccctttaatggtattgcgctgtacgccaacggagacacagcccgcgctaccgttaacttccccgcaagtcgcaactacaatttccgcctgcggggttgcggcaacaacaataatcttgcccgtgtggacctgaggatcgacggacggaccgtcgggaccttttattaccagggcacatacccctgggaggccccaattgacaatgtttatgtcagtgcggggagtcatacagtcgaaatcactgttactgcggataacggcacatgggacgtgtatgccgactacctggtgatacag

SEQ ID NO: 1795 - DNA, 2349 bp, Artificial Sequence
  Synthetic Construct, P77853-Tth-T134-49 DNA
atgttccttaagaaactgtctaagttgctgctcgtcgtgctccttgttgccgtttacacacaggtcaacgcgcaaacaagcattactctgacatccaacgcatccggtacgtttgacggttactattacgaactctggaaggatactggcaatacaacaatgacggtctacactcaaggtcgcttttcctgccagtggtcgaacatcaataacgcgttgtttaggaccgggaagaaatacaaccagaattggcagtctcttggcacaatccggatcacgtactctgcgacttacaacccaaacgggaactcctacttgtgtatctatggctggtctaccaacccattggtcgagttctacatcgttgagtcctgggggaactggagaccgcctggtgcctgcctggccgagggctcgctcgtcttggacgcggctaccgggcagagggtccctatcgaaaaggtgcgtccggggatggaagttttctccttgggacctgattacagactgtatcgggtgcccgttttggaggtccttgagagcggggttagggaagttgtacgcctcagaactcggtcagggagaacgctggtgttgacaccagatcacccgcttttgacccccgaaggttggaaacctctttgtgacctcccgcttggaactccaattgcagtccccgcagaactgcctgtggcgggccacttggccccacctgaagaacgtgttacgctcctggctcttctgttgggggatgggaacacaaagctgtcgggtcggagaggtacacgtcctattgccttcttctacagcaaagaccccgaattgctcgcggcttatcgccggtgtgcagaagccttgggtgcaaaggtgaaagcatacgtccacccgactacgggggtggttacactcgcaaccctcgctccacgtcctggagctcaagatcctgtcaaacgcctcgttgtcgaggcgggaatggttgctaaagccgaagagaagagggtcccggaggaggtgtttcgttaccggcgtgaggcgttggcccttttcttgggccgtttgttctcgacagacggctctgttgaaaagaagaggatctcttattcaagtgccagtttgggactggcccaggatgtcgcacatctcttgctgcgccttggaattacatctcaactccgttcgagagggccacgggctcacgaggttcttatatcgggccgcgaggatattttgcggtttgctgaacttatcggaccctacctcttgggggccaagagggagagacttgcagcgctggaagctgaggcccgcaggcgtttgcctggacagggatggcacttgcggcttgttcttcctgccgtggcgtacagagtgagcgaggctaaaaggcgctcgggattttcgtggagtgaagccggtcggcgcgtcgcagttgcgggatcgtgtttgtcatctggactcaacctcaaattgcccagacgctacctttctcggcaccggttgtcgctgctcggtgaggcttttgccgaccctgggctggaagcgctcgcggaaggccaagtgctctgggaccctattgttgctgtcgaaccggccggtaaggcgagaacattcgacttgcgcgttccaccctttgcaaacttcgtgagcgaggacctggtggtgcataacagtcccctgggccaagtgacaatcgatggcgggacctacgacatctataggacgacacgcgtcaaccagccttccattgtggggacagccacgttcgatcagtactggagcgtgcgcacctctaagcggacttcaggaacagtgaccgtgaccgatcacttccgcgcctgggcgaaccggggcctgaacctcggcacaatagaccaaattacattgtgcgtggagggttaccaaagctctggatcagccaacatcacccagaacaccttctctcagggctcttcttccggcagttcgggtggctcatccggctccacaacgactactcgcatcgagtgtgagaacatgtccttgtccggaccctacgttagcaggatcaccaatccctttaatggtattgcgctgtacgccaacggagacacagcccgcgctaccgttaacttccccgcaagtcgcaactacaatttccgcctgcggggttgcggcaacaacaataatcttgcccgtgtggacctgaggatcgacggacggaccgtcgggaccttttattaccagggcacatacccctgggaggccccaattgacaatgtttatgtcagtgcggggagtcatacagtcgaaatcactgttactgcggataacggcacatgggacgtgtatgccgactacctggtgatacag

SEQ ID NO: 1796 - DNA, 2349 bp, Artificial Sequence
  Synthetic Construct, P77853-Tth-T134-80 DNA
atgttccttaagaaactgtctaagttgctgctcgtcgtgctccttgttgccgtttacacacaggtcaacgcgcaaacaagcattactctgacatccaacgcatccggtacgtttgacggttactattacgaactctggaaggatactggcaatacaacaatgacggtctacactcaaggtcgcttttcctgccagtggtcgaacatcaataacgcgttgtttaggaccgggaagaaatacaaccagaattggcagtctcttggcacaatccggatcacgtactctgcgacttacaacccaaacgggaactcctacttgtgtatctatggctggtctaccaacccattggtcgagttctacatcgttgagtcctgggggaactggagaccgcctggtgcctgcctggccgagggctcgctcgtcttggacgcggctaccgggcagagggtccctatcgaaaaggtgcgtccggggatggaagttttctccttgggacctgattacagactgtatcgggtgcccgttttggaggtccttgagagcggggttagggaagttgtgcgcctcagaactcggtcagggagaacgctggtgttgacaccagatcacccgcttttgacccccgaaggttggaaacctctttgtgacctcccgcttggaactccaattgcagtccccgcagaactgcctgtggcgggccacttggccccacctgaagaacgtggtacgctcctggctcttctgttgggggatgggaacacaaagctgtcgggtcggagaggtacacgtcctaatgccttcttctacagcaaagaccccgaattgctcgcggcttatcgccggtgtgcagaagccttgggtgcaaaggtgaaagcatacgtccacccgactacgggggtggttacactcgcaaccctcgctccacgtcctggagctcaagatcctgtcaaacgcctcgttgtcgaggcgggaatggttgctaaagccgaagagaagagggtcccggaggaggtgtttcgttaccggcgtgaggcgttggcccttttcttgggccgtttgttctcgacagacggctctgttgaaaagaagaggatctcttattcaagtgccagtttgggactggcccaggatgtcgcacatctcttgctgcgccttggaattacatctcaactccgttcgagagggccacgggctcacgaggttcttatatcgggccgcgaggatattttgcggtttgctgaacttatcggaccctacctcttgggggccaagagggagagacttgcagcgctggaagctgaggcccgcaggcgtttgcctggacagggatggcacttgcggcttgttcttcctgccgtggcgtacagagtgagcgaggctaaaaggcgctcgggattttcgtggagtgaagccggtcggcgcgtcgcagttgcgggatcgtgtttgtcatctggactcaacctcaaattgcccagacgctacctttctcggcaccggttgtcgctgctcggtgaggcttttgccgaccctgggctggaagcgctcgcggaaggccaagtgctctgggaccctattgttgctgtcgaaccggccggtaaggcgagaacattcgacttgcgcgttccaccctttgcaaacttcgtgagcgaggacctggtggtgcataacacgtccctgggccaagtgacaatcgatggcgggacctacgacatctataggacgacacgcgtcaaccagccttccattgtggggacagccacgttcgatcagtactggagcgtgcgcacctctaagcggacttcaggaacagtgaccgtgaccgatcacttccgcgcctgggcgaaccggggcctgaacctcggcacaatagaccaaattacattgtgcgtggagggttaccaaagctctggatcagccaacatcacccagaacaccttctctcagggctcttcttccggcagttcgggtggctcatccggctccacaacgactactcgcatcgagtgtgagaacatgtccttgtccggaccctacgttagcaggatcaccaatccctttaatggtattgcgctgtacgccaacggagacacagcccgcgctaccgttaacttccccgcaagtcgcaactacaatttccgcctgcggggttgcggcaacaacaataatcttgcccgtgtggacctgaggatcgacggacggaccgtcgggaccttttattaccagggcacatacccctgggaggccccaattgacaatgtttatgtcagtgcggggagtcatacagtcgaaatcactgttactgcggataacggcacatgggacgtgtatgccgactacctggtgatacag

SEQ ID NO: 1797 - DNA, 2352 bp, Artificial Sequence
  Synthetic Construct, P77853-Tth-T134-82 DNA
atgttccttaagaaactgtctaagttgctgctcgtcgtgctccttgttgccgtttacacacaggtcaacgcgcaaacaagcattactctgacatccaacgcatccggtacgtttgacggttactattacgaactctggaaggatactggcaatacaacaatgacggtctacactcaaggtcgcttttcctgccagtggtcgaacatcaataacgcgttgtttaggaccgggaagaaatacaaccagaattggcagtctcttggcacaatccggatcacgtactctgcgacttacaacccaaacgggaactcctacttgtgtatctatggctggtctaccaacccattggtcgagttctacatcgttgagtcctgggggaactggagaccgcctggtgcctgcctggccgagggctcgctcgtcttggacgcggctaccgggcagagggtccctatcgaaaaggtgcgtccggggatggaagttttctccttgggacctgattacagactgtatcgggtgcccgttttggaggtccttgagagcggggttagggaagttgtgcgcctcagaactcggtcagggagaacgctggtgttgacaccagatcacccgcttttgacccccgaaggttggaaacctctttgtgacctcccgcttggaactccaattgcagtccccgcagaactgcctgtggcgggccacttggccccacctgaagaacgtgttacgctcctggctcttctgttgggggatgggaacacaaagctgtcgggtcggagaggtacacgtcctaatgccttcttctacagcaaagaccccgaattgctcgcggcttatcgccggtgtgcagaagccttgggtgcaaaggtgaaagcatacgtccacccgactacgggggtggttacactcgcaaccctcgctccacgtcctggagctcaagatcctgtcaaacgcctcgttgtcgaggcgggaatggttgctaaagccgaagagaagagggtcccggaggaggtgtttcgttaccggcgtgaggcgttggcccttttcttgggccgtttgttctcgacagacggctctgttgaaaagaagaggatctcttattcaagtgccagtttgggactggcccaggatgtcgcacatctcttgctgcgccttggaattacatctcaactccgttcgagagggccacgggctcacgaggttcttatatcgggccgcgaggatattttgcggtttgctgaacttatcggaccctacctcttgggggccaagagggagagacttgcagcgctggaagctgaggcccgcaggcgtttgcctggacagggatggcacttgcggcttgttcttcctgccgtggcgtacagagtgagcgaggctaaaaggcgctcgggattttcgtggagtgaagccggtcggcgcgtcgcagttgcgggatcgtgtttgtcatctggactcaacctcaaattgcccagacgctacctttctcggcaccggttgtcgctgctcggtgaggcttttgccgaccctgggctggaagcgctcgcggaaggccaagtgctctgggaccctattgttgctgtcgaaccggccggtaaggcgagaacattcgacttgcgcgttccaccctttgcaaacttcgtgagcgaggacctggtggtgcataacaccgtccccttgggccaagtgacaatcgatggcgggacctacgacatctataggacgacacgcgtcaaccagccttccattgtggggacagccacgttcgatcagtactggagcgtgcgcacctctaagcggacttcaggaacagtgaccgtgaccgatcacttccgcgcctgggcgaaccggggcctgaacctcggcacaatagaccaaattacattgtgcgtggagggttaccaaagctctggatcagccaacatcacccagaacaccttctctcagggctcttcttccggcagttcgggtggctcatccggctccacaacgactactcgcatcgagtgtgagaacatgtccttgtccggaccctacgttagcaggatcaccaatccctttaatggtattgcgctgtacgccaacggagacacagcccgcgctaccgttaacttccccgcaagtcgcaactacaatttccgcctgcggggttgcggcaacaacaataatcttgcccgtgtggacctgaggatcgacggacggaccgtcgggaccttttattaccagggcacatacccctgggaggccccaattgacaatgtttatgtcagtgcggggagtcatacagtcgaaatcactgttactgcggataacggcacatgggacgtgtatgccgactacctggtgatacag

SEQ ID NO: 1798 - DNA, 2352 bp, Artificial Sequence
  Synthetic Construct, P77853-Tth-T134-83 DNA
atgttccttaagaaactgtctaagttgctgctcgtcgtgctccttgttgccgtttacacacaggtcaacgcgcaaacaagcattactctgacatccaacgcatccggtacgtttgacggttactattacgaactctggaaggatactggcaatacaacaatgacggtctacactcaaggtcgcttttcctgccagtggtcgaacatcaataacgcgttgtttaggaccgggaagaaatacaaccagaattggcagtctcttggcacaatccggatcacgtactctgcgacttacaacccaaacgggaactcctacttgtgtatctatggctggtctaccaacccattggtcgagttctacatcgttgagtcctgggggaactggagaccgcctggtgcctgcctggccgagggctcgctcgtcttggacgcggctaccgggcagagggtccctatcgaaaaggtgcgtccggggatggaagttttctccttgggacctgattacagactgtatcgggtgcccgttttggaggtccttgagagcggggttagggaagttgtgcgcctcagaactcggtcagggagaacgctggtgttgacaccagatcacccgcttttgacccccgaaggttggaaacctctttgtgacctcccgcttggaactccaattgcagtccccgcagaactgcctgtggcgggccacttggccccacctgaagaacgtgttacgctcctggctcttctgttgggggatgggaacacaaagctgtcgggtcggagaggtacacgtcctaatgccttcttctacagcaaagaccccgaattgctcgcggcttatcgccggtgtgcagaagccttgggtgcaaaggtgaaagcatacgtccacccgactacgggggtggttacactcgcaaccctcgctccacgtcctggagctcaagatcctgtcaaacgcctcgttgtcgaggcgggaatggttgctaaagccgaagagaagagggtcccggaggaggtgtttcgttaccggcgtgaggcgttggcccttttcttgggccgtttgttctcgacagacggctctgttgaaaagaagaggatctcttattcaagtgccagtttgggactggcccaggatgtcgcacatctcttgctgcgccttggaattacatctcaactccgttcgagagggccacgggctcacgaggttcttatatcgggccgcgaggatattttgcggtttgctgaacttatcggagcctacctcttgggggccaagagggagagacttgcagcgctggaagctgaggcccgcaggcgtttgcctggacagggatggcacttgcggcttgttcttcctgccgtggcgtacagagtgagcgaggctaaaaggcgctcgggattttcgtggagtgaagccggtcggcgcgtcgcagttgcgggatcgtgtttgtcatctggactcaacctcaaattgcccagacgctacctttctcggcaccggttgtcgctgctcggtgaggcttttgccgaccctgggctggaagcgctcgcggaaggccaagtgctctgggaccctattgttgctgtcgaaccggccggtaaggcgagaacattcgacttgcgcgttccaccctttgcaaacttcgtgagcgaggacctggtggtgcataacacgtcccccttgggccaagtgacaatcgatggcgggacctacgacatctataggacgacacgcgtcaaccagccttccattgtggggacagccacgttcgatcagtactggagcgtgcgcacctctaagcggacttcaggaacagtgaccgtgaccgatcacttccgcgcctgggcgaaccggggcctgaacctcggcacaatagaccaaattacattgtgcgtggagggttaccaaagctctggatcagccaacatcacccagaacaccttctctcagggctcttcttccggcagttcgggtggctcatccggctccacaacgactactcgcatcgagtgtgagaacatgtccttgtccggaccctacgttagcaggatcaccaatccctttaatggtattgcgctgtacgccaacggagacacagcccgcgctaccgttaacttccccgcaagtcgcaactacaatttccgcctgcggggttgcggcaacaacaataatcttgcccgtgtggacctgaggatcgacggacggaccgtcgggaccttttattaccagggcacatacccctgggaggccccaattgacaatgtttatgtcagtgcggggagtcatacagtcgaaatcactgttactgcggataacggcacatgggacgtgtatgccgactacctggtgatacag

SEQ ID NO: 1799 - DNA, 2352 bp, Artificial Sequence
  Synthetic Construct, P77853-Tth-T134-89 DNA
atgttccttaagaaactgtctaagttgctgctcgtcgtgctccttgttgccgtttacacacaggtcaacgcgcaaacaagcattactctgacatccaacgcatccggtacgtttgacggttactattacgaactctggaaggatactggcaatacaacaatgacggtctacactcaaggtcgcttttcctgccagtggtcgaacatcaataacgcgttgtttaggaccgggaagaaatacaaccagaattggcagtctcttggcacaatccggatcacgtactctgcgacttacaacccaaacgggaactcctacttgtgtatctatggctggtctaccaacccattggtcgagttctacatcgttgagtcctgggggaactggagaccgcctggtgcctgcctggccgagggctcgctcgtcttggacgcggctaccgggcagagggtccctatcgaaaaggtgcgtccggggatggaagttttctccttgggacctgattacagactgtatcgggtgcccgttttggaggtccttgagagcggggttagggaagttgtgcgcctcagaactcggtcagggagaacgctggtgttgacaccagatcacccgcttttgacccccgaaggttggaaacctctttgtgacctcccgcttggaactccaattgcagtccccgcagaactgcctgtggcgggccacttggccccacctgaagaacgtgttacgctcctggctcttctgttgggggatgggaacacaaagctgtcgggtcggagaggtacacgtcctaatgccttcttctacagcaaagaccccgaattgctcgcggcttatcgccggtgtgcagaagccttgggtgcaaaggtgaaagcatacgtccacccgactacgggggtggctacactcgcaaccctcgctccacgtcctggagctcaagatcctgtcaaacgcctcgttgtcgaggcgggaatggttgctaaagccgaagagaagagggtcccggaggaggtgtttcgttaccggcgtgaggcgttggcccttttcttgggccgtttgttctcgacagacggctctgttgaaaagaagaggatctcttattcaagtgccagtttgggactggcccaggatgtcgcacatctcttgctgcgccttggaattacatctcaactccgttcgagagggccacgggctcacgaggttcttatatcgggccgcgaggatattttgcggtttgctgaacttatcggaccctacctcttgggggccaagagggagagacttgcagcgctggaaactgaggcccgcaggcgtttgcctggacagggatggcacttgcggcttgttcttcctgccgtggcgtacagagtgagcgaggctaaaaggcgctcgggattttcgtggagtgaagccggtcggcgcgtcgcagttgcgggatcgtgtttgtcatctggactcaacctcaaattgcccagacgctacctttctcggcaccggttgtcgctgctcggtgaggcttttgccgaccctgggctggaagcgctcgcggaaggccaagtgctctgggaccctattgttgctgtcgaaccggccggtaaggcgagaacattcgacttgcgcgttccaccctttgcaaacttcgtgagcgaggacctggtggtgcataacacgtcccccctgggccaagtgacaatcgatggcgggacctacgacatctataggacgacacgcgtcaaccagccttccattgtggggacagccacgttcgatcagtactggagcgtgcgcacctctaagcggacttcaggaacagtgaccgtgaccgatcacttccgcgcctgggcgaaccggggcctgaacctcggcacaatagaccaaattacattgtgcgtggagggttaccaaagctctggatcagccaacatcacccagaacaccttctctcagggctcttcttccggcagttcgggtggctcatccggctccacaacgactactcgcatcgagtgtgagaacatgtccttgtccggaccctacgttagcaggatcaccaatccctttaatggtattgcgctgtacgccaacggagacacagcccgcgctaccgttaacttccccgcaagtcgcaactacaatttccgcctgcggggttgcggcaacaacaataatcttgcccgtgtggacctgaggatcgacggacggaccgtcgggaccttttattaccagggcacatacccctgggaggccccaattgacaatgtttatgtcagtgcggggagtcatacagtcgaaatcactgttactgcggataacggcacatgggacgtgtatgccgactacctggtgatacag

SEQ ID NO: 1800 - DNA, 2349 bp, Artificial Sequence
  Synthetic Construct, P77853-Tth-T134-91 DNA
atgttccttaagaaactgtctaagttgctgctcgtcgtgctccttgttgccgtttacacacaggtcaacgcgcaaacaagcattactctgacatccaacgcatccggtacgtttgacggttactattacgaactctggaaggatactggcaatacaacaatgacggtctacactcaaggtcgcttttcctgccagtggtcgaacatcaataacgcgttgtttaggaccgggaagaaatacaaccagaattggcagtctcttggcacaatccggatcacgtactctgcgacttacaacccaaacgggaactcctacttgtgtatctatggctggtctaccaacccattggtcgagttctacatcgttgagtcctgggggaactggagaccgcctggtgcctgcctggccgagggctcgctcgtcttggacgcggctaccgggcagagggtccctatcgaaaaggtgcgtccggggatggaagttttctccttgggacctgattacagactgtatcgggtgcccgttttggaggtccttgagagcggggttagggaagttgtgcgcctcagaactcggtcagggagaacgctggtgttgacaccagatcacccgcttttgacccccgaaggttggaaacctctttgtgacctcccgcttggaactccaattgcagtccccgcagaactgcctgtggcgggccacttggccccacctgaagaacgtgttacgctcctggctcttctgttgggggatgggaacacaaagctgtcgggtcggagaggtacacgtcctaatgccttcttctacagcaaagaccccgaattgctcgcggcttatcgccggtgtgcagaagccttgggtgcaaaggtgaaagcatacgtccacccgactacgggggtggttacactcgcaaccctcgctccacgtcctggagctcaagatcctgtcaaacgcctcgttgtcgaggcgggaatggttgctaaagccgaagagaagagggtcccggaggaggtgtttcgttaccggcgtgaggcgttggcccttttcttgggccgtttgttctcgacagacggctctgttgaaaagaagaggatctcttattcaagtgccactttggggctggcccaggatgtcgcacatctcttgctgcgccttggaattacatctcaactccgttcgagagggccacgggctcacgaggttcttatatcgggccgcgaggatattttgcggtttgctgaacttatcggaccctacctcttgggggccaagagggagagacttgcagcgctggaagctgaggcccgcaggcgtttgcctggacagggatggcacttgcggcttgttcttcctgccgtggcgtacagagtgagcgaggctaaaaggcgctcgggattttcgtggagtgaagccggtcggcgcgtcgcagttgcgggatcgtgtttgtcatctggactcaacctcaaattgcccagacgctacctttctcggcaccggttgtcgctgctcggtgaggcttttgccgaccctgggctggaagcgctcgcggaaggccaagtgctctgggaccctattgttgctgtcgaaccggccggtaaggcgagaacattcgacttgcgcgttccaccctttgcaaacttcgtgagcgaggacctggtggtgcataacaagtccctgggccaagtgacaatcgatggcgggacctacgacatctataggacgacacgcgtcaaccagccttccattgtggggacagccacgttcgatcagtactggagcgtgcgcacctctaagcggacttcaggaacagtgaccgtgaccgatcacttccgcgcctgggcgaaccggggcctgaacctcggcacaatagaccaaattacattgtgcgtggagggttaccaaagctctggatcagccaacatcacccagaacaccttctctcagggctcttcttccggcagttcgggtggctcatccggctccacaacgactactcgcatcgagtgtgagaacatgtccttgtccggaccctacgttagcaggatcaccaatccctttaatggtattgcgctgtacgccaacggagacacagcccgcgctaccgttaacttccccgcaagtcgcaactacaatttccgcctgcggggttgcggcaacaacaataatcttgcccgtgtggacctgaggatcgacggacggaccgtcgggaccttttattaccagggcacatacccctgggaggccccaattgacaatgtttatgtcagtgcggggagtcatacagtcgaaatcactgttactgcggataacggcacatgggacgtgtatgccgactacctggtgatacag

SEQ ID NO: 1801 - DNA, 2349 bp, Artificial Sequence
  Synthetic Construct, P77853-Tth-T134-95 DNA
atgttccttaagaaactgtctaagttgctgctcgtcgtgctccttgttgccgtttacacacaggtcaacgcgcaaacaagcattactctgacatccaacgcatccggtacgtttgacggttactattacgaactctggaaggatactggcaatacaacaatgacggtctacactcaaggtcgcttttcctgccagtggtcgaacatcaataacgcgttgtttaggaccgggaagaaatacaaccagaattggcagtctcttggcacaatccggatcacgtactctgcgacttacaacccaaacgggaactcctacttgtgtatctatggctggtctaccaacccattggtcgagttctacatcgttgagtcctgggggaactggagaccgcctggtgcctgcctggccgagggctcgctcgtcttggacgcggctaccgggcagagggtccctatcgaaaaggtgcgtccggggatggaagttttctccttgggacctgattacagactgtatcgggtgcccgttttggaggtccttgagagcggggttagggaagttgtgcgcctcagaactcggtcagggagaacgctggtgttgacaccagatcacccgcttttgacccccgaaggttggaaacctctttgtgacctcccgcttggaactccaattgcagtccccgcagaactgcctgtggcgggccacttggccccacctgaagaacgtgttacgctcctggctcttctgttgggggatgggaacacaaagctgtcgggtcggagaggtacacgtcctaatgcctccttctacagcaaagaccccgaattgctcgcggcttatcgccggtgtgcagaagccttgggtgcaaaggtgaaagcatacgtccacccgactacgggggtggttacactcgcaaccctcgctccacgtcctggagctcaagatcctgtcaaacgcctcgttgtcgaggcgggaatggttgctaaagccgaagagaagagggtcccggaggaggtgtttcgttaccggcgtgaggcgttggcccttttcttgggccgtttgttctcgacagacggctctgttgaaaagaagaggatctcttattcaagtgccagtttgggactggcccaggatgtcgcacatctcttgctgcgccttggaattagatctcaactccgttcgagagggccacgggctcacgaggttcttatatcgggccgcgaggatattttgcgatttgctgaacttatcggaccctacctcttgggggccaagagggagagacttgcagcgctggaagctgaggcccgcaggcgtttgcctggacagggatggcacttgcggcttgttcttcctgccgtggcgtacagagtgagcgaggctaaaaggcgctcgggattttcgtggagtgaagccggtcggcgcgtcgcagttgcgggatcgtgtttgtcatctggactcaacctcaaattgcccagacgctacctttctcggcaccggttgtcgctgctcggtgaggcttttgccgaccctgggctggaagcgctcgcggaaggccaagtgctctgggaccctattgttgctgtcgaaccggccggtaaggcgagaacattcgacttgcgcgttccaccctttgcaaacttcgtgagcgaggacctggtggtgcataacaagtccctgggccaagtgacaatcgatggcgggacctacgacatctataggacgacacgcgtcaaccagccttccattgtggggacagccacgttcgatcagtactggagcgtgcgcacctctaagcggacttcaggaacagtgaccgtgaccgatcacttccgcgcctgggcgaaccggggcctgaacctcggcacaatagaccaaattacattgtgcgtggagggttaccaaagctctggatcagccaacatcacccagaacaccttctctcagggctcttcttccggcagttcgggtggctcatccggctccacaacgactactcgcatcgagtgtgagaacatgtccttgtccggaccctacgttagcaggatcaccaatccctttaatggtattgcgctgtacgccaacggagacacagcccgcgctaccgttaacttccccgcaagtcgcaactacaatttccgcctgcggggttgcggcaacaacaataatcttgcccgtgtggacctgaggatcgacggacggaccgtcgggaccttttattaccagggcacatacccctgggaggccccaattgacaatgtttatgtcagtgcggggagtcatacagtcgaaatcactgttactgcggataacggcacatgggacgtgtatgccgactacctggtgatacag

SEQ ID NO: 1802 - DNA, 2349 bp, Artificial Sequence
  Synthetic Construct, P77853-Tth-T134-98 DNA
atgttccttaagaaactgtctaagttgctgctcgtcgtgctccttgttgccgtttacacacaggtcaacgcgcaaacaagcattactctgacatccaacgcatccggtacgtttgacggttactattacgaactctggaaggatactggcaatacaacaatgacggtctacactcaaggtcgcttttcctgccagtggtcgaacatcaataacgcgttgtttaggaccgggaagaaatacaaccagaattggcagtctcttggcacaatccggatcacgtactctgcgacttacaacccaaacgggaactcctacttgtgtatctatggctggtctaccaacccattggtcgagttctacatcgttgagtcctgggggaactggagaccgcctggtgcctgcctggccgagggctcgctcgtcttggacgcggctaccgggcagagggtccctatcgaaaaggtgcgtccggggatggaagttttctccttgggacctgattacagactgtatcgggtgcccgtttcggaggtccttgagagcggggttagggaagttgtgcgcctcagaactcggtcagggagaacgctggtgttgacaccagatcacctgcttttgacccccgaaggttggaaacctctttgtgacctcccgcttggaactccaattgcagtccccgcagaactgcctgtggcgggccacttggccccacctgaagaacgtgttacgctcctggctcttctgttgggggatgggaacacaaagctgtcgggtcggagaggtacacgtcctaatgccttcttctacagcaaagaccccgaattgctcgcggcttatcgccggtgtgcagaagccttgggtgcaaaggtgaaagcatacgtccacccgactacgggggtggttacactcgcaaccctcgctccacgtcctggagctcaagatcctgtcaaacgcctcgttgtcgaggcgggaatggttgctaaagccgaagagaagagggtcccggaggaggtgtttcgttaccggcgtgaggcgttggcccttttcttgggccgtttgttctcgacagacggctctgttgaaaagaagaggatctcttattcaagtgccagtttgggactggcccaggatgtcgcacatctcttgctgcgccttggaattacatctcaactccgttcgagagggccacgggctcacgaggttcttatatcgggccgcgaggatattttgcggtttgctgaacttatcggaccctacctcttgggggccaagagggagagacttgcagcgctggaagctgaggcccgcaggcgtttgcctggacagggatggcacttgcggcttgttcttcctgccgtggcgtacagagtgagcgaggctaaaaggcgctcgggattttcgtggagtgaagccggtcggcgcgtcgcagttgcgggatcgtgtttgtcatctggactcaacctcaaattgcccagacgctacctttctcggcaccggttgtcgctgctcggtgaggcttttgccgaccctgggctggaagcgctcgcggaaggccaagtgctctgggaccctattgttgctgtcgaaccggccggtaaggcgagaacattcgacttgcgcgttccaccctttgcaaacttcgtgagcgaggacctggtggtgcataacacgtccctgggccaagtgacaatcgatggcgggacctacgacatctataggacgacacgcgtcaaccagccttccattgtggggacagccacgttcgatcagtactggagcgtgcgcacctctaagcggacttcaggaacagtgaccgtgaccgatcacttccgcgcctgggcgaaccggggcctgaacctcggcacaatagaccaaattacattgtgcgtggagggttaccaaagctctggatcagccaacatcacccagaacaccttctctcagggctcttcttccggcagttcgggtggctcatccggctccacaacgactactcgcatcgagtgtgagaacatgtccttgtccggaccctacgttagcaggatcaccaatccctttaatggtattgcgctgtacgccaacggagacacagcccgcgctaccgttaacttccccgcaagtcgcaactacaatttccgcctgcggggttgcggcaacaacaataatcttgcccgtgtggacctgaggatcgacggacggaccgtcgggaccttttattaccagggcacatacccctgggaggccccaattgacaatgtttatgtcagtgcggggagtcatacagtcgaaatcactgttactgcggataacggcacatgggacgtgtatgccgactacctggtgatacag

SEQ ID NO: 1803 - DNA, 2352 bp, Artificial Sequence
  Synthetic Construct, P77853-Tth-T134-100 DNA
atgttccttaagaaactgtctaagttgctgctcgtcgtgctccttgttgccgtttacacacaggtcaacgcgcaaacaagcattactctgacatccaacgcatccggtacgtttgacggttactattacgaactctggaaggatactggcaatacaacaatgacggtctacactcaaggtcgcttttcctgccagtggtcgaacatcaataacgcgttgtttaggaccgggaagaaatacaaccagaattggcagtctcttggcacaatccggatcacgtactctgcgacttacaacccaaacgggaactcctacttgtgtatctatggctggtctaccaacccattggtcgagttctacatcgttgagtcctgggggaactggagaccgcctggtgcctgcctggccgagggctcgctcgtcttggacgcggctaccgggcagagggtccctatcgaaaaggtgcgtccggggatggaagttttctccttgggacctgattacagactgtatcgggtgcccgttttggaggtccttgagagcggggttagggaagttgtgcgcctcagaactcggtcagggagaacgctggtgttgacaccagatcacccgcttttgacccccgaaggttggaaacctctttgtgacctcccgcttggaactccaattgcagtccccgcagaactgcctgtggcgggccacttggccccacctgaagaacgtgttacgctcctggctcttctgttgggggatgggaacacaaagctgtcgggtcggagaggtacacgtcctaatgccttcttctacagcaaagaccccgaattgctcgcggcttatcgccggtgtgcagaagccttgggtgcaaaggtgaaagcatacgtccacccgactacgggggtggttacactcgcaaccctcgctccacgtcctggagctcaagatcctgtcaaacgcctcgttgtcgaggcgggaatggttgctaaagccgaagagaagagggtcccggaggaggtgtttcgttaccggcgtgaggcgttggcccttttcttgggccgtttgttctcgacagacggctctgttgaaaagaagaggatctcttattcaagtgccagtttgggactggcccaggatgtcgcacatctcttgctgcgccttggaattacatctcaactccgttcgagagggccacgggctcacgaggttcttatatcgggccgcgaggatattttgcggtttgctgaacttatcggaccctacctcttgggggccaagagggagagacttgcagcgctggaagctgaggcccgcaggcgtttgcctggacagggatggcacttgcggcttgttcttcctgccgtggcgtacagagtgagcgaggctaaaaggcgctcgggattttcgtggagtgaagccggtcggcgcgtcgcagttgcgggatcgtgtttgtcatctggactcaacctcaaattgcccagacgctacctttctcggcaccggttgtcgctgctcggtgaggcttttgccgaccctgggctggaagcgctcgcggaaggccaagtgctctgggaccctattgttgctgtcgaaccggccggtaaggcgagaacattcgacttgcgcgttccaccctttgcaaacttcgtgagcgaggacctggtggtgcataacaccgtccccctgggccaagtgacaatcgatggcgggacctacgacatctataggacgacacgcgtcaaccagccttccattgtggggacagccacgttcgatcagtactggagcgtgcgcacctctaagcggacttcaggaacagtgaccgtgaccgatcacttccgcgcctgggcgaaccggggcctgaacctcggcacaatagaccaaattacattgtgcgtggagggttaccaaagctctggatcagccaacatcacccagaacaccttctctcagggctcttcttccggcagttcgggtggctcatccggctccacaacgactactcgcatcgagtgtgagaacatgtccttgtccggaccctacgttagcaggatcaccaatccctttaatggtattgcgctgtacgccaacggagacacagcccgcgctaccgttaacttccccgcaagtcgcaactacaatttccgcctgcggggttgcggcaacaacaataatcttgcccgtgtggacctgaggatcgacggacggaccgtcgggaccttttattaccagggcacatacccctgggaggccccaattgacaatgtttatgtcagtgcggggagtcatacagtcgaaatcactgttactgcggataacggcacatgggacgtgtatgccgactacctggtgatacag

SEQ ID NO: 1804 - DNA, 2352 bp, Artificial Sequence
  Synthetic Construct, P77853-Tth-T134-108 DNA
atgttccttaagaaactgtctaagttgctgctcgtcgtgctccttgttgccgtttacacacaggtcaacgcgcaaacaagcattactctgacatccaacgcatccggtacgtttgacggttactattacgaactctggaaggatactggcaatacaacaatgacggtctacactcaaggtcgcttttcctgccagtggtcgaacatcaataacgcgttgtttaggaccgggaagaaatacaaccagaattggcagtctcttggcacaatccggatcacgtactctgcgacttacaacccaaacgggaactcctacttgtgtatctatggctggtctaccaacccattggtcgagttctacatcgttgagtcctgggggaactggagaccgcctggtgcctgcctggccgagggctcgctcgtcttggacgcggctaccgggcagagggtccctatcgaaaaggtgcgtccggggatggaagttttctccttgggacctgattacagactgtatcgggtgcccgttttggaggtccttgagagcggggttagggaagttgtgcgcctcagaactcggtcagggagaacgctggtgttgacaccagatcacccgcttttgacccccgaaggttggaaacctctttgtgacctcccgcttggaactccaattgcagtccccgcagaagtgcctgtggcgggccacttggccccacctgaagaacgtgttacgctcctggctcttctgttgggggatgggaacacaaagctgtcgggtcggagaggtacacgtcctaatgccttcttctacagcaaagaccccgaattgctcgcggcttatcgccggtgtgcagaagcctcgggtgcaaaggtgaaagcatacgtccacccgactacgggggtggttacactcgcaaccctcgctccacgtcctggagctcaagatcctgtcaaacgcctcgttgtcgaggcgggaatggttgctaaagccgaagagaagagggtcccggaggaggtgtttcgttaccggcgtgaggcgttggcccttttcttgggccgtttgttctcgacagacggctctgttgaaaagaagaggatctcttattcaagtgccagtttgggactggcccaggatgtcgcacatctcttgctgcgccttggaattacatctcaactccgttcgatagggccacgggctcacgaggttcttatatcgggccgcgaggatattttgcggtttgctgaacttatcggaccctacctcttgggggccaagagggagagacttgcagcgctggaagctgaggcccgcaggcgtttgcctggacagggatggcacttgcggcttgttcttcctgccgtggcgtacagagtgagcgaggctaaaaggcgctcgggattttcgtggagtgaagccggtcggcgcgtcgcagttgcgggatcgtgtttgtcatctggactcaacctcaaattgcccagacgctacctttctcggcaccggttgtcgctgctcggtgaggcttttgccgaccctgggctggaagcgctcgcggaaggccaagtgctctgggaccctattgttgctgtcgaaccggccggtaaggcgagaacattcgacttgcgcgttccaccctttgcaaacttcgtgagcgaggacctggtggtgcataacaccggtcccctgggccaagtgacaatcgatggcgggacctacgacatctataggacgacacgcgtcaaccagccttccattgtggggacagccacgttcgatcagtactggagcgtgcgcacctctaagcggacttcaggaacagtgaccgtgaccgatcacttccgcgcctgggcgaaccggggcctgaacctcggcacaatagaccaaattacattgtgcgtggagggttaccaaagctctggatcagccaacatcacccagaacaccttctctcagggctcttcttccggcagttcgggtggctcatccggctccacaacgactactcgcatcgagtgtgagaacatgtccttgtccggaccctacgttagcaggatcaccaatccctttaatggtattgcgctgtacgccaacggagacacagcccgcgctaccgttaacttccccgcaagtcgcaactacaatttccgcctgcggggttgcggcaacaacaataatcttgcccgtgtggacctgaggatcgacggacggaccgtcgggaccttttattaccagggcacatacccctgggaggccccaattgacaatgtttatgtcagtgcggggagtcatacagtcgaaatcactgttactgcggataacggcacatgggacgtgtatgccgactacctggtgatacag

SEQ ID NO: 1805 - DNA, 2352 bp, Artificial Sequence
  Synthetic Construct, P77853-Tth-T134-110 DNA
atgttccttaagaaactgtctaagttgctgctcgtcgtgctccttgttgccgtttacacacaggtcaacgcgcaaacaagcattactctgacatccaacgcatccggtacgtttgacggttactattacgaactctggaaggatactggcaatacaacaatgacggtctacactcaaggtcgcttttcctgccagtggtcgaacatcaataacgcgttgtttaggaccgggaagaaatacaaccagaattggcagtctcttggcacaatccggatcacgtactctgcgacttacaacccaaacgggaactcctacttgtgtatctatggctggtctaccaacccattggtcgagttctacatcgttgagtcctgggggaactggagaccgcctggtgcctgcctggccgagggctcgctcgtcttggacgcggctaccgggcagagggtccctatcgaaaaggtgcgtccggggatggaagttttctccttgggacctgattacagactgtatcgggtgcccgttttggaggtccttgagagcggggttagggaagttgtgcgcctcagaactcggtcagggagaacgctggtgttgacaccagatcacccgcttttgacccccgaaggttggaaacctctttgtgacctcccgcttggaactccaattgcagtccccgcagaactgcctgtggcgggccacttggccccacctgaagaacgtgttacgctcctggctcttctgttgggggatgggaacacaaagctgtcgggtcggagaggtacacgtcctaatgccttcttctacagcaaagaccccgaattgctcgcggcttatcgccggtgtgcagaagccttgggtgcaaaggtgaaagcatacgtccacccgactacgggggtggttacactcgcaaccctcgctccacgtcctggagctcaagatcctgtcaaacgcctcgttgtcgaggcgggaatggttgctaaagccgaagagaagagggtcccggaggaggtgtttcgttaccggcgtgaggcgttggcccttttcttgggccgtttgttctcgacagacggctctgttgaaaagaagaggatctcttattcaagtgccagtttgggactggcccaggatgtcgcacatctcttgctgcgccttggaattacatctcaactccgttcgagagggccacgggctcacgaggttcttatatcgggccgcgaggatattttgcggtttgctgaacttatcggaccctacctcttgggggccaagagggagagacttgcagcgctggaagctgaggcccgcaggcgtttgcctggacagggatggcacttgcggcttgttcctcctgccgtggcgtacagagtgagcgaggctaaaaggcgctcgggattttcgtggagtgaagccggtcggcgcgtcgcagttgcgggatcgtgtttgtcatctggactcaacctcaaattgcccagacgctacctttctcggcaccggttgtcgctgctcggtgaggcttttgccgaccctgggctggaagcgctcgcggaaggccaagtgctctgggaccctattgttgctgtcgaaccggccggtaaggcgagaacattcgacttgcgcgttccaccctttgcaaacttcgtgagcgaggacctggtggtgcataacacgtcccccctgggccaagtgacaatcgatggcgggacctacgacatctataggacgacacgcgtcaaccagccttccattgtggggacagccacgttcgatcagtactggagcgtgcgcacctctaagcggacttcaggaacagtgaccgtgaccgatcacttccgcgcctgggcgaaccggggcctgaacctcggcacaatagaccaaattacattgtgcgtggagggttaccaaagctctggatcagccaacatcacccagaacaccttctctcagggctcttcttccggcagttcgggtggctcatccggctccacaacgactactcgcatcgagtgtgagaacatgtccttgtccggaccctacgttagcaggatcaccaatccctttaatggtattgcgctgtacgccaacggagacacagcccgcgctaccgttaacttccccgcaagtcgcaactacaatttccgcctgcggggttgcggcaacaacaataatcttgcccgtgtggacctgaggatcgacggacggaccgtcgggaccttttattaccagggcacatacccctgggaggccccaattgacaatgtttatgtcagtgcggggagtcatacagtcgaaatcactgttactgcggataacggcacatgggacgtgtatgccgactacctggtgatacag

SEQ ID NO: 1806 - DNA, 2349 bp, Artificial Sequence
  Synthetic Construct, P77853-Tth-T134-119 DNA
atgttccttaagaaactgtctaagttgctgctcgtcgtgctccttgttgccgtttacacacaggtcaacgcgcaaacaagcattactctgacatccaacgcatccggtacgtttgacggttactattacgaactctggaaggatactggcaatacaacaatgacggtctacactcaaggtcgcttttcctgccagtggtcgaacatcaataacgcgttgtttaggaccgggaagaaatacaaccagaattggcagtctcttggcacaatccggatcacgtactctgcgacttacaacccaaacgggaactcctacttgtgtatctatggctggtctaccaacccattggtcgagttctacatcgttgagtcctgggggaactggagaccgcctggtgcctgcctggccgagggctcgctcgtcttggacgcggctaccgggcagagggtccctatcgaaaaggtgcgtccggggatggaagttttctccttgggacctgattacagactgtatcgggtgcccgttttggaggtccttgagagcggggttagggaagttgtgcgcctcagaactcggtcagggagaacgctggtgttgacaccagatcacacgcttttgacacccgaaggttggaaacccctttgtgacctcccgcttggaactccaattgcagtccccgcagaactgcctgtggcgggccacttggccccacctgaagaacgtgttacgctcctggctcttctgttgggggatgggaacacaaagctgtcgggtcggagaggtacacgtcctaatgccttcttccacagcaaagaccccgaattgctcgcggcttatcgccggtgtgcagaagccttgggtgcaaaggtgaaagcatacgtccacccgactacgggggtggttacactcgcaaccctcgctccacgtcctggagctcaagatcctgtcaaacgcctcgttgtcgaggcgggaatggttgctaaagccgaagagaagagggtcccggaggaggtgtttcgttaccggcgtgaggcgttggcccttttcttgggccgtttgttctcgacagacggctctgttgaaaagaagaggatctcttattcaagtgccagtttgggactggcccaggatgtcgcacatctcttgctgcgccttggaattacatctcaactccgttcgagagggccacgggctcacgaggttcttatatcgggccgcgaggatattttgcggtttgctgaacttatcggaccctacctcttgggggccaagagggagagacttgcagcgctggaagctgaggcccgcaggcgtttgcctggacagggatggcacttgcggcttgttcttcctgccgtggcgtacagagtgagcgaggctaaaaggcgctcgggattttcgtggagtgaagccggtcggcgcgtcgcagttgcgggatcgtgtttgtcatctggactcaacctcaaattgcccagacgctacctttctcggcaccggttgtcgctgctcggtgaggcttttgccgaccctgggctggaagcgctcgcggaaggccaagtgctctgggaccctattgttgctgtcgaaccggccggtaaggcgagaacattcgacttgcgcgttccaccctttgcaaacttcgtgagcgaggacctggtggtgcataacacgtccctgggccaagtgacaatcgatggcgggacctacgacatctataggacgacacgcgtcaaccagccttccattgtggggacagccacgttcgatcagtactggagcgtgcgcacctctaagcggacttcaggaacagtgaccgtgaccgatcacttccgcgcctgggcgaaccggggcctgaacctcggcacaatagaccaaattacattgtgcgtggagggttaccaaagctctggatcagccaacatcacccagaacaccttctctcagggctcttcttccggcagttcgggtggctcatccggctccacaacgactactcgcatcgagtgtgagaacatgtccttgtccggaccctacgttagcaggatcaccaatccctttaatggtattgcgctgtacgccaacggagacacagcccgcgctaccgttaacttccccgcaagtcgcaactacaatttccgcctgcggggttgcggcaacaacaataatcttgcccgtgtggacctgaggatcgacggacggaccgtcgggaccttttattaccagggcacatacccctgggaggccccaattgacaatgtttatgtcagtgcggggagtcatacagtcgaaatcactgttactgcggataacggcacatgggacgtgtatgccgactacctggtgatacag

SEQ ID NO: 1807 - DNA, 2349 bp, Artificial Sequence
  Synthetic Construct, P77853-Tth-T134-121 DNA
atgttccttaagaaactgtctaagttgctgctcgtcgtgctccttgttgccgtttacacacaggtcaacgcgcaaacaagcattactctgacatccaacgcatccggtacgtttgacggttactattacgaactctggaaggatactggcaatacaacaatgacggtctacactcaaggtcgcttttcctgccagtggtcgaacatcaataacgcgttgtttaggaccgggaagaaatacaaccagaattggcagtctcttggcacaatccggatcacgtactctgcgacttacaacccaaacgggaactcctacttgtgtatctatggctggtctaccaacccattggtcgagttctacatcgttgagtcctgggggaactggagaccgcctggtgcctgcctggccgagggctcgctcgtcttggacgcggctaccgggcagagggtccctatcgaaaaggtgcgtccggggatggaagttttctccttgggacctgattacagactgtatcgggtgcccgttttggaggtccttgagagcggggttagggaagttgtgcgcctcagaactcggtcagggagaacgctggtgttgacaccagatcacacgcttttgacccccgaaggttggaaacctctttgtgacctcccgcttggaactccaattgcagtccccgcagaactgcctgtggcgggccacttggccccacctgaagaacgtgttacgctcctggctcttctgttgggggatgggaacacaaagctgtcgggtcggagaggtacacgtcctaatgccttcttctacagcaaagaccccgaattgctcgcggcttatcgccggtgtgcagaagccttgggtgcaaaggtgaaagcatacgtccacccgactacgggggtggttacactcgcaaccctcgctccacgtcctggagctcaagatcctgtcaaacgcctcgttgtcgaggcgggaatggttgctaaagccgaagagaagagggtcccggaggaggtgtttcgttaccggcgtgaggcgttggcccttttcttgggccgtttgttctcgtcagacggctctgttgaaaagaagaggatctcttattcaagtgccagtttgggactggcccaggatgtcgcacatctcttgctgcgccttggaattacatctcaactccgttcgagagggccacgggctcacgaggttcttatatcgggccgcgaggatattttgcggtttgctgaacttatcggaccctacctcttgggggccaagagggagagacttgcagcgctggaagctgaggcccgcaggcgtttgcctggacagggatggcacttgcggcttgttcttcctgccgtggcgtacagagtgagcgaggctaaaaggcgctcgggattttcgtggagtgaagccggtcggcgcgtcgcagttgcgggatcgtgtttgtcatctggactcaacctcaaattgcccagacgctacctttctcggcaccggttgtcgctgctcggtgaggcttttgccgaccctgggctggaagcgctcgcggaaggccaagtgctctgggaccctattgttgctgtcgaaccggccggtaaggcgagaacattcgacttgcgcgttccaccctttgcaaacttcgtgagcgaggacctggtggtgcataacacgtcccttggccaagtgacaatcgatggcgggacctacgacatctataggacgacacgcgtcaaccagccttccattgtggggacagccacgttcgatcagtactggagcgtgcgcacctctaagcggacttcaggaacagtgaccgtgaccgatcacttccgcgcctgggcgaaccggggcctgaacctcggcacaatagaccaaattacattgtgcgtggagggttaccaaagctctggatcagccaacatcacccagaacaccttctctcagggctcttcttccggcagttcgggtggctcatccggctccacaacgactactcgcatcgagtgtgagaacatgtccttgtccggaccctacgttagcaggatcaccaatccctttaatggtattgcgctgtacgccaacggagacacagcccgcgctaccgttaacttccccgcaagtcgcaactacaatttccgcctgcggggttgcggcaacaacaataatcttgcccgtgtggacctgaggatcgacggacggaccgtcgggaccttttattaccagggcacatacccctgggaggccccaattgacaatgtttatgtcagtgcggggagtcatacagtcgaaatcactgttactgcggataacggcacatgggacgtgtatgccgactacctggtgatacag

SEQ ID NO: 1808 - DNA, 2349 bp, Artificial Sequence
  Synthetic Construct, P77853-Tth-T134-122 DNA
atgttccttaagaaactgtctaagttgctgctcgtcgtgctccttgttgccgtttacacacaggtcaacgcgcaaacaagcattactctgacatccaacgcatccggtacgtttgacggttactattacgaactctggaaggatactggcaatacaacaatgacggtctacactcaaggtcgcttttcctgccagtggtcgaacatcaataacgcgttgtttaggaccgggaagaaatacaaccagaattggcagtctcttggcacaatccggatcacgtactctgcgacttacaacccaaacgggaactcctacttgtgtatctatggctggtctaccaacccattggtcgagttctacatcgttgagtcctgggggaactggagaccgcctggtgcctgcctggccgagggctcgctcgtcttgggcgcggctaccgggcagagggtccctatcgaaaaggtgcgtccggggatggaagttttctccttgggacctgattacagactgtatcgggtgcccgttttggaggtccttgagagcggggttagggaagttgtgcgcctcagaactcggtcagggagaacgctggtgttgacaccagatcaccagcttttgacccccgaaggttggaaacctctttgtgacctcccgcttggaactccaattgcagtccccgcagaactgcctgtggcgggccacttggccccacctgaagaacgtgttacgctcctggctcttctgttgggggatgggaacacaaagctgtcgggtcggagaggtacacgtcctaatgccttcttctacagcaaagaccccgaattgctcgcggcttatcgccggtgtgcagaagccttgggtgcaaaggtgaaagcatacgtccacccgactacgggggtggttacactcgcaacccttgctccacgtcctggagctcaagatcctgtcaaacgcctcgttgtcgaggcgggaatggttgctaaagccgaagagaagagggtcccggaggaggtgtttcgttaccggcgtgaggcgttggcccttttcttgggccgtttgttctcgacagacggctctgttgaaaagaagaggatctcttattcaagtgccagtttgggactggcccaggatgtcgcacatctcttgctgcgccttggaattacatctcaactccgttcgagagggccacgggctcacgaggttcttatatcgggccgcgaggatattttgcggtttgctgaacttatcggaccctacctcttgggggccaagagggagagacttgcagcgctggaagctgaggcccgcaggcgtttgcctggacagggatggcacttgcggcttgttcttcctgccgtggcgtacagagtgagcgaggctaaaaggcgctcgggattttcgtggagtgaagccggtcggcgcgtcgcagttgcgggatcgtgtttgtcatctggactcaacctcaaattgcccagacgctacctttctcggcaccggttgtcgctgctcggtgaggcttttgccgaccctgggctggaagcgctcgcggaaggccaagtgctctgggaccctattgttgctgtcgaaccggccggtaaggcgagaacattcgacttgcgcgttccaccctttgcaaacttcgtgagcgaggacctggtggtgcataacacgtccctgggccaagtgacaatcgatggcgggacctacgacatctataggacgacacgcgtcaaccagccttccattgtggggacagccacgttcgatcagtactggagcgtgcgcacctctaagcggacttcaggaacagtgaccgtgaccgatcacttccgcgcctgggcgaaccggggcctgaacctcggcacaatagaccaaattacattgtgcgtggagggttaccaaagctctggatcagccaacatcacccagaacaccttctctcagggctcttcttccggcagttcgggtggctcatccggctccacaacgactactcgcatcgagtgtgagaacatgtccttgtccggaccctacgttagcaggatcaccaatccctttaatggtattgcgctgtacgccaacggagacacagcccgcgctaccgttaacttccccgcaagtcgcaactacaatttccgcctgcggggttgcggcaacaacaataatcttgcccgtgtggacctgaggatcgacggacggaccgtcgggaccttttattaccagggcacatacccctgggaggccccaattgacaatgtttatgtcagtgcggggagtcatacagtcgaaatcactgttactgcggataacggcacatgggacgtgtatgccgactacctggtgatacag

SEQ ID NO: 1809 - DNA, 2349 bp, Artificial Sequence
  Synthetic Construct, P77853-Tth-T134-144 DNA
atgttccttaagaaactgtctaagttgctgctcgtcgtgctccttgttgccgtttacacacaggtcaacgcgcaaacaagcattactctgacatccaacgcatccggtacgtttgacggttactattacgaactctggaaggatactggcaatacaacaatgacggtctacactcaaggtcgcttttcctgccagtggtcgaacatcaataacgcgttgtttaggaccgggaagaaatacaaccagaattggcagtctcttggcacaatccggatcacgtactctgcgacttacaacccaaacgggaactcctacttgtgtatctatggctggtctaccaacccattggtcgagttctacatcgttgagtcctgggggaactggagaccgcctggtgcctgcctggccgagggctcgctcgtcttggacgcggctaccgggcagagggtccctatcgaaaaggtgcgtccggggatggaagttttctccttgggacctgattacagactgtatcgggtgcccgttttggaggtccttgagagcggggttagggaagttgtgcgcctcagaactcggtcagggagaacgctggtgttgacaccagatcacccgcttttgacccccgaaggttggaaacctctttgtgacctcccgcttggaactccaattgcagtccccgcagaactgcctgtggcgggccacttggccccacctgaagaacgtgttacgctcctggctcttctgttgggggatgggaacacaaagctgtcgggtcggagaggtacacgtcctaatgccttcttctacagcaaagaccccgaattgctcgcggcttatcgccggtgtgcagaagccttgggtgcaaaggtgaaagcatacgtccacccgactacgggggtggttacactcgcaaccctcgctccacgtcctggagctcaagatcctgtcaaacgcctcgttgtcgaggcgggaatggttgctaaagccgaagagaagagggtcccggaggaggtgtttcgttaccggcgtgaggcgttggcccttttcttgggccgtttgttctcgacagacggctctgttgaaaagaagaggatctcttattcaagtgccagtttgggactggcccaggatgtcgcacatctcttgctgcgccttggaattacatctcaactccgttcgagagggccacgggctcacgaggttcttatatcgggccgcgaggatattttgcggtttgctgaacttatcggaccctacctcttgggggccaagagggagagacttgcagcgctggaagctgaggccagcaggcgtttgcctggacagggatggcacttgcggcttgttcttcctgccgtggcgtacagagtgagcgaggctaaaaggcgctcgggattttcgtggagtgaagccggtcggcgcgtcgcagttgcgggatcgtgtttgtcatctggactcaacctcaaattgcccagacgctacctttctcggcaccggttgtcgctgctcggtgaggcttttgccgaccctgggctggaagcgctcgcggaaggccaagtgctctgggaccctattgttgctgtcgaaccggccggtaaggcgagaacattcgacttgcgcgttccaccctttgcaaacttcgtgagcgaggacctggtggtgcataacagtcccctgggccaagtgacaatcgatggcgggacctacgacatctataggacgacacgcgtcaaccagccttccattgtggggacagccacgttcgatcagtactggagcgtgcgcacctctaagcggacttcaggaacagtgaccgtgaccgatcacttccgcgcctgggcgaaccggggcctgaacctcggcacaatagaccaaattacattgtgcgtggagggttaccaaagctctggatcagccaacatcacccagaacaccttctctcagggctcttcttccggcagttcgggtggctcatccggctccacaacgactactcgcatcgagtgtgagaacatgtccttgtccggaccctacgttagcaggatcaccaatccctttaatggtattgcgctgtacgccaacggagacacagcccgcgctaccgttaacttccccgcaagtcgcaactacaatttccgcctgcggggttgcggcaacaacaataatcttgcccgtgtggacctgaggatcgacggacggaccgtcgggaccttttattaccagggcacatacccctgggaggccccaattgacaatgtttatgtcagtgcggggagtcatacagtcgaaatcactgttactgcggataacggcacatgggacgtgtatgccgactacctggtgatacag

SEQ ID NO: 1810 - DNA, 2349 bp, Artificial Sequence
  Synthetic Construct, P77853-Tth-T134-153 DNA
atgttccttaagaaactgtctaagttgctgctcgtcgtgctccttgttgccgtttacacacaggtcaacgcgcaaacaagcattactctgacatccaacgcatccggtacgtttgacggttactattacgaactctggaaggatactggcaatacaacaatgacggtctacactcaaggtcgcttttcctgccagtggtcgaacatcaataacgcgttgtttaggaccgggaagaaatacaaccagaattggcagtctcttggcacaatccggatcacgtactctgcgacttacaacccaaacgggaactcctacttgtgtatctatggctggtctaccaacccattggtcgagttctacatcgttgagtcctgggggaactggagaccgcctggtgcctgcctggccgagggctcgctcgtcttggacgcggctaccgggcagagggtccctatcgaaaaggtgcgtccggggatggaagttttctccttgggacctgattacagactgtatcgggtgcccgttttggaggtccttgagagcggggttagggaagttgtgcgcctcagaactcggtcagggagaacgctggtgttgacaccagatcacctgcttttgacccccgaaggttggaaacctctttgtgacctcccgcttggaactccaattgcagtccccgcagaactgcctgtggcgggccacttggccccacctgaagaacgtgttacgctcctggctcttctgttgggggatgggaacacaaagctgtcgggtcggagaggtacacgtcctaatgccttcttctacggcaaagaccccgaattgctcgcggcttatcgccggtgtgcagaagccttgggtgcaaaggtgaaagcatacgtccacccgaccacgggggtggttacactcgcaaccctcgctccacgtcctggagctcaagatcctgtcaaacgcctcgttgtcgaggcgggaatggttgctaaagccgaagagaagagggtcccggaggaggtgtttcgttaccggcgtgaggcgttggcccttttcttgggccgtttgttctcgacagacggctctgttgaaaagaagaggatctcttattcaagtgccagtttgggactggcccaggatgtcgcacatctcttgctgcgccttggaattacatctcaactccgttcgagagggccgcgggctcacgaggttcttatatcgggccgcgaggatattttgcggtttgctgaacttatcggaccctacctcttgggggccaagagggagagacttgcagcgctggaagctgaggcccgcaggcgtttgcctggacagggatggcacttgcggcttgttcttcctgccgtggcgtacagagtgagcgaggctaaaaggcgctcgggattttcgtggagtgaagccggtcggcgcgtcgcagttgcgggatcgtgtttgtcatctggactcaacctcaaattgcccagacgttacctttctcggcaccggttgtcgctgctcggtgaggcttttgccgaccctgggctggaagcgctcgcggaaggccaagtgctctgggaccctattgttgctgtcgaaccggccggtagggcgagaacattcgacttgcgcgttccaccctatgcaaacttcgtgagcgaggacctggtggtgcataacacgtccctgggccaagtgacaatcgatggcgggacctacgacatctataggacgacacgcgtcaaccagccttccattgtggggacagccacgttcgatcagtactggagcgtgcgcacctctaagcggacttcaggaacagtgaccgtgaccgatcacttccgcgcctgggcgaaccggggcctgaacctcggcacaatagaccaaattacattgtgcgtggagggttaccaaagctctggatcagccaacatcacccagaacaccttctctcagggctcttcttccggcagttcgggtggctcatccggctccacaacgactactcgcatcgagtgtgagaacatgtccttgtccggaccctacgttagcaggatcaccaatccctttaatggtattgcgctgtacgccaacggagacacagcccgcgctaccgttaacttccccgcaagtcgcaactacaatttccgcctgcggggttgcggcaacaacaataatcttgcccgtgtggacctgaggatcgacggacggaccgtcgggaccttttattaccagggcacatacccctgggaggccccaattgacaatgtttatgtcagtgcggggagtcatacagtcgaaatcactgttactgcggataacggcacatgggacgtgtatgccgactacctggtgatacag

SEQ ID NO: 1811 - DNA, 2352 bp, Artificial Sequence
  Synthetic Construct, P77853-Tth-T134-167 DNA
atgttccttaagaaactgtctaagttgctgctcgtcgtgctccttgttgccgtttacacacaggtcaacgcgcaaacaagcattactctgacatccaacgcatccggtacgtttgacggttactattacgaactctggaaggatactggcaatacaacaatgacggtctacactcaaggtcgcttttcctgccagtggtcgaacatcaataacgcgttgtttaggaccgggaagaaatacaaccagaattggcagtctcttggcacaatccggatcacgtactctgcgacttacaacccaaacgggaactcctacttgtgtatctatggctggtctaccaacccattggtcgagttctacatcgttgagtcctgggggaactggagaccgcctggtgcctgcctggccgagggctcgctcgtcttggacgcggctaccgggcagagggtccctatcgaaaaggtgcgtcaggggatggaagttttctccttgggacctgattacagactgtatcgggtgcccgttttggaggtccttgagagcggggttagggaagttgtgcgcctcagaactcggtcagggagaacgctggtgttgacaccagatcacccgcttttgacccccgaaggttggaaacctctttgtgacctcccgcttggaactccaattgcagtccccgcagaactgcctgtggcgggccacttggccccacctgaagaacgtgttacgctcctggctcttctgttgggggatgggaacacaaagctgtcgggtcggagaggtacacgtcctaatgccttcttctacagcaaagaccccgaattgctcgcggcttatcgccggtgtgcagaagccttgggtgcaaaggtgaaagcatacgtccacccgactacgggggtggttacactcgcaaccctcgctccacgtcctggagctcaagatcctgtcaaacgcctcgttgtcgaggcgggaatggttgctaaagccgaagagaagagggtcccggaagaggtgtttcgttaccggcgtgaggcgttggcccttttcttgggccgtttgttctcgacagacggctctgttgaaaagaagaggatctcttattcaagtgccagtttgggactggcccaggatgtcgcacatctcttgctgcgccttggaattacatctcaactccgttcgagagggccacgggctcacgaggttcttatatcgggccgcgaggatattttgcggtttgctgaacttatcggaccctacctcttgggggccaagagggagagacttgcagcgctggaagctgaggcccgcaggcgtttgcctggacagggatggcacttgcggcttgttcttcctgccgtggcgtacagagtgagcgaggctaaaaggcgctcgggattttcgtggagtgaagccggtcggcgcgtcgcagttgcgggatcgtgtttgtcatctggactcaacctcaaattgcccagacgctacctttctcggcaccggttgtcgctgctcggtgaggcttttgccgaccctgggctggaagcgctcgcggaaggccaagtgctctgggaccctattgttgctgtcgaaccggccggtaaggcgagaacattcgacttgcgcgttccaccctttgcaaacttcgtgagcgaggacctggtggtgcataacaacgtccccctgggccaagtgacaatcgatggcgggacctacgacatctataggacgacacgcgtcaaccagccttccattgtggggacagccacgttcgatcagtactggagcgtgcgcacctctaagcggacttcaggaacagtgaccgtgaccgatcacttccgcgcctgggcgaaccggggcctgaacctcggcacaatagaccaaattacattgtgcgtggagggttaccaaagctctggatcagccaacatcacccagaacaccttctctcagggctcttcttccggcagttcgggtggctcatccggctccacaacgactactcgcatcgagtgtgagaacatgtccttgtccggaccctacgttagcaggatcaccaatccctttaatggtattgcgctgtacgccaacggagacacagcccgcgctaccgttaacttccccgcaagtcgcaactacaatttccgcctgcggggttgcggcaacaacaataatcttgcccgtgtggacctgaggatcgacggacggaccgtcgggaccttttattaccagggcacatacccctgggaggccccaattgacaatgtttatgtcagtgcggggagtcatacagtcgaaatcactgttactgcggataacggcacatgggacgtgtatgccgactacctggtgatacag

SEQ ID NO: 1812 - DNA, 2349 bp, Artificial Sequence
  Synthetic Construct, P77853-Tth-T134-168 DNA
atgttccttaagaaactgtctaagttgctgctcgtcgtgctccttgttgccgtttacacacaggtcaacgcgcaaacaagcattactctgacatccaacgcatccggtacgtttgacggttactattacgaactctggaaggatactggcaatacaacaatgacggtctacactcaaggtcgcttttcctgccagtggtcgaacatcaataacgcgttgtttaggaccgggaagaaatacaaccagaattggcagtctcttggcacaatccggatcacgtactctgcgacttacaacccaaacgggaactcctacttgtgtatctatggctggtctaccaacccattggtcgagttctacatcgttgagtcctgggggaactggagaccgcctggtgcctgcctggccgagggctcgctcgtcttggacgcggctaccgggcagagggtccctatcgaaaaggtgcgtccggggatggaagttttctccttgggacctgattacagactgtatcgggtgcccgttttggaggtccttgagagcggggttagggaagttgtgcgcctcagaactcggtcagggagaacgctggtgttgacaccagatcacctgcttttgacccccgaaggttggaaacctctttgtgacctcccgcttgaaactccaattgcagtccccgcagaactgcctgtggcgggccacttggccccacctgaagaacgtgttacgctcctggctcttctgttgggggatgggaacacaaagctgtcgggtcggagaggtacacgtcctaatgccttcttctacagcaaagaccccgaattgctcgcggcttatcgccggtgtgcagaagccttgggtgcaaaggtgaaagcatacgtccacccgactacgggggtggttacactcgcaaccctcgctccacgtcctggagctcaagatcctgtcaaacgcctcgttgtcgaggcgggaatggttgctaaagccgaagagaagagggtcccggaggaggtgtttcgttaccggcgtgaggcgttggcccttttcttgggccgtttgttctcgacagacggctctgttgaaaagaagaggatctcttattcaagtgccagtttgggactggcccaggatgtcgcacatctcttgctgcgccttggaattacatctcaactccgttcgagagggccacgggctcacgaggttcttatatcgggccgcgaggatattttgcggtttgctgaacttatcggaccctacctcttgggggccaagagggagagacttgcagcgctggaagctgaggcccgcaggcgtttgcctggacagggatggcacttgcggcttgttcttcctgccgtggcgtacagagtgagcgaggctaaaaggcgctcgggattttcgtggagtgaagccggtcggcgcgtcgcagttgcgggatcgtgtttgtcatctggactcaacctcaaattgcccagacgctacctttctcggcaccggttgtcgctgctcggtgaggcttttgccgaccctgggctggaagcgctcgcggaaggccaagtgttctgggaccctattgttgctgtcgaaccggccggtaaggcgagaacattcgacttgcgcgttccaccctttgcaaacttcgtgagcgaggacctggtggtgcataacacgtccctgggccaagtgacaatcgatggcgggacctacgacatctataggacgacacgcgtcaaccagccttccattgtggggacagccacgttcgatcagtactggagcgtgcgcacctctaagcggacttcaggaacagtgaccgtgaccgatcacttccgcgcctgggcgaaccggggcctgaacctcggcacaatagaccaaattacattgtgcgtggagggttaccaaagctctggatcagccaacatcacccagaacaccttctctcagggctcttcttccggcagttcgggtggctcatccggctccacaacgactactcgcatcgagtgtgagaacatgtccttgtccggaccctacgttagcaggatcaccaatccctttaatggtattgcgctgtacgccaacggagacacagcccgcgctaccgttaacttccccgcaagtcgcaactacaatttccgcctgcggggttgcggcaacaacaataatcttgcccgtgtggacctgaggatcgacggacggaccgtcgggaccttttattaccagggcacatacccctgggaggccccaattgacaatgtttatgtcagtgcggggagtcatacagtcgaaatcactgttactgcggataacggcacatgggacgtgtatgccgactacctggtgatacag

SEQ ID NO: 1813 - DNA, 2352 bp, Artificial Sequence
  Synthetic Construct, P77853-Tth-T134-173 DNA
atgttccttaagaaactgtctaagttgctgctcgtcgtgctccttgttgccgtttacacacaggtcaacgcgcaaacaagcattactctgacatccaacgcatccggtacgtttgacggttactattacgaactctggaaggatactggcaatacaacaatgacggtctacactcaaggtcgcttttcctgccagtggtcgaacatcaataacgcgttgtttaggaccgggaagaaatacaaccagaattggcagtctcttggcacaatccggatcacgtactctgcgacttacaacccaaacgggaactcctacttgtgtatctatggctggtctaccaacccattggtcgagttctacatcgttgagtcctgggggaactggagaccgcctggtgcctgcctggccgagggctcgctcgtcttggacgcggctaccgggcagagggtccctatcgaaaaggtgcgtccggggatggaagttttctccttgggacctgattacagactgtatcgggtgcccgttttggaggtccttgagagcggggttagggaagttgtgcgcctcagaactcggtcagggagaacgctggtgttgacaccagatcacccgcttttgacccccgaaggttggaaacctctttgtgacctcccgcttggaactccaattgcagtccccgcagaactgcatgtggcgggccacttggccccacctgaagaacgtgttacgctcctggctcttctgttgggggatgggaacacaaagctgtcgggtcggagaggtacacgtcctaatgccttcttctacagcaaagaccccgaattgctcgcggcttatcgccggtgtgcagaagccttgggtgcaaaggtgaaagcatacgtccacccgactacgggggtggttacactcgcaaccctcgctccacgtcctggagctcaagatcctgtcaaacgcctcgttgtcgaagcgggaatggttgctaaagccgaagagaagagggtcccggaggaggtgtttcgttaccggcgtgaggcgttggcccttttcttgggccgtttgttctcgacagacggctctgttgaaaagaagaggatctcttattcaagtgccagtttgggactggcccaggatgtcgcacatctcttgctgcgccttggaattacatctcaactccgttcgagagggccacgggctcacgaggttcttatatcgggccgcgaggatattttgcggtttgctgaacttatcggaccctacctcttgggggccaagagggagagacttgcagcgctggaagctgaggcccgcaggcgtttgcctggacagggatggcacttgcggcttgttcttcctgccgtggcgtacagagtgagcgaggctaaaaggcgctcgggattttcgtggagtgaagccggtcggcgcgtcgcagttgcgggatcgtgtttgtcatctggactcaacctcaaattgcccagacgctacctttctcggcaccggttgtcgctgctcggtgaggcttttgccgaccctgggctggaagcgctcgcggaaggccaagtgctctgggaccctattgttgctgtcgaaccggccggtaaggcgagaacattcgacttgcgcgttccaccctttgcaaacttcgtgagcgaggacctggtggtgcataacacgtcccccctgggccaagtgacaatcgatggcgggacctacgacatctataggacgacacgcgtcaaccagccttccattgtggggacagccacgttcgatcagtactggagcgtgcgcacctctaagcggacttcaggaacagtgaccgtgaccgatcacttccgcgcctgggcgaaccggggcctgaacctcggcacaatagaccaaattacattgtgcgtggagggttaccaaagctctggatcagccaacatcacccagaacaccttctctcagggctcttcttccggcagttcgggtggctcatccggctccacaacgactactcgcatcgagtgtgagaacatgtccttgtccggaccctacgttagcaggatcaccaatccctttaatggtattgcgctgtacgccaacggagacacagcccgcgctaccgttaacttccccgcaagtcgcaactacaatttccgcctgcggggttgcggcaacaacaataatcttgcccgtgtggacctgaggatcgacggacggaccgtcgggaccttttattaccagggcacatacccctgggaggccccaattgacaatgtttatgtcagtgcggggagtcatacagtcgaaatcactgttactgcggataacggcacatgggacgtgtatgccgactacctggtgatacag

SEQ ID NO: 1814 - DNA, 2349 bp, Artificial Sequence
  Synthetic Construct, P77853-Tth-T134-174 DNA
atgttccttaagaaactgtctaagttgctgctcgtcgtgctccttgttgccgtttacacacaggtcaacgcgcaaacaagcattactctgacatccaacgcatccggtacgtttgacggttactattacgaactctggaaggatactggcaatacaacaatgacggtctacactcaaggtcgcttttcctgccagtggtcgaacatcaataacgcgttgtttaggaccgggaagaaatacaaccagaattggcagtctcttggcacaatccggatcacgtactctgcgacttacaacccaaacgggaactcctacttgtgtatctatggctggtctaccaacccattggtcgagttctacatcgttgagtcctgggggaactggagaccgcctggtgcctgcctggccgagggctcgctcgtcttggacgcggctaccgggcagagggtccctatcgaaaaggtgcgtccggggatggaagttttctccttgggacctgattacagactgtatcgggtgcccgttttggaggtccttgagagcggggttagggaagttgtgcgcctcagaactcggtcagggagaacgctggtgttgacaccagatcacccgcttttgacccccgaaggttggaaacctctttgtgacctcccgcttggaactccaattgcagtccccgcagaactgcctgtggcgggccacttggccccacctgaagaacgtgttacgctcctggctcttctgttgggggatgggaacacaaagctgtcgggtcggagaggtacacgtcctaatgccttcttctacagcaaagaccccgaattgctcgcggcttatcgccggtgtgcagaagccttgggtgcaaaggtgaaagcatacgtccacccgactacgggggtggttacactcgcaaccctcgctccacgtcctggagctcaagatcctgtcaaacgcctcgttgtcgaggcgggaatggttgctaaagccgaagagaagagggtcccggaggaggtgtttcgttaccggcgtgaggcgttggcccttttcttgggccgtttgttctcgacagacggctctgttgaaaagaagaggatctcttattcaagtgccagtttgggactggcccaggatgtcgcacatctcttgctgcgccttggaattacatctcaactccgttcgagagggccacgggctcacgaggttcttatatcgggccgcgaggatattttgcggtttgctgaacttatcggaccctacctcttgggggccaagagggagagacttgcagcgctggaagctgaggcccgcaggcgtttgcctggacagggatggcacttgcggcttgttcttcctgccgtggcgtacagagtgagcgaggctaaaaggcgctcgggattttcgtggagtgaagccggtcggcgcgtcgcagttgcgggatcgtgtttgtcatctggactcaacctcaaattgcccagacgctacctttctcggcaccggttgtcgctgctcggtgaggcttttgccgaccctgggctggaagcgctcgcggaaggccaagtgctctgggaccctattgttgctgtcgaaccggccggtaaggcgagaacattcgacttgcgcgttccaccctttgcaaacttcgtgagcgaggacctggtggtgcataacaagtccctgggccaagtgacaatcgatggcgggacctacgacatctataggacgacacgcgtcaaccagccttccattgtggggacagccacgttcgatcagtactggagcgtgcgcacctctaagcggacttcaggaacagtgaccgtgaccgatcacttccgcgcctgggcgaaccggggcctgaacctcggcacaatagaccaaattacattgtgcgtggagggttaccaaagctctggatcagccaacatcacccagaacaccttctctcagggctcttcttccggcagttcgggtggctcatccggctccacaacgactactcgcatcgagtgtgagaacatgtccttgtccggaccctacgttagcaggatcaccaatccctttaatggtattgcgctgtacgccaacggagacacagcccgcgctaccgttaacttccccgcaagtcgcaactacaatttccgcctgcggggttgcggcaacaacaataatcttgcccgtgtggacctgaggatcgacggacggaccgtcgggaccttttattaccagggcacatacccctgggaggccccaattgacaatgtttatgtcagtgcggggagtcatacagtcgaaatcactgttactgcggataacggcacatgggacgtgtatgccgactacctggtgatacag

SEQ ID NO: 1815 - DNA, 2352 bp, Artificial Sequence
  Synthetic Construct, P77853-Tth-T134-175 DNA
atgttccttaagaaactgtctaagttgctgctcgtcgtgctccttgttgccgtttacacacaggtcaacgcgcaaacaagcattactctgacatccaacgcatccggtacgtttgacggttactattacgaactctggaaggatactggcaatacaacaatgacggtctacactcaaggtcgcttttcctgccagtggtcgaacatcaataacgcgttgtttaggaccgggaagaaatacaaccagaattggcagtctcttggcacaatccggatcacgtactctgcgacttacaacccaaacgggaactcctacttgtgtatctatggctggtctaccaacccattggtcgagttctacatcgttgagtcctgggggaactggagaccgcctggtgcctgcctggccgagggctcgctcgtcttggacgcggctaccgggcagagggtccctatcgaaaaggtgcgtccggggatggaagttttctccttgggacctgattacagactgtatcgggtgcccgttttggaggtccttgagagcggggttagggaagttgtgcgcctcagaactcggtcagggagaacgctggtgttgacaccagatcacccgcttttgacccccgaaggttggaaacctctttgtgacctcccgcttggaactccaattgcagtccccgcagaactgcctgtggcgggccacttggccccacctgaagaacgtgttacgctcctggctcttctgttgggggatgggaacacaaagctgtcgggtcggagaggtacacgtcctaatgccttcttctacagcaaagaccccgaattgctcgcggcttatcgccggtgtgcagaagccttgggtgcaaaggtgaaagcatacgtccacccgactacgggggtggttacactcgcaaccctcgctccacgtcctggagctcaagatcctgtcaaacgcctcgttgtcgaggcgggaatggttgctaaagccgaagagaagagggtcccggaggaggtgtttcgttaccggcgtgaggcgttggcccttttcttgggccgtttgttctcgacagacggctctgttgaaaagaagaggatctcttattcaagtgccagtttgggactggcccaggatgtcgcacatctcttgctgcgccttggaattacatctcaactccgttcgagagggccacgggctcacgaggttcttatatcgggccgcgaggatattttgcggtttgctgaacttatcggaccctacctcttgggggccaagagggagagacttgcagcgctggaagctgaggcccgcaggcgtttgcctggacagggatggcacttgcggcttgttcttcctgccgtggcgtacagagtgagcgaggctaaaaggcgctcgggattttcgtggagtgaagccggtcggcgcgtcgcagttgcgggatcgtgtttgtcatctggactcaacctcaaattgcccagacgctacctttctcggcaccggttgtcgctgctcggtgaggcttttgccgaccctgggctggaagcgctcgcggaaggccaagtgctctgggaccctattgttgctgtcgaaccggccggtaaggcgagaacattcgacttgcgcgttccaccctttgcaaacttcgtgagcgaggacctggtggtgcataacacgtcccccctgggccaagtgacaatcgatggcgggacctacgacatctataggacgacacgcgtcaaccagccttccattgtggggacagccacgttcgatcagtactggagcgtgcgcacctctaagcggacttcaggaacagtgaccgtgaccgatcacttccgcgcctgggcgaaccggggcctgaacctcggcacaatagaccaaattacattgtgcgtggagggttaccaaagctctggatcagccaacatcacccagaacaccttctctcagggctcttcttccggcagttcgggtggctcatccggctccacaacgactactcgcatcgagtgtgagaacatgtccttgtccggaccctacgttagcaggatcaccaatccctttaatggtattgcgctgtacgccaacggagacacagcccgcgctaccgttaacttccccgcaagtcgcaactacaatttccgcctgcggggttgcggcaacaacaataatcttgcccgtgtggacctgaggatcgacggacggaccgtcgggaccttttattaccagggcacatacccctgggaggccccaattgacaatgtttatgtcagtgcggggagtcatacagtcgaaatcactgttactgcggataacggcacatgggacgtgtatgccgactacctggtgatacag

SEQ ID NO: 1816 - DNA, 2352 bp, Artificial Sequence
  Synthetic Construct, P77853-Tth-T134-180 DNA
atgttccttaagaaactgtctaagttgctgctcgtcgtgctccttgttgccgtttacacacaggtcaacgcgcaaacaagcattactctgacatccaacgcatccggtacgtttgacggttactattacgaactctggaaggatactggcaatacaacaatgacggtctacactcaaggtcgcttttcctgccagtggtcgaacatcaataacgcgttgtttaggaccgggaagaaatacaaccagaattggcagtctcttggcacaatccggatcacgtactctgcgacttacaacccaaacgggaactcctacttgtgtatctatggctggtctaccaacccattggtcgagttctacatcgttgagtcctgggggaactggagaccgcctggtgcctgcctggccgagggctcgctcgtcttggacgcggctaccgggcagagggtccctatcgaaaaggtgcgtccggggatggaagttttctccttgggacctgattacagactgtatcgggtgcccgttttggaggtccttgagagcggggttagggaagttgtgcgcctcagaactcggtcagggagaacgctggtgttgacaccagatcacccgcttttgacccccgaaggttggaaacctctttgtgacctcccgcttggaactccaattgcagtccccgcagaactgcctgtggcgggccacttggccccacctgaagaacgtgttacgctcctggctcttctgttgggggatgggaacacaaagctgtcgggtcggagaggtacacgtcctaatgccttcttctacagcaaagaccccgaattgctcgcggcttatcgccggtgtgcagaagccttgggtgcaaaggtgaaagcatacgtccacccgactacgggggtggttacactcgcaaccctcgctccacgtcctggagctcaagatcctgtcaaacgcctcgttgtcgaggcgggaatggttgctaaagccgaagagaagagggtcccggaggaggtgtttcgttaccggcgtgaggcgttggcccttttcttgggccgtttgttctcgacagacggctctgttgaaaagaagaggatctcttattcaagtgccagtttgggactggcccaggatgtcgcacatctcttgctgcgccttggaattacatctcaactccgttcgagagggccacgggctcacgaggttcttatatcgggccgcgaggatattttgcggtttgctgaacttatcggaccctacctcttgggggccaagagggagagacttgcagcgctggaagctgaggcccgcaggcgtttgcctggacagggatggcacttgcggcttgttcttcctgccgtggcgtacagagtgagcgaggctaaaaggcgctcgggattttcgtggagtgaagccggtcggcgcgtcgcagttgcgggatcgtgtttgtcatctggactcaacctcaaattgcccagacgctacctttctcggcaccggttgtcgctgctcggtgaggcttttgccgaccctgggctggaagcgctcgcggaaggccaagtgctctgggaccctattgttgctgtcgaaccggccggtaaggcgagaacattcgacttgcgcgttccaccctttgcaaacttcgtgagcgaggacctggtggtgcataacacgtcccccatgggccaagtgacaatcgatggcgggacctacgacatctataggacgacacgcgtcaaccagccttccattgtggggacagccacgttcgatcagtactggagcgtgcgcacctctaagcggacttcaggaacagtgaccgtgaccgatcacttccgcgcctgggcgaaccggggcctgaacctcggcacaatagaccaaattacattgtgcgtggagggttaccaaagctctggatcagccaacatcacccagaacaccttctctcagggctcttcttccggcagttcgggtggctcatccggctccacaacgactactcgcatcgagtgtgagaacatgtccttgtccggaccctacgttagcaggatcaccaatccctttaatggtattgcgctgtacgccaacggagacacagcccgcgctaccgttaacttccccgcaagtcgcaactacaatttccgcctgcggggttgcggcaacaacaataatcttgcccgtgtggacctgaggatcgacggacggaccgtcgggaccttttattaccagggcacatacccctgggaggccccaattgacaatgtttatgtcagtgcggggagtcatacagtcgaaatcactgttactgcggataacggcacatgggacgtgtatgccgactacctggtgatacag

SEQ ID NO: 1817 - DNA, 2352 bp, Artificial Sequence
  Synthetic Construct, P77853-Tth-T134-190 DNA
atgttccttaagaaactgtctaagttgctgctcgtcgtgctccttgttgccgtttacacacaggtcaacgcgcaaacaagcattactctgacatccaacgcatccggtacgtttgacggttactattacgaactctggaaggatactggcaatacaacaatgacggtctacactcaaggtcgcttttcctgccagtggtcgaacatcaataacgcgttgtttaggaccgggaagaaatacaaccagaattggcagtctcttggcacaatccggatcacgtactctgcgacttacaacccaaacgggaactcctacttgtgtatctatggctggtctaccaacccattggtcgagttctacatcgttgagtcctgggggaactggagaccgcctggtgcctgcctggccgagggctcgctcgtcttgggcgcggctaccgggcagagggtccctatcgaaaaggtgcgtccggggatggaagttttctccttgggacctgattacagactgtatcgggtgcccgttttggaggtccttgagagcggggttagggaagttgtgcgcctcagaactcggtcagggagaacgctggtgttgacaccagatcacccgcttttgacccccgaaggttggaaacctctttgtgacctcccgcttggaactccaattgcagtccccgcagaactgcctgtggcgggccacttggccccacctgaagaacgtgttacgctcctggctcttctgttgggggatgggaacacaaagctgtcgggtcggagaggtacacgtcctaatgccttcttctacagcaaagaccccgaattgctcgcggcttatcgccggtgtgcagaagccttgggtgcaaaggtgaaagcatacgtccacccgactacgggggtggttacactcgcaaccctcgctccacgtcctggagctcaagatcctgtcaaacgcctcgttgtcgaggcgggaatggttgctaaagccgaagagaagagggtcccggaggaggtgtttcgttaccggcgtgaggcgttggcccttttcttgggccgtttgttctcgacagacggctctgttgaaaagaagaggatctcttattcaagtgccagtttgggactggcccaggatgtcgcacatctcttgctgcgccttggaattacatctcaactccgttcgagagggccacgggctcacgaggttcttatatcgggccgcgaggatattttgcggtttgctgaacttatcggaccctacctcttgggggccaagagggagagacttgcagcgctggaagctgaggcccgcaggcgtttgcctggacagggatggcacttgcggcttgttcttcctgccgtggcgtacatagtgagcgaggctaaaaggcgctcgggattttcgtggagtgaagccggtcggcgcgtcgtagttgcgggatcgtgtttgtcatctggactcaacctcaaattgcccagacgctacctttctcggcaccggttgtcgctgctcggtgaggcttttgccgaccctgggctggaagcgctcgcggaaggccaagtgctctgggaccctattgtcgctgtcgaaccggccggtaaggcgagaacattcgacttgcgcgttccaccctttgcaaacttcgtgagcgaggacctggtggtgcataaccaacgttccctgggccaagtgacaatcgatggcgggacctacgacatctataggacgacacgcgtcaaccagccttccattgtggggacagccacgttcgatcagtactggagcgtgcgcacctctaagcggacttcaggaacagtgaccgtgaccgatcacttccgcgcctgggcgaaccggggcctgaacctcggcacaatagaccaaattacattgtgcgtggagggttaccaaagctctggatcagccaacatcacccagaacaccttctctcagggctcttcttccggcagttcgggtggctcatccggctccacaacgactactcgcatcgagtgtgagaacatgtccttgtccggaccctacgttagcaggatcaccaatccctttaatggtattgcgctgtacgccaacggagacacagcccgcgctaccgttaacttccccgcaagtcgcaactacaatttccgcctgcggggttgcggcaacaacaataatcttgcccgtgtggacctgaggatcgacggacggaccgtcgggaccttttattaccagggcacatacccctgggaggccccaattgacaatgtttatgtcagtgcggggagtcatacagtcgaaatcactgttactgcggataacggcacatgggacgtgtatgccgactacctggtgatacag

SEQ ID NO: 1818 - DNA, 2352 bp, Artificial Sequence
  Synthetic Construct, P77853-Tth-T134-191 DNA
atgttccttaagaaactgtctaagttgctgctcgtcgtgctccttgttgccgtttacacacaggtcaacgcgcaaacaagcattactctgacatccaacgcatccggtacgtttgacggttactattacgaactctggaaggatactggcaatacaacaatgacggtctacactcaaggtcgcttttcctgccagtggtcgaacatcaataacgcgttgtttaggaccgggaagaaatacaaccagaattggcagtctcttggcacaatccggatcacgtactctgcgacttacaacccaaacgggaactcctacttgtgtatctatggctggtctaccaacccattggtcgagttctacatcgttgagtcctgggggaactggagaccgcctggtgcctgcctggccgagggctcgctcgtcttggacgcggctaccgggcagagggtccctatcgaaaaggtgcgtccggggatggaagttttctccttgggacctgattacagactgtatcgggtgcccgttttggaggtccttgagagcggggttagggaagttgtgcgcctcagaactcggtcagggagaacgctggtgttgacaccagatcacccgcttttgacccccgaaggttggaaacctctttgtgacctcccgcttggaactccaattgcagtccccgcagaactgcctgtggcgggccacttggccccacctgaagaacgtgttacgctcctggctcttctgttgggggatgggaacacaaagctgtcgggtcggagaggtacacgtcctaatgccttcttctacagcaaagaccccgaattgctcgcggcttatcgccggtgtgcagaagccttgggtgcaaaggtgaaagcatacgttcacccgactacgggggtggttacactcgcaaccctcgctccacgtcctggagctcaagatcctgtcaaacgcctcgttgtcgaggcgggaatggttgctaaagccgaagagaagagggtcccggaggaggtgtttcgttaccggcgtgaggcgttggcacttttcttgggccgtttgttctcgacagacggctctgttgaaaagaagaggatctcttattcaagtgccagtttgggactggcccaggatgtcgcacatctcttgctgcgccttggaattacatctcaactccgttcgagagggccacgggctcacgaggttcttatatcgggccgcgaggatattttgcggtttgctgaacttatcggaccctacctcttgggggccaagagggagagacttgcagcgctggaagctgaggcccgcaggcgtttgcctggacagggatggcacttgcggcttgttcttcctgccgtggcgtacagagtgagcgaggctaaaaggcgctcgggattttcgtggagtgaagccggtcggcgcgtcgcagttgcgggatcgtgtttgtcatctggactcaacctcaaattgcccagacgctacctttctcggcaccggttgtcgctgctcggtgaggcttttgccgaccctgggctggaagcgctcgcggaaggccaagtgctctgggaccctattgttgctgtcgaaccggccggtaaggcgagaacattcgacttgcgcgttccaccctttgcaaacttcgtgagcgaggacctggtggtgcataacacgtcccccctgggccaagtgacaatcgatggcgggacctacgacatctataggacgacacgcgtcaaccagccttccattgtggggacagccacgttcgatcagtactggagcgtgcgcacctctaagcggacttcaggaacagtgaccgtgaccgatcacttccgcgcctgggcgaaccggggcctgaacctcggcacaatagaccaaattacattgtgcgtggagggttaccaaagctctggatcagccaacatcacccagaacaccttctctcagggctcttcttccggcagttcgggtggctcatccggctccacaacgactactcgcatcgagtgtgagaacatgtccttgtccggaccctacgttagcaggatcaccaatccctttaatggtattgcgctgtacgccaacggagacacagcccgcgctaccgttaacttccccgcaagtcgcaactacaatttccgcctgcggggttgcggcaacaacaataatcttgcccgtgtggacctgaggatcgacggacggaccgtcgggaccttttattaccagggcacatacccctgggaggccccaattgacaatgtttatgtcagtgcggggagtcatacagtcgaaatcactgttactgcggataacggcacatgggacgtgtatgccgactacctggtgatacag

SEQ ID NO: 1819 - DNA, 2352 bp, Artificial Sequence
  Synthetic Construct, P77853-Tth-T134-193 DNA
atgttccttaagaaactgtctaagttgctgctcgtcgtgctccttgttgccgtttacacacaggtcaacgcgcaaacaagcattactctgacatccaacgcatccggtacgtttgacggttactattacgaactctggaaggatactggcaatacaacaatgacggtctacactcaaggtcgcttttcctgccagtggtcgaacatcaataacgcgttgtttaggaccgggaagaaatacaaccagaattggcagtctcttggcacaatccggatcacgtactctgcgacttacaacccaaacgggaactcctacttgtgtatctatggctggtctaccaacccattggtcgagttctacatcgttgagtcctgggggaactggagaccgcctggtgcctgcctggccgagggctcgctcgtcttggacgcggctaccgggcagagggtccctatcgaaaaggtgcgtccggggatggaagttttctccttgggacctgattacagactgtatcgggtgcccgttttagaggtccttgagagcggggttagggaagttgtgcgcctcagaactcggtcagggagaacgctggtgttgacaccagatcacccgcttttgacccccgaaggttggaaacctctttgtgacctcccgcttggaactccaattgcagtccccgcagaactgcctgtggcgggccacttggccccacctgaagaacgtgttacgctcctggctcttctgttgggggatgggaacacaaagctgtcgggtcggagaggtacacgtcctaatgccttcttctacagcaaagaccccgaattgctcgcggcttatcgccggtgtgcagaagccttgggtacaaaggtgaaagcatacgtccacccgactacgggggtggttacactcgcaaccctcgctccacgtcctggagctcaagatcctgtcaaacgcctcgttgtcgaggcgggaatggttgctaaagccgaagagaagagggtcccggaggaggtgtttcgttaccggcgtgaggcgttggcccttttcttgggccgtttgttctcgacagacggctctgttgaaaagaagaggatctcttattcaagtgccagtttgggactggcccaggatgtcgcacatctcttgctgcgccttggaattacatctcaactccgttcgagagggccacgggctcacgaggttcttatatcgggccgcgaggatattttgcggtttgctgaacttatcggaccctacctcttgggggccaagagggagagacttgcagcgctggaagctgaggcccgcaggcgtttgcctggacagggatggcacttgcggcttgttcttcctgccgtggcgtacagagtgagcgaggctaaaaggcgctcgggattttcgtggagtgaagccggtcggcgcgtcgcagttgcgggatcgtgtttgtcatctggactcaacctcaaattgcccagacgctacctttctcggcaccggttgtcgctgctcggtgaggcttttgccgaccctgggctggaagcgctcgcggaaggccaagtgctctgggaccctattgttgctgtcgaaccggccggtaaggcgagaacattcgacttgcgcgttccaccctttgcaaacttcgtgagcgaggacctggtggtgcataacacggtccccctgggccaagtgacaatcgatggcgggacctacgacatctataggacgacacgcgtcaaccagccttccattgtggggacagccacgttcgatcagtactggagcgtgcgcacctctaagcggacttcaggaacagtgaccgtgaccgatcacttccgcgcctgggcgaaccggggcctgaacctcggcacaatagaccaaattacattgtgcgtggagggttaccaaagctctggatcagccaacatcacccagaacaccttctctcagggctcttcttccggcagttcgggtggctcatccggctccacaacgactactcgcatcgagtgtgagaacatgtccttgtccggaccctacgttagcaggatcaccaatccctttaatggtattgcgctgtacgccaacggagacacagcccgcgctaccgttaacttccccgcaagtcgcaactacaatttccgcctgcggggttgcggcaacaacaataatcttgcccgtgtggacctgaggatcgacggacggaccgtcgggaccttttattaccagggcacatacccctgggaggccccaattgacaatgtttatgtcagtgcggggagtcatacagtcgaaatcactgttactgcggataacggcacatgggacgtgtatgccgactacctggtgatacag

SEQ ID NO: 1820 - DNA, 2352 bp, Artificial Sequence
  Synthetic Construct, P77853-Tth-T134-194 DNA
atgttccttaagaaactgtctaagttgctgctcgtcgtgctccttgttgccgtttacacacaggtcaacgcgcaaacaagcattactctgacatccaacgcatccggtacgtttgacggttactattacgaactctggaaggatactggcaatacaacaatgacggtctacactcaaggtcgcttttcctgccagtggtcgaacatcaataacgcgttgtttaggaccgggaagaaatacaaccagaattggcagtctcttggcacaatccggatcacgtactctgcgacttacaacccaaacgggaactcctacttgtgtatctatggctggtctaccaacccattggtcgagttctacatcgttgagtcctgggggaactggagaccgcctggtgcctgcctggccgagggctcgctcgtcttggacgcggctaccgggcagagggtccctatcgaaaaggtgcgtccggggatggaagttttctccttgggacctgattacagactgtatcgggtgcccgttttggaggtccttgagagcggggttagggaagttgtgcgcctcagaactcggtcagggagaacgctggtgttgacaccagatcacccgcttttgacccccgaaggttggaaacctctttgtgacctcccgcttggaactccaattgcagtccccgcagaactgcctgtggcgggccacttggccccacctgaagaacgtgttacgctcctggctcttctgttgggggatgggaacacaaagctgtcgggtcggagaggtacacgtcctaatgccttcttctacagcaaagaccccgaattgctcgcggcttatcgccggtgtgcagaagccttgggtgcaaaggtgaaagcatacgtccacccgactacgggggtggttacactcgcaaccctcgctccacgtcctggagctcaagatcctgtcaaacgcctcgttgtcgaggcgggaatggttgctaaagccgaagagaagagggtcccggaggaggtgtttcgttaccgacgtgaggcgttggcccttttcttgggccgtttgttctcgacagacggctctgttgaaaagaagaggatctcttattcaagtgccagtttgggactggcccaggatgtcgcacatctcttgctgcgccttggaattacatctcaactccgttcgagagggccacgggctcacgaggttcttatatcgggccgcgaggatattttgcggtttgctgaaattatcggaccctacctcttgggggccaagagggagagacttgcagcgctggaagctgaggcccgcaggcgtttgcctggacagggatggcacttgcggcttgttcttcctgccgtggcgtacagagtgagcgaggctaaaaggcgctcgggattttcgtggagtgaagccggtcggcgcgtcgcagttgcgggatcgtgtttgtcatctggactcaacctcaaattgcccagacgctacctttctcggcaccggttgtcgctgctcggtgaggcttttgccgaccctgggctggaagcgctcgcggaaggccaagtgctctgggaccctattgttgctgtcgaaccggccggtaaggcgagaacattcgacttgcgcgttccaccctttgcaaacttcgtgagcgaggacctggtggtgcataacaacgttcccctgggccaagtgacaatcgatggcgggacctacgacatctataggacgacacgcgtcaaccagccttccattgtggggacagccacgttcgatcagtactggagcgtgcgcacctctaagcggacttcaggaacagtgaccgtgaccgatcacttccgcgcctgggcgaaccggggcctgaacctcggcacaatagaccaaattacattgtgcgtggagggttaccaaagctctggatcagccaacatcacccagaacaccttctctcagggctcttcttccggcagttcgggtggctcatccggctccacaacgactactcgcatcgagtgtgagaacatgtccttgtccggaccctacgttagcaggatcaccaatccctttaatggtattgcgctgtacgccaacggagacacagcccgcgctaccgttaacttccccgcaagtcgcaactacaatttccgcctgcggggttgcggcaacaacaataatcttgcccgtgtggacctgaggatcgacggacggaccgtcgggaccttttattaccagggcacatacccctgggaggccccaattgacaatgtttatgtcagtgcggggagtcatacagtcgaaatcactgttactgcggataacggcacatgggacgtgtatgccgactacctggtgatacag

SEQ ID NO: 1821 - DNA, 2352 bp, Artificial Sequence
  Synthetic Construct, P77853-Tth-T134-195 DNA
atgttccttaagaaactgtctaagttgctgctcgtcgtgctccttgttgccgtttacacacaggtcaacgcgcaaacaagcattactctgacatccaacgcatccggtacgtttgacggttactattacgaactctggaaggatactggcaatacaacaatgacggtctacactcaaggtcgcttttcctgccagtggtcgaacatcaataacgcgttgtttaggaccgggaagaaatacaaccagaattggcagtctcttggcacaatccggatcacgtactctgcgacttacaacccaaacgggaactcctacttgtgtatctatggctggtctaccaacccattggtcgagttctacatcgttgagtcctgggggaactggagaccgcctggtgcctgcctggccgagggctcgctcgtcttggacgcggctaccgggcagagggtccctatcgaaaaggtgcgtccggggatggaagttttctccttgggacctgattacagactgtatcgggtgcccgttttggaggtccttgagagcggggttagggaagttgtgcgcctcagaactcggtcagggagaacgctggtgttgacaccagatcacccgcttttgacccccgaaggttggaaacctctttgtgacctcccgcttggaactccaattgcagtccccgcagaactgcctgtggcgggccacttggccccacctgaagaacgtgttacgctcctggctcttctgttgggggatgggaacacaaagctgtcgggtcggagaggtacacgtcctaatgccttcttctacagcaaagaccccgaattgctcgcggcttatcgccggtgtgcagaagccttgggtgcaaaggtgaaagcatacgtccacccgactacgggggtggttacactcgcatccctcgctccacgtcctggagctcaagatcctgtcaaacgcctcgttgtcgaggcgggaatggttgctaaagccgaagagaagagggtcccggaggaggtgtttcgttaccggcgtgaggcgttggcccttttcttgggccgtttgttctcgacagacggctctgttgaaaagaagaggatctcttattcaagtgccagtttgggactggcccaggatgtcgcacatctcttgctgcgccttggaattacatctcaactccgttcgagagggccacgggctcacgaggttcttatatcgggccgcgaggatattttgcggtttgctgaacttatcggaccctacctcttgggggccaagagggagagacttgcagcgctggaagctgaggcccgcaggcgtttgcctggacagggatggcacttgcggcttgttcttcctgccgtggcgtacagagtgagcgaggctaaaaggcgctcgggattttcgtggagtgaagccggtcggcgcgtcgcagttgcgggatcgtgtttgtcatctggactcaacctcaaattgcccagacgctacctttctcggcaccggttgtcgctgctcggtgaggcttttgccgaccctgggctggaagtgctcgcggaaggccaagtgctctgggaccctattgttgctgtcgaaccggccggtaaggcgagaacattcgacttgcgcgttccaccctttgcaaacttcgtgagcgaggacctggtggtgcataacacgtcccccctgggccaagtgacaatcgatggcgggacctacgacatctataggacgacacgcgtcaaccagccttccattgtggggacagccacgttcgatcagtactggagcgtgcgcacctctaagcggacttcaggaacagtgaccgtgaccgatcacttccgcgcctgggcgaaccggggcctgaacctcggcacaatagaccaaattacattgtgcgtggagggttaccaaagctctggatcagccaacatcacccagaacaccttctctcagggctcttcttccggcagttcgggtggctcatccggctccacaacgactactcgcatcgagtgtgagaacatgtccttgtccggaccctacgttagcaggatcaccaatccctttaatggtattgcgctgtacgccaacggagacacagcccgcgctaccgttaacttccccgcaagtcgcaactacaatttccgcctgcggggttgcggcaacaacaataatcttgcccgtgtggacctgaggatcgacggacggaccgtcgggaccttttattaccagggcacatacccctgggaggccccaattgacaatgtttatgtcagtgcggggagtcatacagtcgaaatcactgttactgcggataacggcacatgggacgtgtatgccgactacctggtgatacag

SEQ ID NO: 1822 - DNA, 2349 bp, Artificial Sequence
  Synthetic Construct, P77853-Tth-T134-218 DNA
atgttccttaagaaactgtctaagttgctgctcgtcgtgctccttgttgccgtttacacacaggtcaacgcgcaaacaagcattactctgacatccaacgcatccggtacgtttgacggttactattacgaactctggaaggatactggcaatacaacaatgacggtctacactcaaggtcgcttttcctgccagtggtcgaacatcaataacgcgttgtttaggaccgggaagaaatacaaccagaattggcagtctcttggcacaatccggatcacgtactctgcgacttacaacccaaacgggaactcctacttgtgtatctatggctggtctaccaacccattggtcgagttctacatcgttgagtcctgggggaactggagaccgcctggtgcctgcctggccgagggctcgctcgtcttggacgcggctaccgggcagagggtccctatcgaaaaggtgcgtccggggatggaagttttctccttgggacctgattacagactgtatcgggtgcccgttttggaggtccttgagagcggggttagggaagttgtgcgcctcagaactcggtcagggagaacgctggtgttgacaccagatcacccgcttttgacccccgaaggttggaaacctctttgtgacctcccgcttggaactccaattgcagtccccgcagaactgcctgtggcgggccacttggccccacctgaagaacgtgttacgctcctggctcttctgttgggggatgggaacacaaagctgtcgggtcggagaggtacacgtcctaatgccttcttctacagcaaagaccccgaattgctcgcggcttatcgccggtgtgcagaagccttgggtgcaaaggtgaaagcatacgtccacccgactacgggggtggttacactcgcaaccctcgctccacgtcctggagctcaagatcctgtcaaacgcctcgttgtcgaggcaggaatggttgctaaagccgaagagaagagggtcccggaggaggtgtttcgttaccggcgtgaggcgttggcccttttcttgggccgtttgttctcgacagacggctctgttgaaaagaagaggatctcttattcaagtgccagtttgggactggcccaggatgtcgcacatctcttgctgcgccttggaattacatctcaactccgttcgagagggccacgggctcacgaggttcttatatcgggccgcgaggatattttgcggtttgctgaacttatcggaccctacctcttgggggccaagagggagagacttgcagcgctggaagctgaggcccgcaggcgtttgcctggacagggatggcacttgcggcttgttcttcctgccgtggcgtacagattgagcgaggctaaaaggcgctcgggattttcgtggagtgaagccggtcggcgcgtcacagttgcgggatcgtgtttgtcatctggactcaacctcaaattgcccagacgctacctttctcggcaccggttgtcgctgctcggtgaggcttttgccgaccctgggctggaagcgctcgcggaaggccaagtgctctgggaccctattgttgctgtcgaaccggccggtaaggcgagaacattcgacttgcgcgttccaccctttgcaaacttcgtgagcgaggacctggtggtgcataacaagtccctgggccaagtgacaatcgatggcgggacctacgacatctataggacgacacgcgtcaaccagccttccattgtggggacagccacgttcgatcagtactggagcgtgcgcacctctaagcggacttcaggaacagtgaccgtgaccgatcacttccgcgcctgggcgaaccggggcctgaacctcggcacaatagaccaaattacattgtgcgtggagggttaccaaagctctggatcagccaacatcacccagaacaccttctctcagggctcttcttccggcagttcgggtggctcatccggctccacaacgactactcgcatcgagtgtgagaacatgtccttgtccggaccctacgttagcaggatcaccaatccctttaatggtattgcgctgtacgccaacggagacacagcccgcgctaccgttaacttccccgcaagtcgcaactacaatttccgcctgcggggttgcggcaacaacaataatcttgcccgtgtggacctgaggatcgacggacggaccgtcgggaccttttattaccagggcacatacccctgggaggccccaattgacaatgtttatgtcagtgcggggagtcatacagtcgaaatcactgttactgcggataacggcacatgggacgtgtatgccgactacctggtgatacag

SEQ ID NO: 1823 - DNA, 2349 bp, Artificial Sequence
  Synthetic Construct, P77853-Tth-T134-219 DNA
atgttccttaagaaactgtctaagttgctgctcgtcgtgctccttgttgccgtttacacacaggtcaacgcgcaaacaagcattactctgacatccaacgcatccggtacgtttgacggttactattacgaactctggaaggatactggcaatacaacaatgacggtctacactcaaggtcgcttttcctgccagtggtcgaacatcaataacgcgttgtttaggaccgggaagaaatacaaccagaattggcagtctcttggcacaatccggatcacgtactctgcgacttacaacccaaacgggaactcctacttgtgtatctatggctggtctaccaacccattggtcgagttctacatcgttgagtcctgggggaactggagaccgcctggtgcctgcctggccgagggctcgctcgtcttggacgcggctaccgggcagagggtccctatcgaaaaggtgcgtccggggatggaagttttctccttgggacctgattacagactgtatcgggtgcccgttttggaggtccttgagagcggggttagggaagttgtgcgcctcagaactcggtcagggagaacgctggtgttgacaccagatcacctgcttttgacccccgaaggttgggaacctctttgtgacctcccgcttggaactccaattgcagtccccgcagaactgcctgtagcgggccactttgccccacctgaagaacgtgttacgctcctggctcttctgttgggggatgggaacacaaagctgtcgggtcggagaggtacacgtcctaatgccttcttctacagcaaagaccccgaattgctcgcggctcatcgccggtgtgcagaagccttgggtgcaaaggtgaaagcatacgtccacccgactacgggggtggttacactcgcaaccctcgctccacgtcctggagctcaagatcctgtcaaacgcctcgttgtcgaggcgggaatggttgctaaagccgaagagaagagggtcccggaggaggtgtttcgttaccggcgtgaggcgttggcccttttcttgggccgtttgttctcgacagacggctctgttgaaaagaagaggatctcttattcaagtgccagtttgggactggcccaggatgtcgcacatctcttgctgcgccttggaattacatctcaactccgttcgagagggccacgggctcacgaggttcttatatcgggccgcgaggatattttgcggtttgctgaacttatcggaccctacctcttgggggccaagagggagagacttgcagcgctggaagctgaggcccgcaggcgtttgcctggacagggatggcacttgcggcttgttcttcctgccgtggcgtacagagtgagcgaggctaaaaggcgctcgggattttcgtggagtgaagccggtcggcgcgtcgcagttgcgggatcgtgtttgtcatctggactcaacctcaaattgcccagacgctacctttctcggcaccggttgtcgctgctcggtgaggcttttgccgaccctgggctggaagcgctcgcggaaggccaagtgctctgggaccctattgttgctgtcgaaccggccggtaaggcgagaacattcgacttgcgcgttccaccctttgcaaacttcgtgagcgaggacctggtggtgcataacacgtccctgggccaagtgacaatcgatggcgggacctacgacatctataggacgacacgcgtcaaccagccttccattgtggggacagccacgttcgatcagtactggagcgtgcgcacctctaagcggacttcaggaacagtgaccgtgaccgatcacttccgcgcctgggcgaaccggggcctgaacctcggcacaatagaccaaattacattgtgcgtggagggttaccaaagctctggatcagccaacatcacccagaacaccttctctcagggctcttcttccggcagttcgggtggctcatccggctccacaacgactactcgcatcgagtgtgagaacatgtccttgtccggaccctacgttagcaggatcaccaatccctttaatggtattgcgctgtacgccaacggagacacagcccgcgctaccgttaacttccccgcaagtcgcaactacaatttccgcctgcggggttgcggcaacaacaataatcttgcccgtgtggacctgaggatcgacggacggaccgtcgggaccttttattaccagggcacatacccctgggaggccccaattgacaatgtttatgtcagtgcggggagtcatacagtcgaaatcactgttactgcggataacggcacatgggacgtgtatgccgactacctggtgatacag

SEQ ID NO: 1824 - DNA, 2349 bp, Artificial Sequence; identical to SEQ ID NO: 1814
  Synthetic Construct, P77853-Tth-T134-225 DNA

SEQ ID NO: 1825 - DNA, 2349 bp, Artificial Sequence
  Synthetic Construct, P77853-Tth-T134-238 DNA
atgttccttaagaaactgtctaagttgctgctcgtcgtgctccttgttgccgtttacacacaggtcaacgcgcaaacaagcattactctgacatccaacgcatccggtacgtttgacggttactattacgaactctggaaggatactggcaatacaacaatgacggtctacactcaaggtcgcttttcctgccagtggtcgaacatcaataacgcgttgtttaggaccgggaagaaatacaaccagaattggcagtctcttggcacaatccggatcacgtactctgcgacttacaacccaaacgggaactcctacttgtgtatctatggctggtctaccaacccattggtcgagttctacatcgttgagtcctgggggaactggagaccgcctggtgcctgcctggccgagggctcgctcgtcttggacgcggctaccgggcagagggtccctatcgaaaaggtgcgtccggggatggaagttttctccttgggacctgattacagactgtatcgggtgcccgttttggaggtccttgagagcggggttagggaagttgtgcgcctcagaactcggtcagggagaacgctggtgttgacaccagatcacccgcttttgacccccgaaggttggaaacctctttgtgacctcccgcttggaactccaattgcagtccccgcagaactgcctgtggcgggccacttggccccacctgaagaacgtgctacgctcctggctcttctgttgggggatgggaacacaaagctgtcgggtcggagaggtacacgtcctaatgccttcttctacagcaaagaccccgaattgctcgcggcttatcgccggtgtgcagaagccttgggtgcaaaggtgaaagcatacgtccacccgactacgggggtggttacactcgcaaccctcgctccacgtcctggagctcaagatcctgtcaaacgcctcgttgtcgaggcgggaatggttgctaaagccgaagagaagagggtcccggaggaggtgtttcgttaccggcgtgaggcgttggcccttttcttgggccgtttgttctcgacagacggctctgttgaaaagaagaggatctcttattcaagtgccagtttgggactggcccaggatgtcgcacatctcttgctgcgccttggaattacatctcaactccgttcgagagggccacgggctcacgaggttcttatatcgggccgcgaggatattttgcggtttgctgaacttatcggaccctacctcttgggggccaagagggagagacttgcagcgctggaagctgaggcccgcaggcgtttgcctggacagggatggcacttgcggcttgttcttcctgccgtggcgtacagagtgagcgaggctaaaaggcgctcgggattttcgtggagtgaagccggtcggcgcgtcgcagttgcgggatcgtgtttgtcatctggactcaacctcaaattgcccagacgctacctttctcggcaccggttgtcgctgctcggtgaggcttttgccgaccctgggctggaagcgctcgcggaaggccaagtgctctgggaccctattgttgctgtcgaaccggccggtaaggcgagaacattcgacttgcgcgttccaccctttgcaaacttcgtgagcgaggacctggtggtgcataacacgtccctgggccaagtgacaatcgatggcgggacctacgacatctataggacgacacgcgtcaaccagccttccattgtggggacagccacgttcgatcagtactggagcgtgcgcacctctaagcggacttcaggaacagtgaccgtgaccgatcacttccgcgcctgggcgaaccggggcctgaacctcggcacaatagaccaaattacattgtgcgtggagggttaccaaagctctggatcagccaacatcacccagaacaccttctctcagggctcttcttccggcagttcgggtggctcatccggctccacaacgactactcgcatcgagtgtgagaacatgtccttgtccggaccctacgttagcaggatcaccaatccctttaatggtattgcgctgtacgccaacggagacacagcccgcgctaccgttaacttccccgcaagtcgcaactacaatttccgcctgcggggttgcggcaacaacaataatcttgcccgtgtggacctgaggatcgacggacggaccgtcgggaccttttattaccagggcacatacccctgggaggccccaattgacaatgtttatgtcagtgcggggagtcatacagtcgaaatcactgttactgcggataacggcacatgggacgtgtatgccgactacctggtgatacag

SEQ ID NO: 1826 - DNA, 2349 bp, Artificial Sequence
  Synthetic Construct, P77853-Tth-T134-248 DNA
atgttccttaagaaactgtctaagttgctgctcgtcgtgctccttgttgccgtttacacacaggtcaacgcgcaaacaagcattactctgacatccaacgcatccggtacgtttgacggttactattacgaactctggaaggatactggcaatacaacaatgacggtctacactcaaggtcacttttcctgccagtggtcgaacatcaataacgcgttgtttaggaccgggaagaaatacaaccagaattggcagtctcttggcacaatccggatcacgtactctgcgacttacaacccaaacgggaactcctacttgtgtatctatggctggtctaccaacccattggtcgagttctacatcgttgagtcctgggggaactggagaccgcctggtgcctgcctggccgagggctcgctcgtcttggacgcggctaccgggcagagggtccctatcgaaaaggtgcgtccggggatggaagttttctccttgggacctgattacagactgtatcgggtgcccgttttggaggtccttgagagcggggctagggaagttgtgcgcctcagaactcggtcagggagaacgctggtgttgacaccagatcacccgcttttgacccccgaaggttggaaacctctttgtgacctcccgcttggaactccaattgcagtccccgcagaactgcctgtggcgggccacttggccccacctgaagaacgtgttacgctcctggctcttctgttgggggatgggaacacaaagctgtcgggtcggagaggtacacgtcctaatgccttcttctacagcaaagaccccgaattgctcgcggcttatcgccggtgtgcagaagccttgggtgcaaaggtgaaagcatacgtccacccgactacgggggtggttacactcgcaaccctcgctccacgtcctggagctcaagatcctgtcaaacgcctcgttgtcgaggcgggaatggttgctaaagccgaagagaagagggtcccggaggaggtgtttcgttaccggcgtgaggcgttggcccttttcttgggccgtttgttctcgacagacggctctgttgaaaagaagaggatctcttattcaagtgccagtttgggactggcccatgatgtcgcacatctcttgctgcgccttggaattacatctcaactccgttcgagagggccacgggctcacgaggttcttatatcgggccgcgaggatattttgcggtttgctgaacttatcggaccctacctcttgggggccaagagggagagacttgcagcgctggaagctgaggcccgcaggcgtttgcctggacagggatggcacttgcggcttgttcttcctgccgtggcgtacagagtgagcgaggctaaaaggcgctcgggattttcgtggagtgaagccggtcggcgcgtcgcagttgcgggatcgtgtttgtcatctggactcaacctcaaattgcccagacgctacctttctcggcaccggttgtcgctgctcggtgaggcttttgccgaccctgggctggaagcgctcgcggaaggccaagtgctctgggatcctattgttgctgtcgaaccggccggtaaggcgagaacattcgacttgcgcgttccaccctttgcaaacttcgtgagcgaggacctggtggtgcataacacgtccctgggccaagtgacaatcgatggcgggacctacgacatctataggacgacacgcgtcaaccagccttccattgtggggacagccacgttcgatcagtactggagcgtgcgcacctctaagcggacttcaggaacagtgaccgtgaccgatcacttccgcgcctgggcgaaccggggcctgaacctcggcacaatagaccaaattacattgtgcgtggagggttaccaaagctctggatcagccaacatcacccagaacaccttctctcagggctcttcttccggcagttcgggtggctcatccggctccacaacgactactcgcatcgagtgtgagaacatgtccttgtccggaccctacgttagcaggatcaccaatccctttaatggtattgcgctgtacgccaacggagacacagcccgcgctaccgttaacttccccgcaagtcgcaactacaatttccgcctgcggggttgcggcaacaacaataatcttgcccgtgtggacctgaggatcgacggacggaccgtcgggaccttttattaccagggcacatacccctgggaggccccaattgacaatgtttatgtcagtgcggggagtcatacagtcgaaatcactgttactgcggataacggcacatgggacgtgtatgccgactacctggtgatacag

SEQ ID NO: 1827 - DNA, 2349 bp, Artificial Sequence
  Synthetic Construct, P77853-Tth-T134-249 DNA
atgttccttaagaaactgtctaagttgctgctcgtcgtgctccttgttgccgtttacacacaggtcaacgcgcaaacaagcattactctgacatccaacgcatccggtacgtttgacggttactattacgaactctggaaggatactggcaatacaacaatgacggtctacactcaaggtcgcttttcctgccagtggtcgaacatcaataacgcgttgtttaggaccgggaagaaatacaaccagaattggcagtctcttggcacaatccggatcacgtactctgcgacttacaacccaaacgggaactcctacttgtgtatctatggctggtctaccaacccattggtcgagttctacatcgttgagtcctgggggaactggagaccgcctggtgcctgcctggccgagggctcgctcgtcttggacgcggctaccgggcagagggtccctatcgaaaaggtgcgtccggggatggaagttttctccttgggacctgattacagactgtatcgggtgcccgttttggaggtccttgagagcggggttagggaagttgtgcgcctcagaactcggtcagggagaacgctggtgttgacaccagatcacctgcttttgacccccgaaggttggaaacctctttgtgacctcccgcttggaactccaattgcagtccccgcagaactgcctgtggcgggccacttggccccacctgaagaacgtgttacgctcctggctcttctgttgggggatgggaacacaaagctgtcgggtcggagaggtacacgtcctaatgccttcttctacagcaaagaccccgaattgctcgcggcttatcgccggtgtgcagaagccttgggtgcaaaggtgaaagcatacgtccacccgactacgggggtggttacactcgcaaccctcgctccacgtcctggagctcaagatcctgtcaaacgcctcgttgtcgaggcgggaatggttgctaaagccgaagagaagagggtcccggaggaggtgtttcgttaccggcgtgaggcgttggcccttttcttgggccgtttgttctcgacagacggctctgttgaaaagaagaggatctcttattcaagtgccagtttgggactggcccaggatgtcgcacatctcttgctgcgccttggaattacatctcaactccgttcgagagggccacgggctcacgaggttcttatatcgggccgcgaggatattttgcggtttgctgaacttatcggaccctacctcttgggggccaagagggagagacttgctgcgctggaagctgaggcccgcaggcgtttgcctggacagggatggcacttgcggcttgttcttcctgccgtggcgtacagagtgagcgaggctaaaaggcgctcgggattttcgtggagtgaagccggtcggcgcgtcgcagttgcgggatcgtgtttgtcatctggactcaacctcaaattgcccagacgctacctttctcggcaccggttgtcgctgctcggtgaggcttttgccgaccctgggctggaagcgctcgcggaaggccaagtgctctgggaccctattgttgctgtcgaaccggccggtaaggcgagaacattcgacttgcgcgttccaccctttgcaaacttcgtgagcgaggacctggtggtgcataacacgtccctgggccaagtgacaatcgatggcgggacctacgacatctataggacgacacgcgtcaaccagccttccattgtggggacagccacgttcgatcagtactggagcgtgcgcacctctaagcggacttcaggaacagtgaccgtgaccgatcacttccgcgcctgggcgaaccggggcctgaacctcggcacaatagaccaaattacattgtgcgtggagggttaccaaagctctggatcagccaacatcacccagaacaccttctctcagggctcttcttccggcagttcgggtggctcatccggctccacaacgactactcgcatcgagtgtgagaacatgtccttgtccggaccctacgttagcaggatcaccaatccctttaatggtattgcgctgtacgccaacggagacacagcccgcgctaccgttaacttccccgcaagtcgcaactacaatttccgcctgcggggttgcggcaacaacaataatcttgcccgtgtggacctgaggatcgacggacggaccgtcgggaccttttattaccagggcacatacccctgggaggccccaattgacaatgtttatgtcagtgcggggagtcatacagtcgaaatcactgttactgcggataacggcacatgggacgtgtatgccgactacctggtgatacag

SEQ ID NO: 1828 - DNA, 2349 bp, Artificial Sequence
  Synthetic Construct, P77853-Tth-S158-2 DNA
atgttccttaagaaactgtctaagttgctgctcgtcgtgctccttgttgccgtttacacacaggtcaacgcgcaaacaagcattactctgacatccaacgcatccggtacgtttgacggttactattacgaactctggaaggatactggcaatacaacaatgacggtctacactcaaggtcgcttttcctgccagtggtcgaacatcaataacgcgttgtttaggaccgggaagaaatacaaccagaattggcagtctcttggcacaatccggatcacgtactctgcgacttacaacccaaacgggaactcctacttgtgtatctatggctggtctaccaacccattggtcgagttctacatcgttgagtcctgggggaactggagaccgcctggtgccacgtccctgggccaagtgacaatcgatggcgggacctacgacatctataggacgacacgcgtcaaccagccttgcctggccgagggctcgctcgtcttggacgcggctaccgggcagagggtccctatcgaaaaggtgcgtccggggatggaagttttctccttgggacctgattacagactgtatcgggtgcccgttttggaggtccttgagagcggggttagggaagttgtgcgcctcagaactcggtcagggagaacgctggtgttgacaccagatcacccgcttttgacccccgaaggttggaaacctctttgtgacctcccgcttggaactccaattgcagtccccgcagaactgcctgtggcgggccacttggccccacctgaagaacgtgttacgctcctggctcttctgttgggggatgggaacacaaagctgccgggtcggagaggtacacgtcctaatgccttcttctacagcaaagaccccgaattgctcgcggcttatcgccggtgtgcagaagccttgggtgcaaaggtgaaagcatacgtccacccgactacgggggtggttacactcgcaaccctcgctccacgtcctggagctcaagatcctgtcaaacgcctcgttgtcgaggcgggaatggttgctaaagccgaagagaagagggtcccggaggaggtgtttcgttaccggcgtgaggcgttggcccttttcttgggccgtttgttctcgacagacggctctgttgaaaagaagaggatctcttattcaagtgccagtttgggactggcccaggatgacgcacatctcttgctgcgccttggaattacatctcaactccgttcgagagggccacgggctcacgaggttcttatatcgggccgcgaggatattttgcggtttgctgaacttatcggaccctacctcttgggggccaagagggagagacttgcagcgctggaagctgaggcccgcaggcgtttgcctggacagggatggcacttgcggcttgttcttcctgccgtggcgtacagagtgagcgaggctaaaaggcgctcgggattttcgtggagtgaagccggtcggcgcgtcgcagttgcgggatcgtgtttgtcatctggactcaacctcaaattgcccagacgctacctttctcggcaccggttgtcgctgctcggtgaggcttttgccgaccctgggctggaagcgctcgcggaaggccaagtgctctgggaccctattgttgctgtcgaaccggccggtaaggcgagaacattcgacttgcgcgttccaccctttgcaaacttcgtgagcgaggacctggtggtgcataactccattgtggggacagccacgttcgatcagtactggagcgtgcgcacctctaagcggacttcaggaacagtgaccgtgaccgatcacttccgcgcctgggcgaaccggggcctgaacctcggcacaatagaccaaattacattgtgcgtggagggttaccaaagctctggatcagccaacatcacccagaacaccttctctcagggctcttcttccggcagttcgggtggctcatccggctccacaacgactactcgcatcgagtgtgagaacatgtccttgtccggaccctacgttagcaggatcaccaatccctttaatggtattgcgctgtacgccaacggagacacagcccgcgctaccgttaacttccccgcaagtcgcaactacaatttccgcctgcggggttgcggcaacaacaataatcttgcccgtgtggacctgaggatcgacggacggaccgtcgggaccttttattaccagggcacatacccctgggaggccccaattgacaatgtttatgtcagtgcggggagtcatacagtcgaaatcactgttactgcggataacggcacatgggacgtgtatgccgactacctggtgatacag

SEQ ID NO: 1829 - DNA, 2349 bp, Artificial Sequence
  Synthetic Construct, P77853-Tth-S158-4 DNA
atgttccttaagaaactgtctaagttgctgctcgtcgtgctccttgttgccgtttacacacaggtcaacgcgcaaacaagcattactctgacatccaacgcatccggtacgtttgacggttactattacgaactctggaaggatactggcaatacaacaatgacggtctacactcaaggtcgcttttcctgccagtggtcgaacatcaataacgcgttgtttaggaccgggaagaaatacaaccagaattggcagtctcttggcacaatccggatcacgtactctgcgacttacaacccaaacgggaactcctacttgtgtatctatggctggtctaccaacccattggtcgagttctacatcgttgagtcctgggggaactggagaccgcctggtgccacgtccctgggccaagtgacaatcgatggcgggacctacgacatctataggacgacacgcgtcaaccagccttgcctggccgagggctcgctcgtcttggacgcggctaccgggcagagggtccctatcgaaaaggtgcgtccggggatggaagttttctccttgggacctgattacagactgtatcgggtgcccgttttggaggtccttgagagcggggttagggaagttgtgcgcctcagaactcggtcagggagaacgctggtgttgacaccagatcacccgcttttgacccccgaaggttggaaacctctttgtgacctcccgcttggaactccaattgcagtccccgcagaactgcctgtggcgggccacttggccccacctgaagaacgtgttacgctcctggctcttctgttgggggatgggaacacaaagctgtcgggtcggagaggtacacgtcctaatgccttcttctacagcaaagaccccgaattgctcgcggcttatcgccggtgtgcagaagccttgggtgcaaaggtgaaagcatacgtccacccgactacgggggtggttacactcgcaaccctcgctccacgtcctggagctcaagatcctgtcaaacgcctcgttgtcgaggcgggaatggttgctaaagccgaagagaagagggtcccggaggaggtgtttcgttaccggcgtgaggcgttggcccttttcttgggccgtttgttctcgacagacggctctgttgaaaagaagaggatctcttattcaagtgccagtttgggactggcccaggatgtcgcacatctcttgctgcgccttggaattacatctcaactccgttcgagagggccacgggctcacgaggttcttatatcgggccgcgaggatattttgcggtttgctgaacttatcggaccctacctcttgggggccaagagggagagacttgcagcgctggaagctgaggcccgcaggcgtttgcctggacagggatggcacttgcggcttgttcttcctgccgtggcgtacagagtgagcgaggctaaaaggcgctcgggattttcgtggagtgaagccggtcggcgcgtcgcagttgcgggatcgtgtttgtcatctggactcaacctcaaattgcccagacgctacctttctcggcaccggttgtcgctgctcggtgaggcttttgccgaccctgggctggaagcgctcgcggaaggccaagtgctctggaaccctattgttgctgtcgaaccggccggtaaggcgagaacattcgacttgcgcgttccaccctttgcaaacttcgtgagcgaggacctggtggtgcataactccattgtggggacagccacgttcgatcagtactggagcgtgcgcacctctaagcggacttcaggaacagtgaccgtgaccgatcacttccgcgcctgggcgaaccggggcctgaacctcggcacaatagaccaaattacattgtgcgtggagggttaccaaagctctggatcagccaacatcacccagaacaccttctctcagggctcttcttccggcagttcgggtggctcatccggctccacaacgactactcgcatcgagtgtgagaacatgtccttgtccggaccctacgttagcaggatcaccaatccctttaatggtattgcgctgtacgccaacggagacacagcccgcgctaccgttaacttccccgcaagtcgcaactacaatttccgcctgcggggttgcggcaacaacaataatcttgcccgtgtggacctgaggatcgacggacggaccgtcgggaccttttattaccagggcacatacccctgggaggccccaattgacaatgtttatgtcagtgcggggagtcatacagtcgaaatcactgttactgcggataacggcacatgggacgtgtatgccgactacctggtgatacag

SEQ ID NO: 1830 - DNA, 2349 bp, Artificial Sequence
  Synthetic Construct, P77853-Tth-S158-7 DNA
atgttccttaagaaactgtctaagttgctgctcgtcgtgctccttgttgccgtttacacacaggtcaacgcgcaaacaagcattactctgacatccaacgcatccggtacgtttgacggttactattacgaactctggaaggatactggcaatacaacaatgacggtctacactcaaggtcgcttttcctgccagtggtcgaacatcaataacgcgttgtttaggaccgggaagaaatacaaccagaattggcagtctcttggcacaatccggatcacgtactctgcgacttacaacccaaacgggaactcctacttgtgtatctatggctggtctaccaacccattggtcgagttctacatcgttgagtcctgggggaactggagaccgcctggtgccacgtccctgggccaagtgacaatcgatggcgggacctacgacatctataggacgacacgcgtcaaccagccttgcctggccgagggctcgctcgtcttggacgcggctaccgggcagagggtccctatcgaaaaggtgcgtccggggatggaagttttctccttgggacctgattacagactgtatcgggtgcccgttttggaggtccttgagagcggggttagggaagttgtgcgcctcagaactcggtcagggagaacgctggtgttgacaccagatcacccgcttttgacccccgaaggttggaaacctctttgtgacctcccgcttggaactccaattgcagtccccgcagaactgcctgtggcgggccacttggccccacctgaagaacgtgttacgctcctggctcttctgttgggggatgggaacacaaagctgtcgggtcggagaggtacacgtcctaatgccttcttctacagcaaagaccccgaattgctcgcggcttatcgccggtgtgcagaagccttgggtgcaaaggtgaaagcatacgtccacccgactacgggggtggttacactcgcaaccctcgctccacgtcctggagctcaagatcctgtcaaacgcctcgttgtcgaggcgggaatggttgctaaagccgaagagaagagggtcccggaggaggtgtttcgttaccggcgtgaggcgttggcccttttcttgggccgtttgttctcgacagacggctctgttgaaaagaagaggatctcttattcaagtgccagtttgggactggcccaggatgtcgcacatctcttgctgcgccttggaattacatctcaactccgttcgagagggccacgggctcacgaggttcttatatcgggccgcgaggatattttgcggtttgctgaacttatcggaccctacctcttgggggccaagagggagagacttgcagcgctggaagctgaggcccgcaggcgtttgcctggacagggatggcacttgcggcttgttcttcctgccgtggcgtacagagtgagcgaggctaaaaggcgctcgggattttcgtggagtgaagccggtcggcgcgtcgcagttgcgggatcgtgtttgtcatctggacttaacctcaaattgcccagacgctacctttctcggcaccggttgtcgctgctcggtgaggcttttgccgaccctgggctggaagcgctcgcgggaggccaagtgctctgggaccctattgttgctgtcgaaccggccggtaaggcgagaacattcgacttgcgcgtaccaccctttgcaaacttcgtgagcgaggacctggtggtgcataactccattgtggggacagccacgttcgatcagtactggagcgtgcgcacctctaagcggacttcaggaacagtgaccgtgaccgatcacttccgcgcctgggcgaaccggggcctgaacctcggcacaatagaccaaattacattgtgcgtggagggttaccaaagctctggatcagccaacatcacccagaacaccttctctcagggctcttcttccggcagttcgggtggctcatccggctccacaacgactactcgcatcgagtgtgagaacatgtccttgtccggaccctacgttagcaggatcaccaatccctttaatggtattgcgctgtacgccaacggagacacagcccgcgctaccgttaacttccccgcaagtcgcaactacaatttccgcctgcggggttgcggcaacaacaataatcttgcccgtgtggacctgaggatcgacggacggaccgtcgggaccttttattaccagggcacatacccctgggaggccccaattgacaatgtttatgtcagtgcggggagtcatacagtcgaaatcactgttactgcggataacggcacatgggacgtgtatgccgactacctggtgatacag

SEQ ID NO: 1831 - DNA, 2349 bp, Artificial Sequence
  Synthetic Construct, P77853-Tth-S158-19 DNA
atgttccttaagaaactgtctaagttgctgctcgtcgtgctccttgttgccgtttacacacaggtcaacgcgcaaacaagcattactctgacatccaacgcatccggtacgtttgacggttactattacgaactctggaaggatactggcaatacaacaatgacggtctacactcaaggtcgcttttcctgccagtggtcgaacatcaataacgcgttgtttaggaccgggaagaaatacaaccagaattggcagtctcttggcacaatccggatcacgtactctgcgacttacaacccaaacgggaactcctacttgtgtatctatggctggtctaccaacccattggtcgagttctacatcgttgagtcctgggggaactggagaccgcctggtgccacgtccctgggccaagtgacaatcgatggcgggacctacgacatctataggacgacacgcgtcaaccagccttgcctggccgagggctcgctcgtcttggacgcggctaccgggcagagggtccctatcgaaaaggtgcgtccggggatggaagttttctccttgggacctgattacagactgtatcgggtgcccgttttggaggtccttgagagcggggttggggaagttgtgcgcctcagaactcggtcagggagaacgctggtgttgacaccagatcacccgcttttgacccccgaaggttggaaacctctttgtgacctcccgcttggaactccaattgcagtccccgcagaactgcctgtggcgggccacttggccccacctgaagaacgtgttacgctcctggctcttctgttgggggatgggaacacaaagctgtcgggtcggagaggtacacgtcctattgccttcttctacagcaaagaccccgaattgctcgcggcttatcgccggtgtgcagaagccttgggtgcaaaggtgaaagcatacgtccacccgactacgggggtggttacactcgcaaccctcgctccacgtcctggagctcaagatcctgtcaaacgcctcgttgtcgaggcgggaatggttgctaaagccgaagagaagagggtcccggaggaggtgtttcgttaccggcgtgaggcgttggcccttttcttgggccgtttgttctcgacagacggctctgttgaaaagaagaggatctcttattcaagtgccagtttgggactggcccaggatgtcgcacatctcttgctgcgccttggaattacatctcaactccgttcgagagggccacgggctcacgaggttcttatatcgggccgcgaggatattttgcggtttgctgaacttatcggaccctacctcttgggggccaagagggagagacttgcagcgctggaagctgaggcccgcaggcgtttgcctggacagggatggcacttgcggcttgttcttcctgccgtggcgtacagagtgagcgaggctaaaaggcgctcgggattttcgtggagtgaagccggtcggcgcgtcgcagttgcgggatcgtgtttgtcatctggactcaacctcaaattgcccagacgctacctttctcggcaccggttgtcgctgctcggtgaggcttttgccgaccctgggctggaagcgctcgcggaaggccaagtgctctgggaccctattgttgctgtcgaaccggccggtaaggcgagaacattcgacttgcgcgttccaccctttgcaaacttcgtgagcgaggacctggtggtgcataactccattgtggggacagccacgttcgatcagtactggagcgtgcgcacctctaagcggacttcaggaacagtgaccgtgaccgatcacttccgcgcctgggcgaaccggggcctgaacctcggcacaatagaccaaattacattgtgcgtggagggttaccaaagctctggatcagccaacatcacccagaacaccttctctcagggctcttcttccggcagttcgggtggctcatccggctccacaacgactactcgcatcgagtgtgagaacatgtccttgtccggaccctacgttagcaggatcaccaatccctttaatggtattgcgctgtacgccaacggagacacagcccgcgctaccgttaacttccccgcaagtcgcaactacaatttccgcctgcggggttgcggcaacaacaataatcttgcccgtgtggacctgaggatcgacggacggaccgtcgggaccttttattaccagggcacatacccctgggaggccccaattgacaatgtttatgtcagtgcggggagtcatacagtcgaaatcactgttactgcggataacggcacatgggacgtgtatgccgactacctggtgatacag

SEQ ID NO: 1832 - DNA, 2349 bp, Artificial Sequence
  Synthetic Construct, P77853-Tth-S158-20 DNA
atgttccttaagaaactgtctaagttgctgctcgtcgtgctccttgttgccgtttacacacaggtcaacgcgcaaacaagcattactctgacatccaacgcatccggtacgtttgacggttactattacgaactctggaaggatactggcaatacaacaatgacggtctacactcaaggtcgcttttcctgccagtggtcgaacatcaataacgcgttgtttaggaccgggaagaaatacaaccagaattggcagtctcttggcacaatccggatcacgtactctgcgacttacaacccaaacgggaactcctacttgtgtatctatggctggtctaccaacccattggtcgagttctacatcgttgagtcctgggggaactggagaccgcctggtgccacgtccctgggccaagtgacaatcgatggcgggacctacgacatctataggacgacacgcgtcaaccaggcttgcctggccgagggctcgctcgtcttggacgcggctaccgggcagagggtccctatcgaaaaggtgcgtccggggatggaagttttctccttgggacctgattacagactgtatcgggtgcccgttttggaggtccttgagagcggggttagggaagttgtgcgcctcagaactcggtcagggagaacgctggtgttgacaccagatcacccgcttttgacccccgaaggttggaaacctctttgtgacctcccgcttggaactccaattgcagtccccgcagaactgcctgtggcgggccacttggccccacctgaagaacgtgttacgctcctggctcttctgttgggggatgggaacacaaagctgtcgggtcggagaggtacacgtcctaatgccttcttctacagcaaagaccccgaattgctcgcggcttatcgccggtgtgcagaagccttgggtgcaaaggtgaaagcatacgtccacccgactacgggggtggttacactcgcaaccctcgctccacgtcctggagctcaagatcctgtcaaacgcctcgttgtcgaggcgggaatggttgctaaagccgaagagaagagggtcccggaggaggtgtttcgttaccggcgtgaggcgttggcccttttcttgggccgtttgttctcgacagacggctctgttgaaaagaagaggatctcttattcaagtgccagtttgggactggcccaggatgtcgcacatctcttgctgcgccttggaattacatctcaactccgttcgagagggccacgggctcacgaggttcttatatcgggccgcgaggatattttgcggtttgctgaacttatcggaccctacctcttgggggccaagagggagagacttgcagcgctggaagctgaggcccgcaggcgtttgcctggacagggatggcacttgcggcttgttcttcctgccgtggcgtacagagtgagcgaggctaaaaggcgctcgggattttcgtggagtgaagccggtcggcgcgtcgcagttgcgggatcgtgtttgtcatctggactcaacctcaaattgcccagacgctacctttctcggcaccggttgtcgctgctcggtgaggcttttgccgaccctgggctggaagcgctcgcggaaggccaagtgctctgggaccctattgttgctgtcgaaccggccggtaaggcgagaacattcgacttgcgcgttccaccctttgcaaacttcgtgagcgaggacctggtggtgcataactccattgtggggacagccacgttcgatcagtactggagcgtgcgcacctctaagcggacttcaggaacagtgaccgtgaccgatcacttccgcgcctgggcgaaccggggcctgaacctcggcacaatagaccaaattacattgtgcgtggagggttaccaaagctctggatcagccaacatcacccagaacaccttctctcagggctcttcttccggcagttcgggtggctcatccggctccacaacgactactcgcatcgagtgtgagaacatgtccttgtccggaccctacgttagcaggatcaccaatccctttaatggtattgcgctgtacgccaacggagacacagcccgcgctaccgttaacttccccgcaagtcgcaactacaatttccgcctgcggggttgcggcaacaacaataatcttgcccgtgtggacctgaggatcgacggacggaccgtcgggaccttttattaccagggcacatacccctgggaggccccaattgacaatgtttatgtcagtgcggggagtcatacagtcgaaatcactgttactgcggataacggcacatgggacgtgtatgccgactacctggtgatacag

SEQ ID NO: 1833 - DNA, 2349 bp, Artificial Sequence
  Synthetic Construct, P77853-Tth-S158-21 DNA
atgttccttaagaaactgtctaagttgctgctcgtcgtgctccttgttgccgtttacacacaggtcaacgcgcaaacaagcattactctgacatccaacgcatccggtacgtttgacggttactattacgaactctggaaggatactggcaatacaacaatgacggtctacactcaaggtcgcttttcctgccagtggtcgaacatcaataacgcgttgtttaggaccgggaagaaatacaaccagaattggcagtctcttggcacaatccggatcacgtactctgcgacttacaacccaaacgggaactcctacttgtgtatctatggctggtctaccaacccattggtcgagttctacatcgttgagtcctgggggaactggagaccgcctggtgccacgtccctgggccaagtgacaatcgatggcgggacctacgacatctataggacgacacgcgtcaaccagccttgcctggccgagggctcgctcgtcttggacgcggctaccgggcagagggtccctatcgaaaaggtgcgtccggggatggaagttttctccttgggacctgattacagactgtatcgggtgcccgttttggaggtccttgagagcggggttagggaagttgtgcgcctcagaactcggtcagggagaacgctggtgttgacaccagatcacccgcttttgacccccgaaggttggaaacctctttgtgacctcccgcttggaactccaattgcagtccccgcagaactgcctgtggcgggccacttggccccacctgaagaacgtgttacgctcctggctcttctgttgggggatgggaacacaaagctgtcgggtcggagaggtacacgtcctaatgccttcttctacagcaaagaccccgaattgctcgcggcttatcgccggtgtggagaagccttgggtgcaaaggtgaaagcatacgtccacccgactacgggggtggttacactcgcaaccctcgctccacgtcctggagctcaagatcctgtcaaacgcctcgttgtcgaggcgggaatggttgctaaagccgaagagaagagggtcccggaggaggtgtttcgttaccggcgtgaggcgttggcccttttcttgggccgtttgttctcgacagacggctctgttgaaaagaagaggatctcttattcaagtgccagtttgggactggcccaggatgtcgcacatctcttgctgcgccttggaattacatctcaactccgttcgagagggccacgggctcacgaggttcttatatcgggccgcgaggatattttgcggtttgctgaacttatcggaccctacctcttgggggccaagagggagagacttgcagcgctggaagctgaggcccgcaggcgtttgcctggacagggatggcacttgcggcttgttcttcctgccgtggcgtacagagtgagcgaggctaaaaggcgctcgggattttcgtggagtgaagccggtcggcgcgtcgcagttgcgggatcgtgtttgtcatctggactcaacctcaaattgcccagacgctacctttctcagcaccggttgtcgctgctcggtgaggcttttgccgaccctgggctggaagcgctcgcggaaggccaagtgctctgggaccctattgttgctgtcgaaccggccggtaaggcgagaacattcgacttgcgcgttccaccctttgcaaacttcgtgagcgaggacctggtggtgcataactccattgtggggacagccacgttcgatcagtactggagcgtgcgcacctctaagcggacttcaggaacagtgaccgtgaccgatcacttccgcgcctgggcgaaccggggcctgaacctcggcacaatagaccaaattacattgtgcgtggagggttaccaaagctctggatcagccaacatcacccagaacaccttctctcagggctcttcttccggcagttcgggtggctcatccggctccacaacgactactcgcatcgagtgtgagaacatgtccttgtccggaccctacgttagcaggatcaccaatccctttaatggtattgcgctgtacgccaacggagacacagcccgcgctaccgttaacttccccgcaagtcgcaactacaatttccgcctgcggggttgcggcaacaacaataatcttgcccgtgtggacctgaggatcgacggacggaccgtcgggaccttttattaccagggcacatacccctgggaggccccaattgacaatgtttatgtcagtgcggggagtcatacagtcgaaatcactgttactgcggataacggcacatgggacgtgtatgccgactacctggtgatacag

SEQ ID NO: 1834 - DNA, 2349 bp, Artificial Sequence
  Synthetic Construct, P77853-Tth-S158-25 DNA
atgttccttaagaaactgtctaagttgctgctcgtcgtgctccttgttgccgtttacacacaggtcaacgcgcaaacaagcattactctgacatccaacgcatccggtacgtttgacggttactattacgaactctggaaggatactggcaatacaacaatgacggtctacactcaaggtcgcttttcctgccagtggtcgaacatcaataacgcgttgtttaggaccgggaagaaatacaaccagaattggcagtctcttggcacaatccggatcacgtactctgcgacttacaacccaaacgggaactcctacttgtgtatctatggctggtctaccaacccattggtcgagttctacatcgttgagtcctgggggaactggagaccgcctggtgccacgtccctgggccaagtgacaatcgatggcgggacctacgacatctataggacgacacgcgtcaaccagccttgcctggccgagggctcgctcgtcttggacgcggctaccgggcagagggtccctatcgaaaaggtgcgtccggggatggaagttttctccttgggacctgattacagactgtatcgggtgcccgttttggaggtccttgagagcggggttggggaagttgtgcgcctcagaactcggtcagggagaacgctggtgttgacaccagatcacccgcttttgacccccgaaggttggaaacctctttgtgacctcccgcttggaactccaattgcagtccccgcagaactgcctgtggcgggccacttggccccacctgaagaacgtgttacgctcctggctcttctgttgggggatgggaacacaaagctgtcgggtcggagaggtacacgtcctaatgccttcttctacagcaaagaccccgaattgctcgcggcttatcgccggtgtgcagaagccttgggtgcaaaggtgaaagcatacgtccacccgactacgggggtggttacactcgcaaccctcgctccacgtcctggagctcaagatcctgtcaaacgcctcgttgtcgaggcgggaatggttgctaaagccgaagagaagagggtcccggaggaggtgtttcgttaccggcgtgaggcgttggcccttttcttgggccgtttgttctcgacagacggctctgttgaaaagaagaggatctcttattcaagtgccagtttgggactggcccaggatgtcgcacatctcttgctgcgccttggaattacatctcaactccgttcgagagggccacgggctcacgaggttcttatatcgggccgcgaggatattttgcggtttgctgaacttatcggaccctacctcttgggggccaagagggagagacttgcagcgctggaagctgaggcccgcaggcgtttgcctggacagggatggcacttgcggcttgttcttcctgccgtggcgtacagagtgagcgaggctaaaaggcgctcgggattttcgtggagtgaagccggtcggcgcgtcgcagttgcgggatcgtgtttgtcatctggactcaacctcaaattgcccagacgctacctttctcggcaccggttgtcgctgctcggtgaggcttttgccgaccctgggctggaagcgctcgcggaaggccaagtgctctgggaccctattgttgctgtcgaaccggccggtaaggcgagaacattcgacttgcgcgttccaccctttgcaaacttcgtgagcgaggacctggtggtgcataactccattgtggggacagccacgttcgatcagtactggagcgtgcgcacctctaagcggacttcaggaacagtgaccgtgaccgatcacttccgcgcctgggcgaaccggggcctgaacctcggcacaatagaccaaattacattgtgcgtggagggttaccaaagctctggatcagccaacatcacccagaacaccttctctcagggctcttcttccggcagttcgggtggctcatccggctccacaacgactactcgcatcgagtgtgagaacatgtccttgtccggaccctacgttagcaggatcaccaatccctttaatggtattgcgctgtacgccaacggagacacagcccgcgctaccgttaacttccccgcaagtcgcaactacaatttccgcctgcggggttgcggcaacaacaataatcttgcccgtgtggacctgaggatcgacggacggaccgtcgggaccttttattaccagggcacatacccctgggaggccccaattgacaatgtttatgtcagtgcggggagtcatacagtcgaaatcactgttactgcggataacggcacatgggacgtgtatgccgactacctggtgatacag

SEQ ID NO: 1835 - DNA, 2349 bp, Artificial Sequence
  Synthetic Construct, P77853-Tth-S158-38 DNA
atgttccttaagaaactgtctaagttgctgctcgtcgtgctccttgttgccgtttacacacaggtcaacgcgcaaacaagcattactctgacatccaacgcatccggtacgtttgacggttactattacgaactctggaaggatactggcaatacaacaatgacggtctacactcaaggtcgcttttcctgccagtggtcgaacatcaataacgcgttgtttaggaccgggaagaaatacaaccagaattggcagtctcttggcacaatccggatcacgtactctgcgacttacaacccaaacgggaactcctacttgtgtatctatggctggtctaccaacccattggtcgagttctacatcgttgagtcctgggggaactggagaccgcctggtgccacgtccctgggccaagtgacaatcgatggcgggacctacgacatctataggacgacacgcgtcaaccagccttgcctggccgagggctcgctcgtcttggacgcggctaccgggcagagggtccctatcgaaaaggtgcgtccggggatggaagttttctccttgggacctgattacagactgtatcgggtgcccgttttggaggtccttgagagcggggttagtgaagttgtgcgcctcagaactcggtcagggagaacgctggtgttgacaccagatcacccgcttttgacccccgaaggttggaaacctctttgtgacctcccgcttggaactccaattgcagtccccgcagaactgcctgtggcgggccacttggccccacctgaagaacgtgttacgctcctggctcttctgttgggggatgggaacacaaagctgtcgggtcggagaggtacacgtcctaatgccttcttctacagcaaagaccccgaattgctcgcggcttatcgccggtgtgcagaagccttgggtgcaaaggtgaaagcatacgtccacccgactacgggggtggttacactcgcaaccctcgctccacgtcctggagctcaagatcctgtcaaacgcctcgttgtcgaggcgggaatggttgctaaagccgaagagaagagggtcccggaggaggtgtttcgttaccggcgtgaggcgttggcccttttcttgggccgtttgttctcgacagacggctctgttgaaaagaagaggatctcttattcaagtgccagtttgggactggcccaggatgtcgcacatctcttgctgcgccttggaattacatctcaactccgttcgagagggccacgggctcacgaggttcttatatcgggccgcgaggatattttgcggtttgctgaacttatcggaccctacctcttgggggccaagagggagagacttgcagcgctggaagctgaggcccgcaggcgtttgcctggacagggatggcacttgcggcttgttcttcctgccgtggcgtacagagtgagcgaggctaaaaggcgctcgggattttcgtggagtgaagccggtcggcgcgtcgcagttgcgggatcgtgtttgtcatctggactcaacctcaaattgcccagacgctacctttctcggcaccggttgtcgctgctcggtgaggcttttgccgaccctgggctggaagcgctcgcggaaggccaagtgctctgggaccctattgttgctgtcgaaccggccggtaaggcgagaacattcgacttgcgcgttccaccctttgcaaacttcgtgagcgaggacctggtggtgcataactccattgtggggacagccacgttcgatcagtactggagcgtgcgcacctctaagcggacttcaggaacagtgaccgtgaccgatcacttccgcgcctgggcgaaccggggcctgaacctcggcacaatagaccaaattacattgtgcgtggagggttaccaaagctctggatcagccaacatcacccagaacaccttctctcagggctcttcttccggcagttcgggtggctcatccggctccacaacgactactcgcatcgagtgtgagaacatgtccttgtccggaccctacgttagcaggatcaccaatccctttaatggtattgcgctgtacgccaacggagacacagcccgcgctaccgttaacttccccgcaagtcgcaactacaatttccgcctgcggggttgcggcaacaacaataatcttgcccgtgtggacctgaggatcgacggacggaccgtcgggaccttttattaccagggcacatacccctgggaggccccaattgacaatgtttatgtcagtgcggggagtcatacagtcgaaatcactgttactgcggataacggcacatgggacgtgtatgccgactacctggtgatacag

SEQ ID NO: 1836 - DNA, 2349 bp, Artificial Sequence
  Synthetic Construct, P77853-Tth-S158-39 DNA
atgttccttaagaaactgtctaagttgctgctcgtcgtgctccttgttgccgtttacacacaggtcaacgcgcaaacaagcattactctgacatccaacgcatccggtacgtttgacggttactattacgaactctggaaggatactggcaatacaacaatgacggtctacactcaaggtcgcttttcctgccagtggtcgaacatcaataacgcgttgtttaggaccgggaagaaatacaaccagaattggcagtctcttggcacaatccggatcacgtactctgcgacttacaacccaaacgggaactcctacttgtgtatctatggctggtctaccaacccattggtcgagttctacatcgttgagtcctgggggaactggagaccgcctggtgccacgtccctgggccaagtgacaatcgatggcgggacctacgacatctataggacgacacgcgtcaaccagccttgcctggccgagggctcgctcgtcttggacgcggctaccgggcagagggtccctatcgaaaaggtgcgtccggggatggaagttttctccttgggacctgattacagactgtatcgggtgcccgttttggaggtccttgagagcggggttggggaagttgtgcgcctcagaactcggtcagggagaacgctggtgttgacaccagatcacccgcttttgacccccgaaggttggaaacctctttgtgacctcccgcttggaactccaattgcagtccccgcagaactgcctgtggcgggccacttggccccacctgaagaacgtgttacgctcctggctcttctgttgggggatgggaacacaaagctgtcgggtcggagaggtacacgtcctaatgccttcttctacagcaaagaccccgaattgctcgcggcttatcgccggtgtgcagaagccttgggtgcaaaggtgaaagcatacgtccacccgactacgggggtggttacactcgcaaccctcgctccacgtcctggagctcaagatcctgtcaaacgcctcgttgtcgaggcgggaatggttgctaaagccgaagagaagagggtcccggaggaggtgtttcgttaccggcgtgaggcgttggcccttttcttgggccgtttgtcctcgacagacggctctgttgaaaggaagaggatctcttattcaagtgccagtttgggactggcccaggatgtcgcacatctcttgctgcgccttggaattacatctcaactccgttcgagagggccacgggctcacgaggttcttatatcgggccgcgaggatattttgcggtttgctgaacttatcggaccctacctcttgggggccaagagggagagacttgcagcgctggaagctgaggcccgcaggcgtttgcctggacagggatggcacttgcggcttgttcttcctgccgtggcgtacagagtgagcgaggctaaaaggcgctcgggattttcgtggagtgaagccggtcagcgcgtcgcagttgcgggatcgtgtttgtcatctggactcaacctcaaattgcccagacgctacctttctcggcaccggttgtcgctgctcggtgaggcttttgccgaccctgggctggaagcgctcgcggaaggccaagtgctctgggaccctattgttgctgtcgaaccggccggtaaggcgagaacattcgacttgcgcgttccaccctttgcaaacttcgtgagcgaggacctggtggtgcataactccattgtggggacagccacgttcgatcagtactggagcgtgcgcacctctaagcggacttcaggaacagtgaccgtgaccgatcacttccgcgcctgggcgaaccggggcctgaacctcggcacaatagaccaaattacattgtgcgtggagggttaccaaagctctggatcagccaacatcacccagaacaccttctctcagggctcttcttccggcagttcgggtggctcatccggctccacaacgactactcgcatcgagtgtgagaacatgtccttgtccggaccctacgttagcaggatcaccaatccctttaatggtattgcgctgtacgccaacggagacacagcccgcgctaccgttaacttccccgcaagtcgcaactacaatttccgcctgcggggttgcggcaacaacaataatcttgcccgtgtggacctgaggatcgacggacggaccgtcgggaccttttattaccagggcacatacccctgggaggccccaattgacaatgtttatgtcagtgcggggagtcatacagtcgaaatcactgttactgcggataacggcacatgggacgtgtatgccgactacctggtgatacag

SEQ ID NO: 1837 - DNA, 2349 bp, Artificial Sequence
  Synthetic Construct, P77853-Tth-S158-42 DNA
atgttccttaagaaactgtctaagttgctgctcgtcgtgctccttgttgccgtttacacacaggtcaacgcgcaaacaagcattactctgacatccaacgcatccggtacgtttgacggttactattacgaactctggaaggatactggcaatacaacaatgacggtctacactcaaggtcgcttttcctgccagtggtcgaacatcaataacgcgttgtttaggaccgggaagaaatacaaccagaattggcagtctcttggcacaatccggatcacgtactctgcgacttacaacccaaacgggaactcctacttgtgtatctatggctggtctaccaacccattggtcgagttctacatcgttgagtcctgggggaactggagaccgcctggtgccacgtccctgggccaagtgacaatcgatggcgggacctacgacatctataggacgacacgcgtcaaccagccttgcctggccgagggctcgctcgtcttggacgcggctaccgggcagagggtccctatcgaaaaggtgcgtccggggatggaagttttctccttgggacctgattacagactgtatcgggtgcccgttttggaggtccttgagagcggggttagtgaagttgtgcgcctcagaactcggtcagggagaacgctggtgttgacaccagatcacccgcttttgacccccgaaggttggaaacctctttgtgacctcccgcttggaactccaattgcagtccccgcagaactgcctgtggcgggccacttggccccacctgaagaacgtgttacgctcctggctcttctgttgggggatgggaacacaaagctgtcgggtcggagaggtacacgtcctaatgccttcttctacagcaaagaccccgaattgctcgcggcttatcgccggtgtgcagaagccttgggtgcaaaggtgaaagcatacgtccacccgactacgggggtggttacactcgcaaccctcgctccacgtcctggagctcaagatcctgtcaaacgcctcgttgtcgaggcgggaatggttgctaaagccgaagagaagagggtcccggaggaggtgtttcgttaccggcgtgaggcgttggcccttttcttgggccgtttgttctctacagacggctctgttgaaaagaagaggatctcttattcaagtgccagtttgggactggcccaggatgtcgcacatctcttgctgcgccttggaattacatctcaactccgttcgagagggccacgggctcacgaggttcttatatcgggccgcgaggatattttgcggtttgctgaacttatcggaccctacctcttgggggccaagagggagagacttgcagcgctggaagctgaggcccgcaggcgtttgcctggacagggatggcacttgcggcttgttcttcctgccgtggcgtacagagtgagcgaggctaaaaggcgctcgggattttcgtggagtgaagccggtcggcgcgtcgcagttgcgggatcgtgtttgtcatctggactcaacctcaaattgcccagacgctacctttctcggcaccggttgtcgctgctcggtgaggcttttgccgaccctgggctggaagcgctcgcggaaggccaagtgctctgggaccctattgttgctgtcgaaccggccggtaaggcgagaacattcgacttgcgcgttccaccctttgcaaacttcgtgagcgaggacctggtggtgcataactccattgtggggacagccacgttcgatcagtactggagcgtgcgcacctctaagcggacttcaggaacagtgaccgtgaccgatcacttccgcgcctgggcgaaccggggcctgaacctcggcacaatagaccaaattacattgtgcgtggagggttaccaaagctctggatcagccaacatcacccagaacaccttctctcagggctcttcttccggcagttcgggtggctcatccggctccacaacgactactcgcatcgagtgtgagaacatgtccttgtccggaccctacgttagcaggatcaccaatccctttaatggtattgcgctgtacgccaacggagacacagcccgcgctaccgttaacttccccgcaagtcgcaactacaatttccgcctgcggggttgcggcaacaacaataatcttgcccgtgtggacctgaggatcgacggacggaccgtcgggaccttttattaccagggcacatacccctgggaggccccaattgacaatgtttatgtcagtgcggggagtcatacagtcgaaatcactgttactgcggataacggcacatgggacgtgtatgccgactacctggtgatacag

SEQ ID NO: 1838 - DNA, 2352 bp, Artificial Sequence
  Synthetic Construct, P77853-Tth-S158-107 DNA
atgttccttaagaaactgtctaagttgctgctcgtcgtgctccttgttgccgtttacacacaggtcaacgcgcaaacaagcattactctgacatccaacgcatccggtacgtttgacggttactattacgaactctggaaggatactggcaatacaacaatgacggtctacactcaaggtcgcttttcctgccagtggtcgaacatcaataacgcgttgtttaggaccgggaagaaatacaaccagaattggcagtctcttggcacaatccggatcacgtactctgcgacttacaacccaaacgggaactcctacttgtgtatctatggctggtctaccaacccattggtcgagttctacatcgttgagtcctgggggaactggagaccgcctggtgccacgtccctgggccaagtgacaatcgatggcgggacctacgacatctataggacgacacgcgtcaaccagccttgcctggccgagggctcgctcgtcttggacgcggctaccgggcagagggtccctatcgaaaaggtgcgtccggggatggaagttttctccttgggacctgattacagactgtatcgggtgcccgttttggaggtccttgagagcggggttagggaagttgtgcgcctcagaactcggtcagggagaacgctggtgttgacaccagatcacccgcttttgacccccgaaggttggaaacctctttgtgacctcccgcttggaactccaattgcagtccccgcagaactgcctgtggcgggccacttggccccacctgaagaacgtgttacgctcctggctcttctgttgggggatgggaacacaaagctgtcgggtcggagaggtacacgtcctaatgccttcttctacagcaaagaccccgaattgctcgcggcttatcgccggtgtgcagaagccttgggtgcaaaggtgaaagcatacgcccacccgactacgggggtggttacactcgcaaccctcgctccacgtcctggagctcaagatcctgtcaaacgcctcgttgtcgaggcggggatggttgctaaagccgaagagaagagggtcccggaggaggtgtttcgttaccggcgtgaggcgttggcccttttcttgggccgtttgttctcgacagacggctctgttgaaaagaagaggatctcttattcaagtgccagtttgggactggcccaggatgtcgcacatctcttgctgcgccttggaattacatctcaactccgttcgagagggccacgggctcacgaggttcttatatcgggccgcgaggatattttgcggtttgccgaacttatcggaccctacctcttgggggccaagagggagagacttgcagcgctggaagctgaggcccgcaggcgtttgcctggacagggatggcacttgcggcttgttcttcctgccgtggcgtacagagcgagcgaggctaaaaggcgctcgggattttcgtggagtgaagccggtcggcgcgtcgcagttgcgggatcgtgtttgtcatctggactcaacctcaaattgcccagacgctacctttctcggcaccggttgtcgctgctcggtgaggcttttgccgaccctgggctggaagcgctcgcggaaggccaagtgctctgggaccctattgttgctgtcgaaccggccggtaaggcgagaacattcgacttgcgcgttccaccctttgcaaacttcgtgagcgaggacctggtggtgcataactccattgtggggacagccacgttcgatcagtactggagcgtgcgcacctctaagcggacttcaggaacagtgaccgtgaccgatcacttccgcgcctgggcgaaccggggcctgaacctcggcacaatagaccaaattacattgtgcgtggagggttaccaaagctctggatcagccaacatcacccagaacaccttctctcagggctcttcttccggcagttcgggtggctcatccggctccacaacgactactcgcatcgagtgtgagaacatgtccttgtccggaccctacgttagcaggatcaccaatccctttaatggtattgcgctgtacgccaacggagacacagcccgcgctaccgttaacttccccgcaagtcgcaactacaatttccgcctgcggggttgcggcaacaacaataatcttgcccgtgtggacctgaggatcgacggacggaccgtcgggaccttttattaccagggcacatacccctgggaggccccaattgacaatgtttatgtcagtgcggggagtcatacagtcgaaatcactgttactgcggataacggcacatgggacgtgtatgccgactacctggtgatacagtga

SEQ ID NO: 1839 - DNA, 2352 bp, Artificial Sequence
  Synthetic Construct, P77853-Tth-S158-111 DNA
atgttccttaagaaactgtctaagttgctgctcgtcgtgctccttgttgccgtttacacacaggtcaacgcgcaaacaagcattactctgacatccaacgcatccggtacgtttgacggttactattacgaactctggaaggatactggcaatacaacaatgacggtctacactcaaggtcgcttttcctgccagtggtcgaacatcaataacgcgttgtttaggaccgggaagaaatacaaccagaattggcagtctcttggcacaatccggatcacgtactctgcgacttacaacccaaacgggaactcctacttgtgtatctatggctggtctaccaacccattggtcgagttctacattattgagtcctgggggaactggagaccgcctggtgccacgtccctgggccaagtgacaatcgatggcgggacctacgacatctataggacgacacgcgtcaaccagccttgcctggccgagggctcgctcgtcttggacgcggctaccgggcagagggtccctatcgaaaaggtgcgtccggggatggaagttttctccttgggacctgattacagactgtatcgggtgcccgttttggaggtccttgagagcggggttagggaagttgtgcgcctcagaactcggtcagggagaacgctggtgttgacaccagatcacccgcttttgacccccgaaggttggaaacctctttgtgacctcccgctaggaactccaattgcagtccccgcagaactgcctgtggcgggccacttggccccacctgaagaacgtgttacgctcctggctcttctgttgggggatgggaacacaaagctgtcgggtcggagaggtacacgtcctaatgccttcttctacagcaaagaccccgaattgctcgcggcttatcgccggtgtgcagaagccttgggtgcaaaggtgaaagcatacgtccacccgactacgggggtggttacactcgcaaccctcgctccacgtcctggagctcaagatcctgtcaaacgcctcgttgtcgaggcgggaatggttgctaaagccgaagagaagagggtcccggaggaggtgtttcgttaccggcgtgaggcgttggcccttttcttgggccgtttgttctcgacagacggctctgttgaaaagaagaggatctcttattcaagtgccagtttgggactggcccaggatgtcgcacatctcttgctgcgccttggaatttcatctcaactccgttcgagagggccacgggctcacgaggttcttatatcgggccgcgaggatattttgcagtttgctgaacttatcggaccctacctcttgggggccaagagggagagacttgcagcgctggaagctgaggcccgcaggcgtttgcctggacagggatggcacttgcggcttgttcttcctgccgtggcgtacagagtgagccaggctaaaaggcgcacgggattttcgtggagtgaagccggtcggcgcgtcgcagttgcgggatcgtgtttgtcatctgaactcaacctcaaattgcccagacgctacctttctcggcaccggttgtcgctgctcggtgaggcttttgccgaccctgggctggaagcgctcgcggaaggccaagtgctctgggaccctattgttgctgtcgaaccggccggtaaggcgagaacattcgacttgcgcgttccaccctttgcaaacttcgtgagcgaggacctggtggtgcataactccattgtggggacagccacgttcgatcagtactggagcgtgcgcacctctaagcggacttcaggaacagtgaccgtgaccgatcacttccgcgcctgggcgaaccggggcctgaacctcggcacaatagaccaaattacattgtgcgtggagggttaccaaagctctggatcagccaacatcacccagaacaccttctctcagggctcttcttccggcagttcgggtggctcatccggctccacaacgactactcgcatcgagtgtgagaacatgtccttgtccggaccctacgttagcaggatcaccaatccctttaatggtattgcgctgtacgccaacggagacacagcccgcgctaccgttaacttccccgcaagtcgcaactacaatttccgcctgcggggttgcggcaacaacaataatcttgcccgtgtggacctgaggatcgacggacggaccgtcgggaccttttattaccagggcacatacccctgggaggccccaattgacaatgtttatgtcagtgcggggagtcatacagtcgaaatcactgttactgcggataacggcacatgggacgtgtatgccgactacctggtgatacagtga

SEQ ID NO: 1840 - DNA, 2352 bp, Artificial Sequence; identical to SEQ ID NO: 1839
  Synthetic Construct, P77853-Tth-S158-112 DNA

SEQ ID NO: 1841 - DNA, 2352 bp, Artificial Sequence
  Synthetic Construct, P77853-Tth-S158-113 DNA
atgttccttaagaaactgtctaagttgctgctcgtcgtgctccttgttgccgtttacacacaggtcaacgcgcaaacaagcattactctgacatccaacgcatccggtacgtttgacggttactattacgaactctggaaggatactggcaatacaacaatgacggtctacactcaaggtcgcttttcctgccagtggtcgaacatcaataacgcgttgtttaggaccgggaagaaatacaaccagaattggcagtctcttggcacaatccggatcacgtactctgcgacttacaacccaaacgggaactcctacttgtgtatctatggctggtctaccaacccattggtcgagttctacatcgttgagtcctgggggaactggagaccgcctggtgccacgtccctgggccaagtgacaatcgatggcgggacctacgacatctataggacgacacgcgtcaaccagccttgcctggccgagggctcgctcgtcttggacgcggctaccgggcagagggtccctatcgaaaaggtgcgtccggggatggaagttttctccttgggacctgattacagactgtatcgggtgcccgttttggaggtccttgagagcggggttagggaagttgtgcgcctcagaactcggtcagggagaacgctggtgttgacaccagatcacccgcttttgacccccgaaggttggaaacctctttgtgacctcccgcttggaactccaattgcagtccccgcagaactgcctgtggcgggccacttggccccacctgaagaacgtgttacgctcctggctcttctgttgggggatgggaacacaaagctgtcgggtcggagaggtacacgtcctaatgccttcttctacagcaaagaccccgaattgctcgcggcttatcgccggtgtgcagaagccttgggtgcaaaggtgaaagcatacgtccacccgactacgggggtggttacactcgcaaccctcgctccacgtcctggagctcaagatcctgtcaaacgcctcgttgtcgaggcgggaatggttgctaaagccgaagagaagagggtcccggaggaggtgtttcgttaccggcgtgaggcgttggtccttttcttgggccgtttgttctcgacagacggctctgttgaaaagaagaggatctcttattcgagtgccagtttgggactggcccaggatgtcgcacatctcttgctgcgccttggaattacatctcaactccgttcgagaggaccacgggctcacgaggttcttatatcgggccgcgaggatattttgcggtttgctgaacttatcggaccctacctcttgggggccaagagggagagacttgcagcgctggaagctgaggcccgcaggcgtttgcctggacagggatggcacttgcggcttgttcttcctgccgtggcgtacagagtgagcgaggctaaaaggcgctcgggattttcgtggagtgaagccggtcggcgcgtcgcagttgcgggatcgtgtttgtcatctggactcaacctcaaattgcccagacgctacctttctcggcgccggttgtcgctgctcggtgaggcttttgccgaccctgggctggaagcgctcgcggaaggccaagtgctctgggaccctattgttgctgtcgaaccggccggtaaggcgagaacattcgacttgcgcgttccaccctttgcaaacttcgtgagcgaggacctggtggtgcataactccattgtggggacagccacgttcgatcagtactggagcgtgcgcacctctaagcggacttcaggaacagtgaccgtgaccgatcacttccgcgcctgggcgaaccggggcctgaacctcggcacaatagaccaaattacattgtgcgtggagggttaccaaagctctggatcagccaacatcacccagaacaccttctctcagggctcttcttccggcagttcgggtggctcatccggctccacaacgactactcgcatcgagtgtgagaacatgtccttgtccggaccctacgttagcaggatcaccaatccctttaatggtattgcgctgtacgccaacggagacacagcccgcgctaccgttaacttccccgcaagtcgcaactacaatttccgcctgcggggttgcggcaacaacaataatcttgcccgtgtggacctgaggatcgacggacggaccgtcgggaccttttattaccagggcacatacccctgggaggccccaattgacaatgtttatgtcagtgcggggagtcatacagtcgaaatcactgttactgcggataacggcacatgggacgtgtatgccgactacctggtgatacagtga

SEQ ID NO: 1842 - DNA, 2352 bp, Artificial Sequence
  Synthetic Construct, P77853-Tth-S158-115 DNA
atgttccttaagaaactgtctaagttgctgctcgtcgtgctccttgttgccgtttacacacaggtcaacgcgcaaacaagcattactctgacatccaacgcatccggtacgtttgacggttactattacgaactctggaaggatactggcaatacaacaatgacggtctacactcaaggtcgcttttcctgccagtggtcgaacatcaataacgcgttgtttaggaccgggaagaaatacaaccagaattggcagtctcttggcacaatccggatcacgtactctgcgacttacaacccaaacgggaactcctacttgtgtatctatggctggtctaccaacccattggtcgagttctacatcgttgagtcctgggggaactggagaccgcctggtgccacgtccctgggccaagtgacaatcgatggcgggacctacgacatctataggacgacacgcgtcaaccagccttgcctggccgagggctcgctcgtcttggacgcggctaccgggcagagggtccctatcgaaaaggtgcgtccggggatggaagttttctccttgggacctgattacagactgtatcgggtgcccgttttggaggtccttgagagcggggttagggaagttgtgcgcctcagaactcggtcagggagaacgctggtgttgacaccagatcacccgcttttgacccccgaaggttggaaacctctttgtgacctcccgcttggaactccaattgcagtccccgcagaactgcctgtggcgggccacttggccccacctgaagaacgtgttacgctcctggctcttctgttgggggatgggaacacaaagctgtcgggtcggagaggtacacgtcctaatgccttcttctacagcaaagaccccgaattgctcgcggcttatcgccggtgtgcagaagccttgggtgcaaaggtgaaagcatacgtccacccgactacgggggtggttacactcgcaaccctcgctccacgtcctggagctcaagatcctgtcaaacgcctcgttgtagaggcgggaatggttgctaaagccgaagagaagagggtcccggaggaggtgtttcgttaccggcgtgaggcgttggcccttttcttgggccgtttgttctcgacagacggctctgttgaaaagaagaggatctcttattcaagtgccagtttgggactggcccaggatgtcgcacatctcttgctgcgccttggaattacatctcaactccgttcgagagggccacgggctcacgaggttcttatatcgggtcgcgaggatattttgcggtttgctgaacttatcggaccctacctcttgggggccaagagggagagacttgcagcgctggaagctgaggcccgcaggcgtttgcctggacagggatggcacttgcggcttgctcttcctgccgtggcgtacagagtgagcgaggctaaaaggcgctcgggattttcgtggagtgaagccggtcggcgcgtcgcagttgcgggatcgtgtttgtcatctggactcaacctcaaattgcccaggcgctacctttctcggcaccggttgtcgctgctcggtgaggcttttgccgaccctgggctggaagcgctcgcggaaggccaagtgctatgggaccctattgttgctgtcgaatcggccggtaaggcgagaacattcgacttgcgcgttccaccctttgcaaacttcgtgagcgaggacctggtggtgcataactccattgtggggacagccacgttcgatcagtactggagcgtgcgcacctctaagcggacttcaggaacagtgaccgtgaccgatcacttccgcgcctgggcgaaccggggcctgaacctcggcacaatagaccaaatcacattgtgcgtggagggttaccaaagctctggatcagccaacatcacccagaacaccttctctcagggctcttcttccggcagttcgggtggctcatccggctccacaacgactactcgcatcgagtgtgagaacatgtccttgtccggaccctacgttagcaggatcaccaatccctttaatggtattgcgctgtacgccaacggagacacagcccgcgctaccgttaacttccccgcaagtcgcaactacaatttccgcctgcggggttgcggcaacaacaataatcttgcccgtgtggacctgaggatcgacggacggaccgtcgggaccttttattaccagggcacatacccctgggaggccccaattgacaatgtttatgtcagtgcggggagtcatacagtcgaaatcactgttactgcggataacggcacatgggacgtgtatgccgactacctggtgatacagtga

SEQ ID NO: 1843 - DNA, 2352 bp, Artificial Sequence
  Synthetic Construct, P77853-Tth-S158-128 DNA
atgttccttaagaaactgtctaagttgctgctcgtcgtgctccttgttgccgtttacacacaggtcaacgcgcaaacaagcattactctgacatccaacgcatccggtacgtttgacggttactattacgaactctggaaggatactggcaatacaacaatgacggtctacactcaaggtcgcttttcctgccagtggtcgaacatcaataacgcgttgtttaggaccgggaagaaatacaaccagaattggcagtctcttggcacaatccggatcacgtactctgcgacttacaacccaaacgggaactcctacttgtgtatctatggctggtctaccaacccattggtcgagttctacatcgttgagtcctgggggaactggagaccgcctggtgccacgtccctgggccaagtgacaatcgatggcgggacctacgacatctataggacgacacgcgtcaaccagccttgcctggccgagggctcgctcgtcttggacgcggctaccgggcagagggtccctatcgaaaaggtgcgtccggggatggaagttttctccttgggacctgattacagactgtatcgggtgcccgttttggaggtccttgagagcggggttagggaagttgtgcgcctcagaactcggtcagggagaacgctggtgttgacaccagatcacccgcttttgacccccgaaggttggaaacctctttgtgacctcccgcctggaactccaattgcagtccccgcagaactgcctgtggcgggccacttggccccacctgaggaacgtgttacgctcctggctcttctgttgggggatgggaacacaaagctgtcgggtcggagaggtacacgtcctaatgccttcttctacagcaaagaccccgaattgctcgcggcttatcgccggtgtgcagaagccttgggtgcaaaggtgaaagcatacgtccacccgactacgggggtggttacactcgcaaccctcgctccacgtcctggagctcaagatcctgtcaaacgcctcgttgtcgaggcgggaatggttgccaaagccgaagagaagagggtcccggaggaggtgtttcgttaccggcgtgaggcgttggcccttttcttgggccgtttgttctcgacagacggctctgttgaaaggaagaggatctcttattcaagtgccagtttgggactggcccaggatgtcgcacatctcttgctgcgccttggaattacatctcaactccgttcgagagggccacgggctcacgaggttcttatatcgggccgcgaggatattttgcggtttgccgaacttatcggaccctacctcttgggggccaagagggagagacttgcagcgctggaagctgaggcccgcaggcgtttgcctggacagggatggcacttgcggcttgttcttcctgccgtggcgtacagagtgagcgaggctaaaaggcgctcgggattttcgtggagtgaagccggtcggcgcgtcgcagttacgggatcgtgtttgtcatctggactcaacctcaaattgcccagacgctacctttctcggcaccggttgtcgctgctcggtgaggcttttgcagaccctgggctggaagcgctcgcggaaggccaagtgctctgggaccctattgttgctgtcgaaccggccggtaaggcgagaacattcgacttgcgcgttccaccctttgcaaacttcgtgagcgaggacctggtggtgcataactccattgtggggacagccacgttcgatcagtactggagcgtgcgcacctctaagcggacttcaggaacagtgaccgtgaccgatcacttccgcgcctgggcgaaccggggcctgaacctcggcacaatagaccaaattacattgtgcgtggagggttaccaaagctctggatcagccaacatcacccagaacaccttctctcagggctcttcttccggcagttcgggtggctcatccggctccacaacgactactcgcatcgagtgtgagaacatgtccttgtccggaccctacgttagcaggatcaccaatccctttaatggtattgcgctgtacgccaacggagacacagcccgcgctaccgttaacttccccgcaagtcgcaactacaatttccgcctgcggggttgcggcaacaacaataatcttgcccgtgtggacctgaggatcgacggacggaccgtcgggaccttttattaccagggcacatacccctgggaggccccaattgacaatgtttatgtcagtgcggggagtcatacagtcgaaatcactgttactgcggataacggcacatgggacgtgtatgccgactacctggtgatacagtga

SEQ ID NO: 1844 - DNA, 2352 bp, Artificial Sequence
  Synthetic Construct, P77853-Tth-S158-131 DNA
atgttccttaagaaactgtctaagttgctgctcgtcgtgctccttgttgccgtttacacacaggtcaacgcgcaaacaagcattactctgacatccaacgcatccggtacgtttgacggttactattacgaactctggaaggatactggcaatacaacaatgacggtctacactcaaggtcgcttttcctgccagtggtcgaacatcaataacgcgttgtttaggaccgggaagaaatacaaccagaattggcagtctcttggcacaatccggatcacgtactctgcgacttacaacccaaacgggaactcctacttgtgtatctatggctggtctaccaacccattggtcgagttctacatcgttgagtcctgggggaactggagaccgcctggtgccacgtccctgggccaagtgacaatcgatggcgggacctacgacatctataggacgacacgcgtcaaccagccttgcctggccgagggctcgctcgtcttggacgcggctaccgggcagagggtccctatcgaaaaggtgcgtccggggatggaagttttctccttgggacctgattacagactgtatcgggtgcccgttttggaggtccttgagagcggggttagggaagttgtgcgcctcagaactcggtcagggagaacgctggtgttgacaccagatcacccgcttttgacccccgaaggttggaaacctctttgtgacctcccgcttggaactccaattgcagtccccgcagaactgcctgtggcgggccacttggccccacctgaagaacgtgttacgctcctggctcttctgttgggggatgggaacacaaagctgtcgggtcggagaggtacacgtcctaatgccttcttctacagcaaagaccccgaattgctcgcggcttatcgccggtgtgcagaagccttgggtgcaaaggtgaaagcatacgtccacccgactacgggggtggttacactcgcaaccctcgctccacgtcctggagctcaagatcctgtcaaacgcctcgttgtcgaggcgggaatggttgctaaagccgaagagaagagggtcccggaggaggtgtttcgttaccggcgtgaggcgttggccattttcttgggccgtttgttctcgacagacggctctgttgaaaagaagaggatctcttattcaagtgccggtttgggactggcccaggatgtcgcacatctcttgctgcgccttggaattacatctcaactccgttcgagagggccacgggctcacgaggttcttatatcgggccgcgaggatattttgcggtttgctgaacttatcggaccctacctcttgggggccaagagggagagacttgcagcgctggaagctgaggcccgcaggcgtttgcctggacagggatggcacttgcggcttgttcttcctgccgtggcgtacagagtgagcgaggctaaaaggcgctcgggattttcgtggagtgaagccggtcggcgcgtcgcagttgcgggatcgtgtttgtcatctggactcaacctcaaattgcccagacgctacctttctcggcaccggttgtcgctgctcggtgaggcttttgccgaccctgggctggaagcgctcgcggaaggccaagtgctctgggaccctattgttgctgtcgaaccggccggtaaggcgagaacattcgacttgcgcgttccaccctttgcaaacttcgtgagcgaggacctggtggtgcataactccattgtggggacagccacgttcgatcagtactggagcgtgcgcacctctaagcggacttcaggaacagtgaccgtgaccgatcacttccgcgcctgggcgaaccggggcctgaacctcggcacaatagaccaaattacattgtgcgtggagggttaccaaagctctggatcagccaacatcacccagaacaccttctctcagggctcttcttccggcagttcgggtggctcatccggctccacaacgactactcgcatcgagtgtgagaacatgtccttgtccggaccctacgttagcaggatcaccaatccctttaatggtattgcgctgtacgccaacggagacacagcccgcgctaccgttaacttccccgcaagtcgcaactacaatttccgcctgcggggttgcggcaacaacaataatcttgcccgtgtggacctgaggatcgacggacggaccgtcgggaccttttattaccagggcacatacccctgggaggccccaattgacaatgtttatgtcagtgcggggagtcatacagtcgaaatcactgttactgcggataacggcacatgggacgtgtatgccgactacctggtgatacagtga

SEQ ID NO: 1845 - DNA, 2352 bp, Artificial Sequence
  Synthetic Construct, P77853-Tth-S158-132 DNA
atgttccttaagaaactgtctaagttgctgctcgtcgtgctccttgttgccgtttacacacaggtcaacgcgcaaacaagcattactctgacatccaacgcatccggtacgtttgacggttactattacgaactctggaaggatactggcaatacaacaatgacggtctacactcaaggtcgcttttcctgccagtggtcgaacatcaataacgcgttgtttaggaccgggaagaaatacaaccagaattggcagtctcttggcacaatccggatcacgtactctgcgacttacaacccaaacgggaactcctacttgtgtatctatggctggtctaccaacccattggtcgagttctacatcgttgagtcctgggggaactggagaccgcctggtgccacgtccctgggccaagtgacaatcgatggcgggacctacgacatctataggacgacacgcgtcaaccagccttgcctggccgagggctcgctcgtcttggacgcggctaccgggcagagggtccctatcgaaaaggtgcgtccggggatggaagttttctccttgggacctgattacagactgtatcgggtgcccgttttggaggtccttgagagcggggttagtgaagttgtgcgcctcagaactcggtcagggagaacgctggtgttgacaccagatcacccgcttttgacccccgaaggttggaaacccctttgtgacctcccgcttggaactccaattgcagtccccgcagaactgcctgtggcgggccacttggccccacctgaagaacgtgttacgctcctggctcttctgttgggggatgggaacacaaagctgtcgggtcggagaggtacacgtcctaatgccttcttctacagcaaagaccccgaattgctcgcggcttatcgccggtgtgcagaagccttgggtgcaaaggtgaaagcatacgtccacccgactacgggggtggttacactcgcaaccctcgctccacgtcctggagctcaagatcctgtcaaacgcctcgttgtcgaggcgggaatggttgctaaagccgaagagaagagggtcccggaggaggtgtttcgttaccggcgtgaggcgttggcccttttcttgggccgtttgttctcgacagacggctctgttgaaaagaagaggatctcttattcaagtgccagtttgggactggcccaggatgtcgcacatctcttgctgcgccttggaattacatctcaactccgttcgagagggccacgggctcacgaggttcttatatcgggccgcgaggatattttgcggtttgctgaacttatcggaccctacctcttgggggccaagagggagagacttgcagcgctggaagctgaggcccgcaggcgtttgcctggacagggatggcacttgcggcttgttcttcctgccgtggcgtacagagtgagcgaggctaaaaggcgctcgggattttcgtggagtgaagccggtcggcgcgtcgcagttgcgggaccgtgtttgtcatctggactcaacctcaaattgcccagacgctacctttctcggcaccggttgtcgctgctcggtgaggcttttgccgaccctgagctggaagcgctcgcggaaggccaagtgctctgggaccctattgttgctgtcgaaccggccggtaaggcgagaacattcgacttgcgcgttccaccctttgcaaacttcgtgagcgaggacctggtggtgcataactccattgtggggacagccacgttcgatcagtactggagcgtgcgcacctctaagcggacttcaggaacagtgaccgtgaccgatcacttccgcgcctgggcgaaccggggcctgaacctcggcacaatagaccaaattacattgtgcgtggagggttaccaaagctctggatcagccaacatcacccagaacaccttctctcagggctcttcttccggcagttcgggtggctcatccggctccacaacgactactcgcatcgagtgtgagaacatgtccttgtccggaccctacgttagcaggatcaccaatccctttaatggtattgcgctgtacgccaacggagacacagcccgcgctaccgttaacttccccgcaagtcgcaactacaatttccgcctgcggggttgcggcaacaacaataatcttgcccgtgtggacctgaggatcgacggacggaccgtcgggaccttttattaccagggcacatacccctgggaggccccaattgacaatgtttatgtcagtgcggggagtcatacagtcgaaatcactgttactgcggataacggcacatgggacgtgtatgccgactacctggtgatacagtga

SEQ ID NO: 1846 - DNA, 2352 bp, Artificial Sequence
  Synthetic Construct, P77853-Tth-S158-137 DNA
atgttccttaagaaactgtctaagttgctgctcgtcgtgctccttgttgccgtttacacacaggtcaacgcgcaaacaagcattactctgacatccaacgcatccggtacgtttgacggttactattacgaactctggaaggatactggcaatacaacaatgacggtctacactcaaggtcgcttttcctgccagtggtcgaacatcaataacgcgttgtttaggaccgggaagaaatacaaccagaattggcagtctcttggcacaatccggatcacgtactctgcgacttacaacccaaacgggaactcctacttgtgtatctatggctggtctaccaacccattggtcgagttctacatcgttgagtcctgggggaactggagaccgcctggtgccacgtccctgggccaagtgacaatcgatggcgggacctacgacatctataggacgacacgcgtcaaccagccttgcctggccgagggctcgctcgtcttggacgcggctaccgggcagagggtccctatcgaaaaggtgcgtccggggatggaagttttctccttgggacctgattacagactgtatcgggtgcccgttttggaggtccttgagagcggggttagggaagttgtgcgcctcagaactcggtcagggagaacgctggtgttgacaccagatcacccgcttttgacccccgaaggttggaaacctctttgtgacctcccgcttggaactccaattgcagtccccgcagaactgcctgtggcgggccacttggccccacctgaagaacgtgttacgctcctggctcttctgttgggggatgggaacacaaagctgtcgggtcggagaggtacacgtcctaatgccttcttctacagcaaagaccccgaattgctcgcggcttatcgccggtgtgcagaagccttgggtgcaaaggtgaaagcatacgtccacccgactacgggagtggttacactcgcaaccctcgctccacgtcctggagctcaagatcctgtcaaacgcctcgttgtcgaggcgggaatggttgctaaagccgaagagaagagggtcccggaggaggtgtttcgttaccggcgtgaggcgttggcccttttcttgggccgtttgttctcgacagacggctctgttgaaaagaagaggatctcttattcaagtgccagtttgggactggcccaggatgtcgcacatctcttgctgcgccttggaattacatctcaactccgttcgagagggccacgggctcacgaggttcttatatcgggccgcgaggatattttgcggtttgctgaacttatcggaccctacctcttgggggccaagagggagagacttgcagcgctggaagctgaggcccgcaggcgtttgcctagacagggatggcacttgcggcttgttcttcctgccgtggcgtacagagtgagcgaggctaaaaggcgatcgggattttcgtggagtgaagccggtcggcgcgtcgcagttgcgggatcgtgtttgtcatctggactcaacctcaaattgcccagacgctacctttctcggcaccggttgtcgctgctcggtgaggcttttgccgaccctgggctggaagcgctcgcggaaggccaagtgcactgggaccctattgttgctgtcgaaccggccggtaaggcgagaacattcgacttgcgcgttccaccctttgcaaacttcgtgagcgaggacctggtggtgcataactccattgtggggacagccacgttcgatcagtactggagcgtgcgcacctctaagcggacttcaggaacagtgaccgtgaccgatcacttccgcgcctgggcgaaccggggcctgaacctcggcacaatagaccaaattacattgtgcgtggagggttaccaaagctctggatcagccaacatcacccagaacaccttctctcagggctcttcttccggcagttcgggtggctcatccggctccacaacgactactcgcatcgagtgtgagaacatgtccttgtccggaccctacgttagcaggatcaccaatccctttaatggtattgcgctgtacgccaacggagacacagcccgcgctaccgttaacttccccgcaagtcgcaactacaatttccgcctgcggggttgcggcaacaacaataatcttgcccgtgtggacctgaggatcgacggacggaccgtcgggaccttttattaccagggcacatacccctgggaggccccaattgacaatgtttatgtcagtgcggggagtcatacagtcgaaatcactgttactgcggataacggcacatgggacgtgtatgccgactacctggtgatacagtga

SEQ ID NO: 1847 - DNA, 2352 bp, Artificial Sequence
  Synthetic Construct, P77853-Tth-S158-138 DNA
atgttccttaagaaactgtctaagttgctgctcgtcgtgctccttgttgccgtttacacacaggtcaacgcgcaaacaagcattactctgacatccaacgcatccggtacgtttgacggttactattacgaactctggaaggatactggcaatacaacaatgacggtctacactcaaggtcgcttttcctgccagtggtcgaacatcaataacgcgttgtttaggaccgggaagaaatacaaccagaattggcagtctcttggcacaatccggatcacgtactctgcgacttacaacccaaacgggaactcctacttgtgtatctatggctggtctaccaacccattggtcgagttctacatcgttgagtcctgggggaactggagaccgcctggtgccacgtccctgggccaagtgacaatcgatggcgggacctacgacatctataggacgacacgcgtcaaccagccttgcctggccgagggctcgctcgtcttggacgcggctaccgggcagagggtccctatcgaaaaggtgcgtccggggatggaagttttctccttgggacctgattacagactgtatcgggtgcccgttttggaggtccttgagagcggggttggggaagttgtgcgcctcagaactcggtcagggagaacgctggtgttgacaccagatcacccgcttttgacccccgaaggttggaaacctctttgtgacctcccgcttggaactccaattgcagtccccgcagaactgcctgtggcgggccacttggccccacctgaagaacgtgttacgctcctggctcttctgttgggggatgggaacacaaagctgtcgggtcggagaggtacacgtcctaatgccttcttctacagcaaagaccccgaattgctcgcggcttatcgccggtgtgcagaagccttgggtgcaaaggtgaaagcatacgtccacccgactacgggggtggttacactcgcaaccctcgctccacgacctggagctcaagatcctgtcaaacgcctcgttgtcgaggcgggaatggttgctaaagccgaagagaagagggtcccggaggaggtgtttcgttaccggcgtgaggcgttggcccttttcttgggccgtttgttctcgacagacggctctgttgaaaagaagaggatctcttattcaagtgccagtttgggactgggccaggatgtcgcacatctcttgctgcgccttggaattacatctcaactccgttcgagagggccacgggctcacgaggttcttatatcgggccgcgaggatattttgcggtttgctgaacttatcggaccctacctcttgggggccaagagggagagacttgcagcgctggaagctgaggcccgcaggcgtttgcctggacagggatggcacttgcggcttgttcttcctgccgtggcgtacagagtgagcgaggctaaaaggcgctcgggattttcgtggagtgaagccggtcggcgcgtcgcagttgcgggatcgtgtttgtcatctggactcaacctcaaattgcccagacgctacctttctcggcaccggttgtcgctgctcggtgaggcttttgccgaccctgggctggaagcgctcgcggaaggccaagtgctctgggaccctattgttgctgtcgaaccggccggtaaggcgagaacattcgacttgcgcgttccaccctttgcaaacttcgtgagcgaggacctggtggtgcataactccattgtggggacagccacgttcgatcagtactggagcgtgcgcacctctaagcggacttcaggaacagtgaccgtgaccgatcacttccgcgcctgggcgaaccggggcctgaacctcggcacaatagaccaaattacattgtgcgtggagggttaccaaagctctggatcagccaacatcacccagaacaccttctctcagggctcttcttccggcagttcgggtggctcatccggctccacaacgactactcgcatcgagtgtgagaacatgtccttgtccggaccctacgttagcaggatcaccaatccctttaatggtattgcgctgtacgccaacggagacacagcccgcgctaccgttaacttccccgcaagtcgcaactacaatttccgcctgcggggttgcggcaacaacaataatcttgcccgtgtggacctgaggatcgacggacggaccgtcgggaccttttattaccagggcacatacccctgggaggccccaattgacaatgtttatgtcagtgcggggagtcatacagtcgaaatcactgttactgcggataacggcacatgggacgtgtatgccgactacctggtgatacagtga

SEQ ID NO: 1848 - DNA, 2694 bp, Artificial Sequence
  Synthetic Construct, P77853-Tth-S63 DNA
atgttccttaagaaactgtctaagttgctgctcgtcgtgctccttgttgccgtttacacacaggtcaacgcgcaaacaagcattactctgacatccaacgcatccggtacgtttgacggttactattacgaactctggaaggatactggcaatacaacaatgacggtctacactcaaggtcgctttagcattttaccggaagaatgggttccactaattaaaaacggtaaagttaagatattccgcattggggacttcgttgatggacttatgaaggcgaaccaaggaaaagtgaagaaaacgggggatacagaagttttagaagttgcaggaatccatgcgttttcctttgacaggaagtccaagaaggcccgtgtaatggcagtgaaagccgtgataagacaccgttattccggaaatgtttatagaatagtcttaaactctggtagaaaaataacaataacagaagggcatagcctatttgtctataggaacggggatctcgttgaggcaactggggaggatgtcaaaattggggatcttcttgcagttccaagatcagtaaacctaccagagaaaagggaacgcttgaatattgttgaacttcttctgaatctctcaccggaagagacagaagatataatacttacgattccagttaaaggcagaaagaacttcttcaagggaatgttgagaacattacgttggatttttggtgaggaaaagagagtaaggacagcgagccgctatctaagacaccttgaaaatctcggatacataaggttgaggaaaattggatacgacatcattgataaggaggggcttgagaaatatagaacgttgtacgagaaacttgttgatgttgtccgctataatggcaacaagagagagtatttagttgaatttaatgctgtccgggacgttatctcactaatgccagaggaagaactgaaggaatggcgtattggaactagaaatggattcagaatgggtacgttcgtagatattgatgaagattttgccaagcttcttggctactatgtgagcgagggaagtgcgaggaagtggaagaatcaaactggaggttggagttacactgtgagattgtacaacgagaacgatgaagttcttgacgacatggaacacttagccaagaagttttttgggaaagtcaaacgtggaaagaactatgttgagataccaaagaaaatggcttatatcatctttgagagcctttgtgggactttggcagaaaacaaaagggttcctgaggtaatctttacctcatcaaagggcgttagatgggccttccttgagggttatttcatcggcgatggcgatgttcacccaagcaagagggttcgcctatcaacgaagagcgagcttttagtaaatggccttgttctcctacttaactcccttggagtatctgccattaagcttggatacgatagcggagtctacagggtttatgtaaacgaggaacttaagtttacggaatacagaaagaaaaagaatgtatatcactctcacattgttccaaaggatattctcaaagaaacttttggtaaggtcttccagaaaaatataagttacaagaaatttagagagcttgtagaaaatggaaaacttgacagggagaaagccaaacgcattgagtggttacttaacggagatatagtcctagatagagtcgtagagattaagagagagtactatgatggttacgtttacgatctaagtgtcgatgaagatgagaatttccttgctggctttggattcctctatgcacataattcctgccagtggtcgaacatcaataacgcgttgtttaggaccgggaagaaatacaaccagaattggcagtctcttggcacaatccggatcacgtactctgcgacttacaacccaaacgggaactcctacttgtgtatctatggctggtctaccaacccattggtcgagttctacatcgttgagtcctgggggaactggagaccgcctggtgccacgtccctgggccaagtgacaatcgatggcgggacctacgacatctataggacgacacgcgtcaaccagccttccattgtggggacagccacgttcgatcagtactggagcgtgcgcacctctaagcggacttcaggaacagtgaccgtgaccgatcacttccgcgcctgggcgaaccggggcctgaacctcggcacaatagaccaaattacattgtgcgtggagggttaccaaagctctggatcagccaacatcacccagaacaccttctctcagggctcttcttccggcagttcgggtggctcatccggctccacaacgactactcgcatcgagtgtgagaacatgtccttgtccggaccctacgttagcaggatcaccaatccctttaatggtattgcgctgtacgccaacggagacacagcccgcgctaccgttaacttccccgcaagtcgcaactacaatttccgcctgcggggttgcggcaacaacaataatcttgcccgtgtggacctgaggatcgacggacggaccgtcgggaccttttattaccagggcacatacccctgggaggccccaattgacaatgtttatgtcagtgcggggagtcatacagtcgaaatcactgttactgcggataacggcacatgggacgtgtatgccgactacctggtgatacagtga

SEQ ID NO: 1849 - DNA, 2694 bp, Artificial Sequence
  Synthetic Construct, P77853-Tth-S67 DNA
atgttccttaagaaactgtctaagttgctgctcgtcgtgctccttgttgccgtttacacacaggtcaacgcgcaaacaagcattactctgacatccaacgcatccggtacgtttgacggttactattacgaactctggaaggatactggcaatacaacaatgacggtctacactcaaggtcgcttttcctgccagtggagcattttaccggaagaatgggttccactaattaaaaacggtaaagttaagatattccgcattggggacttcgttgatggacttatgaaggcgaaccaaggaaaagtgaagaaaacgggggatacagaagttttagaagttgcaggaatccatgcgttttcctttgacaggaagtccaagaaggcccgtgtaatggcagtgaaagccgtgataagacaccgttattccggaaatgtttatagaatagtcttaaactctggtagaaaaataacaataacagaagggcatagcctatttgtctataggaacggggatctcgttgaggcaactggggaggatgtcaaaattggggatcttcttgcagttccaagatcagtaaacctaccagagaaaagggaacgcttgaatattgttgaacttcttctgaatctctcaccggaagagacagaagatataatacttacgattccagttaaaggcagaaagaacttcttcaagggaatgttgagaacattacgttggatttttggtgaggaaaagagagtaaggacagcgagccgctatctaagacaccttgaaaatctcggatacataaggttgaggaaaattggatacgacatcattgataaggaggggcttgagaaatatagaacgttgtacgagaaacttgttgatgttgtccgctataatggcaacaagagagagtatttagttgaatttaatgctgtccgggacgttatctcactaatgccagaggaagaactgaaggaatggcgtattggaactagaaatggattcagaatgggtacgttcgtagatattgatgaagattttgccaagcttcttggctactatgtgagcgagggaagtgcgaggaagtggaagaatcaaactggaggttggagttacactgtgagattgtacaacgagaacgatgaagttcttgacgacatggaacacttagccaagaagttttttgggaaagtcaaacgtggaaagaactatgttgagataccaaagaaaatggcttatatcatctttgagagcctttgtgggactttggcagaaaacaaaagggttcctgaggtaatctttacctcatcaaagggcgttagatgggccttccttgagggttatttcatcggcgatggcgatgttcacccaagcaagagggttcgcctatcaacgaagagcgagcttttagtaaatggccttgttctcctacttaactcccttggagtatctgccattaagcttggatacgatagcggagtctacagggtttatgtaaacgaggaacttaagtttacggaatacagaaagaaaaagaatgtatatcactctcacattgttccaaaggatattctcaaagaaacttttggtaaggtcttccagaaaaatataagttacaagaaatttagagagcttgtagaaaatggaaaacttgacagggagaaagccaaacgcattgagtggttacttaacggagatatagtcctagatagagtcgtagagattaagagagagtactatgatggttacgtttacgatctaagtgtcgatgaagatgagaatttccttgctggctttggattcctctatgcacataattcgaacatcaataacgcgttgtttaggaccgggaagaaatacaaccagaattggcagtctcttggcacaatccggatcacgtactctgcgacttacaacccaaacgggaactcctacttgtgtatctatggctggtctaccaacccattggtcgagttctacatcgttgagtcctgggggaactggagaccgcctggtgccacgtccctgggccaagtgacaatcgatggcgggacctacgacatctataggacgacacgcgtcaaccagccttccattgtggggacagccacgttcgatcagtactggagcgtgcgcacctctaagcggacttcaggaacagtgaccgtgaccgatcacttccgcgcctgggcgaaccggggcctgaacctcggcacaatagaccaaattacattgtgcgtggagggttaccaaagctctggatcagccaacatcacccagaacaccttctctcagggctcttcttccggcagttcgggtggctcatccggctccacaacgactactcgcatcgagtgtgagaacatgtccttgtccggaccctacgttagcaggatcaccaatccctttaatggtattgcgctgtacgccaacggagacacagcccgcgctaccgttaacttccccgcaagtcgcaactacaatttccgcctgcggggttgcggcaacaacaataatcttgcccgtgtggacctgaggatcgacggacggaccgtcgggaccttttattaccagggcacatacccctgggaggccccaattgacaatgtttatgtcagtgcggggagtcatacagtcgaaatcactgttactgcggataacggcacatgggacgtgtatgccgactacctggtgatacagtga

SEQ ID NO: 1850 - DNA, 2694 bp, Artificial Sequence
  Synthetic Construct, P77853-Tth-S86 DNA
atgttccttaagaaactgtctaagttgctgctcgtcgtgctccttgttgccgtttacacacaggtcaacgcgcaaacaagcattactctgacatccaacgcatccggtacgtttgacggttactattacgaactctggaaggatactggcaatacaacaatgacggtctacactcaaggtcgcttttcctgccagtggtcgaacatcaataacgcgttgtttaggaccgggaagaaatacaaccagaattggcagagcattttaccggaagaatgggttccactaattaaaaacggtaaagttaagatattccgcattggggacttcgttgatggacttatgaaggcgaaccaaggaaaagtgaagaaaacgggggatacagaagttttagaagttgcaggaatccatgcgttttcctttgacaggaagtccaagaaggcccgtgtaatggcagtgaaagccgtgataagacaccgttattccggaaatgtttatagaatagtcttaaactctggtagaaaaataacaataacagaagggcatagcctatttgtctataggaacggggatctcgttgaggcaactggggaggatgtcaaaattggggatcttcttgcagttccaagatcagtaaacctaccagagaaaagggaacgcttgaatattgttgaacttcttctgaatctctcaccggaagagacagaagatataatacttacgattccagttaaaggcagaaagaacttcttcaagggaatgttgagaacattacgttggatttttggtgaggaaaagagagtaaggacagcgagccgctatctaagacaccttgaaaatctcggatacataaggttgaggaaaattggatacgacatcattgataaggaggggcttgagaaatatagaacgttgtacgagaaacttgttgatgttgtccgctataatggcaacaagagagagtatttagttgaatttaatgctgtccgggacgttatctcactaatgccagaggaagaactgaaggaatggcgtattggaactagaaatggattcagaatgggtacgttcgtagatattgatgaagattttgccaagcttcttggctactatgtgagcgagggaagtgcgaggaagtggaagaatcaaactggaggttggagttacactgtgagattgtacaacgagaacgatgaagttcttgacgacatggaacacttagccaagaagttttttgggaaagtcaaacgtggaaagaactatgttgagataccaaagaaaatggcttatatcatctttgagagcctttgtgggactttggcagaaaacaaaagggttcctgaggtaatctttacctcatcaaagggcgttagatgggccttccttgagggttatttcatcggcgatggcgatgttcacccaagcaagagggttcgcctatcaacgaagagcgagcttttagtaaatggccttgttctcctacttaactcccttggagtatctgccattaagcttggatacgatagcggagtctacagggtttatgtaaacgaggaacttaagtttacggaatacagaaagaaaaagaatgtatatcactctcacattgttccaaaggatattctcaaagaaacttttggtaaggtcttccagaaaaatataagttacaagaaatttagagagcttgtagaaaatggaaaacttgacagggagaaagccaaacgcattgagtggttacttaacggagatatagtcctagatagagtcgtagagattaagagagagtactatgatggttacgtttacgatctaagtgtcgatgaagatgagaatttccttgctggctttggattcctctatgcacataattctcttggcacaatccggatcacgtactctgcgacttacaacccaaacgggaactcctacttgtgtatctatggctggtctaccaacccattggtcgagttctacatcgttgagtcctgggggaactggagaccgcctggtgccacgtccctgggccaagtgacaatcgatggcgggacctacgacatctataggacgacacgcgtcaaccagccttccattgtggggacagccacgttcgatcagtactggagcgtgcgcacctctaagcggacttcaggaacagtgaccgtgaccgatcacttccgcgcctgggcgaaccggggcctgaacctcggcacaatagaccaaattacattgtgcgtggagggttaccaaagctctggatcagccaacatcacccagaacaccttctctcagggctcttcttccggcagttcgggtggctcatccggctccacaacgactactcgcatcgagtgtgagaacatgtccttgtccggaccctacgttagcaggatcaccaatccctttaatggtattgcgctgtacgccaacggagacacagcccgcgctaccgttaacttccccgcaagtcgcaactacaatttccgcctgcggggttgcggcaacaacaataatcttgcccgtgtggacctgaggatcgacggacggaccgtcgggaccttttattaccagggcacatacccctgggaggccccaattgacaatgtttatgtcagtgcggggagtcatacagtcgaaatcactgttactgcggataacggcacatgggacgtgtatgccgactacctggtgatacagtga

SEQ ID NO: 1851 - DNA, 2694 bp, Artificial Sequence
  Synthetic Construct, P77853-Tth-S95 DNA
atgttccttaagaaactgtctaagttgctgctcgtcgtgctccttgttgccgtttacacacaggtcaacgcgcaaacaagcattactctgacatccaacgcatccggtacgtttgacggttactattacgaactctggaaggatactggcaatacaacaatgacggtctacactcaaggtcgcttttcctgccagtggtcgaacatcaataacgcgttgtttaggaccgggaagaaatacaaccagaattggcagtctcttggcacaatccggatcacgtacagcattttaccggaagaatgggttccactaattaaaaacggtaaagttaagatattccgcattggggacttcgttgatggacttatgaaggcgaaccaaggaaaagtgaagaaaacgggggatacagaagttttagaagttgcaggaatccatgcgttttcctttgacaggaagtccaagaaggcccgtgtaatggcagtgaaagccgtgataagacaccgttattccggaaatgtttatagaatagtcttaaactctggtagaaaaataacaataacagaagggcatagcctatttgtctataggaacggggatctcgttgaggcaactggggaggatgtcaaaattggggatcttcttgcagttccaagatcagtaaacctaccagagaaaagggaacgcttgaatattgttgaacttcttctgaatctctcaccggaagagacagaagatataatacttacgattccagttaaaggcagaaagaacttcttcaagggaatgttgagaacattacgttggatttttggtgaggaaaagagagtaaggacagcgagccgctatctaagacaccttgaaaatctcggatacataaggttgaggaaaattggatacgacatcattgataaggaggggcttgagaaatatagaacgttgtacgagaaacttgttgatgttgtccgctataatggcaacaagagagagtatttagttgaatttaatgctgtccgggacgttatctcactaatgccagaggaagaactgaaggaatggcgtattggaactagaaatggattcagaatgggtacgttcgtagatattgatgaagattttgccaagcttcttggctactatgtgagcgagggaagtgcgaggaagtggaagaatcaaactggaggttggagttacactgtgagattgtacaacgagaacgatgaagttcttgacgacatggaacacttagccaagaagttttttgggaaagtcaaacgtggaaagaactatgttgagataccaaagaaaatggcttatatcatctttgagagcctttgtgggactttggcagaaaacaaaagggttcctgaggtaatctttacctcatcaaagggcgttagatgggccttccttgagggttatttcatcggcgatggcgatgttcacccaagcaagagggttcgcctatcaacgaagagcgagcttttagtaaatggccttgttctcctacttaactcccttggagtatctgccattaagcttggatacgatagcggagtctacagggtttatgtaaacgaggaacttaagtttacggaatacagaaagaaaaagaatgtatatcactctcacattgttccaaaggatattctcaaagaaacttttggtaaggtcttccagaaaaatataagttacaagaaatttagagagcttgtagaaaatggaaaacttgacagggagaaagccaaacgcattgagtggttacttaacggagatatagtcctagatagagtcgtagagattaagagagagtactatgatggttacgtttacgatctaagtgtcgatgaagatgagaatttccttgctggctttggattcctctatgcacataattctgcgacttacaacccaaacgggaactcctacttgtgtatctatggctggtctaccaacccattggtcgagttctacatcgttgagtcctgggggaactggagaccgcctggtgccacgtccctgggccaagtgacaatcgatggcgggacctacgacatctataggacgacacgcgtcaaccagccttccattgtggggacagccacgttcgatcagtactggagcgtgcgcacctctaagcggacttcaggaacagtgaccgtgaccgatcacttccgcgcctgggcgaaccggggcctgaacctcggcacaatagaccaaattacattgtgcgtggagggttaccaaagctctggatcagccaacatcacccagaacaccttctctcagggctcttcttccggcagttcgggtggctcatccggctccacaacgactactcgcatcgagtgtgagaacatgtccttgtccggaccctacgttagcaggatcaccaatccctttaatggtattgcgctgtacgccaacggagacacagcccgcgctaccgttaacttccccgcaagtcgcaactacaatttccgcctgcggggttgcggcaacaacaataatcttgcccgtgtggacctgaggatcgacggacggaccgtcgggaccttttattaccagggcacatacccctgggaggccccaattgacaatgtttatgtcagtgcggggagtcatacagtcgaaatcactgttactgcggataacggcacatgggacgtgtatgccgactacctggtgatacagtga

SEQ ID NO: 1852 - DNA, 2694 bp, Artificial Sequence
  Synthetic Construct, P77853-Tth-S112 DNA
atgttccttaagaaactgtctaagttgctgctcgtcgtgctccttgttgccgtttacacacaggtcaacgcgcaaacaagcattactctgacatccaacgcatccggtacgtttgacggttactattacgaactctggaaggatactggcaatacaacaatgacggtctacactcaaggtcgcttttcctgccagtggtcgaacatcaataacgcgttgtttaggaccgggaagaaatacaaccagaattggcagtctcttggcacaatccggatcacgtactctgcgacttacaacccaaacgggaactcctacttgtgtatctatggctggagcattttaccggaagaatgggttccactaattaaaaacggtaaagttaagatattccgcattggggacttcgttgatggacttatgaaggcgaaccaaggaaaagtgaagaaaacgggggatacagaagttttagaagttgcaggaatccatgcgttttcctttgacaggaagtccaagaaggcccgtgtaatggcagtgaaagccgtgataagacaccgttattccggaaatgtttatagaatagtcttaaactctggtagaaaaataacaataacagaagggcatagcctatttgtctataggaacggggatctcgttgaggcaactggggaggatgtcaaaattggggatcttcttgcagttccaagatcagtaaacctaccagagaaaagggaacgcttgaatattgttgaacttcttctgaatctctcaccggaagagacagaagatataatacttacgattccagttaaaggcagaaagaacttcttcaagggaatgttgagaacattacgttggatttttggtgaggaaaagagagtaaggacagcgagccgctatctaagacaccttgaaaatctcggatacataaggttgaggaaaattggatacgacatcattgataaggaggggcttgagaaatatagaacgttgtacgagaaacttgttgatgttgtccgctataatggcaacaagagagagtatttagttgaatttaatgctgtccgggacgttatctcactaatgccagaggaagaactgaaggaatggcgtattggaactagaaatggattcagaatgggtacgttcgtagatattgatgaagattttgccaagcttcttggctactatgtgagcgagggaagtgcgaggaagtggaagaatcaaactggaggttggagttacactgtgagattgtacaacgagaacgatgaagttcttgacgacatggaacacttagccaagaagttttttgggaaagtcaaacgtggaaagaactatgttgagataccaaagaaaatggcttatatcatctttgagagcctttgtgggactttggcagaaaacaaaagggttcctgaggtaatctttacctcatcaaagggcgttagatgggccttccttgagggttatttcatcggcgatggcgatgttcacccaagcaagagggttcgcctatcaacgaagagcgagcttttagtaaatggccttgttctcctacttaactcccttggagtatctgccattaagcttggatacgatagcggagtctacagggtttatgtaaacgaggaacttaagtttacggaatacagaaagaaaaagaatgtatatcactctcacattgttccaaaggatattctcaaagaaacttttggtaaggtcttccagaaaaatataagttacaagaaatttagagagcttgtagaaaatggaaaacttgacagggagaaagccaaacgcattgagtggttacttaacggagatatagtcctagatagagtcgtagagattaagagagagtactatgatggttacgtttacgatctaagtgtcgatgaagatgagaatttccttgctggctttggattcctctatgcacataattctaccaacccattggtcgagttctacatcgttgagtcctgggggaactggagaccgcctggtgccacgtccctgggccaagtgacaatcgatggcgggacctacgacatctataggacgacacgcgtcaaccagccttccattgtggggacagccacgttcgatcagtactggagcgtgcgcacctctaagcggacttcaggaacagtgaccgtgaccgatcacttccgcgcctgggcgaaccggggcctgaacctcggcacaatagaccaaattacattgtgcgtggagggttaccaaagctctggatcagccaacatcacccagaacaccttctctcagggctcttcttccggcagttcgggtggctcatccggctccacaacgactactcgcatcgagtgtgagaacatgtccttgtccggaccctacgttagcaggatcaccaatccctttaatggtattgcgctgtacgccaacggagacacagcccgcgctaccgttaacttccccgcaagtcgcaactacaatttccgcctgcggggttgcggcaacaacaataatcttgcccgtgtggacctgaggatcgacggacggaccgtcgggaccttttattaccagggcacatacccctgggaggccccaattgacaatgtttatgtcagtgcggggagtcatacagtcgaaatcactgttactgcggataacggcacatgggacgtgtatgccgactacctggtgatacagtga

SEQ ID NO: 1853 - DNA, 2694 bp, Artificial Sequence
  Synthetic Construct, P77853-Tth-S124 DNA
atgttccttaagaaactgtctaagttgctgctcgtcgtgctccttgttgccgtttacacacaggtcaacgcgcaaacaagcattactctgacatccaacgcatccggtacgtttgacggttactattacgaactctggaaggatactggcaatacaacaatgacggtctacactcaaggtcgcttttcctgccagtggtcgaacatcaataacgcgttgtttaggaccgggaagaaatacaaccagaattggcagtctcttggcacaatccggatcacgtactctgcgacttacaacccaaacgggaactcctacttgtgtatctatggctggtctaccaacccattggtcgagttctacatcgttgagagcattttaccggaagaatgggttccactaattaaaaacggtaaagttaagatattccgcattggggacttcgttgatggacttatgaaggcgaaccaaggaaaagtgaagaaaacgggggatacagaagttttagaagttgcaggaatccatgcgttttcctttgacaggaagtccaagaaggcccgtgtaatggcagtgaaagccgtgataagacaccgttattccggaaatgtttatagaatagtcttaaactctggtagaaaaataacaataacagaagggcatagcctatttgtctataggaacggggatctcgttgaggcaactggggaggatgtcaaaattggggatcttcttgcagttccaagatcagtaaacctaccagagaaaagggaacgcttgaatattgttgaacttcttctgaatctctcaccggaagagacagaagatataatacttacgattccagttaaaggcagaaagaacttcttcaagggaatgttgagaacattacgttggatttttggtgaggaaaagagagtaaggacagcgagccgctatctaagacaccttgaaaatctcggatacataaggttgaggaaaattggatacgacatcattgataaggaggggcttgagaaatatagaacgttgtacgagaaacttgttgatgttgtccgctataatggcaacaagagagagtatttagttgaatttaatgctgtccgggacgttatctcactaatgccagaggaagaactgaaggaatggcgtattggaactagaaatggattcagaatgggtacgttcgtagatattgatgaagattttgccaagcttcttggctactatgtgagcgagggaagtgcgaggaagtggaagaatcaaactggaggttggagttacactgtgagattgtacaacgagaacgatgaagttcttgacgacatggaacacttagccaagaagttttttgggaaagtcaaacgtggaaagaactatgttgagataccaaagaaaatggcttatatcatctttgagagcctttgtgggactttggcagaaaacaaaagggttcctgaggtaatctttacctcatcaaagggcgttagatgggccttccttgagggttatttcatcggcgatggcgatgttcacccaagcaagagggttcgcctatcaacgaagagcgagcttttagtaaatggccttgttctcctacttaactcccttggagtatctgccattaagcttggatacgatagcggagtctacagggtttatgtaaacgaggaacttaagtttacggaatacagaaagaaaaagaatgtatatcactctcacattgttccaaaggatattctcaaagaaacttttggtaaggtcttccagaaaaatataagttacaagaaatttagagagcttgtagaaaatggaaaacttgacagggagaaagccaaacgcattgagtggttacttaacggagatatagtcctagatagagtcgtagagattaagagagagtactatgatggttacgtttacgatctaagtgtcgatgaagatgagaatttccttgctggctttggattcctctatgcacataattcctgggggaactggagaccgcctggtgccacgtccctgggccaagtgacaatcgatggcgggacctacgacatctataggacgacacgcgtcaaccagccttccattgtggggacagccacgttcgatcagtactggagcgtgcgcacctctaagcggacttcaggaacagtgaccgtgaccgatcacttccgcgcctgggcgaaccggggcctgaacctcggcacaatagaccaaattacattgtgcgtggagggttaccaaagctctggatcagccaacatcacccagaacaccttctctcagggctcttcttccggcagttcgggtggctcatccggctccacaacgactactcgcatcgagtgtgagaacatgtccttgtccggaccctacgttagcaggatcaccaatccctttaatggtattgcgctgtacgccaacggagacacagcccgcgctaccgttaacttccccgcaagtcgcaactacaatttccgcctgcggggttgcggcaacaacaataatcttgcccgtgtggacctgaggatcgacggacggaccgtcgggaccttttattaccagggcacatacccctgggaggccccaattgacaatgtttatgtcagtgcggggagtcatacagtcgaaatcactgttactgcggataacggcacatgggacgtgtatgccgactacctggtgatacagtga

SEQ ID NO: 1854 - DNA, 2694 bp, Artificial Sequence
  Synthetic Construct, P77853-Tth-S178 DNA
atgttccttaagaaactgtctaagttgctgctcgtcgtgctccttgttgccgtttacacacaggtcaacgcgcaaacaagcattactctgacatccaacgcatccggtacgtttgacggttactattacgaactctggaaggatactggcaatacaacaatgacggtctacactcaaggtcgcttttcctgccagtggtcgaacatcaataacgcgttgtttaggaccgggaagaaatacaaccagaattggcagtctcttggcacaatccggatcacgtactctgcgacttacaacccaaacgggaactcctacttgtgtatctatggctggtctaccaacccattggtcgagttctacatcgttgagtcctgggggaactggagaccgcctggtgccacgtccctgggccaagtgacaatcgatggcgggacctacgacatctataggacgacacgcgtcaaccagccttccattgtggggacagccacgttcgatcagtactggagcgtgcgcacctctaagcggactagcattttaccggaagaatgggttccactaattaaaaacggtaaagttaagatattccgcattggggacttcgttgatggacttatgaaggcgaaccaaggaaaagtgaagaaaacgggggatacagaagttttagaagttgcaggaatccatgcgttttcctttgacaggaagtccaagaaggcccgtgtaatggcagtgaaagccgtgataagacaccgttattccggaaatgtttatagaatagtcttaaactctggtagaaaaataacaataacagaagggcatagcctatttgtctataggaacggggatctcgttgaggcaactggggaggatgtcaaaattggggatcttcttgcagttccaagatcagtaaacctaccagagaaaagggaacgcttgaatattgttgaacttcttctgaatctctcaccggaagagacagaagatataatacttacgattccagttaaaggcagaaagaacttcttcaagggaatgttgagaacattacgttggatttttggtgaggaaaagagagtaaggacagcgagccgctatctaagacaccttgaaaatctcggatacataaggttgaggaaaattggatacgacatcattgataaggaggggcttgagaaatatagaacgttgtacgagaaacttgttgatgttgtccgctataatggcaacaagagagagtatttagttgaatttaatgctgtccgggacgttatctcactaatgccagaggaagaactgaaggaatggcgtattggaactagaaatggattcagaatgggtacgttcgtagatattgatgaagattttgccaagcttcttggctactatgtgagcgagggaagtgcgaggaagtggaagaatcaaactggaggttggagttacactgtgagattgtacaacgagaacgatgaagttcttgacgacatggaacacttagccaagaagttttttgggaaagtcaaacgtggaaagaactatgttgagataccaaagaaaatggcttatatcatctttgagagcctttgtgggactttggcagaaaacaaaagggttcctgaggtaatctttacctcatcaaagggcgttagatgggccttccttgagggttatttcatcggcgatggcgatgttcacccaagcaagagggttcgcctatcaacgaagagcgagcttttagtaaatggccttgttctcctacttaactcccttggagtatctgccattaagcttggatacgatagcggagtctacagggtttatgtaaacgaggaacttaagtttacggaatacagaaagaaaaagaatgtatatcactctcacattgttccaaaggatattctcaaagaaacttttggtaaggtcttccagaaaaatataagttacaagaaatttagagagcttgtagaaaatggaaaacttgacagggagaaagccaaacgcattgagtggttacttaacggagatatagtcctagatagagtcgtagagattaagagagagtactatgatggttacgtttacgatctaagtgtcgatgaagatgagaatttccttgctggctttggattcctctatgcacataattcaggaacagtgaccgtgaccgatcacttccgcgcctgggcgaaccggggcctgaacctcggcacaatagaccaaattacattgtgcgtggagggttaccaaagctctggatcagccaacatcacccagaacaccttctctcagggctcttcttccggcagttcgggtggctcatccggctccacaacgactactcgcatcgagtgtgagaacatgtccttgtccggaccctacgttagcaggatcaccaatccctttaatggtattgcgctgtacgccaacggagacacagcccgcgctaccgttaacttccccgcaagtcgcaactacaatttccgcctgcggggttgcggcaacaacaataatcttgcccgtgtggacctgaggatcgacggacggaccgtcgggaccttttattaccagggcacatacccctgggaggccccaattgacaatgtttatgtcagtgcggggagtcatacagtcgaaatcactgttactgcggataacggcacatgggacgtgtatgccgactacctggtgatacagtga

SEQ ID NO: 1855 - DNA, 2349 bp, Artificial Sequence
  Synthetic Construct, P77853-Tth-S158-30 DNA
atgttccttaagaaactgtctaagttgctgctcgtcgtgctccttgttgccgtttacacacaggtcaacgcgcaaacaagcattactctgacatccaacgcatccggtacgtttgacggttactattacgaactctggaaggatactggcaatacaacaatgacggtctacactcaaggtcgcttttcctgccagtggtcgaacatcaataacgcgttgtttaggaccgggaagaaatacaaccagaattggcagtctcttggcacaatccggatcacgtactctgcgacttacaacccaaacgggaactcctacttgtgtatctatggctggtctaccaacccattggtcgagttctacatcgttgagtcctgggggaactggagaccgcctggtgccacgtccctgggccaagtgacaatcgatggcgggacctacgacatctataggacgacacgcgtcaaccagccttgcctggccgagggctcgctcgtcttggacgcggctaccgggcagagggtccctatcgaaaaggtgcgtccggggatggaagttttctccttgggacctgattacagactgtatcgggtgcccgttttggaggtccttgagagcggggttagggaagttgtgcgcctcagaactcggtcagggagaacgctggtgttgacaccagatcacccgcttttgacccccgaaggttggaaacctctttgtgacctcccgcttggaactccaattgcagtccccgcagaactgcctgtggcgggccacttggccccacctgaagaacgtgttacgctcctggctcttctgttgggggatgggaacacaaagctgtcgggtcggagaggtacacgtcctaatgccttcttctacagcaaagaccccgaattgctcgcggcttatcgccggtgtgcagaagccttgggtgcaaaggtgaaagcatacgtccacccgactacgggggtggttacactcgcaaccctcgctccacgtcctggagctcaagatcctgtcaaacgcctcgttgtcgaggcgggaatggttgctaaagccgaagagaagagggtcccggaggaggtgtttcgttaccggcgtgaggcgttggcccttttcttgggccgtttgttctcgacagacggctctgttgaaaagaagaggatctcttattcaagtgccagtttgggactggcccaggatgtcgcacatctcttgctgcgccttggaattacatctcaactccgttcgagagggccacgggctcacgaggttcttatatcgggccgcgaggatattttgcggtttgctgaacttatcggaccctacctcttgggggccaagagggagagacttgcagcgctggaagctgaggcccgcaggcgtttgcctggacagggatggcacttgcggcttgttcttcctgccgtggcgtacagagtgagcgaggctaaaaggcgctcgggattttcgtggagtgaagccggtcggcgcgtcgcagttgcgggatcgtgtttgtcatctggactcaacctcaaattgcccagacgctacctttctcggcaccggttgtcgatgctcggtgaggcttttgccgaccctgggctggaagcgctcgcggaaggccaagtgctctgggaccctattgttgctgtcgaaccggccggtaaggcgagaacattcgacttgcgcgttccaccctttgcaaacttcgtgagcgaggacctggtggtgcataactccattgtggggacagccacgttcgatcagtactggagcgtgcgcacctctaagcggacttcaggaacagtgaccgtgaccgatcacttccgcgcctgggcgaaccggggcctgaacctcggcacaatagaccaaattacattgtgcgtggagggttaccaaagctctggatcagccaacatcacccagaacaccttctctcagggctcttcttccggcagttcgggtggctcatccggctccacaacgactactcgcatcgagtgtgagaacatgtccttgtccggaccctacgttagcaggatcaccaatccctttaatggtattgcgctgtacgccaacggagacacagcccgcgctaccgttaacttccccgcaagtcgcaactacaatttccgcctgcggggttgcggcaacaacaataatcttgcccgtgtggacctgaggatcgacggacggaccgtcgggaccttttattaccagggcacatacccctgggaggccccaattgacaatgtttatgtcagtgcggggagtcatacagtcgaaatcactgttactgcggataacggcacatgggacgtgtatgccgactacctggtgatacag

SEQ ID NO: 1856 - DNA, 2349 bp, Artificial Sequence
  Synthetic Construct, P77853-Tth-S158-30-38 DNA
atgttccttaagaaactgtctaagttgctgctcgtcgtgctccttgttgccgtttacacacaggtcaacgcgcaaacaagcattactctgacatccaacgcatccggtacgtttgacggttactattacgaactctggaaggatactggcaatacaacaatgacggtctacactcaaggtcgcttttcctgccagtggtcgaacatcaataacgcgttgtttaggaccgggaagaaatacaaccagaattggcagtctcttggcacaatccggatcacgtactctgcgacttacaacccaaacgggaactcctacttgtgtatctatggctggtctaccaacccattggtcgagttctacatcgttgagtcctgggggaactggagaccgcctggtgccacgtccctgggccaagtgacaatcgatggcgggacctacgacatctataggacgacacgcgtcaaccagccttgcctggccgagggctcgctcgtcttggacgcggctaccgggcagagggtccctatcgaaaaggtgcgtccggggatggaagttttctccttgggacctgattacagactgtatcgggtgcccgttttggaggtccttgagagcggggttggggaagttgtgcgcctcagaactcggtcagggagaacgctggtgttgacaccagatcacccgcttttgacccccgaaggttggaaacctctttgtgacctcccgcttggaactccaattgcagtccccgcagaactgcctgtggcgggccacttggccccacctgaagaacgtgttacgctcctggctcttctgttgggggatgggaacacaaagctgtcgggtcggagaggtacacgtcctaatgccttcttctacagcaaagaccccgaattgctcgcggcttatcgccggtgtgcagaagccttgggtgcaaaggtgaaagcatacgtccacccgactacgggggtggttacactcgcaaccctcgctccacgtcctggagctcaagatcctgtcaaacgcctcgttgtcgaggcgggaatggttgctaaagccgaagagaagagggtcccggaggaggtgtttcgttaccggcgtgaggcgttggcccttttcttgggccgtttgttctcgacagacggctctgttgaaaagaagaggatctcttattcaagtgccagtttgggactggcccaggatgtcgcacatctcttgctgcgccttggaattacatctcaactccgttcgagagggccacgggctcacgaggttcttatatcgggccgcgaggatattttgcggtttgctgaacttatcggaccctacctcttgggggccaagagggagagacttgcagcgctggaagctgaggcccgcaggcgtttgcctggacagggatggcacttgcggcttgttcttcctgccgtggcgtacagagtgagcgaggctaaaaggcgctcgggattttcgtggagtgaagccggtcggcgcgtcgcagttgcgggatcgtgtttgtcatctggactcaacctcaaattgcccagacgctacctttctcggcaccggttgtcgatgctcggtgaggcttttgccgaccctgggctggaagcgctcgcggaaggccaagtgctctgggaccctattgttgctgtcgaaccggccggtaaggcgagaacattcgacttgcgcgttccaccctttgcaaacttcgtgagcgaggacctggtggtgcataactccattgtggggacagccacgttcgatcagtactggagcgtgcgcacctctaagcggacttcaggaacagtgaccgtgaccgatcacttccgcgcctgggcgaaccggggcctgaacctcggcacaatagaccaaattacattgtgcgtggagggttacaaaagctctggatcagccaacatcacccagaacaccttctctcagggctcttcttccggcagttcgggtggctcatccggctccacaacgactactcgcatcgagtgtgagaacatgtccttgtccggaccctacgttagcaggatcaccaatccctttaatggtattgcgctgtacgccaacggagacacagcccgcgctaccgttaacttccccgcaagtcgcaactacaatttccgcctgcggggttgcggcaacaacaataatcttgcccgtgtggacctgaggatcgacggacggaccgtcgggaccttttattaccagggcacgtacccctgggaggccccaattgacaatgtttatgtcagtgcggggagtcatacagtcgaaatcactgttactgcggataacggcacatgggacgtgtatgccgactacctggtgatacag

SEQ ID NO: 1857 - DNA, 2349 bp, Artificial Sequence
  Synthetic Construct, P77853-Tth-S158-30-103 DNA
atgttccttaagaaactgtctaagttgctgctcgtcgtgctccttgttgccgtttacacacaggtcaacgcgcaaacaagcattactctgacatccaacgcatccggtacgtttgacggttactattacgaactctggaaggatactggcaatacaacaatgacggtctacactcaaggtcgcttttcctgccagtggtcgaacatcaataacgcgttgtttaggaccgggaagaaatacaaccagaattggcagtctcttggcacaatccggatcacgtactctgcgacttacaacccaaacgggaactcctacttgtgtatctatggctggtctaccaacccattggtcgagttctacatcgttgagtcctgggggaactggagaccgcctggtgccacgtccctgggccaagtgacaatcgatggcgggacctacgacatctataggacgacacgcgtcaaccagccttgcctggccgagggctcgctcgtcttggacgcggctaccgggcagagggtccctatcgaaaaggtgcgtccggggatggaagttttctccttgggacctgattacagactgtatcgggtgcccgttttggaggtccttgagagcggggttggggaagttgtgcgcctcagaactcggtcagggagaacgctggtgttgacaccagatcacccgcttttgacccccgaaggttggaaacctctttgtgacctcccgcttggaactccaattgcagtccccgcagaactgcctgtggcgggccacttggccccacctgaagaacgtgttacgctcctggctcttctgttgggggatgggaacacaaagctgtcgggtcggagaggtacacgtcctaatgccttcttctacagcaaagaccccgaattgctcgcggcttatcgccggtgtgcagaagccttgggtgcaaaggtgaaagcatacgtccacccgactacgggggtggttacactcgcaaccctcgctccacgtcctggagctcaagatcctgtcaaacgcctcgttgtcgaggcgggaatggttgctaaagccgaagagaagagggtcccggaggaggtgtttcgttaccggcgtgaggcgttggcccttttcttgggccgtttgttctcgacagacggctctgttgaaaagaagaggatctcttattcaagtgccagtttgggactggcccaggatgtcgcacatctcttgctgcgccttggaattacatctcaactccgttcgagagggccacgggctcacgaggttcttatatcgggccgcgaggatattttgcggtttgctgaacttatcggaccctacctcttgggggccaagagggagagacttgcagcgctggaagctgaggcccgcaggcgtttgcctggacagggatggcacttgcggcttgttcttcctgccgtggcgtacagagtgagcgaggctaaaaggcgctcgggattttcgtggagtgaagccggtcggcgcgtcgcagttgcgggatcgtgtttgtcatctggactcaacctcaaattgcccagacgctacctttctcggcaccggttgtcgatgctcggtgaggcttttgccgaccctgggctggaagcgctcgcggaaggccaagtgctctgggaccctattgttgctgtcgaaccggccggtaaggcgagaacattcgacttgcgcgttccaccctttgcaaacttcgtgagcgaggacctggtggtgcataactccattgtggggacagccacgttcgatcagtactggagcgtgcgcacctctaagcggacttcaggaacagtgaccgtgaccgatcacttccgcgcctgggcgaaccggggcctgaacctcggcacaatagaccaaattacattgtgcgtggagggttaccaaagctctggatcagccaacatcacccagaacaccttctctcagggctcttcttccggcagttcgggtggctcatccggctccacaacgactgctcgcatcgagtgtgagaacatgtccttgtccggtccctacgttagcaggatcaccaatccctttaatggtattgcgctgtacgccaacggagacacagcccgcgctaccgttaacttccccgcaagtcgcaactacaatttccgcctgcggggttgcggcaacaacaataatcttgcccgtgtggacctgaggatcgacggacggaccgtcgggaccttttattaccagggcacatacccctgggaggccccaattgacaatgtttatgtcagtgcggggagtcatacagtcgaaatcactgttactgcggataacggcacatgggacgtgtatgccgactacctggtgatacag

SEQ ID NO: 1858 - DNA, 2349 bp, Artificial Sequence
  Synthetic Construct, P77853-Tth-S158-30-108/205/345 DNA
atgttccttaagaaactgtctaagttgctgctcgtcgtgctccttgttgccgtttacacacaggtcaacgcgcaaacaagcattactctgacatccaacgcatccggtacgtttgacggttactattacgaactctggaaggatactggcaatacaacaatgacggtctacactcaaggtcgcttttcctgccagtggtcgaacatcaataacgcgttgtttaggaccgggaagaaatacaaccagaattggcagtctcttggcacaatccggatcacgtactctgcgacttacaacccaaacgggaactcctacttgtgtatctatggctggtctaccaacccattggtcgagttctacatcgttgagtcctgggggaactggagaccgcctggtgccacgtccctgggccaagtgacaatcgatggcgggacctacgacatctataggacgacacgcgtcaaccagccttgcctggccgagggctcgctcgtcttggacgcggctaccgggcagagggtccctatcgaaaaggtgcgtccggggatggaagttttctccttgggacctgattacagactgtatcgggtgcccgttttggaggtccttgagagcggggttggggaagttgtgcgcctcagaactcggtcagggagaacgctggtgttgacaccagatcacccgcttttgacccccgaaggttggaaacctctttgtgacctcccgcttggaactccaattgcagtccccgcagaactgcctgtggcgggccacttggccccacctgaagaacgtgttacgctcctggctcttctgttgggggatgggaacacaaagctgtcgggtcggagaggtacacgtcctaatgccttcttctacagcaaagaccccgaattgctcgcggcttatcgccggtgtgcagaagccttgggtgcaaaggtgaaagcatacgtccacccgactacgggggtggttacactcgcaaccctcgctccacgtcctggagctcaagatcctgtcaaacgcctcgttgtcgaggcgggaatggttgctaaagccgaagagaagagggtcccggaggaggtgtttcgttaccggcgtgaggcgttggcccttttcttgggccgtttgttctcgacagacggctctgttgaaaagaagaggatctcttattcaagtgccagtttgggactggcccaggatgtcgcacatctcttgctgcgccttggaattacatctcaactccgttcgagagggccacgggctcacaaggttcttatatcgggccgcgaggatattttgcggtttgctgaacttatcggaccctacctcttgggggccaagagggagagacttgcagcgctggaagctgaggcccgcaggcgtttgcctggacagggatggcacttgcggcttgttcttcctgccgtggcgtacagagtgagcgaggctaaaaggcgctcgggattttcgtggagtgaagccggtcggcgcgtcgcagttgcgggatcgtgtttgtcatctggactcaacctcaaattgcccagacgctacctttctcggcaccggttgtcgctgctcggtgaggcttttgccgaccctgggctggaagcgctcgcggaaggccaagtgctctgggaccctattgttgctgtcgaaccggccggtaaggcgagaacattcgacttgcgcgttccaccctttgcaaacttcgtgagcgaggacctggtggtgcataactccattgtggggacagccacgttcgatcagtactggagcgtgcgcacctctaagcggacttcaggaacagtgaccgtgaccgatcacttccgcgcctgggcgaaccggggcctgaacctcggcacaatagaccaaattacattgtgcgtggagggttaccaaagctctggatcagccaacatcacccagaacaccttctctcagggctcttcttccggcagttcgggtggctcatccggctccacaacgactactcgcatcgagtgtgagaacatgtccttgtccggaccctacgttagcaggatcaccaatccctttaatggtattgcgctgtacgccaacggagacacagcccgcgctaccgttaacttccccgcaagtcgcaactacaatttccgcctgcggggttgcggcaacaacaataatcttgcccgtgtggacctgaggatcgacggacggaccgtcgggaccttttattaccagggcacatacccctgggaggccccaattgacaatgtttatgtcagtgcggggagtcatacagtcgaaatcactgttactgcggataacggcacatgggacgtgtatgccgactacctggtgatacag

SEQ ID NO: 1859 - DNA, 2349 bp, Artificial Sequence
  Synthetic Construct, P77853-Tth-S158-30-133 DNA
atgttccttaagaaactgtctaagttgctgctcgtcgtgctccttgttgccgtttacacacaggtcaacgcgcaaacaagcattactctgacatccaacgcatccggtacgtttgacggttactattacgaactctggaaggatactggcaatacaacaatgacggtctacactcaaggtcgcttttcctgccagtggtcgaacatcaataacgcgttgtttaggaccgggaagaaatacaaccagaattggcagtctcttggcacaatccggatcacgtactctgcgacttacaacccaaacgggaactcctacttgtgtatctatggctggtctaccaacccattggtcgagttctacatcgttgagtcctgggggaactggagaccgcctggtgccacgtccctgggccaagtgacaatcgatggcgggacctacgacatctataggacgacacgcgtcaaccagccttgcctggccgagggctcgctcgtcttggacgcggctaccgggcagagggtccctatcgaaaaggtgcgtccggggatggaagttttctccttgggacctgattacagactgtatcgggtgcccgttttggaggtccttgagagcggggttggggaagttgtgcgcctcagaactcggtcagggagaacgctggtgttgacaccagatcacccgcttttgacccccgaaggttggaaacctctttgtgacctcccgcttggaactccaattgcagtccccgcagaactgcctgtggcgggccacttggccccacctgaagaacgtgttacgctcctggctcttctgttgggggatgggaacacaaagctgtcgggtcggagaggtacacgtcctaatgccttcttctacagcaaagaccccgaattgctcgcggcttatcgccggtgtgcagaagccttgggtgcaaaggtgaaagcatacgtccacccgactacgggggtggttacactcgcaaccctcgctccacgtcctggagctcaagatcctgtcaaacgcctcgttgtcgaggcgggaatggttgctaaagccgaagagaagagggtcccggaggaggtgtttcgttaccggcgtgaggcgttggcccttttcttgggccgtttgttctcgacagacggctctgttgaaaagaagaggatctcttattcaagtgccagtttgggactggcccaggatgtcgcacatctcttgctgcgccttggaattacatctcaactccgttcgagagggccacgggctcacgaggttcttatatcgggccgcaaggatattttgcggtttgctgaacttatcggaccctacctcttgggggccaagagggagagacttgcagcgctggaagctgaggcccgcaggcgtttgcctggacagggatggcacttgcggcttgttcttcctgccgtggcgtacagagtgagcgaggctaaaaggcgctcgggattttcgtggagtgaagccggtcggcgcgtcgcagttgcgggatcgtgtttgtcatctggactcaacctcaaattgcccagacgctacctttctcggcaccggatgtcgatgctcggtgaggcttttgccgaccctgggctggaagcgctcgcggaaggccaagtgctctgggaccctattgttgctgtcgaaccggccggtaaggcgagaacattcgacttgcgcgttccaccctttgcaaacttcgtgagcgaggacctggtggtgcataactccattgtggggacagccacgttcgatcagtactggagcgtgcgcacctctaagcggacttcaggaacagtgaccgtgaccgatcacttccgcgcctgggcgaaccggggcctgaacctcggcacaatagaccaaattacattgtgcgtggagggttaccaaagctctggatcagccaacatcacccagaacaccttctctcagggctcttcttccggcagttcgggtggctcatccggctccacaacgactactcgcatcgagtgtgagaacatgtccttgtccggaccctacgttagcaggatcaccaatccctttaatggtattgcgctgtacgccaacggagacacagcccgcgctaccgttaacttccccgcaagtcgcaactacaatttccgcctgcggggttgcggcaacaacaataatcttgcccgtgtggacctgaggatcgacggacggaccgtcgggaccttttattaccagggcacatacccctgggaggccccaattgacaatgtttatgtcagtgcggggagtcatacagtcgaaatcactgttactgcggataacggcacatgggacgtgtatgccgactacctggtgatacag

SEQ ID NO: 1860 - DNA, 2349 bp, Artificial Sequence
  Synthetic Construct, P77853-Tth-S158-30-209 DNA
atgttccttaagaaactgtctaagttgctgctcgtcgtgctccttgttgccgtttacacacaggtcaacgcgcaaacaagcattactctgacatccaacgcatccggtacgtttgacggttactattacgaactctggaaggatactggcaatacaacaatgacggtctacactcaaggtcgcttttcctgccagtggtcgaacatcaataacgcgttgtttaggaccgggaagaaatacaaccagaattggcagtctcttggcacaatccggatcacgtactctgcgacttacaacccaaacgggaactcctacttgtgtatctatggctggtctaccaacccattggtcgagttctacatcgttgagtcctgggggaactggagaccgcctggtgccacgtccctgggccaagtgacaatcgatggcgggacctacgacatctataggacgacacgcgtcaaccagccttgcctggccgagggctcgctcgtcttggacgcggctaccgggcagagggtccctatcgaaaaggtgcgtccggggatggaagttttctccttgggacctgattacagactgtatcgggtgcccgttttggaggtccttgagagcggggttggggaagttgtgcgcctcagaactcggtcagggagaacgctggtgttgacaccagatcacccgcttttgacccccgaaggttggaaacctctttgtgacctcccgcttggaactccaattgcagtccccgcagaactgcctgtggcgggccacttggccccacctgaagaacgtgttacgctcctggctcttctgttgggggatgggaacacaaagctgtcgggtcggagaggtacacgtcctaatgccttcttctacagcaaagaccccgaattgctcgcggcttatcgccggtgtgcagaagccttgggtgcaaaggtgaaagcatacgtccacccgactacgggggtggttacactcgcaaccctcgctccacgtcctggagctcaagatcctgtcaaacgcctcgttgtcgaggcgggaatggttgctaaagccgaagagaagagggtcccggaggaggtgtttcgttaccggcgtgaggcgttggcccttttcttgggccgtttgttctcgacagacggctctgttgaaaagaagaggatctcttattcaagtgccagtttgggactggcccaggatgtcgcacatctcttgctgcgccttggaattacatctcaactccgttcgagagggccacgggctcacaaggttcttatatcgggccgcgaggatattttgcggtttgctgaacttatcggaccctacctcttgggggccaagagggagagacttgcagcgctggaagctgaggcccgcaggcgtttgcctggacagggatggcacttgcggcttgttcttcctgccgtggcgtacagagtgagcgaggctaaaaggcgctcgggattttcgtggagtgaagccggtcggcgcgtcgcagttgcgggatcgtgtttgtcatctggactcaacctcaaattgcccagacgctacctttctcggcaccggttgtcgctgctcggtgaggcttttgccgaccctgggctggaagcgctcgcggaaggccaagtgctctgggaccctattgttgctgtcgaaccggccggtaaggcgagaacattcgacttgcgcgttccaccctttgcaaacttcgtgagcgaggacctggtggtgcataactccattgtggggacagccacgttcgatcagtactggagcgtgcgcacctctaagcggacttcaggaacagtgaccgtgaccgatcacttccgcgcctgggcgaaccggggcctgaacctcggcacaatagaccaaattacattgtgcgtggagggttaccaaagctctggatcagccaacatcacccagaacacctcctctcagggctcttcttccggcagttcgggtggctcatccggctccacaacgactactcgcatcgagtgtgagaacatgtccttgtccggaccctacgttagcaggatcaccagtccctttaatggtattgcgctgtacgccaacggagacacagcccgcgctaccgttaacttccccgcaagtcgcaactacaatttccgcctgcggggttgcggcaacaacaataatcttgcccgtgtggacctgaggatcgacggacggaccgtcgggaccttttattaccagggcacatacccctgggaggccccaattgacaatgtttatgtcagtgcggggagtcatacagtcgaaatcactgttactgcggataacggcacatgggacgtgtatgccgactacctggtgatacag

SEQ ID NO: 1861 - DNA, 2349 bp, Artificial Sequence
  Synthetic Construct, P77853-Tth-S158-30-217 DNA
atgttccttaagaaactgtctaagttgctgctcgtcgtgctccttgttgccgtttacacacaggtcaacgcgcaaacaagcattactctgacatccaacgcatccggtacgtttgacggttactattacgaactctggaaggatactggcaatacaacaatgacggtctacactcaaggtcgcttttcctgccagtggtcgaacatcaataacgcgttgtttaggaccgggaagaaatacaaccagaattggcagtctcttggcacaatccggatcacgtactctgcgacttacaacccaaacgggaactcctacttgtgtatctatggctggtctaccaacccattggtcgagttctacatcgttgagtcctgggggaactggagaccgcctggtgccacgtccctgggccaagtgacaatcgatggcgggacctacgacatctataggacgacacgcgtcaaccagccttgcctggccgagggctcgctcgtcttggacgcggctaccgggcagagggtccctatcgtaaaggtgcgtccggggatggaagttttctccttgggacctgattacagactgtatcgggtgcccgttttggaggtccttgagagcggggttggggaagttgtgcgcctcagaactcggtcagggagaacgctggtgttgacaccagatcacccgcttttgacccccgaaggttggaaacctctttgtgacctcccgcttggaactccaattgcagtccccgcagaactgcctgtggcgggccacttggccccacctgaagaacgtgttacgctcctggctcttctgttgggggatgggaacacaaagctgtcgggtcggagaggtacacgtcctaatgccttcttctacagcaaagaccccgaattgctcgcggcttatcgccggtgtgcagaagccttgggtgcaaaggtgaaagcatacgtccacccgactacgggggtggttacactcgcaaccctcgctccacgtcctggagctcaagatcctgtcaaacgcctcgttgtcgaggcgggaatggttgctaaagccgaagagaagagggtcccggaggaggtgtttcgttaccggcgtgaggcgttggcccttttcttgggccgtttgttctcgacagacggctctgttgaaaagaagaggatctcttattcaagtgccagtttgggactggcccaggatgtcgcacatctcttgctgcgccttggaattacatctcaactccgttcgagagggccacgggctcacgaggttcttatatcgggccgcgaggatattttgcggtttgctgaacttatcggaccctacctcttgggggccaagagggagagacttgcagcgctggaagctgaggcccgcaggcgtttgcctggacagggatggcacttgcggcttgttcttcctgccgtggcgtacagagtgagcgaggctaaaaggcgctcgggattttcgtggagtgaagccggtcggcgcgtcgcagttgcgggatcgtgtttatcatctggactcaacctcaaattgcccagacgctacctttctcggcaccggttgtcgatgctcggtgaggcttttgccgaccctgggctggaagcgctcgcggaaggccaagtgctctgggaccctattgttgctgtcgaaccggccggtaaggcgagaacattcgacttgcgcgttccaccctttgcaaacttcgtgagcgaggacctggtggtgcataactccattgtggggacagccacgttcgatcagtactggagcgtgcgcacctctaagcggacttcaggaacagtgaccgtgaccgatcacttccgcgcctgggcgaaccggggcctgaacctcggcacaatagaccaaattacactgtgcgtggagggttaccaaagctctggatcagccaacatcacccagaacaccttctctcagggctcttcttccggcagttcgggtggctcatccggctccacaacgactactcgcatcgagtgtgagaacatgtccttgtccggaccctacgttagcaggatcaccaatccctttaatggtattgcgctgtacgccaacggagacacagcccgcgctaccgttaacttccccgcaagtcgcaactacaatttccgcctgcggggttgcggcaacaacaataatcttgcccgtgtggacctgaggatcgacggacggaccgtcgggaccttttattaccagggcacatacccctgggaggccccaattgacaatgtttatgtcagtgcggggagtcatacagtcgaaatcactgttactgcggataacggcacatgggacgtgtatgccgactacctggtgatacag

SEQ ID NO: 1862 - DNA, 2349 bp, Artificial Sequence
  Synthetic Construct, P77853-Tth-S158-30-218/219 DNA
atgttccttaagaaactgtctaagttgctgctcgtcgtgctccttgttgccgtttacacacaggtcaacgcgcaaacaagcattactctgacatccaacgcatccggtacgtttgacggttactattacgaactctggaaggatactggcaatacaacaatgacggtctacactcaaggtcgcttttcctgccagtggtcgaacatcaataacgcgttgtttaggaccgggaagaaatacaaccagaattggcagtctcttggcacaatccggatcacgtactctgcgacttacaacccaaacgggaactcctacttgtgtatctatggctggtctaccaacccattggtcgagttctacatcgttgagtcctgggggaactggagaccgcctggtgccacgtccctgggccaagtgacaatcgatggcgggacctacgacatctataggacgacacgcgtcaaccagccttgcctggccgagggctcgctcgtcttggacgcggctaccgggcagagggtccctatcgaaaaggtgcgtccggggatggaagttttctccttgggacctgattacagactgtatcgggtgcccgttttggaggtccttgagagcggggttggggaagttgtgcgcctcagaactcggtcagggagaacgctggtgttgacaccagatcacccgcttttgacccccgaaggttggaaacctctttgtgacctcccgcttggaactccaattgcagtccccgcagaactgcctgtggcgggccacttggccccacctgaagaacgtgttacgctcctggctcttctgttgggggatgggaacacaaagctgtcgggtcggagaggtacacgtcctaatgccttcttctacagcaaagaccccgaattgctcgcggcttatcgccggtgtgcagaagccttgggtgcaaaggtgaaagcatacgtccacccgactacgggggtggttacactcgcaaccctcgctccacgtcctggagctcaagatcctgtcaaacgcctcgttgtcgaggcgggaatggttgctaaagccgaagagaagagggtcccggaggaggtgtttcgttaccggcgtgaggcgttggcccttttcttgggccgtttgttctcgacagacggctctgttgaaaagaagaggatctcttattcaagtgccagtttgggactggcccaggatgtcgcacatctcttgctgcgccttggaattacatctcaactccgttcgagagggccacgggctcacgaggttcttatatcgggccgcgaggatattttgcggtttgctgaacttatcggaccctacctcttgggggccaagagggagagacttgcagcgctggaagctgaggcccgcaggcgtttgcctggacagggatggcacttgcggcttgttcttcctgccgtggcgtacagagtgagcgaggctaaaaggcgctcgggattttcgtggagtgaagccggtcggcgcgtcgcagttgcgggatcgtgtttgtcatctggactcaacctcaaattgcccagacgctacctttctcggcaccggttgtcgatgctcggtgaggcttttgccgaccctgggctggaagcgctcgcggaaggccaagtgctctgggaccctattgttgctgtcgaaccggccggtaaggcgagaacattcgacttgcgcgttccaccctttgcaaacttcgtgagcgaggacctggtggtgcataactccattgtggggacagccacgttcgatcagtactggagcgtgcgcacctctaagcggacttcaggaacagtgaccgtgaccgatcacttccgcgcctgggcgaaccggggcctgaacctcggcacaatagaccaaattacattgtgcgtggagggttaccaaagctctggatcagccaacatcacccagaacaccttctctcagggctcttcttccggcagttcgggtggctcatccggctccacaacgactactcgcatcgagtgtgagaacatgtccttgtccggaccctacgttagcaggatcaccaatccctttaatggtattgcgctgtacgccaacggagacacagcccgcgctaccgttaacttccccgcaagtcgcaactacaatttccgcctgcggggttgcggcaacaacaataatcttgcccgtgtggacctgaggatcgacggacggaccgtcgggaccttttattaccagggcacatacccctgggaggccccaattgacaatgtttatgtcagtgcggggagtcatacagtcgaaatcactgttactgcggataacggcacatgggacgtgtatgccgactacctggtgatacag

SEQ ID NO: 1863 - DNA, 2349 bp, Artificial Sequence
  Synthetic Construct, P77853-Tth-S158-30-460 DNA
atgttccttaagaaactgtctaagttgctgctcgtcgtgctccttgttgccgtttacacacaggtcaacgcgcaaacaagcattactctgacatccaacgcatccggtaagtttgacggttactattacgaactctggaaggatactggcaatacaacaatgacggtctacactcaaggtcgcttttcctgccagtggtcgaacatcaataacgcgttgtttaggaccgggaagaaatacaaccagaattggcagtctcttggcacaatccggatcacgtactctgcgacttacaacccaaacgggaactcctacttgtgtatctatggctggtctaccaacccattggtcgagttctacatcgttgagtcctgggggaactggagaccgcctggtgccacgtccctgggccaagtgacaatcgatggcgggacctacgacatctataggacgacacgcgtcaaccagccttgcctggccgagggctcgctcgtcttggacgcggctaccgggcagagggtccctatcgaaaaggtgcgtccggggatggaagttttctccttgggacctgattacagactgtatcgggtgcccgttttggaggtccttgagagcggggttggggaagttgtgcgcctcagaactcggtcagggagaacgctggtgttgacaccagatcacccgcttttgacccccgaaggttggaaacctctttgtgacctcccgcttggaactccaattgcagtccccgcagaactgcctgtggcgggccacttggccccacctgaagaacgtgttacgctcctggctcttctgttgggggatgggaacacaaagctgtcgggtcggagaggtacacgtcctaatgccttcttctacagcaaagaccccgaattgctcgcggcttatcgccggtgtgcagaagccttgggtgcaaaggtgaaagcatacgtccacccgactacgggggtggttacactcgcaaccctcgctccacgtcctggagctcaagatcctgtcaaacgcctcgttgtcgaggcgggaatggttgctaaagccgaagagaagagggtcccggaggaggtgtttcgttaccggcgtgaggcgttggcccttttcttgggccgtttgttctcgacagacggctctgttgaaaagaagaggatctcttattcaagtgccagtttgggactggcccaggatgtcgcacatctcttgctgcgccttggaattacatctcaactccgttcgagagggccacgggctcacgaggttcttatatcgggccgcgaggatattttgcggtttgctgaacttatcggaccctacctcttgggggccaagagggagagacttgcagcgctggaagctgaggcccgcaggcgtttgcctggacagggatggcacttgcggcttgttcttcctgccgtggcgtacagagtgagcgaggctaaaaggcgctcgggattttcgtggagtgaagccggtcggcgcgtcgcagttgcgggatcgtgtttgtcatctggactcaacctcaaattgcccagacgctacctttctcggcaccggttgtcgatgctcggtgaggcttttgccgaccctgggctggaagcgctcgcggaaggccaagtgctctgggaccctattgttgctgtcgaaccggccggtaaggcgagaacattcgacttgcgcgttccaccctttgcaaacttcgtgagcgaggacctggtggtgcataactccattgtggggacagccacgttcgatcagtactggagcgtgcgcacctctaagcggacttcaggaacagtgaccgtgaccgatcacttccgcgcctgggcgaaccggggcctgaacctcggcacaatagaccaaattacattgtgcgtggagggttaccaaagctctggatcagccaacatcacccagaacaccttctctcagggctcttcttccggcagttcgggtggctcatccggctccacaacgactactcgcatcgagtgtgagaacatgtccttgtccggaccctacgttagcaggatcaccaatccctttaatggtattgcgctgtacgccaacggagacacagcccgcgctaccgttaacttccccgcaagtcgcaactacaatttccgcctgcggggttgcggcaacaacaataatcttgcccgtgtggacctgaggatcgacggacggaccgtcgggaccttttattaccagggcacatacccctgggaggccccaattgacaatgtttatgtcagtgcggggagtcatacagtcgaaatcactgttactgcggataacggcacatgggacgtgtatgccgactacctggtgatacag

SEQ ID NO: 1864 - DNA, 2349 bp, Artificial Sequence
  Synthetic Construct, P77853-Tth-S158-30-m69 DNA
atgttccttaagaaactgtctaagttgctgctcgtcgtgctccttgttgccgtttacacacaggtcaacgcgcaaacaagcattactctgacatccaacgcatccggtacgtttgacggttactattacgaactctggaaggatactggcaatacaacaatgacggtctacactcaaggtcgcttttcctgccagtggtcgaacatcaataacgcgttgtttaggaccgggaagaaatacaaccagaattggcagtctcttggcacaatccggatcacgtactctgcgacttacaacccaaacgggaactcctacttgtgtatctatggctggtctaccaacccattggtcgagttctacatcgttgagtcctgggggaactggagaccgcctggtgccacgtccctgggccaagtgacaatcgatggcgggacctacgacatctataggacgacacgcgtcaaccagccttgcctggccgagggctcgctcgtcttggacgcggctaccgggcagagggtccctatcgaaaaggtgcgtccggggatggaagttttctccttgggacctgattacagactgtatcgggtgcccgttttggaggtccttgagagcggggttagtgaagttgtgcgcctcagaactcggtcagggagaacgctggtgttgacaccagatcacccgcttttgacccccgaaggttggaaacctctttgtgacctcccgcttggaactccaattgcagtccccgcagaactgcctgtggcgggccacttggccccacctgaagaacgtgttacgctcctggctcttctgttgggggatgggaacacaaagctgtcgggtcggagaggtacacgtcctaatgccttcttctacagcaaagaccccgaattgctcgcggcttatcgccggtgtgcagaagccttgggtgcaaaggtgaaagcatacgtccacccgactacgggggtggttacactcgcaaccctcgctccacgtcctggagctcaagatcctgtcaaacgcctcgttgtcgaggcgggaatggttgctaaagccgaagagaagagggtcccggaggaggtgtttcgttaccggcgtgaggcgttggcccttttcttgggccgtttgttctcgacagacggctctgttgaaaagaagaggatctcttattcaagtgccagtttgggactggcccaggatgtcgcacatctcttgctgcgccttggaattacatctcaactccgttcgagagggccacgggctcacgaggttcttatatcgggccgcgaggatattttgcggtttgctgaacttatcggaccctacctcttgggggccaagagggagagacttgcagcgctggaagctgaggcccgcaggcgtttgcctggacagggatggcacttgcggcttgttcttcctgccgtggcgtacagagtgagcgaggctaaaaggctctcgggattttcgtggagtgaagccggtcggcgcgtcgcagttgcgggatcgtgtttgtcatctggactcaacctcaaattgcccagacgctacctttctcggcaccggttgtcgatgctcggtgaggcttttgccgaccctgggctggaagcgctcgcggaaggccaagtgctctgggaccctattgttgctgtcgaaccggccggtaaggcgagaacattcgacttgcgcgttccaccctttgcaaacttcgtgagcgaggacctggtggtgcataactccattgtggggacagccacgttcgatcagtactggagcgtgcgcacctctaagcggacttcaggaacagtgaccgtgaccgatcacttccgcgcctgggcgaaccggggcctgaacctcggcacaatagaccaaattacattgtgcgtggagggttaccaaagctctggatcagccaacatcacccagaacaccttctctcagggctcttcttccggcagttcgggtggctcatccggctccacaacgactactcgcatcgagtgtgagaacatgtccttgtccggaccctacgttagcaggatcaccaatccctttaatggtattgcgctgtacgccaacggagacacagcccgcgctaccgttaacttccccgcaagtcgcaactacaatttccgcctgcggggttgcggcaacaacaataatcttgcccgtgtggacctgaggatcgacggacggaccgtcgggaccttttattaccagggcacatacccctgggaggccccaattgacaatgtttatgtcagtgcggggagtcatacagtcgaaatcactgttactgcggataacggcacatgggacgtgtatgccgactacctggtgatacag

SEQ ID NO: 1865 - DNA, 2349 bp, Artificial Sequence
  Synthetic Construct, P77853-Tth-S158-m70 DNA
atgttccttaagaaactgtctaagttgctgctcgtcgtgctccttgttgccgtttacacacaggtcaacgcgcaaacaagcattactctgacatccaacgcatccggtacgtttgacggttactattacgaactctggaaggatactggcaatacaacaatgacggtctacactcaaggtcgcttttcctgccagtggtcgaacatcaataacgcgttgtttaggaccgggaagaaatacaaccagaattggcagtctcttggcacaatccggatcacgtactctgcgacttacaacccaaacgggaactcctacttgtgtatctatggctggtctaccaacccattggtcgagttctacatcgttgagtcctgggggaactggagaccgcctggtgccacgtccctgggccaagtgacaatcgatggcgggacctacgacatctataggacgacacgcgtcaaccagccttgcctggccgagggctcgctcgtcttggacgcggctaccgggcagagggtccctatcgaaaaggtgcgtccggggatggaagttttctccttgggacctgattacagactgtatcgggtgcccgttttggaggtccttgagagcggggttagggaagttgtgcgcctcagaactcggtcagggagaacgctggtgttgacaccagatcacccgcttttgacccccgaaggttggaaacctctttgtgacctcccgcttggaactccaattgcagtccccgcagaactgcctgtggcgggccacttggccccacctgaagaacgtgttacgctcctggctcttctgttgggggatgggaacacaaagctgtcgggtcggagaggtacacgtcctaatgccttcttctacagcaaagaccccgaattgctcgcggcttatcgccggtgtgcagaagccttgggtgcaaaggtgaaagcatacgtccacccgactacgggggtggttacactcgcaaccctcgctccacgtcctggagctcaagatcctgtcagacgcctcgttgtcgaggcgggaatggttgctaaagccgaagagaagagggtcccggaggaggtgtttcgttaccggcgtgaggcgttggcccttttcttgggccgtttgttctcgacagacggctctgttgaaaagaagaggatctcttattcaagtgccagtttgggactggcccaggatgtcgcacatctcttgctgcgccttggaattacatctcaactccgttcgagagggccacgggctcacgaggttcttatatcgtgccgcgaggatattttgcggtttgctgaacttatcggaccctacctcttgggggccaagagggagagacttgcagcgctggaagctgaggcccgcaggcgtttgcctggacagggatggcacttgcggcttgttcttcctgccgtggcgtacagagtgagcgaggctaaaaggcgctcgggattttcgtggagtgaagccggtcggcgcgtcgcagttgcgggatcgtgtttgtcatctggactcaacctcaaattgcccagacgctacctttctcggcaccggttgtcgatgctcggtgaggcttttgccgaccctgggctggaagcgctcgcggaaggccaagtgctctgggaccctattgttgctgtcgaaccggccggtaaggcgagaacattcgacttgcgcgttccaccctttgcaaacttcgtgagcgaggacctggtggtgcataactccattgtggggacagccacgttcgatcagtactggagcgtgcgcacctctaagcggacttcaggaacagtgaccgtgaccgatcacttccgcgcctgggcgaaccggggcctgaacctcggcacaatagaccaaattacattgtgcgtggagggttaccaaagctctggatcagccaacatcacccagaacaccttctctcagggctcttcttccggcagttcgggtggctcatccggctccacaacgactactcgcatcgagtgtgagaacatgtccttgtccggaccctacgttagcaggatcaccaatccctttaatggtattgcgctgtacgccaacggagacacagcccgcgctaccgttaacttccccgcaagtcgcaactacaatttccgcctgcggggttgcggcaacaacaataatcttgcccgtgtggacctgaggatcgacggacggaccgtcgggaccttttattaccagggcacatacccctgggaggccccaattgacaatgtttatgtcagtgcggggagtcatacagtcgaaatcactgttactgcggataacggcacatgggacgtgtatgccgactacctggtgatacag

SEQ ID NO: 1866 - DNA, 2349 bp, Artificial Sequence
  Synthetic Construct, P77853-Tth-S158-m79 DNA
atgttccttaagaaactgtctaagttgctgctcgtcgtgctccttgttgccgtttacacacaggtcaacgcgcaaacaagcattactctgacatccaacgcatccggtacgtttgacggttactattacgaactctggaaggatactggcaatacaacaatgacggtctacactcaaggtcgcttttcctgccagtggtcgaacatcaataacgcgttgtttaggaccgggaagaaatacaaccagaattggcagtctcttggcacaatccggatcacgtactctgcgacttacaacccaaacgggaactcctacttgtgtatctatggctggtctaccaacccattggtcgagttctacatcgttgagtcctgggggaactggagaccgcctggtgccacgtccctgggccaagtgacaatcgatggcgggacctacgacatctataggacgacacgcgtcaaccagccttgcctggccgagggctcgctcgtcttggacgcggctaccgggcagagggtccctatcgaaaaggtgcgtccggggatggaagttttctccttgggacctgattacagactgtatcaggtgcccgttttggaggtccttgagagcggggttggggaagttgtgcgcctcagaactcggtcagggagaacgctggtgttgacaccagatcacccgcttttgacccccgaaggttggaaacctctttgtgacctcccgcttggaactccaattgcagtccccgcagaactgcctgtggcgggccacttggccccacctgaagaacgtgttacgcccctggctcttctgttgggggatgggaacacaaagctgtcgggtcggagaggtacacgtcctaatgccttcttctacagcaaagaccccgaattgctcgcggcttatcgccggtgtgcagaagccttgggtgcaaaggtgaaagcatacgtccacccgactacgggggtggttacactcgcaaccctcgctccacgtcctggagctcaagatcctgtcaaacgcctcgttgtcgaggcgggaatggttgctaaagccgaagagaagagggtcccggaggaggtgtttcgttaccggcgtgaggcgttggcccttttcttgggccgtttgttctcgacagacggctctgttgaaaagaagaggatctcttattcaagtgccagtttgggactggcccaggatgtcgcacatctcttgctgcgccttggaattacatctcaactccgttcgagagggccacgggctcacgaggttcttatatcgggccgcgaggatattttgcggtttgctgaacttatcggaccctacctcttgggggccaagagggagagacttgcagcgctggaagctgaggcccgcaggcgtttgcctggacagggatggcacttgcggcttgttcttcctgccgtggcgtacagagtgagcgaggctaaaaggcgctcgggattttcgtggagtgaagccggtcggcgcgtcgcagttgcgggatcgtgtttgtcatctggactcaacctcaaattgcccagacgctacctttctcggcaccggttgtcgatgctcggtgaggcttttgccgaccctgggctggaagcgctcgcggaaggccaagtgctctgggaccctattgttgctgtcgaaccggccggtaaggcgagaacattcgacttgcgcgttccaccctttgcaaacttcgtgagcgaggacctggtggtgcataactccattgtggggacagccacgttcgatcagtactggagcgtgcgcacctctaagcggacttcaggaacagtgaccgtgaccgatcacttccgcgcctgggcgaaccggggcctgaacctcggcacaatagaccaaattacattgtgcgtggagggttaccaaagctctggatcagccaacatcacccagaacaccttctctcagggctcttcttccggcagttcgggtggctcatccggctccacaacgactactcgcatcgagtgtgagaacatgtccttgtccggaccctacgttagcaggatcaccaatccctttaatggtattgcgctgtacgccaacggagacacagcccgcgctaccgttaacttccccgcaagtcgcaactacaatttccgcctgcggggttgcggcaacaacaataatcttgcccgtgtggacctgaggatcgacggacggaccgtcgggaccttttattaccagggcacatacccctgggaggccccaattgacaatgtttatgtcagtgcggggagtcatacagtcgaaatcactgttactgcggataacggcacatgggacgtgtatgccgactacctggtgatacag

SEQ ID NO: 1867 - DNA, 2355 bp, Artificial Sequence
  Synthetic Construct, P77853-Tth-T134-100-101 DNA
atgttccttaagaaactgtctaagttgctgctcgtcgtgctccttgttgccgtttacacacaggtcaacgcgcaaacaagcattactctgacatccaacgcatccggtacgtttgacggttactattacgaactctggaaggatactggcaatacaacaatgacggtctacactcaaggtcgcttttcctgccagtggtcgaacatcaataacgcgttgtttaggaccgggaagaaatacaaccagaattggcagtctcttggcacaatccggatcacgtactctgcgacttacaacccaaacgggaactcctacttgtgtatctatggctggtctaccaacccattggtcgagttctacatcgttgagtcctgggggaactggagaccgcctggtgcctgcctggccgagggctcgctcgtcttggacgcggctaccgggcagagggtccctatcgaaaaggtgcgtccggggatggaagttttctccttgggacctgattacagactgtatcgggtgcccgttttggaggtccttgagagcggggttagggaagttgtgcgcctcagaactcggtcagggagaacgctggtgttgacaccagatcacccgcttttgacccccgaaggttggaaacctctttgtgacctcccgcttggaactccaattgcagtccccgcagaactgcctgtggcgggccacttggccccacctgaagaacgtgttacgctcctggctcttctgttgggggatgggaacacaaagctgtcgggtcggagaggtacacgtcctaatgccttcttctacagcaaaaaccccgaattgctcgcggcttatcgccggtgtgcagaagccttgggtgcaaaggtgaaagcatacgtccacccgactacgggggtggttacactcgcaaccctcgctccacgtcctggagctcaagatcctgtcaaacgcctcgttgtcgaggcgggaatggttgctaaagccgaagagaagagggtcccggaggaggtgtttcgttaccggcgtgaggcgttggcccttttcttgggccgtttgttctcgacagacggctctgttgaaaagaagaggatctcttattcaagtgccagtttgggactggcccaggatgtcgcacatctcttgctgcgccttggaattacatctcaactccgttcgagagggccacgggctcacgaggttcttatatcgggccgcgaggatattttgcggtttgctgaacttatcggaccctacctcttgggggccaagagggagagacttgcagcgctggaagctgaggcccgcaggcgtttgcctggacagggatggcacttgcggcttgttcttcctgccgtggcgtacagagtgggcgaggcggaaaggcgctcgggattttcgtggagtgaagccggtcggcgcgtcgcagttgcgggatcgtgtttgtcatctggactcaacctcaaattgcccagacgctacctttctcggcaccggttgtcgctgctcggtgaggcttttgccgaccctgggctggaagcgctcgcggaaggccaagtgctctgggaccctattgttgctgtcgaaccggccggtaaggcgagaacattcgacttgcgcgttccaccctttgcaaacttcgtgagcgaggacctggtggtgcataacaccgtccccctgggccaagtgacaatcgatggcgggacctacgacatctataggacgacacgcgtcaaccagccttccattgtggggacagccacgttcgatcagtactggagcgtgcgcacctctaagcggacttcaggaacagtgaccgtgaccgatcacttccgcgcctgggcgaaccggggcctgaacctcggcacaatagaccaaattacattgtgcgtggagggttaccaaagctctggatcagccaacatcacccagaacaccttctctcagggctcttcttccggcagttcgggtggctcatccggctccacaacgactactcgcatcgagtgtgagaacatgtccttgtccggaccctacgttagcaggatcaccaatccctttaatggtattgcgctgtacgccaacggagacacagcccgcgctaccgttaacttccccgcaagtcgcaactacaatttccgcctgcggggttgcggcaacaacaataatcttgcccgtgtggacctgaggatcgacggacggaccgtcgggaccttttattaccagggcacatacccctgggaggccccaattgacaatgtttatgtcagtgcggggagtcatacagtcgaaatcactgttactgcggataacggcacatgggacgtgtatgccgactacctggtgatacagtga

SEQ ID NO: 1868 - DNA, 2355 bp, Artificial Sequence
  Synthetic Construct, P77853-Tth-T134-100-119/157 DNA
atgttccttaagaaactgtctaagttgctgctcgtcgtgctccttgttgccgtttacacacaggtcaacgcgcaaacaagcattactctgacatccaacgcatccggtacgtttgacggttactattacgaactctggaaggatactggcaatacaacaatgacggtctacactcaaggtcgcttttcctgccagtggtcgaacatcaataacgcgttgtttaggaccgggaagaaatacaaccagaattggcagtctcttggcacaatccggatcacgtactctgcgacttacaacccaaacgggaactcctacttgtgtatctatggctggtctaccaacccattggtcgagttctacatcgttgagtcctgggggaactggagaccgcctggtgcctgcctggccgagggctcgctcgtcttggacgcggctaccgggcagagggtccctatcgaaaaggtgcgtccggggatggaagttttctccttgggacctgattacatactgtatcgggtgcccgttttggaggtccttgagagcggggtcagggaagttgtgcgcctcagaactcggtcagggagaacgctggtgttgacaccagatcacccgcttttgacccccgaaggttggaaacctctttgtgacctcccgcttggaactccaattgcagtccccgcagaactgcctgtggcgggccacttggccccacctgaagaacgtgttacgctcctggctcttctgttgggggatgggaacacaaaactgtcgggtcggagaggtacacgtcctaatgccttcttctacagcaaagaccccgaattgctcgcggcttatcgccggtgtgcagaagccttgggtgcaaaggtgaaagcatacgtccacccgactacgggggtggttacacacgcaaccctagctccacgtcctggagctcaagatcctgtcaaacgcctcgttgtcgaggcgggaatggttgctaaagccgaagagaagagggtcccggaggaggtgtttcgttaccggcgtgaggcgttggcccttttcttgggccgtttgttctcgacagacggctctgttgaaaagaagaggatctcttattcaagtgccagtttgggactggcccaggatgtcgcacatctcttgccgcgccttggaattacatctcaactccgttcgagagggccacgggctcacgaggttcttatatcgggccgcgaggatattttgcggtttgctgaacttatcggaccctacctcttgggggccaagagggagagacttgcagcgctggaagctgaggcccgcaggcgtttgcctggacagggatggcacttgcggcttgttcttcctgccgtggcgtacagagtgagcgaggctaaaaggcgctcgggatttttgtggagtgaagccggtcggcgcgccgcagttgcgggatcgtgcttgtcatctggactcaacctcaaattgcccagacgctacctttctcggcaccggttgtcgctgctcggtgaggcttttgccgaccctgggctggaagcgctcgcggaaggccaagtgctctgggaccctattgttgctgtcgaaccggccggtaaggcgagaacattcgacttgcgcgttccaccctttgcaaacttcgtgagcgaggacctggtggtgcataacaccgtccccctgggccaagtgacaatcgatggcgggacctacgacatctataggacgacacgcgtcaaccagccttccattgtggggacagccacgttcgatcagtactggagcgtgcgcacctctaagcggacttcaggaacagtgaccgtgaccgatcacttccgcgcctgggcgaaccggggcctgaacctcggcacaatagaccaaattacattgtgcgtggagggttaccaaagctctggatcagccaacatcacccagaacaccttctctcagggctcttcttccggcagttcgggtggctcatccggctccacaacgactactcgcatcgagtgtgagaacatgtccttgtccggaccctacgttagcaggatcaccaatccctttaatggtattgcgctgtacgccaacggagacacagcccgcgctaccgttaacttccccgcaagtcgcaactacaatttccgcctgcggggttgcggcaacaacaataatcttgcccgtgtggacctgaggatcgacggacggaccgtcgggaccttttattaccagggcacatacccctgggaggccccaattgacaatgtttatgtcagtgcggggagtcatacagtcgaaatcactgttactgcggataacggcacatgggacgtgtatgccgactacctggtgatacagtga

SEQ ID NO: 1869 - DNA, 1641 bp, Artificial Sequence
  Synthetic Construct, P26222-mTth004-S43-1 DNA
atgaacgatagtccattctacgtgaacccgaatatgtgcctggccgagggctcgctcgtcttggacgcggctaccgggcagagggtccctatcgaaaaggtgcgtccggggatggaagttttctccttgggacctgattacagactgtatcgggtgcccgttttggaggtccttgagagcggggttagggaagttgtgcgcctcagaactcggtcagggagaacgctggtgttgacaccagatcacccgcttttgacccccgaaggttggaaacctctttgtgacctcccgcttggaactccaattgcagtcccagatagcgagggaaacgttctctgggaccctattgttgctgtcgaaccggccggtaaggcgagaacattcgacttgcgcgttccaccctttgcaaacttcgtgagcgaggacctggtggtgcataactcatcagctgagtgggtgcgtaacaaccccaatgaccctcgcacaccagtcattagggatcgtattgcctcggtgccccaaggaacgtggttcgcccaccataaccctggccagattacagggcaagttgatgctctgatgtccgccgctcaagccgcgggtaagatccctattctcgtggtgtacaacgcaccaggacgcgactgcgggaatcatagttcgggtggggctccttcccacagcgcttatcggtcttggatcgacgagtttgctgctggcctcaagaaccgtcccgcttacatcattgtggagcctgacctgataagccttatgtcgtcgtgtatgcagcacgttcaacaggaggtgctccagactatggcctacgcagggaaggccttgaaggccggctcatcccaggcccgtatctatttcgacgcggggcattcggcgtggcattcaccagcgcagatggcttcttggctccagcaggctgatatctcaaactctgcacatggtatcgccacgaatacttctaactaccgttggaccgctgatgaagtcgcgtacgccaaggccgtgctgtccgccataggaaatccctccctcagagccgtcatagatacgtcccgcaacggaaatggccctgctggaaatgagtggtgcgacccaagcggacgcgctatcggaaccccgagtaccacaaatactggcgacccaatgatcgatgctttcctctggattaagcttccgggagaagcagacggttgcatcgccggagctggccaattcgttccacaagcagcatacgagatggctattgcggcgggtggtacgaatcctaatcccaaccccaaccctacgccaacgcccacaccgactcccactccacctccggggagcagcggcgcctgcacagccacctatacaatcgcaaacgaatggaatgatggcttccaagcgacggtgacggtgaccgcgaaccagaacatcactgggtggactgtcacttggactttcacggatggacagactattactaacgccttgaatgctgacgtttcgacgtcaggttcgtctgtgacggcgcgcaacgtcgggcataatggtactctctcccagggcgccagcacagagtttggctttgtcggctcaaagggaaattcaaatagcgtccccactctcacgtgcgccgcctcgtga

SEQ ID NO: 1870 - DNA, 1641 bp, Artificial Sequence
  Synthetic Construct, P26222-mTth005-S43-1 DNA
atgaacgatagtccattctacgtgaacccgaatatgtgcctggccgagggctcgctcgtcttggacgcggctaccgggcagagggtccctatcgaaaaggtgcgtccggggatggaagttttctccttgggacctgattacagactgtatcgggtgcccgttttggaggtccttgagagcggggttagggaagttgtgcgcctcagaactcggtcagggagaacgctggtgttgacaccagatcacccgcttttgacccccgaaggttggaaacctctttgtgacctcccgcttggaactccaattgcagtcccaagcagcgatggacttgttctctgggaccctattgttgctgtcgaaccggccggtaaggcgagaacattcgacttgcgcgttccaccctttgcaaacttcgtgagcgaggacctggtggtgcataactcatcagctgagtgggtgcgtaacaaccccaatgaccctcgcacaccagtcattagggatcgtattgcctcggtgccccaaggaacgtggttcgcccaccataaccctggccagattacagggcaagttgatgctctgatgtccgccgctcaagccgcgggtaagatccctattctcgtggtgtacaacgcaccaggacgcgactgcgggaatcatagttcgggtggggctccttcccacagcgcttatcggtcttggatcgacgagtttgctgctggcctcaagaaccgtcccgcttacatcattgtggagcctgacctgataagccttatgtcgtcgtgtatgcagcacgttcaacaggaggtgctccagactatggcctacgcagggaaggccttgaaggccggctcatcccaggcccgtatctatttcgacgcggggcattcggcgtggcattcaccagcgcagatggcttcttggctccagcaggctgatatctcaaactctgcacatggtatcgccacgaatacttctaactaccgttggaccgctgatgaagtcgcgtacgccaaggccgtgctgtccgccataggaaatccctccctcagagccgtcatagatacgtcccgcaacggaaatggccctgctggaaatgagtggtgcgacccaagcggacgcgctatcggaaccccgagtaccacaaatactggcgacccaatgatcgatgctttcctctggattaagcttccgggagaagcagacggttgcatcgccggagctggccaattcgttccacaagcagcatacgagatggctattgcggcgggtggtacgaatcctaatcccaaccccaaccctacgccaacgcccacaccgactcccactccacctccggggagcagcggcgcctgcacagccacctatacaatcgcaaacgaatggaatgatggcttccaagcgacggtgacggtgaccgcgaaccagaacatcactgggtggactgtcacttggactttcacggatggacagactattactaacgccttgaatgctgacgtttcgacgtcaggttcgtctgtgacggcgcgcaacgtcgggcataatggtactctctcccagggcgccagcacagagtttggctttgtcggctcaaagggaaattcaaatagcgtccccactctcacgtgcgccgcctcgtga

SEQ ID NO: 1871 - DNA, 1641 bp, Artificial Sequence
  Synthetic Construct, P26222-mTth008-S43-1 DNA
atgaacgatagtccattctacgtgaacccgaatatgtgcctggccgagggctcgctcgtcttggacgcggctaccgggcagagggtccctatcgaaaaggtgcgtccggggatggaagttttctccttgggacctgattacagactgtatcgggtgcccgttttggaggtccttgagagcggggttagggaagttgtgcgcctcagaactcggtcagggagaacgctggtgttgacaccagatcacccgcttttgacccccgaaggttggaaacctctttgtgacctcccgcttggaactccaattgcagtcccacaggagggagttggagttctctgggaccctattgttgctgtcgaaccggccggtaaggcgagaacattcgacttgcgcgttccaccctttgcaaacttcgtgagcgaggacctggtggtgcataactcatcagctgagtgggtgcgtaacaaccccaatgaccctcgcacaccagtcattagggatcgtattgcctcggtgccccaaggaacgtggttcgcccaccataaccctggccagattacagggcaagttgatgctctgatgtccgccgctcaagccgcgggtaagatccctattctcgtggtgtacaacgcaccaggacgcgactgcgggaatcatagttcgggtggggctccttcccacagcgcttatcggtcttggatcgacgagtttgctgctggcctcaagaaccgtcccgcttacatcattgtggagcctgacctgataagccttatgtcgtcgtgtatgcagcacgttcaacaggaggtgctccagactatggcctacgcagggaaggccttgaaggccggctcatcccaggcccgtatctatttcgacgcggggcattcggcgtggcattcaccagcgcagatggcttcttggctccagcaggctgatatctcaaactctgcacatggtatcgccacgaatacttctaactaccgttggaccgctgatgaagtcgcgtacgccaaggccgtgctgtccgccataggaaatccctccctcagagccgtcatagatacgtcccgcaacggaaatggccctgctggaaatgagtggtgcgacccaagcggacgcgctatcggaaccccgagtaccacaaatactggcgacccaatgatcgatgctttcctctggattaagcttccgggagaagcagacggttgcatcgccggagctggccaattcgttccacaagcagcatacgagatggctattgcggcgggtggtacgaatcctaatcccaaccccaaccctacgccaacgcccacaccgactcccactccacctccggggagcagcggcgcctgcacagccacctatacaatcgcaaacgaatggaatgatggcttccaagcgacggtgacggtgaccgcgaaccagaacatcactgggtggactgtcacttggactttcacggatggacagactattactaacgccttgaatgctgacgtttcgacgtcaggttcgtctgtgacggcgcgcaacgtcgggcataatggtactctctcccagggcgccagcacagagtttggctttgtcggctcaaagggaaattcaaatagcgtccccactctcacgtgcgccgcctcgtga

SEQ ID NO: 1872 - DNA, 1638 bp, Artificial Sequence
  Synthetic Construct, P26222-mTth001-S115-1 DNA
atgaacgatagtccattctacgtgaacccgaatatgtcatcagctgagtgggtgcgtaacaaccccaatgaccctcgcacaccagtcattagggatcgtattgcctcggtgccccaaggaacgtggttcgcccaccataaccctggccagattacagggcaagttgatgctctgatgtccgccgctcaagccgcgggtaagatccctattctcgtggtgtacaacgcaccaggacgcgactgcgggaatcattgcctggccgagggctcgctcgtcttggacgcggctaccgggcagagggtccctatcgaaaaggtgcgtccggggatggaagttttctccttgggacctgattacagactgtatcgggtgcccgttttggaggtccttgagagcggggttagggaagttgtgcgcctcagaactcggtcagggagaacgctggtgttgacaccagatcacccgcttttgacccccgaaggttggaaacctctttgtgacctcccgcttggaactccaattgcagtcccaggaactgatggagatgttctctgggaccctattgttgctgtcgaaccggccggtaaggcgagaacattcgacttgcgcgttccaccctttgcaaacttcgtgagcgaggacctggtggtgcataacagttcgggtggggctccttcccacagcgcttatcggtcttggatcgacgagtttgctgctggcctcaagaaccgtcccgcttacatcattgtggagcctgacctgataagccttatgtcgtcgtgtatgcagcacgttcaacaggaggtgctccagactatggcctacgcagggaaggccttgaaggccggctcatcccaggcccgtatctatttcgacgcggggcattcggcgtggcattcaccagcgcagatggcttcttggctccagcaggctgatatctcaaactctgcacatggtatcgccacgaatacttctaactaccgttggaccgctgatgaagtcgcgtacgccaaggccgtgctgtccgccataggaaatccctccctcagagccgtcatagatacgtcccgcaacggaaatggccctgctggaaatgagtggtgcgacccaagcggacgcgctatcggaaccccgagtaccacaaatactggcgacccaatgatcgatgctttcctctggattaagcttccgggagaagcagacggttgcatcgccggagctggccaattcgttccacaagcagcatacgagatggctattgcggcgggtggtacgaatcctaatcccaaccccaaccctacgccaacgcccacaccgactcccactccacctccggggagcagcggcgcctgcacagccacctatacaatcgcaaacgaatggaatgatggcttccaagcgacggtgacggtgaccgcgaaccagaacatcactgggtggactgtcacttggactttcacggatggacagactattactaacgccttgaatgctgacgtttcgacgtcaggttcgtctgtgacggcgcgcaacgtcgggcataatggtactctctcccagggcgccagcacagagtttggctttgtcggctcaaagggaaattcaaatagcgtccccactctcacgtgcgccgcctcg

SEQ ID NO: 1873 - DNA, 1638 bp, Artificial Sequence
  Synthetic Construct, P26222-mTth002-S115-1 DNA
atgaacgatagtccattctacgtgaacccgaatatgtcatcagctgagtgggtgcgtaacaaccccaatgaccctcgcacaccagtcattagggatcgtattgcctcggtgccccaaggaacgtggttcgcccaccataaccctggccagattacagggcaagttgatgctctgatgtccgccgctcaagccgcgggtaagatccctattctcgtggtgtacaacgcaccaggacgcgactgcgggaatcattgcctggccgagggctcgctcgtcttggacgcggctaccgggcagagggtccctatcgaaaaggtgcgtccggggatggaagttttctccttgggacctgattacagactgtatcgggtgcccgttttggaggtccttgagagcggggttagggaagttgtgcgcctcagaactcggtcagggagaacgctggtgttgacaccagatcacccgcttttgacccccgaaggttggaaacctctttgtgacctcccgcttggaactccaattgcagtcccaggaccagatcagaaggttctctgggaccctattgttgctgtcgaaccggccggtaaggcgagaacattcgacttgcgcgttccaccctttgcaaacttcgtgagcgaggacctggtggtgcataacagttcgggtggggctccttcccacagcgcttatcggtcttggatcgacgagtttgctgctggcctcaagaaccgtcccgcttacatcattgtggagcctgacctgataagccttatgtcgtcgtgtatgcagcacgttcaacaggaggtgctccagactatggcctacgcagggaaggccttgaaggccggctcatcccaggcccgtatctatttcgacgcggggcattcggcgtggcattcaccagcgcagatggcttcttggctccagcaggctgatatctcaaactctgcacatggtatcgccacgaatacttctaactaccgttggaccgctgatgaagtcgcgtacgccaaggccgtgctgtccgccataggaaatccctccctcagagccgtcatagatacgtcccgcaacggaaatggccctgctggaaatgagtggtgcgacccaagcggacgcgctatcggaaccccgagtaccacaaatactggcgacccaatgatcgatgctttcctctggattaagcttccgggagaagcagacggttgcatcgccggagctggccaattcgttccacaagcagcatacgagatggctattgcggcgggtggtacgaatcctaatcccaaccccaaccctacgccaacgcccacaccgactcccactccacctccggggagcagcggcgcctgcacagccacctatacaatcgcaaacgaatggaatgatggcttccaagcgacggtgacggtgaccgcgaaccagaacatcactgggtggactgtcacttggactttcacggatggacagactattactaacgccttgaatgctgacgtttcgacgtcaggttcgtctgtgacggcgcgcaacgtcgggcataatggtactctctcccagggcgccagcacagagtttggctttgtcggctcaaagggaaattcaaatagcgtccccactctcacgtgcgccgcctcg

SEQ ID NO: 1874 - DNA, 1638 bp, Artificial Sequence
  Synthetic Construct, P26222-mTth004-S115-1 DNA
atgaacgatagtccattctacgtgaacccgaatatgtcatcagctgagtgggtgcgtaacaaccccaatgaccctcgcacaccagtcattagggatcgtattgcctcggtgccccaaggaacgtggttcgcccaccataaccctggccagattacagggcaagttgatgctctgatgtccgccgctcaagccgcgggtaagatccctattctcgtggtgtacaacgcaccaggacgcgactgcgggaatcattgcctggccgagggctcgctcgtcttggacgcggctaccgggcagagggtccctatcgaaaaggtgcgtccggggatggaagttttctccttgggacctgattacagactgtatcgggtgcccgttttggaggtccttgagagcggggttagggaagttgtgcgcctcagaactcggtcagggagaacgctggtgttgacaccagatcacccgcttttgacccccgaaggttggaaacctctttgtgacctcccgcttggaactccaattgcagtcccagatagcgagggaaacgttctctgggaccctattgttgctgtcgaaccggccggtaaggcgagaacattcgacttgcgcgttccaccctttgcaaacttcgtgagcgaggacctggtggtgcataacagttcgggtggggctccttcccacagcgcttatcggtcttggatcgacgagtttgctgctggcctcaagaaccgtcccgcttacatcattgtggagcctgacctgataagccttatgtcgtcgtgtatgcagcacgttcaacaggaggtgctccagactatggcctacgcagggaaggccttgaaggccggctcatcccaggcccgtatctatttcgacgcggggcattcggcgtggcattcaccagcgcagatggcttcttggctccagcaggctgatatctcaaactctgcacatggtatcgccacgaatacttctaactaccgttggaccgctgatgaagtcgcgtacgccaaggccgtgctgtccgccataggaaatccctccctcagagccgtcatagatacgtcccgcaacggaaatggccctgctggaaatgagtggtgcgacccaagcggacgcgctatcggaaccccgagtaccacaaatactggcgacccaatgatcgatgctttcctctggattaagcttccgggagaagcagacggttgcatcgccggagctggccaattcgttccacaagcagcatacgagatggctattgcggcgggtggtacgaatcctaatcccaaccccaaccctacgccaacgcccacaccgactcccactccacctccggggagcagcggcgcctgcacagccacctatacaatcgcaaacgaatggaatgatggcttccaagcgacggtgacggtgaccgcgaaccagaacatcactgggtggactgtcacttggactttcacggatggacagactattactaacgccttgaatgctgacgtttcgacgtcaggttcgtctgtgacggcgcgcaacgtcgggcataatggtactctctcccagggcgccagcacagagtttggctttgtcggctcaaagggaaattcaaatagcgtccccactctcacgtgcgccgcctcg

SEQ ID NO: 1875 - DNA, 1641 bp, Artificial Sequence
  Synthetic Construct, P26222-mTth007-S123-1 DNA
atgaacgatagtccattctacgtgaacccgaatatgtcatcagctgagtgggtgcgtaacaaccccaatgaccctcgcacaccagtcattagggatcgtattgcctcggtgccccaaggaacgtggttcgcccaccataaccctggccagattacagggcaagttgatgctctgatgtccgccgctcaagccgcgggtaagatccctattctcgtggtgtacaacgcaccaggacgcgactgcgggaatcatagttcgggtggggctccttcccactgcctggccgagggctcgctcgtcttggacgcggctaccgggcagagggtccctatcgaaaaggtgcgtccggggatggaagttttctccttgggacctgattacagactgtatcgggtgcccgttttggaggtccttgagagcggggttagggaagttgtgcgcctcagaactcggtcagggagaacgctggtgttgacaccagatcacccgcttttgacccccgaaggttggaaacctctttgtgacctcccgcttggaactccaattgcagtcccaggagagactaacggagttctctgggaccctattgttgctgtcgaaccggccggtaaggcgagaacattcgacttgcgcgttccaccctttgcaaacttcgtgagcgaggacctggtggtgcataacagcgcttatcggtcttggatcgacgagtttgctgctggcctcaagaaccgtcccgcttacatcattgtggagcctgacctgataagccttatgtcgtcgtgtatgcagcacgttcaacaggaggtgctccagactatggcctacgcagggaaggccttgaaggccggctcatcccaggcccgtatctatttcgacgcggggcattcggcgtggcattcaccagcgcagatggcttcttggctccagcaggctgatatctcaaactctgcacatggtatcgccacgaatacttctaactaccgttggaccgctgatgaagtcgcgtacgccaaggccgtgctgtccgccataggaaatccctccctcagagccgtcatagatacgtcccgcaacggaaatggccctgctggaaatgagtggtgcgacccaagcggacgcgctatcggaaccccgagtaccacaaatactggcgacccaatgatcgatgctttcctctggattaagcttccgggagaagcagacggttgcatcgccggagctggccaattcgttccacaagcagcatacgagatggctattgcggcgggtggtacgaatcctaatcccaaccccaaccctacgccaacgcccacaccgactcccactccacctccggggagcagcggcgcctgcacagccacctatacaatcgcaaacgaatggaatgatggcttccaagcgacggtgacggtgaccgcgaaccagaacatcactgggtggactgtcacttggactttcacggatggacagactattactaacgccttgaatgctgacgtttcgacgtcaggttcgtctgtgacggcgcgcaacgtcgggcataatggtactctctcccagggcgccagcacagagtttggctttgtcggctcaaagggaaattcaaatagcgtccccactctcacgtgcgccgcctcgtga

SEQ ID NO: 1876 - DNA, 1637 bp, Artificial Sequence
  Synthetic Construct, P26222-mTth002-S154-1 DNA
atgaacgatagtccattctacgtgaacccgaatatgtcatcagctgagtgggtgcgtaacaaccccaatgaccctcgcacaccagtcattagggatcgtattgcctcggtgccccaaggaacgtggttcgcccaccataaccctggccagattacagggcaagttgatgctctgatgtccgccgctcaagccgcgggtaagatccctattctcgtggtgtacaacgcaccaggacgcgactgcgggaatcatagttcgggtggggctccttcccacagcgcttatcggtcttggatcgacgagtttgctgctggcctcaagaaccgtcccgcttacatcattgtggagcctgacctgataagccttatgtgcctggccgagggctcgctcgtcttggacgcggctaccgggcagagggtccctatcgaaaaggtgcgtccggggatggaagttttctccttgggacctgattacagactgtatcgggtgcccgttttggaggtccttgagagcggggttagggaagttgtgcgcctcagaactcggtcagggagaacgctggtgttgacaccagatcacccgcttttgacccccgaaggttggaaacctctttgtgacctcccgcttggaactccaattgcagtcccaggaccagatcagaaggttctctgggaccctattgttgctgtcgaaccggccggtaaggcgagaacattcgacttgcgcgttccaccctttgcaaacttcgtgagcgaggacctggtggtgcataactcgtcgtgtatgcagcacgttcaacaggaggtgctccagactatggcctacgcagggaaggccttgaaggccggctcatcccaggcccgtatctatttcgacgcggggcattcggcgtggcattcaccagcgcagatggcttcttggctccagcaggctgatatctcaaactctgcacatggtatcgccacgaatacttctaactaccgttggaccgctgatgaagtcgcgtacgccaaggccgtgctgtccgccataggaaatccctccctcagagccgtcatagatacgtcccgcaacggaaatggccctgctggaaatgagtggtgcgacccaagcggacgcgctatcggaaccccgagtaccacaaatactggcgacccaatgatcgatgctttcctctggattaagcttccgggagaagcagacggttgcatcgccggagctggccaattcgttccacaagcagcatacgagatggctattgcggcgggtggtacgaatcctaatcccaaccccaaccctacgccaacgcccacaccgactcccactccacctccggggagcagcggcgcctgcacagccacctatacaatcgcaaacgaatggaatgatggcttccaagcgacggtgacggtgaccgcgaaccagaacatcactgggtggactgtcacttggactttcacggatggacagactattactaacgcctgaatgctgacgtttcgacgtcaggttcgtctgtgacggcgcgcaacgtcgggcataatggtactctctcccagggcgccagcacagagtttggctttgtcggctcaaagggaaattcaaatagcgtccccactctcacgtgcgccgcctcg

SEQ ID NO: 1877 - DNA, 1641 bp, Artificial Sequence
  Synthetic Construct, P26222-mTth003-S154-1 DNA
atgaacgatagtccattctacgtgaacccgaatatgtcatcagctgagtgggtgcgtaacaaccccaatgaccctcgcacaccagtcattagggatcgtattgcctcggtgccccaaggaacgtggttcgcccaccataaccctggccagattacagggcaagttgatgctctgatgtccgccgctcaagccgcgggtaagatccctattctcgtggtgtacaacgcaccaggacgcgactgcgggaatcatagttcgggtggggctccttcccacagcgcttatcggtcttggatcgacgagtttgctgctggcctcaagaaccgtcccgcttacatcattgtggagcctgacctgataagccttatgtgcctggccgagggctcgctcgtcttggacgcggctaccgggcagagggtccctatcgaaaaggtgcgtccggggatggaagttttctccttgggacctgattacagactgtatcgggtgcccgttttggaggtccttgagagcggggttagggaagttgtgcgcctcagaactcggtcagggagaacgctggtgttgacaccagatcacccgcttttgacccccgaaggttggaaacctctttgtgacctcccgcttggaactccaattgcagtcccagagccaggaaagggagttctctgggaccctattgttgctgtcgaaccggccggtaaggcgagaacattcgacttgcgcgttccaccctttgcaaacttcgtgagcgaggacctggtggtgcataactcgtcgtgtatgcagcacgttcaacaggaggtgctccagactatggcctacgcagggaaggccttgaaggccggctcatcccaggcccgtatctatttcgacgcggggcattcggcgtggcattcaccagcgcagatggcttcttggctccagcaggctgatatctcaaactctgcacatggtatcgccacgaatacttctaactaccgttggaccgctgatgaagtcgcgtacgccaaggccgtgctgtccgccataggaaatccctccctcagagccgtcatagatacgtcccgcaacggaaatggccctgctggaaatgagtggtgcgacccaagcggacgcgctatcggaaccccgagtaccacaaatactggcgacccaatgatcgatgctttcctctggattaagcttccgggagaagcagacggttgcatcgccggagctggccaattcgttccacaagcagcatacgagatggctattgcggcgggtggtacgaatcctaatcccaaccccaaccctacgccaacgcccacaccgactcccactccacctccggggagcagcggcgcctgcacagccacctatacaatcgcaaacgaatggaatgatggcttccaagcgacggtgacggtgaccgcgaaccagaacatcactgggtggactgtcacttggactttcacggatggacagactattactaacgccttgaatgctgacgtttcgacgtcaggttcgtctgtgacggcgcgcaacgtcgggcataatggtactctctcccagggcgccagcacagagtttggctttgtcggctcaaagggaaattcaaatagcgtccccactctcacgtgcgccgcctcgtga

SEQ ID NO: 1878 - DNA, 1641 bp, Artificial Sequence
  Synthetic Construct, P26222-mTth004-S154-1 DNA
atgaacgatagtccattctacgtgaacccgaatatgtcatcagctgagtgggtgcgtaacaaccccaatgaccctcgcacaccagtcattagggatcgtattgcctcggtgccccaaggaacgtggttcgcccaccataaccctggccagattacagggcaagttgatgctctgatgtccgccgctcaagccgcgggtaagatccctattctcgtggtgtacaacgcaccaggacgcgactgcgggaatcatagttcgggtggggctccttcccacagcgcttatcggtcttggatcgacgagtttgctgctggcctcaagaaccgtcccgcttacatcattgtggagcctgacctgataagccttatgtgcctggccgagggctcgctcgtcttggacgcggctaccgggcagagggtccctatcgaaaaggtgcgtccggggatggaagttttctccttgggacctgattacagactgtatcgggtgcccgttttggaggtccttgagagcggggttagggaagttgtgcgcctcagaactcggtcagggagaacgctggtgttgacaccagatcacccgcttttgacccccgaaggttggaaacctctttgtgacctcccgcttggaactccaattgcagtcccagatagcgagggaaacgttctctgggaccctattgttgctgtcgaaccggccggtaaggcgagaacattcgacttgcgcgttccaccctttgcaaacttcgtgagcgaggacctggtggtgcataactcgtcgtgtatgcagcacgttcaacaggaggtgctccagactatggcctacgcagggaaggccttgaaggccggctcatcccaggcccgtatctatttcgacgcggggcattcggcgtggcattcaccagcgcagatggcttcttggctccagcaggctgatatctcaaactctgcacatggtatcgccacgaatacttctaactaccgttggaccgctgatgaagtcgcgtacgccaaggccgtgctgtccgccataggaaatccctccctcagagccgtcatagatacgtcccgcaacggaaatggccctgctggaaatgagtggtgcgacccaagcggacgcgctatcggaaccccgagtaccacaaatactggcgacccaatgatcgatgctttcctctggattaagcttccgggagaagcagacggttgcatcgccggagctggccaattcgttccacaagcagcatacgagatggctattgcggcgggtggtacgaatcctaatcccaaccccaaccctacgccaacgcccacaccgactcccactccacctccggggagcagcggcgcctgcacagccacctatacaatcgcaaacgaatggaatgatggcttccaagcgacggtgacggtgaccgcgaaccagaacatcactgggtggactgtcacttggactttcacggatggacagactattactaacgccttgaatgctgacgtttcgacgtcaggttcgtctgtgacggcgcgcaacgtcgggcataatggtactctctcccagggcgccagcacagagtttggctttgtcggctcaaagggaaattcaaatagcgtccccactctcacgtgcgccgcctcgtga

SEQ ID NO: 1879 - DNA, 1641 bp, Artificial Sequence
  Synthetic Construct, P26222-mTth005-S154-1 DNA
atgaacgatagtccattctacgtgaacccgaatatgtcatcagctgagtgggtgcgtaacaaccccaatgaccctcgcacaccagtcattagggatcgtattgcctcggtgccccaaggaacgtggttcgcccaccataaccctggccagattacagggcaagttgatgctctgatgtccgccgctcaagccgcgggtaagatccctattctcgtggtgtacaacgcaccaggacgcgactgcgggaatcatagttcgggtggggctccttcccacagcgcttatcggtcttggatcgacgagtttgctgctggcctcaagaaccgtcccgcttacatcattgtggagcctgacctgataagccttatgtgcctggccgagggctcgctcgtcttggacgcggctaccgggcagagggtccctatcgaaaaggtgcgtccggggatggaagttttctccttgggacctgattacagactgtatcgggtgcccgttttggaggtccttgagagcggggttagggaagttgtgcgcctcagaactcggtcagggagaacgctggtgttgacaccagatcacccgcttttgacccccgaaggttggaaacctctttgtgacctcccgcttggaactccaattgcagtcccaagcagcgatggacttgttctctgggaccctattgttgctgtcgaaccggccggtaaggcgagaacattcgacttgcgcgttccaccctttgcaaacttcgtgagcgaggacctggtggtgcataactcgtcgtgtatgcagcacgttcaacaggaggtgctccagactatggcctacgcagggaaggccttgaaggccggctcatcccaggcccgtatctatttcgacgcggggcattcggcgtggcattcaccagcgcagatggcttcttggctccagcaggctgatatctcaaactctgcacatggtatcgccacgaatacttctaactaccgttggaccgctgatgaagtcgcgtacgccaaggccgtgctgtccgccataggaaatccctccctcagagccgtcatagatacgtcccgcaacggaaatggccctgctggaaatgagtggtgcgacccaagcggacgcgctatcggaaccccgagtaccacaaatactggcgacccaatgatcgatgctttcctctggattaagcttccgggagaagcagacggttgcatcgccggagctggccaattcgttccacaagcagcatacgagatggctattgcggcgggtggtacgaatcctaatcccaaccccaaccctacgccaacgcccacaccgactcccactccacctccggggagcagcggcgcctgcacagccacctatacaatcgcaaacgaatggaatgatggcttccaagcgacggtgacggtgaccgcgaaccagaacatcactgggtggactgtcacttggactttcacggatggacagactattactaacgccttgaatgctgacgtttcgacgtcaggttcgtctgtgacggcgcgcaacgtcgggcataatggtactctctcccagggcgccagcacagagtttggctttgtcggctcaaagggaaattcaaatagcgtccccactctcacgtgcgccgcctcgtga

SEQ ID NO: 1880 - DNA, 1638 bp, Artificial Sequence
  Synthetic Construct, P26222-mTth008-S154-1 DNA
atgaacgatagtccattctacgtgaacccgaatatgtcatcagctgagtgggtgcgtaacaaccccaatgaccctcgcacaccagtcattagggatcgtattgcctcggtgccccaaggaacgtggttcgcccaccataaccctggccagattacagggcaagttgatgctctgatgtccgccgctcaagccgcgggtaagatccctattctcgtggtgtacaacgcaccaggacgcgactgcgggaatcatagttcgggtggggctccttcccacagcgcttatcggtcttggatcgacgagtttgctgctggcctcaagaaccgtcccgcttacatcattgtggagcctgacctgataagccttatgtgcctggccgagggctcgctcgtcttggacgcggctaccgggcagagggtccctatcgaaaaggtgcgtccggggatggaagttttctccttgggacctgattacagactgtatcgggtgcccgttttggaggtccttgagagcggggttagggaagttgtgcgcctcagaactcggtcagggagaacgctggtgttgacaccagatcacccgcttttgacccccgaaggttggaaacctctttgtgacctcccgcttggaactccaattgcagtcccacaggagggagttggagttctctgggaccctattgttgctgtcgaaccggccggtaaggcgagaacattcgacttgcgcgttccaccctttgcaaacttcgtgagcgaggacctggtggtgcataactcgtcgtgtatgcagcacgttcaacaggaggtgctccagactatggcctacgcagggaaggccttgaaggccggctcatcccaggcccgtatctatttcgacgcggggcattcggcgtggcattcaccagcgcagatggcttcttggctccagcaggctgatatctcaaactctgcacatggtatcgccacgaatacttctaactaccgttggaccgctgatgaagtcgcgtacgccaaggccgtgctgtccgccataggaaatccctccctcagagccgtcatagatacgtcccgcaacggaaatggccctgctggaaatgagtggtgcgacccaagcggacgcgctatcggaaccccgagtaccacaaatactggcgacccaatgatcgatgctttcctctggattaagcttccgggagaagcagacggttgcatcgccggagctggccaattcgttccacaagcagcatacgagatggctattgcggcgggtggtacgaatcctaatcccaaccccaaccctacgccaacgcccacaccgactcccactccacctccggggagcagcggcgcctgcacagccacctatacaatcgcaaacgaatggaatgatggcttccaagcgacggtgacggtgaccgcgaaccagaacatcactgggtggactgtcacttggactttcacggatggacagactattactaacgccttgaatgctgacgtttcgacgtcaggttcgtctgtgacggcgcgcaacgtcgggcataatggtactctctcccagggcgccagcacagagtttggctttgtcggctcaaagggaaattcaaatagcgtccccactctcacgtgcgccgcctcg

SEQ ID NO: 1881 - DNA, 1641 bp, Artificial Sequence
  Synthetic Construct, P26222-mTth007-S220-1 DNA
atgaacgatagtccattctacgtgaacccgaatatgtcatcagctgagtgggtgcgtaacaaccccaatgaccctcgcacaccagtcattagggatcgtattgcctcggtgccccaaggaacgtggttcgcccaccataaccctggccagattacagggcaagttgatgctctgatgtccgccgctcaagccgcgggtaagatccctattctcgtggtgtacaacgcaccaggacgcgactgcgggaatcatagttcgggtggggctccttcccacagcgcttatcggtcttggatcgacgagtttgctgctggcctcaagaaccgtcccgcttacatcattgtggagcctgacctgataagccttatgtcgtcgtgtatgcagcacgttcaacaggaggtgctccagactatggcctacgcagggaaggccttgaaggccggctcatcccaggcccgtatctatttcgacgcggggcattcggcgtggcattcaccagcgcagatggcttcttggctccagcaggctgatatctcaaactctgcacatggtatcgccacgaatacttgcctggccgagggctcgctcgtcttggacgcggctaccgggcagagggtccctatcgaaaaggtgcgtccggggatggaagttttctccttgggacctgattacagactgtatcgggtgcccgttttggaggtccttgagagcggggttagggaagttgtgcgcctcagaactcggtcagggagaacgctggtgttgacaccagatcacccgcttttgacccccgaaggttggaaacctctttgtgacctcccgcttggaactccaattgcagtcccaggagagactaacggagttctctgggaccctattgttgctgtcgaaccggccggtaaggcgagaacattcgacttgcgcgttccaccctttgcaaacttcgtgagcgaggacctggtggtgcataactctaactaccgttggaccgctgatgaagtcgcgtacgccaaggccgtgctgtccgccataggaaatccctccctcagagccgtcatagatacgtcccgcaacggaaatggccctgctggaaatgagtggtgcgacccaagcggacgcgctatcggaaccccgagtaccacaaatactggcgacccaatgatcgatgctttcctctggattaagcttccgggagaagcagacggttgcatcgccggagctggccaattcgttccacaagcagcatacgagatggctattgcggcgggtggtacgaatcctaatcccaaccccaaccctacgccaacgcccacaccgactcccactccacctccggggagcagcggcgcctgcacagccacctatacaatcgcaaacgaatggaatgatggcttccaagcgacggtgacggtgaccgcgaaccagaacatcactgggtggactgtcacttggactttcacggatggacagactattactaacgccttgaatgctgacgtttcgacgtcaggttcgtctgtgacggcgcgcaacgtcgggcataatggtactctctcccagggcgccagcacagagtttggctttgtcggctcaaagggaaattcaaatagcgtccccactctcacgtgcgccgcctcgtga

SEQ ID NO: 1882 - DNA, 1641 bp, Artificial Sequence
  Synthetic Construct, P26222-mTth001-S251-1 DNA
atgaacgatagtccattctacgtgaacccgaatatgtcatcagctgagtgggtgcgtaacaaccccaatgaccctcgcacaccagtcattagggatcgtattgcctcggtgccccaaggaacgtggttcgcccaccataaccctggccagattacagggcaagttgatgctctgatgtccgccgctcaagccgcgggtaagatccctattctcgtggtgtacaacgcaccaggacgcgactgcgggaatcatagttcgggtggggctccttcccacagcgcttatcggtcttggatcgacgagtttgctgctggcctcaagaaccgtcccgcttacatcattgtggagcctgacctgataagccttatgtcgtcgtgtatgcagcacgttcaacaggaggtgctccagactatggcctacgcagggaaggccttgaaggccggctcatcccaggcccgtatctatttcgacgcggggcattcggcgtggcattcaccagcgcagatggcttcttggctccagcaggctgatatctcaaactctgcacatggtatcgccacgaatacttctaactaccgttggaccgctgatgaagtcgcgtacgccaaggccgtgctgtccgccataggaaatccctccctcagagccgtcatagatacgtgcctggccgagggctcgctcgtcttggacgcggctaccgggcagagggtccctatcgaaaaggtgcgtccggggatggaagttttctccttgggacctgattacagactgtatcgggtgcccgttttggaggtccttgagagcggggttagggaagttgtgcgcctcagaactcggtcagggagaacgctggtgttgacaccagatcacccgcttttgacccccgaaggttggaaacctctttgtgacctcccgcttggaactccaattgcagtcccaggaactgatggagatgttctctgggaccctattgttgctgtcgaaccggccggtaaggcgagaacattcgacttgcgcgttccaccctttgcaaacttcgtgagcgaggacctggtggtgcataactcccgcaacggaaatggccctgctggaaatgagtggtgcgacccaagcggacgcgctatcggaaccccgagtaccacaaatactggcgacccaatgatcgatgctttcctctggattaagcttccgggagaagcagacggttgcatcgccggagctggccaattcgttccacaagcagcatacgagatggctattgcggcgggtggtacgaatcctaatcccaaccccaaccctacgccaacgcccacaccgactcccactccacctccggggagcagcggcgcctgcacagccacctatacaatcgcaaacgaatggaatgatggcttccaagcgacggtgacggtgaccgcgaaccagaacatcactgggtggactgtcacttggactttcacggatggacagactattactaacgccttgaatgctgacgtttcgacgtcaggttcgtctgtgacggcgcgcaacgtcgggcataatggtactctctcccagggcgccagcacagagtttggctttgtcggctcaaagggaaattcaaatagcgtccccactctcacgtgcgccgcctcgtga

SEQ ID NO: 1883 - DNA, 1641 bp, Artificial Sequence
  Synthetic Construct, P26222-mTth002-S251-1 DNA
atgaacgatagtccattctacgtgaacccgaatatgtcatcagctgagtgggtgcgtaacaaccccaatgaccctcgcacaccagtcattagggatcgtattgcctcggtgccccaaggaacgtggttcgcccaccataaccctggccagattacagggcaagttgatgctctgatgtccgccgctcaagccgcgggtaagatccctattctcgtggtgtacaacgcaccaggacgcgactgcgggaatcatagttcgggtggggctccttcccacagcgcttatcggtcttggatcgacgagtttgctgctggcctcaagaaccgtcccgcttacatcattgtggagcctgacctgataagccttatgtcgtcgtgtatgcagcacgttcaacaggaggtgctccagactatggcctacgcagggaaggccttgaaggccggctcatcccaggcccgtatctatttcgacgcggggcattcggcgtggcattcaccagcgcagatggcttcttggctccagcaggctgatatctcaaactctgcacatggtatcgccacgaatacttctaactaccgttggaccgctgatgaagtcgcgtacgccaaggccgtgctgtccgccataggaaatccctccctcagagccgtcatagatacgtgcctggccgagggctcgctcgtcttggacgcggctaccgggcagagggtccctatcgaaaaggtgcgtccggggatggaagttttctccttgggacctgattacagactgtatcgggtgcccgttttggaggtccttgagagcggggttagggaagttgtgcgcctcagaactcggtcagggagaacgctggtgttgacaccagatcacccgcttttgacccccgaaggttggaaacctctttgtgacctcccgcttggaactccaattgcagtcccaggaccagatcagaaggttctctgggaccctattgttgctgtcgaaccggccggtaaggcgagaacattcgacttgcgcgttccaccctttgcaaacttcgtgagcgaggacctggtggtgcataactcccgcaacggaaatggccctgctggaaatgagtggtgcgacccaagcggacgcgctatcggaaccccgagtaccacaaatactggcgacccaatgatcgatgctttcctctggattaagcttccgggagaagcagacggttgcatcgccggagctggccaattcgttccacaagcagcatacgagatggctattgcggcgggtggtacgaatcctaatcccaaccccaaccctacgccaacgcccacaccgactcccactccacctccggggagcagcggcgcctgcacagccacctatacaatcgcaaacgaatggaatgatggcttccaagcgacggtgacggtgaccgcgaaccagaacatcactgggtggactgtcacttggactttcacggatggacagactattactaacgccttgaatgctgacgtttcgacgtcaggttcgtctgtgacggcgcgcaacgtcgggcataatggtactctctcccagggcgccagcacagagtttggctttgtcggctcaaagggaaattcaaatagcgtccccactctcacgtgcgccgcctcgtga

SEQ ID NO: 1884 - DNA, 1641 bp, Artificial Sequence
  Synthetic Construct, P26222-mTth005-S251-1 DNA
atgaacgatagtccattctacgtgaacccgaatatgtcatcagctgagtgggtgcgtaacaaccccaatgaccctcgcacaccagtcattagggatcgtattgcctcggtgccccaaggaacgtggttcgcccaccataaccctggccagattacagggcaagttgatgctctgatgtccgccgctcaagccgcgggtaagatccctattctcgtggtgtacaacgcaccaggacgcgactgcgggaatcatagttcgggtggggctccttcccacagcgcttatcggtcttggatcgacgagtttgctgctggcctcaagaaccgtcccgcttacatcattgtggagcctgacctgataagccttatgtcgtcgtgtatgcagcacgttcaacaggaggtgctccagactatggcctacgcagggaaggccttgaaggccggctcatcccaggcccgtatctatttcgacgcggggcattcggcgtggcattcaccagcgcagatggcttcttggctccagcaggctgatatctcaaactctgcacatggtatcgccacgaatacttctaactaccgttggaccgctgatgaagtcgcgtacgccaaggccgtgctgtccgccataggaaatccctccctcagagccgtcatagatacgtgcctggccgagggctcgctcgtcttggacgcggctaccgggcagagggtccctatcgaaaaggtgcgtccggggatggaagttttctccttgggacctgattacagactgtatcgggtgcccgttttggaggtccttgagagcggggttagggaagttgtgcgcctcagaactcggtcagggagaacgctggtgttgacaccagatcacccgcttttgacccccgaaggttggaaacctctttgtgacctcccgcttggaactccaattgcagtcccaagcagcgatggacttgttctctgggaccctattgttgctgtcgaaccggccggtaaggcgagaacattcgacttgcgcgttccaccctttgcaaacttcgtgagcgaggacctggtggtgcataactcccgcaacggaaatggccctgctggaaatgagtggtgcgacccaagcggacgcgctatcggaaccccgagtaccacaaatactggcgacccaatgatcgatgctttcctctggattaagcttccgggagaagcagacggttgcatcgccggagctggccaattcgttccacaagcagcatacgagatggctattgcggcgggtggtacgaatcctaatcccaaccccaaccctacgccaacgcccacaccgactcccactccacctccggggagcagcggcgcctgcacagccacctatacaatcgcaaacgaatggaatgatggcttccaagcgacggtgacggtgaccgcgaaccagaacatcactgggtggactgtcacttggactttcacggatggacagactattactaacgccttgaatgctgacgtttcgacgtcaggttcgtctgtgacggcgcgcaacgtcgggcataatggtactctctcccagggcgccagcacagagtttggctttgtcggctcaaagggaaattcaaatagcgtccccactctcacgtgcgccgcctcgtga

SEQ ID NO: 1885 - DNA, 1641 bp, Artificial Sequence
  Synthetic Construct, P26222-mTth007-S251-1 DNA
atgaacgatagtccattctacgtgaacccgaatatgtcatcagctgagtgggtgcgtaacaaccccaatgaccctcgcacaccagtcattagggatcgtattgcctcggtgccccaaggaacgtggttcgcccaccataaccctggccagattacagggcaagttgatgctctgatgtccgccgctcaagccgcgggtaagatccctattctcgtggtgtacaacgcaccaggacgcgactgcgggaatcatagttcgggtggggctccttcccacagcgcttatcggtcttggatcgacgagtttgctgctggcctcaagaaccgtcccgcttacatcattgtggagcctgacctgataagccttatgtcgtcgtgtatgcagcacgttcaacaggaggtgctccagactatggcctacgcagggaaggccttgaaggccggctcatcccaggcccgtatctatttcgacgcggggcattcggcgtggcattcaccagcgcagatggcttcttggctccagcaggctgatatctcaaactctgcacatggtatcgccacgaatacttctaactaccgttggaccgctgatgaagtcgcgtacgccaaggccgtgctgtccgccataggaaatccctccctcagagccgtcatagatacgtgcctggccgagggctcgctcgtcttggacgcggctaccgggcagagggtccctatcgaaaaggtgcgtccggggatggaagttttctccttgggacctgattacagactgtatcgggtgcccgttttggaggtccttgagagcggggttagggaagttgtgcgcctcagaactcggtcagggagaacgctggtgttgacaccagatcacccgcttttgacccccgaaggttggaaacctctttgtgacctcccgcttggaactccaattgcagtcccaggagagactaacggagttctctgggaccctattgttgctgtcgaaccggccggtaaggcgagaacattcgacttgcgcgttccaccctttgcaaacttcgtgagcgaggacctggtggtgcataactcccgcaacggaaatggccctgctggaaatgagtggtgcgacccaagcggacgcgctatcggaaccccgagtaccacaaatactggcgacccaatgatcgatgctttcctctggattaagcttccgggagaagcagacggttgcatcgccggagctggccaattcgttccacaagcagcatacgagatggctattgcggcgggtggtacgaatcctaatcccaaccccaaccctacgccaacgcccacaccgactcccactccacctccggggagcagcggcgcctgcacagccacctatacaatcgcaaacgaatggaatgatggcttccaagcgacggtgacggtgaccgcgaaccagaacatcactgggtggactgtcacttggactttcacggatggacagactattactaacgccttgaatgctgacgtttcgacgtcaggttcgtctgtgacggcgcgcaacgtcgggcataatggtactctctcccagggcgccagcacagagtttggctttgtcggctcaaagggaaattcaaatagcgtccccactctcacgtgcgccgcctcgtga

SEQ ID NO: 1886 - DNA, 1641 bp, Artificial Sequence
  Synthetic Construct, P26222-mTth008-S251-1 DNA
atgaacgatagtccattctacgtgaacccgaatatgtcatcagctgagtgggtgcgtaacaaccccaatgaccctcgcacaccagtcattagggatcgtattgcctcggtgccccaaggaacgtggttcgcccaccataaccctggccagattacagggcaagttgatgctctgatgtccgccgctcaagccgcgggtaagatccctattctcgtggtgtacaacgcaccaggacgcgactgcgggaatcatagttcgggtggggctccttcccacagcgcttatcggtcttggatcgacgagtttgctgctggcctcaagaaccgtcccgcttacatcattgtggagcctgacctgataagccttatgtcgtcgtgtatgcagcacgttcaacaggaggtgctccagactatggcctacgcagggaaggccttgaaggccggctcatcccaggcccgtatctatttcgacgcggggcattcggcgtggcattcaccagcgcagatggcttcttggctccagcaggctgatatctcaaactctgcacatggtatcgccacgaatacttctaactaccgttggaccgctgatgaagtcgcgtacgccaaggccgtgctgtccgccataggaaatccctccctcagagccgtcatagatacgtgcctggccgagggctcgctcgtcttggacgcggctaccgggcagagggtccctatcgaaaaggtgcgtccggggatggaagttttctccttgggacctgattacagactgtatcgggtgcccgttttggaggtccttgagagcggggttagggaagttgtgcgcctcagaactcggtcagggagaacgctggtgttgacaccagatcacccgcttttgacccccgaaggttggaaacctctttgtgacctcccgcttggaactccaattgcagtcccacaggagggagttggagttctctgggaccctattgttgctgtcgaaccggccggtaaggcgagaacattcgacttgcgcgttccaccctttgcaaacttcgtgagcgaggacctggtggtgcataactcccgcaacggaaatggccctgctggaaatgagtggtgcgacccaagcggacgcgctatcggaaccccgagtaccacaaatactggcgacccaatgatcgatgctttcctctggattaagcttccgggagaagcagacggttgcatcgccggagctggccaattcgttccacaagcagcatacgagatggctattgcggcgggtggtacgaatcctaatcccaaccccaaccctacgccaacgcccacaccgactcccactccacctccggggagcagcggcgcctgcacagccacctatacaatcgcaaacgaatggaatgatggcttccaagcgacggtgacggtgaccgcgaaccagaacatcactgggtggactgtcacttggactttcacggatggacagactattactaacgccttgaatgctgacgtttcgacgtcaggttcgtctgtgacggcgcgcaacgtcgggcataatggtactctctcccagggcgccagcacagagtttggctttgtcggctcaaagggaaattcaaatagcgtccccactctcacgtgcgccgcctcgtga

SEQ ID NO: 1887 - DNA, 1644 bp, Artificial Sequence
  Synthetic Construct, P26222-mTth010-S251-1 DNA
atgaacgatagtccattctacgtgaacccgaatatgtcatcagctgagtgggtgcgtaacaaccccaatgaccctcgcacaccagtcattagggatcgtattgcctcggtgccccaaggaacgtggttcgcccaccataaccctggccagattacagggcaagttgatgctctgatgtccgccgctcaagccgcgggtaagatccctattctcgtggtgtacaacgcaccaggacgcgactgcgggaatcatagttcgggtggggctccttcccacagcgcttatcggtcttggatcgacgagtttgctgctggcctcaagaaccgtcccgcttacatcattgtggagcctgacctgataagccttatgtcgtcgtgtatgcagcacgttcaacaggaggtgctccagactatggcctacgcagggaaggccttgaaggccggctcatcccaggcccgtatctatttcgacgcggggcattcggcgtggcattcaccagcgcagatggcttcttggctccagcaggctgatatctcaaactctgcacatggtatcgccacgaatacttctaactaccgttggaccgctgatgaagtcgcgtacgccaaggccgtgctgtccgccataggaaatccctccctcagagccgtcatagatacgtgcctggccgagggctcgctcgtcttggacgcggctaccgggcagagggtccctatcgaaaaggtgcgtccggggatggaagttttctccttgggacctgattacagactgtatcgggtgcccgttttggaggtccttgagagcggggttagggaagttgtgcgcctcagaactcggtcagggagaacgctggtgttgacaccagatcacccgcttttgacccccgaaggttggaaacctctttgtgacctcccgcttggaactccaattgcagtcagagatgttgagactggagaggttctctgggaccctattgttgctgtcgaaccggccggtaaggcgagaacattcgacttgcgcgttccaccctttgcaaacttcgtgagcgaggacctggtggtgcataactcccgcaacggaaatggccctgctggaaatgagtggtgcgacccaagcggacgcgctatcggaaccccgagtaccacaaatactggcgacccaatgatcgatgctttcctctggattaagcttccgggagaagcagacggttgcatcgccggagctggccaattcgttccacaagcagcatacgagatggctattgcggcgggtggtacgaatcctaatcccaaccccaaccctacgccaacgcccacaccgactcccactccacctccggggagcagcggcgcctgcacagccacctatacaatcgcaaacgaatggaatgatggcttccaagcgacggtgacggtgaccgcgaaccagaacatcactgggtggactgtcacttggactttcacggatggacagactattactaacgccttgaatgctgacgtttcgacgtcaggttcgtctgtgacggcgcgcaacgtcgggcataatggtactctctcccagggcgccagcacagagtttggctttgtcggctcaaagggaaattcaaatagcgtccccactctcacgtgcgccgcctcgtga

SEQ ID NO: 1888 - DNA, 1641 bp, Artificial Sequence
  Synthetic Construct, P26222-mTth002-S123-1 DNA
atgaacgatagtccattctacgtgaacccgaatatgtcatcagctgagtgggtgcgtaacaaccccaatgaccctcgcacaccagtcattagggatcgtattgcctcggtgccccaaggaacgtggttcgcccaccataaccctggccagattacagggcaagttgatgctctgatgtccgccgctcaagccgcgggtaagatccctattctcgtggtgtacaacgcaccaggacgcgactgcgggaatcatagttcgggtggggctccttccacctgcctggccgagggctcgctcgtcttggacgcggctaccgggcagagggtccctatcgaaaaggtgcgtccggggatggaagttttctccttgggacctgattacagactgtatcgggtgcccgttttggaggtccttgagagcggggttagggaagttgtgcgcctcagaactcggtcagggagaacgctggtgttgacaccagatcacccgcttttgacccccgaaggttggaaacctctttgtgacctcccgcttggaactccaattgcagtcccaggaccagatcagaaggttctctgggaccctattgttgctgtcgaaccggccggtaaggcgagaacattcgacttgcgcgttccaccctttgcaaacttcgtgagcgaggacctggtggtgcataacagcgcttatcggtcttggatcgacgagtttgctgctggcctcaagaaccgtcccgcttacatcattgtggagcctgacctgataagccttatgtcgtcgtgtatgcagcacgttcaacaggaggtgctggagactatggcctacgcagggaaggccttgaaggccggctcatcccaggcccgtatctatttcgacgcggggcattcggcgtggcattcaccagcgcagatggcttcttggctccagcaggctgatatctcaaactctgcacatggtatcgccacgaatacttctaactaccgttggaccgctgatgaagtcgcgtacgccaaggccgtgctgtccgccataggaaatccctccctcagagccgtcatagatacgtcccgcaacggaaatggccctgctggaaatgagtggtgcgacccaagcggacgcgctatcggaaccccgagtaccacaaatactggcgacccaatgatcgatgctttcctctggattaagcttccgggagaagcagacggttgcatcgccggagctggccaattcgttccacaagcagcatacgagatggctattgcggcgggtggtacgaatcctaatcccaaccccaaccctacgccaacgcccacaccgactcccactccacctccggggagcagcggcgcctgcacagccacctatacaatcgcaaacgaatggaatgatggcttccaagcgacggtgacggtgaccgcgaaccagaacatcactgggtggactgtcacttggactttcacggatggacagactattactaacgcctggaatgctgacgtttcgacgtcaggttcgtctgtgacggcgcgcaacgtcgggcataatggtactctctcccagggcgccagcacagagtttggctttgtcggctcaaagggaaattcaaatagcgtccccactctcacgtgcgccgcctcgtga

SEQ ID NO: 1889 - DNA, 1644 bp, Artificial Sequence
  Synthetic Construct, P26222-mTth010-S115-1 DNA
atgaacgatagtccattctacgtgaacccgaatatgtcatcagctgagtgggtgcgtaacaaccccaatgaccctcgcacaccagtcattagggatcgtattgcctcggtgccccaaggaacgtggttcgcccaccataaccctggccagattacagggcaagttgatgctctgatgtccgccgctcaagccgcgggtaagatccctattctcgtggtgtacaacgcaccaggacgcgactgcgggaatcattgcctggccgagggctcgctcgtcttggacgcggctaccgggcagagggtccctatcgaaaaggtgcgtccggggatggaagttttctccttgggacctgattacagactgtatcgggtgcccgttttggaggtccttgagagcggggttagggaagttgtgcgcctcagaactcggtcagggagaacgctggtgttgacaccagatcacccgcttttgacccccgaaggttggaaacctctttgtgacctcccgcttggaactccaattgcagtcagagatgttgagactggagaggttctctgggaccctattgttgctgtcgaaccggccggtaaggcgagaacattcgacttgcgcgttccaccctttgcaaacttcgtgagcgaggacctggtggtgcataacagttcgggtggggctccttcccacagcgcttatcggtcttggatcgacgagtttgctgctggcctcaagaaccgtcccgcttacatcattgtggagcctgacctgataagccttatgtcgtcgtgtatgcagcacgttcaacaggaggtgctggagactatggcctacgcagggaaggccttgaaggccggctcatcccaggcccgtatctatttcgacgcggggcattcggcgtggcattcaccagcgcagatggcttcttggctccagcaggctgatatctcaaactctgcacatggtatcgccacgaatacttctaactaccgttggaccgctgatgaagtcgcgtacgccaaggccgtgctgtccgccataggaaatccctccctcagagccgtcatagatacgtcccgcaacggaaatggccctgctggaaatgagtggtgcgacccaagcggacgcgctatcggaaccccgagtaccacaaatactggcgacccaatgatcgatgctttcctctggattaagcttccgggagaagcagacggttgcatcgccggagctggccaattcgttccacaagcagcatacgagatggctattgcggcgggtggtacgaatcctaatcccaaccccaaccctacgccaacgcccacaccgactcccactccacctccggggagcagcggcgcctgcacagccacctatacaatcgcaaacgaatggaatgatggcttccaagcgacggtgacggtgaccgcgaaccagaacatcactgggtggactgtcacttggactttcacggatggacagactattactaacgcctggaatgctgacgtttcgacgtcaggttcgtctgtgacggcgcgcaacgtcgggcataatggtactctctcccagggcgccagcacagagtttggctttgtcggctcaaagggaaattcaaatagcgtccccactctcacgtgcgccgcctcgtga

SEQ ID NO: 1890 - DNA, 1644 bp, Artificial Sequence
  Synthetic Construct, P26222-mTth010-S154-1 DNA
atgaacgatagtccattctacgtgaacccgaatatgtcatcagctgagtgggtgcgtaacaaccccaatgaccctcgcacaccagtcattagggatcgtattgcctcggtgccccaaggaacgtggttcgcccaccataaccctggccagattacagggcaagttgatgctctgatgtccgccgctcaagccgcgggtaagatccctattctcgtggtgtacaacgcaccaggacgcgactgcgggaatcatagttcgggtggggctccttcccacagcgcttatcggtcttggatcgacgagtttgctgctggcctcaagaaccgtcccgcttacatcattgtggagcctgacctgataagccttatgtgcctggccgagggctcgctcgtcttggacgcggctaccgggcagagggtccctatcgaaaaggtgcgtccggggatggaagttttctccttgggacctgattacagactgtatcgggtgcccgttttggaggtccttgagagcggggttagggaagttgtgcgcctcagaactcggtcagggagaacgctggtgttgacaccagatcacccgcttttgacccccgaaggttggaaacctctttgtgacctcccgcttggaactccaattgcagtcagagatgttgagactggagaggttctctgggaccctattgttgctgtcgaaccggccggtaaggcgagaacattcgacttgcgcgttccaccctttgcaaacttcgtgagcgaggacctggtggtgcataactcgtcgtgtatgcagcacgttcaacaggaggtgctggagactatggcctacgcagggaaggccttgaaggccggctcatcccaggcccgtatctatttcgacgcggggcattcggcgtggcattcaccagcgcagatggcttcttggctccagcaggctgatatctcaaactctgcacatggtatcgccacgaatacttctaactaccgttggaccgctgatgaagtcgcgtacgccaaggccgtgctgtccgccataggaaatccctccctcagagccgtcatagatacgtcccgcaacggaaatggccctgctggaaatgagtggtgcgacccaagcggacgcgctatcggaaccccgagtaccacaaatactggcgacccaatgatcgatgctttcctctggattaagcttccgggagaagcagacggttgcatcgccggagctggccaattcgttccacaagcagcatacgagatggctattgcggcgggtggtacgaatcctaatcccaaccccaaccctacgccaacgcccacaccgactcccactccacctccggggagcagcggcgcctgcacagccacctatacaatcgcaaacgaatggaatgatggcttccaagcgacggtgacggtgaccgcgaaccagaacatcactgggtggactgtcacttggactttcacggatggacagactattactaacgcctggaatgctgacgtttcgacgtcaggttcgtctgtgacggcgcgcaacgtcgggcataatggtactctctcccagggcgccagcacagagtttggctttgtcggctcaaagggaaattcaaatagcgtccccactctcacgtgcgccgcctcgtga

SEQ ID NO: 1891 - DNA, 1641 bp, Artificial Sequence
  Synthetic Construct, P26222-mTth010-S154-2 DNA
atgaacgatagtccattctacgtgaacccgaatatgtcatcagctgagtgggtgcgtaacaaccccaatgaccctcgcacaccagtcattagggatcgtattgcctcggtgccccaaggaacgtggttcgcccaccataaccctggccagattacagggcaagttgatgctctgatgtccgccgctcaagccgcgggtaagatccctattctcgtggtgtacaacgcaccaggacgcgactgcgggaatcatagttcgggtggggctccttcccacagcgcttatcggtcttggatcgacgagtttgctgctggcctcaagaaccgtcccgcttacatcattgtggagcctgacctgataagccttatgtgcctggccgagggctcgctcgtcttggacgcggctaccgggcagagggtccctatcgaaaaggtgcgtccggggatggaagttttctccttgggacctgattacagactgtatcgggtgcccgttttggaggtccttgagagcggggttagggaagttgtgcgcctcagtactcggtcagggagaacgctggtgttgacgccaaatcacccgcttttgacccccgaaggttggaaacctctttgtgacctcccgcttggaactccaattgcagtcagagatgttgagactggagaggttctctgggaccctattgttgctgtcgaaccggccggtaaggcgagaacattcgacttgcgcgttccaccctttgcaaacttcgtgagcgaggacctggtggtgcataactcgtcgtgtatgcagcacgttcaacaggaggtgctggagactatggcctacgcagggaaggccttgaaggccggctcatcccaggcccgtatctatttcgacgcggggcattcggcgtggcattcaccagcgcagatggcttcttggctccagcaggctgatatctcaaactctgcacatggtatcgccacgaatacttctaactaccgttggaccgctgatgaagtcgcgtacgccaaggccgtgctgtccgccataggaaatccctccctcagagccgtcatagatacgtcccgcaacggaaatggccctgctggaaatgagtggtgcgacccaagcggacgcgctatcggaaccccgagtaccacaaatactggcgacccaatgatcgatgctttcctctggattaagcttccgggagaagcagacggttgcatcgccggagctggccaattcgttccacaagcagcatacgagatggctattgcggcgggtggtacgaatcctaatcccaaccccaaccctacgccaacgcccacaccgactcccactccacctccggggagcagcggcgcctgcacagccacctatacaatcgcaaacgaatggaatgatggcttccaagcgacggtgacggtgaccgcgaaccagaacatcactgggtggactgtcacttggactttcacggatggacagactattactaacgcctggaatgctgacgtttcgacgtcaggttcgtctgtgacggcgcgcaacgtcgggcataatggtactctctcccagggcgccagcacagagtttggctttgtcggctcaaagggaaattcaaatagcgtccccactctcacgtgcgccgcctcg

SEQ ID NO: 1892 - DNA, 1644 bp, Artificial Sequence
  Synthetic Construct, P26222-mTth010-S154-3 DNA
atgaacgatagtccattctacgtgaacccgaatatgtcatcagctgagtgggtgcgtaacaaccccaatgaccctcgcacaccagtcattagggatcgtattgcctcggtgccccaaggaacgtggttcgcccaccataaccctggccagattacagggcaagttgatgctctgatgtccgccgctcaagccgcgggtaagatccctattctcgtggtgtacaacgcaccaggacgcgactgcgggaatcatagttcgggtggggctccttcccacagcgcttatcggtcttggatcgacgagtttgctgctggcctcaagaaccgtcccgcttacatcattgtggagcctgacctgataagccttatgtgcctggccgagggctcgctcgtcttggacgcggctaccgggcagagggtccctatcgaaaaggtgcgtccggggatggaagttttctccttgggacctgattacagactgtatcgggtgcccgttatggaggtccttgagagcggggttagggaagttgtgcgcctcagaactcggtcagggagaacgctggtgttgacaccagatcacccgcttttgacccccgaaggttggaaacctctttgtgacctcccgcttggaactccaattgcagtcagagatgttgagactggagaggttctctgggaccctattgttgctgtcgaaccggccggtaaggcgagaacattcgacttgcgcgttccaccctttgcaaacttcgtgagcgaggacctggtggtgcataactcgtcgtgtatgcagcacgttcaacaggaggtgctggagactatggcctacgcagggaaggccttgaaggccggctcatcccaggcccgtatctatttcgacgcggggcattcggcgtggcattcaccagcgcagatggcttcttggctccagcaggctgatatctcaaactctgcacatggtatcgccacgaatacttctaactaccgttggaccgctgatgaagtcgcgtacgccaaggccgtgctgtccgccataggaaatccctccctcagagccgtcatagatacgtcccgcaacggaaatggccctgctggaaatgagtggtgcgacccaagcggacgcgctatcggaaccccgagtaccacaaatactggcgacccaatgatcgatgctttcctctggattaagcttccgggagaagcagacggttgcatcgccggagctggccaattcgttccacaagcagcatacgagatggctattgcggcgggtggtacgaatcctaatcccaaccccaaccctacgccaacgcccacaccgactcccactccacctccggggagcagcggcgcctgcacagccacctatacaatcgcaaacgaatggaatgatggcttccaagcgacggtgacggtgaccgcgaaccagaacatcactgggtggactgtcacttggactttcacggatggacagactattactaacgcctggaatgctgacgtttcgacgtcaggttcgtctgtgacggcgcgcaacgtcgggcataatggtactctctcccagggcgccagcacagagtttggctttgtcggctcaaagggaaattcaaatagcgtccccactctcacgtgcgccgcctcgtga

SEQ ID NO: 1893 - DNA, 1644 bp, Artificial Sequence
  Synthetic Construct, P26222-mTth010-S154-4 DNA
atgaacgatagtccattctacgtgaacccgaatatgtcatcagctgagtgggtgcgtaacaaccccaatgaccctcgcacaccagtcattagggatcgtattgcctcggtgccccaaggaacgtggttcgcccaccataaccctggccagattacagggcaagttgatgctctgatgtccgccgctcaagccgcgggtaagatccctattctcgtggtgtacaacgcaccaggacgcgactgcgggaatcatagttcgggtggggctccttcccacagcgcttatcggtcttggatcgacgagtttgctgctggcctcaagaaccgtcccgcttacatcattgtggagcctgacctgataagccttatgtgcctggccgagggctcgctcgtcttggacgcggctaccgggcagagggtccctatcgaaaaggtgcgtccggggatggaagttttctccttgggacctgattacagactgtatcgggtgcccgttttggaggtccttgagagcggggttagggaagttgtgcgcctcagaactcggtcagggagaacgctggtgttgacagcaaatcacccgctattgacccccgaaggttggaaacctctttgtgacctcccgcttggaactccaattgcagtcagagatgttgagactggagaggttctctgggaccctattgttgctgtcgaaccggccggtaaggcgagaacattcgacttgcgcgttccaccctttgcaaacttcgtgagcgaggacctggtggtgcataactcgtcgtgtatgcagcacgttcaacaggaggtgctggagactatggcctacgcagggaaggccttgaaggccggctcatcccaggcccgtatctatttcgacgcggggcattcggcgtggcattcaccagcgcagatggcttcttggctccagcaggctgatatctcaaactctgcacatggtatcgccacgaatacttctaactaccgttggaccgctgatgaagtcgcgtacgccaaggccgtgctgtccgccataggaaatccctccctcagagccgtcatagatacgtcccgcaacggaaatggccctgctggaaatgagtggtgcgacccaagcggacgcgctatcggaaccccgagtaccacaaatactggcgacccaatgatcgatgctttcctctggattaagcttccgggagaagcagacggttgcatcgccggagctggccaattcgttccacaagcagcatacgagatggctattgcggcgggtggtacgaatcctaatcccaaccccaaccctacgccaacgcccacaccgactcccactccacctccggggagcagcggcgcctgcacagccacctatacaatcgcaaacgaatggaatgatggcttccaagcgacggtgacggtgaccgcgaaccagaacatcactgggtggactgtcacttggactttcacggatggacagactattactaacgcctggaatgctgacgtttcgacgtcaggttcgtctgtgacggcgcgcaacgtcgggcataatggtactctctcccagggcgccagcacagagtttggctttgtcggctcaaagggaaattcaaatagcgtccccactctcacgtgcgccgcctcgtga

SEQ ID NO: 1894 - DNA, 1644 bp, Artificial Sequence; identical to SEQ ID NO: 1893
  Synthetic Construct, P26222-mTth010-S154-5 DNA

SEQ ID NO: 1895 - DNA, 2835 bp, Artificial Sequence
  Synthetic Construct, P54583-Tth-S56-1 DNA
atggctggaggaggatactggcacacttccggcagggagatcctcgacgcaaataacgttccagtcagaatcgccgggattaattggtttggcttcgaaacgtgtaactacgtggttcacggcctgtggtctcgggattacagatcaatgctcgaccagatcaaatgcctggccgagggctcgctcgtcttggacgcggctaccgggcagagggtccctatcgaaaaggtgcgtccggggatggaagttttctccttgggacctgattacagactgtatcgggtgcccgttttggaggtccttgagagcggggttagggaagttgtgcgcctcagaactcggtcagggagaacgctggtgttgacaccagatcacccgcttttgacccccgaaggttggaaacctctttgtgacctcccgcttggaactccaattgcagtccccgcagaactgcctgtggcgggccacttggccccacctgaagaacgtgttacgctcctggctcttctgttgggggatgggaacacaaagctgtcgggtcggagaggtacacgtcctaatgccttcttctacagcaaagaccccgaattgctcgcggcttatcgccggtgtgcagaagccttgggtgcaaaggtgaaagcatacgtccacccgactacgggggtggttacactcgcaaccctcgctccacgtcctggagctcaagatcctgtcaaacgcctcgttgtcgaggcgggaatggttgctaaagccgaagagaagagggtcccggaggaggtgtttcgttaccggcgtgaggcgttggcccttttcttgggccgtttgttctcgacagacggctctgttgaaaagaagaggatctcttattcaagtgccagtttgggactggcccaggatgtcgcacatctcttgctgcgccttggaattacatctcaactccgttcgagagggccacgggctcacgaggttcttatatcgggccgcgaggatattttgcggtttgctgaacttatcggaccctacctcttgggggccaagagggagagacttgcagcgctggaagctgaggcccgcaggcgtttgcctggacagggatggcacttgcggcttgttcttcctgccgtggcgtacagagtgagcgaggctaaaaggcgctcgggattttcgtggagtgaagccggtcggcgcgtcgcagttgcgggatcgtgtttgtcatctggactcaacctcaaattgcccagacgctacctttctcggcaccggttgtcgctgctcggtgaggcttttgccgaccctgggctggaagcgctcgcggaaggccaagtgctctgggaccctattgttgctgtcgaaccggccggtaaggcgagaacattcgacttgcgcgttccaccctttgcaaacttcgtgagcgaggacctggtggtgcataactccttggggtataatacaattaggctgccctacagcgatgacattcttaagcctggaaccatgccgaactcgattaatttctaccaaatgaaccaggatctgcagggattgacttctctgcaggttatggacaagatcgtggcgtacgccggccaaatcgggctcagaattattttggatcggcacaggccagactgctcaggtcagtcggccctgtggtacacaagctccgtgtcagaggcaacatggatttcagatcttcaagccctcgcacaacgctataaaggcaaccccacggttgtgggattcgaccttcacaacgaacctcacgatccggcctgttggggctgcggggacccttcgatcgactggagactggcagcggagagggctggtaacgccgttctcagcgtcaatcccaacttgctgatctttgtggagggagttcagtcctacaacggcgattcttactggtggggcggaaatctccaaggcgcagggcagtatcctgtcgtgcttaacgttccgaatcgcctggtctactcagcacacgactacgcgactagcgtgtacccacagacgtggttctccgatcccacatttcctaacaatatgccgggaatctggaacaagaattggggttacttgtttaaccaaaacattgctccagtttggttgggtgaatttggcaccactcttcagtcgacgacagaccaaacctggctgaaaaccctcgtccagtatttgcggccaactgctcagtacggagcagattcttttcaatggacgttctggtcttggaatcctgactccggggatacaggcggtatcctgaaagacgattggcagaccgtggacactgttaaggacgggtacttggcgccgattaaaagctcgatctttgacccagtcggcgctagcgcttccccatcttcacaaccttcgccgagcgtcagccccagcccaagcccaagcccgtctgccagcagaacccccactcccacacctacccccacggcctcaccaactccgacgctcactcctacggcgacgccaacaccaactgcttcacccactcctagccccaccgcagcgagcggggctaggtgcaccgcttcttaccaggtcaactctgactggggtaatggcttcaccgtgactgtggcggtcactaactcaggaagcgtcgcgacgaaaacctggactgtgtcctggacgttcgggggcaaccaaacaatcaccaacagctggaacgctgcagttacgcagaatgggcaaagcgtcacggcgcgcaatatgagctacaacaacgtgattcaaccaggccagaataccacattcggttttcaagcaagctataccgggtcaaacgctgccccaactgtcgcttgtgctgcctca

SEQ ID NO: 1896 - DNA, 1974 bp, Artificial Sequence
  Synthetic Construct, P54583-mTth010-S56-1 DNA
atggctggaggaggatactggcacacttccggcagggagatcctcgacgcaaataacgttccagtcagaatcgccgggattaattggtttggcttcgaaacgtgtaactacgtggttcacggcctgtggtctcgggattacagatcaatgctcgaccagatcaaatgcctggccgagggctcgctcgtcttggacgcggctaccgggcagagggtccctatcgaaaaggtgcgtccggggatggaagttttctccttgggacctgattacagactgtatcgggtgcccgttttggaggtccttgagagcggggttagggaagttgtgcgcctcagaactcggtcagggagaacgctggtgttgacaccagatcacccgcttttgacccccgaaggttggaaacctctttgtgacctcccgcttggaactccaattgcagtcagagatgttgagactggagaggttctctgggaccctattgttgctgtcgaaccggccggtaaggcgagaacattcgacttgcgcgttccaccctttgcaaacttcgtgagcgaggacctggtggtgcataactccttggggtataatacaattaggctgccctacagcgatgacattcttaagcctggaaccatgccgaactcgattaatttctaccaaatgaaccaggatctgcagggattgacttctctgcaggttatggacaagatcgtggcgtacgccggccaaatcgggctcagaattattttggatcggcacaggccagactgctcaggtcagtcggccctgtggtacacaagctccgtgtcagaggcaacatggatttcagatcttcaagccctcgcacaacgctataaaggcaaccccacggttgtgggattcgaccttcacaacgaacctcacgatccggcctgttggggctgcggggacccttcgatcgactggagactggcagcggagagggctggtaacgccgttctcagcgtcaatcccaacttgctgatctttgtggagggagttcagtcctacaacggcgattcttactggtggggcggaaatctccaaggcgcagggcagtatcctgtcgtgcttaacgttccgaatcgcctggtctactcagcacacgactacgcgactagcgtgtacccacagacgtggttctccgatcccacatttcctaacaatatgccgggaatctggaacaagaattggggttacttgtttaaccaaaacattgctccagtttggttgggtgaatttggcaccactcttcagtcgacgacagaccaaacctggctgaaaaccctcgtccagtatttgcggccaactgctcagtacggagcagattcttttcaatggacgttctggtcttggaatcctgactccggggatacaggcggtatcctgaaagacgattggcagaccgtggacactgttaaggacgggtacttggcgccgattaaaagctcgatctttgacccagtcggcgctagcgcttccccatcttcacaaccttcgccgagcgtcagccccagcccaagcccaagcccgtctgccagcagaacccccactcccacacctacccccacggcctcaccaactccgacgctcactcctacggcgacgccaacaccaactgcttcacccactcctagccccaccgcagcgagcggggctaggtgcaccgcttcttaccaggtcaactctgactggggtaatggcttcaccgtgactgtggcggtcactaactcaggaagcgtcgcgacgaaaacctggactgtgtcctggacgttcgggggcaaccaaacaatcaccaacagctggaacgctgcagttacgcagaatgggcaaagcgtcacggcgcgcaatatgagctacaacaacgtgattcaaccaggccagaataccacattcggttttcaagcaagctataccgggtcaaacgctgccccaactgtcgcttgtgctgcctca

SEQ ID NO: 1897 - DNA, 2835 bp, Artificial Sequence
  Synthetic Construct, P54583-Tth-C75-1 DNA
atggctggaggaggatactggcacacttccggcagggagatcctcgacgcaaataacgttccagtcagaatcgccgggattaattggtttggcttcgaaacgtgccttgccgagggtacccgagtcttggacgcggctaccgggcagagggtccctatcgaaaaggtgcgtccggggatggaagttttctccttgggacctgattacagactgtatcgggtgcccgttttggaggtccttgagagcggggttagggaagttgtgcgcctcagaactcggtcagggagaacgctggtgttgacaccagatcacccgcttttgacccccgaaggttggaaacctctttgtgacctcccgcttggaactccaattgcagtccccgcagaactgcctgtggcgggccacttggccccacctgaagaacgtgttacgctcctggctcttctgttgggggatgggaacacaaagctgtcgggtcggagaggtacacgtcctaatgccttcttctacagcaaagaccccgaattgctcgcggcttatcgccggtgtgcagaagccttgggtgcaaaggtgaaagcatacgtccacccgactacgggggtggttacactcgcaaccctcgctccacgtcctggagctcaagatcctgtcaaacgcctcgttgtcgaggcgggaatggttgctaaagccgaagagaagagggtcccggaggaggtgtttcgttaccggcgtgaggcgttggcccttttcttgggccgtttgttctcgacagacggctctgttgaaaagaagaggatctcttattcaagtgccagtttgggactggcccaggatgtcgcacatctcttgctgcgccttggaattacatctcaactccgttcgagagggccacgggctcacgaggttcttatatcgggccgcgaggatattttgcggtttgctgaacttatcggaccctacctcttgggggccaagagggagagacttgcagcgctggaagctgaggcccgcaggcgtttgcctggacagggatggcacttgcggcttgttcttcctgccgtggcgtacagagtgagcgaggctaaaaggcgctcgggattttcgtggagtgaagccggtcggcgcgtcgcagttgcgggatcgtgtttgtcatctggactcaacctcaaattgcccagacgctacctttctcggcaccggttgtcgctgctcggtgaggcttttgccgaccctgggctggaagcgctcgcggaaggccaagtgctctgggaccctattgttgctgtcgaaccggccggtaaggcgagaacattcgacttgcgcgttccaccctttgcaaacttcgtgagcgaaggggttgtcgtgcacaactgtaactacgtggttcacggcctgtggtctcgggattacagatcaatgctcgaccagatcaaatccttggggtataatacaattaggctgccctacagcgatgacattcttaagcctggaaccatgccgaactcgattaatttctaccaaatgaaccaggatctgcagggattgacttctctgcaggttatggacaagatcgtggcgtacgccggccaaatcgggctcagaattattttggatcggcacaggccagactgctcaggtcagtcggccctgtggtacacaagctccgtgtcagaggcaacatggatttcagatcttcaagccctcgcacaacgctataaaggcaaccccacggttgtgggattcgaccttcacaacgaacctcacgatccggcctgttggggctgcggggacccttcgatcgactggagactggcagcggagagggctggtaacgccgttctcagcgtcaatcccaacttgctgatctttgtggagggagttcagtcctacaacggcgattcttactggtggggcggaaatctccaaggcgcagggcagtatcctgtcgtgcttaacgttccgaatcgcctggtctactcagcacacgactacgcgactagcgtgtacccacagacgtggttctccgatcccacatttcctaacaatatgccgggaatctggaacaagaattggggttacttgtttaaccaaaacattgctccagtttggttgggtgaatttggcaccactcttcagtcgacgacagaccaaacctggctgaaaaccctcgtccagtatttgcggccaactgctcagtacggagcagattcttttcaatggacgttctggtcttggaatcctgactccggggatacaggcggtatcctgaaagacgattggcagaccgtggacactgttaaggacgggtacttggcgccgattaaaagctcgatctttgacccagtcggcgctagcgcttccccatcttcacaaccttcgccgagcgtcagccccagcccaagcccaagcccgtctgccagcagaacccccactcccacacctacccccacggcctcaccaactccgacgctcactcctacggcgacgccaacaccaactgcttcacccactcctagccccaccgcagcgagcggggctaggtgcaccgcttcttaccaggtcaactctgactggggtaatggcttcaccgtgactgtggcggtcactaactcaggaagcgtcgcgacgaaaacctggactgtgtcctggacgttcgggggcaaccaaacaatcaccaacagctggaacgctgcagttacgcagaatgggcaaagcgtcacggcgcgcaatatgagctacaacaacgtgattcaaccaggccagaataccacattcggttttcaagcaagctataccgggtcaaacgctgccccaactgtcgcttgtgctgcctca

SEQ ID NO: 1898 - DNA, 2835 bp, Artificial Sequence
  Synthetic Construct, P54583-Tth-S192-1 DNA
atggctggaggaggatactggcacacttccggcagggagatcctcgacgcaaataacgttccagtcagaatcgccgggattaattggtttggcttcgaaacgtgtaactacgtggttcacggcctgtggtctcgggattacagatcaatgctcgaccagatcaaatccttggggtataatacaattaggctgccctacagcgatgacattcttaagcctggaaccatgccgaactcgattaatttctaccaaatgaaccaggatctgcagggattgacttctctgcaggttatggacaagatcgtggcgtacgccggccaaatcgggctcagaattattttggatcggcacaggccagactgctcaggtcagtcggccctgtggtacacaagctccgtgtcagaggcaacatggatttcagatcttcaagccctcgcacaacgctataaaggcaaccccacggttgtgggattcgaccttcacaacgaacctcacgatccggcctgttggggctgcggggacccttcgatcgactggagactggcagcggagagggctggtaacgccgttctctgcctggccgagggctcgctcgtcttggacgcggctaccgggcagagggtccctatcgaaaaggtgcgtccggggatggaagttttctccttgggacctgattacagactgtatcgggtgcccgttttggaggtccttgagagcggggttagggaagttgtgcgcctcagaactcggtcagggagaacgctggtgttgacaccagatcacccgcttttgacccccgaaggttggaaacctctttgtgacctcccgcttggaactccaattgcagtccccgcagaactgcctgtggcgggccacttggccccacctgaagaacgtgttacgctcctggctcttctgttgggggatgggaacacaaagctgtcgggtcggagaggtacacgtcctaatgccttcttctacagcaaagaccccgaattgctcgcggcttatcgccggtgtgcagaagccttgggtgcaaaggtgaaagcatacgtccacccgactacgggggtggttacactcgcaaccctcgctccacgtcctggagctcaagatcctgtcaaacgcctcgttgtcgaggcgggaatggttgctaaagccgaagagaagagggtcccggaggaggtgtttcgttaccggcgtgaggcgttggcccttttcttgggccgtttgttctcgacagacggctctgttgaaaagaagaggatctcttattcaagtgccagtttgggactggcccaggatgtcgcacatctcttgctgcgccttggaattacatctcaactccgttcgagagggccacgggctcacgaggttcttatatcgggccgcgaggatattttgcggtttgctgaacttatcggaccctacctcttgggggccaagagggagagacttgcagcgctggaagctgaggcccgcaggcgtttgcctggacagggatggcacttgcggcttgttcttcctgccgtggcgtacagagtgagcgaggctaaaaggcgctcgggattttcgtggagtgaagccggtcggcgcgtcgcagttgcgggatcgtgtttgtcatctggactcaacctcaaattgcccagacgctacctttctcggcaccggttgtcgctgctcggtgaggcttttgccgaccctgggctggaagcgctcgcggaaggccaagtgctctgggaccctattgttgctgtcgaaccggccggtaaggcgagaacattcgacttgcgcgttccaccctttgcaaacttcgtgagcgaggacctggtggtgcataacagcgtcaatcccaacttgctgatctttgtggagggagttcagtcctacaacggcgattcttactggtggggcggaaatctccaaggcgcagggcagtatcctgtcgtgcttaacgttccgaatcgcctggtctactcagcacacgactacgcgactagcgtgtacccacagacgtggttctccgatcccacatttcctaacaatatgccgggaatctggaacaagaattggggttacttgtttaaccaaaacattgctccagtttggttgggtgaatttggcaccactcttcagtcgacgacagaccaaacctggctgaaaaccctcgtccagtatttgcggccaactgctcagtacggagcagattcttttcaatggacgttctggtcttggaatcctgactccggggatacaggcggtatcctgaaagacgattggcagaccgtggacactgttaaggacgggtacttggcgccgattaaaagctcgatctttgacccagtcggcgctagcgcttccccatcttcacaaccttcgccgagcgtcagccccagcccaagcccaagcccgtctgccagcagaacccccactcccacacctacccccacggcctcaccaactccgacgctcactcctacggcgacgccaacaccaactgcttcacccactcctagccccaccgcagcgagcggggctaggtgcaccgcttcttaccaggtcaactctgactggggtaatggcttcaccgtgactgtggcggtcactaactcaggaagcgtcgcgacgaaaacctggactgtgtcctggacgttcgggggcaaccaaacaatcaccaacagctggaacgctgcagttacgcagaatgggcaaagcgtcacggcgcgcaatatgagctacaacaacgtgattcaaccaggccagaataccacattcggttttcaagcaagctataccgggtcaaacgctgccccaactgtcgcttgtgctgcctca

SEQ ID NO: 1899 - DNA, 2835 bp, Artificial Sequence
  Synthetic Construct, P54583-Tth-S237-1 DNA
atggctggaggaggatactggcacacttccggcagggagatcctcgacgcaaataacgttccagtcagaatcgccgggattaattggtttggcttcgaaacgtgtaactacgtggttcacggcctgtggtctcgggattacagatcaatgctcgaccagatcaaatccttggggtataatacaattaggctgccctacagcgatgacattcttaagcctggaaccatgccgaactcgattaatttctaccaaatgaaccaggatctgcagggattgacttctctgcaggttatggacaagatcgtggcgtacgccggccaaatcgggctcagaattattttggatcggcacaggccagactgctcaggtcagtcggccctgtggtacacaagctccgtgtcagaggcaacatggatttcagatcttcaagccctcgcacaacgctataaaggcaaccccacggttgtgggattcgaccttcacaacgaacctcacgatccggcctgttggggctgcggggacccttcgatcgactggagactggcagcggagagggctggtaacgccgttctcagcgtcaatcccaacttgctgatctttgtggagggagttcagtcctacaacggcgattcttactggtggggcggaaatctccaaggcgcagggcagtatcctgtcgtgcttaacgttccgaatcgcctggtctactgcctggccgagggctcgctcgtcttggacgcggctaccgggcagagggtccctatcgaaaaggtgcgtccggggatggaagttttctccttgggacctgattacagactgtatcgggtgcccgttttggaggtccttgagagcggggttagggaagttgtgcgcctcagaactcggtcagggagaacgctggtgttgacaccagatcacccgcttttgacccccgaaggttggaaacctctttgtgacctcccgcttggaactccaattgcagtccccgcagaactgcctgtggcgggccacttggccccacctgaagaacgtgttacgctcctggctcttctgttgggggatgggaacacaaagctgtcgggtcggagaggtacacgtcctaatgccttcttctacagcaaagaccccgaattgctcgcggcttatcgccggtgtgcagaagccttgggtgcaaaggtgaaagcatacgtccacccgactacgggggtggttacactcgcaaccctcgctccacgtcctggagctcaagatcctgtcaaacgcctcgttgtcgaggcgggaatggttgctaaagccgaagagaagagggtcccggaggaggtgtttcgttaccggcgtgaggcgttggcccttttcttgggccgtttgttctcgacagacggctctgttgaaaagaagaggatctcttattcaagtgccagtttgggactggcccaggatgtcgcacatctcttgctgcgccttggaattacatctcaactccgttcgagagggccacgggctcacgaggttcttatatcgggccgcgaggatattttgcggtttgctgaacttatcggaccctacctcttgggggccaagagggagagacttgcagcgctggaagctgaggcccgcaggcgtttgcctggacagggatggcacttgcggcttgttcttcctgccgtggcgtacagagtgagcgaggctaaaaggcgctcgggattttcgtggagtgaagccggtcggcgcgtcgcagttgcgggatcgtgtttgtcatctggactcaacctcaaattgcccagacgctacctttctcggcaccggttgtcgctgctcggtgaggcttttgccgaccctgggctggaagcgctcgcggaaggccaagtgctctgggaccctattgttgctgtcgaaccggccggtaaggcgagaacattcgacttgcgcgttccaccctttgcaaacttcgtgagcgaggacctggtggtgcataactcagcacacgactacgcgactagcgtgtacccacagacgtggttctccgatcccacatttcctaacaatatgccgggaatctggaacaagaattggggttacttgtttaaccaaaacattgctccagtttggttgggtgaatttggcaccactcttcagtcgacgacagaccaaacctggctgaaaaccctcgtccagtatttgcggccaactgctcagtacggagcagattcttttcaatggacgttctggtcttggaatcctgactccggggatacaggcggtatcctgaaagacgattggcagaccgtggacactgttaaggacgggtacttggcgccgattaaaagctcgatctttgacccagtcggcgctagcgcttccccatcttcacaaccttcgccgagcgtcagccccagcccaagcccaagcccgtctgccagcagaacccccactcccacacctacccccacggcctcaccaactccgacgctcactcctacggcgacgccaacaccaactgcttcacccactcctagccccaccgcagcgagcggggctaggtgcaccgcttcttaccaggtcaactctgactggggtaatggcttcaccgtgactgtggcggtcactaactcaggaagcgtcgcgacgaaaacctggactgtgtcctggacgttcgggggcaaccaaacaatcaccaacagctggaacgctgcagttacgcagaatgggcaaagcgtcacggcgcgcaatatgagctacaacaacgtgattcaaccaggccagaataccacattcggttttcaagcaagctataccgggtcaaacgctgccccaactgtcgcttgtgctgcctca

SEQ ID NO: 1900 - DNA, 1974 bp, Artificial Sequence
  Synthetic Construct, P54583-mTth010-S237-1 DNA
atggctggaggaggatactggcacacttccggcagggagatcctcgacgcaaataacgttccagtcagaatcgccgggattaattggtttggcttcgaaacgtgtaactacgtggttcacggcctgtggtctcgggattacagatcaatgctcgaccagatcaaatccttggggtataatacaattaggctgccctacagcgatgacattcttaagcctggaaccatgccgaactcgattaatttctaccaaatgaaccaggatctgcagggattgacttctctgcaggttatggacaagatcgtggcgtacgccggccaaatcgggctcagaattattttggatcggcacaggccagactgctcaggtcagtcggccctgtggtacacaagctccgtgtcagaggcaacatggatttcagatcttcaagccctcgcacaacgctataaaggcaaccccacggttgtgggattcgaccttcacaacgaacctcacgatccggcctgttggggctgcggggacccttcgatcgactggagactggcagcggagagggctggtaacgccgttctcagcgtcaatcccaacttgctgatctttgtggagggagttcagtcctacaacggcgattcttactggtggggcggaaatctccaaggcgcagggcagtatcctgtcgtgcttaacgttccgaatcgcctggtctactgcctggccgagggctcgctcgtcttggacgcggctaccgggcagagggtccctatcgaaaaggtgcgtccggggatggaagttttctccttgggacctgattacagactgtatcgggtgcccgttttggaggtccttgagagcggggttagggaagttgtgcgcctcagaactcggtcagggagaacgctggtgttgacaccagatcacccgcttttgacccccgaaggttggaaacctctttgtgacctcccgcttggaactccaattgcagtcagagatgttgagactggagaggttctctgggaccctattgttgctgtcgaaccggccggtaaggcgagaacattcgacttgcgcgttccaccctttgcaaacttcgtgagcgaggacctggtggtgcataactcagcacacgactacgcgactagcgtgtacccacagacgtggttctccgatcccacatttcctaacaatatgccgggaatctggaacaagaattggggttacttgtttaaccaaaacattgctccagtttggttgggtgaatttggcaccactcttcagtcgacgacagaccaaacctggctgaaaaccctcgtccagtatttgcggccaactgctcagtacggagcagattcttttcaatggacgttctggtcttggaatcctgactccggggatacaggcggtatcctgaaagacgattggcagaccgtggacactgttaaggacgggtacttggcgccgattaaaagctcgatctttgacccagtcggcgctagcgcttccccatcttcacaaccttcgccgagcgtcagccccagcccaagcccaagcccgtctgccagcagaacccccactcccacacctacccccacggcctcaccaactccgacgctcactcctacggcgacgccaacaccaactgcttcacccactcctagccccaccgcagcgagcggggctaggtgcaccgcttcttaccaggtcaactctgactggggtaatggcttcaccgtgactgtggcggtcactaactcaggaagcgtcgcgacgaaaacctggactgtgtcctggacgttcgggggcaaccaaacaatcaccaacagctggaacgctgcagttacgcagaatgggcaaagcgtcacggcgcgcaatatgagctacaacaacgtgattcaaccaggccagaataccacattcggttttcaagcaagctataccgggtcaaacgctgccccaactgtcgcttgtgctgcctca

SEQ ID NO: 1901 - DNA, 1974 bp, Artificial Sequence
  Synthetic Construct, P54583-mTth010-S56-2 DNA
atggctggaggaggatactggcacacttccggcagggagatcctcgacgcaaataacgttccagtcagaatcgccgggattaattggtttggcttcgaaacgtgtaactacgtggttcacggcctgtggtctcgggattacagatcaatgctcgaccagatcaaatgcctggccgagggctcgctcgtcttggacgcggctaccgggcagagggtccctatcgaaaaggtgcgtccggggatggaagttttctccttgggacctgattacagactgtatcgggtgcccgttttggaggtccttgagagcggggttagggaagttgtgcgcctcagaactcggtcagggagaacgctggtgtcgacaccagatcacccgcttttgacccccgaaggttggaaacctctttgtgacctcccgcttggaactccaattgcagtcagagatgttgagactggagaggttctctgggaccctattgttgctgtcgaaccggccggtaaggcgagaacattcgacttgcgcgttccaccctttgcaaacttcgtgagcgaggacctggtggtgcataattccttggggtataatacaattaggctgccctacagcgatgacattcttaagcctggaaccatgccgaactcgattaatttctaccaaatgaaccaggatctgcagggattgacttctctgcaggttatggacaagatcgtggcgtacgccggccaaatcgggctcagaattattttggatcggcacaggccagactgctcaggtcagtcggccctgtggtacacaagctccgtgtcagaggcaacatggatttcagatcttcaagccctcgcacaacgctataaaggcaaccccacggttgtgggattcgaccttcacaacgaacctcacgatccggcctgttggggctgcggggacccttcgatcgactggagactggcagcggagagggctggtaacgccgttctcagcgtcaatcccaacttgctgatctttgtggagggagttcagtcctacaacggcgattcttactggtggggcggaaatctccaaggcgcagggcagtatcctgtcgtgcttaacgttccgaatcgcctggtctactcagcacacgactacgcgactagcgtgtacccacagacgtggttctccgatcccacatttcctaacaatatgccgggaatctggaacaagaattggggttacttgtttaaccaaaacattgctccagtttggttgggtgaatttggcaccactcttcagtcgacgacagaccaaacctggctgaaaaccctcgtccagtatttgcggccaactgctcagtacggagcagattcttttcaatggacgttctggtcttggaatcctgactccggggatacaggcggtatcctgaaagacgattggcagaccgtggacactgttaaggacgggtacttggcgccgattaaaagctcgatctttgacccagtcggcgctagcgcttccccatcttcacaaccttcgccgagcgtcagccccagcccaagcccaagcccgtctgccagcagaacccccactcccacacctacccccacggcctcaccaactccgacgctcactcctacggcgacgccaacaccaactgcttcacccactcctagccccaccgcagcgagcggggctaggtgcaccgcttcttaccaggtcaactctgactggggtaatggcttcaccgtgactgtggcggtcactaactcaggaagcgtcgcgacgaaaacctggactgtgtcctggacgttcgggggcaaccaaacaatcaccaacagctggaacgctgcagttacgcagaatgggcaaagcgtcacggcgcgcaatatgagctacaacaacgtgattcaaccaggccagaataccacattcggttttcaagcaagctataccgggtcaaacgctgccccaactgtcgcttgtgctgcctca

SEQ ID NO: 1902 - DNA, 1974 bp, Artificial Sequence
  Synthetic Construct, P54583-mTth010-S56-3 DNA
atggctggaggaggatactggcacacttccggcagggagatcctcgacgcaaataacgttccagtcagaatcgccgggattaattggtttggcttcgaaacgtgtaactacgtggttcacggcctgtggtctcgggattacagatcaatgctcgaccagatcaaatgcctggccgagggctcgctcgtcttggacgcggctaccgggcagagggtccctatcgaaaaggtgcgtccggggatggaagttttctccttgggacctgattacagactgtatcgggtgcccgttttggaggtccttgagagcggggttagggaagttgtgcgcctcagaactcggtcagggagaacgctggtgttgacaccagatcacccgcttttgacccccgaaggttggaaacctctttgtgacctcccgcttggaactccaattgcagtcagagatgttgagactggagaggttctctgggaccttattgttgctgtcgaaccggccggtaaggcgagaacattcgacttgcgcgttccaccctttgcaaacttcgtgagcgaggacctggtggtgcataactccttggggtataatacaattaggctgccctacagcgatgacattcttaagcctggaaccatgccgaactcgattaatttctaccaaatgaaccaggatctgcagggattgacttctctgcaggttatggacaagatcgtggcgtacgccggccaaatcgggctcagaattattttggatcggcacaggccagactgctcaggtcagtcggccctgtggtacacaagctccgtgtcagaggcaacatggatttcagatcttcaagccctcgcacaacgctataaaggcaaccccacggttgtgggattcgaccttcacaacgaacctcacgatccggcctgttggggctgcggggacccttcgatcgactggagactggcagcggagagggctggtaacgccgttctcagcgtcaatcccaacttgctgatctttgtggagggagttcagtcctacaacggcgattcttactggtggggcggaaatctccaaggcgcagggcagtatcctgtcgtgcttaacgttccgaatcgcctggtctactcagcacacgactacgcgactagcgtgtacccacagacgtggttctccgatcccacatttcctaacaatatgccgggaatctggaacaagaattggggttacttgtttaaccaaaacattgctccagtttggttgggtgaatttggcaccactcttcagtcgacgacagaccaaacctggctgaaaaccctcgtccagtatttgcggccaactgctcagtacggagcagattcttttcaatggacgttctggtcttggaatcctgactccggggatacaggcggtatcctgaaagacgattggcagaccgtggacactgttaaggacgggtacttggcgccgattaaaagctcgatctttgacccagtcggcgctagcgcttccccatcttcacaaccttcgccgagcgtcagccccagcccaagcccaagcccgtctgccagcagaacccccactcccacacctacccccacggcctcaccaactccgacgctcactcctacggcgacgccaacaccaactgcttcacccactcctagccccaccgcagcgagcggggctaggtgcaccgcttcttaccaggtcaactctgactggggtaatggcttcaccgtgactgtggcggtcactaactcaggaagcgtcgcgacgaaaacctggactgtgtcctggacgttcgggggcaaccaaacaatcaccaacagctggaacgctgcagttacgcagaatgggcaaagcgtcacggcgcgcaatatgagctacaacaacgtgattcaaccaggccagaataccacattcggttttcaagcaagctataccgggtcaaacgctgccccaactgtcgcttgtgctgcctca

SEQ ID NO: 1903 - DNA, 1974 bp, Artificial Sequence
  Synthetic Construct, P54583-mTth010-S56-4 DNA
atggctggaggaggatactggcacacttccggcagggagatcctcgacgcaaataacgttccagtcagaatcgccgggattaattggtttggcttcgaaacgtgtaactacgtggttcacggcctgtggtctcgggattacagatcaatgctcgaccagatcaaatgcctggccgagggctcgctcgtcttggacgcggctaccgggcagagggtccctatcgaaaaggtgcgtccggggatggaagttttctccttgggacctgattacagactgtatcgggtgcccgttttggaggtccttgagagcggggttagggaagttgtgtgcctcagaactcggtcagggagaacgctggtgttgacaccagatcacccgcttttgacccccgaaggttggaaacctctttgtgacctcccgcttggaactccaattgcagtcagagatgttgagactggagaggttctctgggaccctattgttgctgtcgaaccggccggtaaggcgagaacattcgacttgcgcgttccaccctttgcaaacttcgtgagcgaggacctggtggtgcataactccttggggtataatacaattaggctgccctacagcgatgacattcttaagcctggaaccatgccgaactcgattaatttctaccaaatgaaccaggatctgcagggattgacttctctgcaggttatggacaagatcgtggcgtacgccggccaaatcgggctcagaattattttggatcggcacaggccagactgctcaggtcagtcggccctgtggtacacaagctccgtgtcagaggcaacatggatttcagatcttcaagccctcgcacaacgctataaaggcaaccccacggttgtgggattcgaccttcacaacgaacctcacgatccggcctgttggggctgcggggacccttcgatcgactggagactggcagcggagagggctggtaacgccgttctcagcgtcaatcccaacttgctgatctttgtggagggagttcagtcctacaacggcgattcttactggtggggcggaaatctccaaggcgcagggcagtatcctgtcgtgcttaacgttccgaatcgcctggtctactcagcacacgactacgcgactagcgtgtacccacagacgtggttctccgatcccacatttcctaacaatatgccgggaatctggaacaagaattggggttacttgtttaaccaaaacattgctccagtttggttgggtgaatttggcaccactcttcagtcgacgacagaccaaacctggctgaaaaccctcgtccagtatttgcggccaactgctcagtacggagcagattcttttcaatggacgttctggtcttggaatcctgactccggggatacaggcggtatcctgaaagacgattggcagaccgtggacactgttaaggacgggtacttggcgccgattaaaagctcgatctttgacccagtcggcgctagcgcttccccatcttcacaaccttcgccgagcgtcagccccagcccaagcccaagcccgtctgccagcagaacccccactcccacacctacccccacggcctcaccaactccgacgctcactcctacggcgacgccaacaccaactgcttcacccactcctagccccaccgcagcgagcggggctaggtgcaccgcttcttaccaggtcaactctgactggggtaatggcttcaccgtgactgtggcggtcactaactcaggaagcgtcgcgacgaaaacctggactgtgtcctggacgttcgggggcaaccaaacaatcaccaacagctggaacgctgcagttacgcagaatgggcaaagcgtcacggcgcgcaatatgagctacaacaacgtgattcaaccaggccagaataccacattcggttttcaagcaagctataccgggtcaaacgctgccccaactgtcgcttgtgctgcctca

SEQ ID NO: 1904 - DNA, 1974 bp, Artificial Sequence
  Synthetic Construct, P54583-mTth010-S56-5 DNA
atggctggaggaggatactggcacacttccggcagggagatcctcgacgcaaataacgttccagtcagaatcgccgggattaattggtttggcttcgaaacgtgtaactacgtggttcacggcctgtggtctcgggattacagatcaatgctcgaccagatcaaatgcctggccgagggctcgctcgtcttggacgcggctaccgggcagagggtccctatcgaaaaggtgcgtccggggatggaagttttctccttgggacctgattacagactgtatcgggtgcccgttttggaggtccttgagagcggggttagggaagttgtgtgcctcagaactcggtcagggagaacgctggtgttgacaccagatcacccgcttttgacccccgaaggttggaagcctctttgtgacctcccgcttggaactccaattgcagtcagagatgttgagactggagaggttctctgggaccctattgttgctgtcgaaccggccggtaaggcgagaacattcgacttgcgcgttccaccctttgcaaacttcgtgagcgaggacctggtggtgcataactccttggggtataatacaattaggctgccctacagcgatgacattcttaagcctggaaccatgccgaactcgattaatttctaccaaatgaaccaggatctgcagggattgacttctctgcaggttatggacaagatcgtggcgtacgccggccaaatcgggctcagaattattttggatcggcacaggccagactgctcaggtcagtcggccctgtggtacacaagctccgtgtcagaggcaacatggatttcagatcttcaagccctcgcacaacgctataaaggcaaccccacggttgtgggattcgaccttcacaacgaacctcacgatccggcctgttggggctgcggggacccttcgatcgactggagactggcagcggagagggctggtaacgccgttctcagcgtcaatcccaacttgctgatctttgtggagggagttcagtcctacaacggcgattcttactggtggggcggaaatctccaaggcgcagggcagtatcctgtcgtgcttaacgttccgaatcgcctggtctactcagcacacgactacgcgactagcgtgtacccacagacgtggttctccgatcccacatttcctaacaatatgccgggaatctggaacaagaattggggttacttgtttaaccaaaacattgctccagtttggttgggtgaatttggcaccactcttcagtcgacgacagaccaaacctggctgaaaaccctcgtccagtatttgcggccaactgctcagtacggagcagattcttttcaatggacgttctggtcttggaatcctgactccggggatacaggcggtatcctgaaagacgattggcagaccgtggacactgttaaggacgggtacttggcgccgattaaaagctcgatctttgacccagtcggcgctagcgcttccccatcttcacaaccttcgccgagcgtcagccccagcccaagcccaagcccgtctgccagcagaacccccactcccacacctacccccacggcctcaccaactccgacgctcactcctacggcgacgccaacaccaactgcttcacccactcctagccccaccgcagcgagcggggctaggtgcaccgcttcttaccaggtcaactctgactggggtaatggcttcaccgtgactgtggcggtcactaactcaggaagcgtcgcgacgaaaacctggactgtgtcctggacgttcgggggcaaccaaacaatcaccaacagctggaacgctgcagttacgcagaatgggcaaagcgtcacggcgcgcaatatgagctacaacaacgtgattcaaccaggccagaataccacattcggttttcaagcaagctataccgggtcaaacgctgccccaactgtcgcttgtgctgcctca

SEQ ID NO: 1905 - DNA, 1974 bp, Artificial Sequence
  Synthetic Construct, P54583-mTth010-S56-6 DNA
atggctggaggaggatactggcacacttccggcagggagatcctcgacgcaaataacgtttcagtcagaatcgccgggattaattggtttggcttcgaaacgtgtaactacgtggttcacggcctgtggtctcgggattacagatcaatgctcgaccagatcaaatgcctggccgagggctcgctcgtcttggacgcggctaccgggcagagggtccctatcgaaaaggtgcgtccggggatgaaagttttctccttgggacctgattacagactgtatcgggtgcccgttttggaggtccttgagagcggggttagggaagttgtgcgcctcagaactcggtcagggagaacgctggtgttgacaccagatcacccgcttttgacccccgaaggttggaaacctctttgtgacctcccgcttggaactccaattgcagtcagagatgttgagactggagaggttctctgggaccctattgttgctgtcgaaccggccggtaaggcgagaacattcgacttgcgcgttccaccctttgcaaacttcgtgagcgaggacctggtggtgcataactccttggggtataatacaattaggctgccctacagcgatgacattcttaagcctggaaccatgccgaactcgattaatttctaccaaatgaaccaggatctgcagggattgacttctctgcaggttatggacaagatcgtggcgtacgccggccaaatcgggctcagaattattttggatcggcacaggccagactgctcaggtcagtcggccctgtggtacacaagctccgtgtcagaggcaacatggatttcagatcttcaagccctcgcacaacgctataaaggcaaccccacggttgtgggattcgaccttcacaacgaacctcacgatccggcctgttggggctgcggggacccttcgatcgactggagactggcagcggagagggctggtaacgccgttctcagcgtcaatcccaacttgctgatctttgtggagggagttcagtcctacaacggcgattcttactggtggggcggaaatctccaaggcgcagggcagtatcctgtcgtgcttaacgttccgaatcgcctggtctactcagcacacgactacgcgactagcgtgtacccacagacgtggttctccgatcccacatttcctaacaatatgccgggaatctggaacaagaattggggttacttgtttaaccaaaacattgctccagtttggttgggtgaatttggcaccactcttcagtcgacgacagaccaaacctggctgaaaaccctcgtccagtatttgcggccaactgctcagtacggagcagattcttttcaatggacgttctggtcttggaatcctgactccggggatacaggcggtatcctgaaagacgattggcagaccgtggacactgttaaggacgggtacttggcgccgattaaaagctcgatctttgacccagtcggcgctagcgcttccccatcttcacaaccttcgccgagcgtcagccccagcccaagcccaagcccgtctgccagcagaacccccactcccacacctacccccacggcctcaccaactccgacgctcactcctacggcgacgccaacaccaactgcttcacccactcctagccccaccgcagcgagcggggctaggtgcaccgcttcttaccaggtcaactctgactggggtaatggcttcaccgtgactgtggcggtcactaactcaggaagcgtcgcgacgaaaacctggactgtgtcctggacgttcgggggcaaccaaacaatcaccaacagctggaacgctgcagttacgcagaatgggcaaagcgtcacggcgcgcaatatgagctacaacaacgtgattcaaccaggccagaataccacattcggttttcaagcaagctataccgggtcaaacgctgccccaactgtcgcttgtgctgcctca

SEQ ID NO: 1906 - DNA, 1974 bp, Artificial Sequence
  Synthetic Construct, P54583-mTth010-S56-7 DNA
atggctggaggaggatactggcacacttccggcagggagatcctcgacgcaaataacgttccagtcagaatcgccgggattaattggtttggcttcgaaacgtgtaactacgtggttcacggcctgtggtctcgggattacagatcaatgctcgaccagatcaaatgcctggccgagggctcgctcgtcttggacgcggctaccgggcagagggtccctatcgaaaaggtgcgtccggggatggaagttttctccttgggacctgattacagactgtatcgggtgcccgttttggaggtccttgagagcggggttagggaagttgtgcgcctcagaactcggtcagggagaacgctggtgttgacaccagatcacccgcttttgacccccgaaggttggaaacctctttgtgacctcccggttggaactccaattgcagtcagagatgttgagactggagaggttctctgggaccctattgttgctgtcgaaccggccggtaaggcgagaacattcgacttgcgcgttccaccctttgcaaacttcgtgagcgaggacctggtggtgcataactccttggggtataatacaattaggctgccctacagcgatgacattcttaagcctggaaccatgccgaactcgattaatttctaccaaatgaaccaggatctgcagggattgacttctctgcaggttatggacaagatcgtggcgtacgccggccaaatcgggctcagaattattttggatcggcacaggccagactgctcaggtcagtcggccctgtggtacacaagctccgtgtcagaggcaacatggatttcagatcttcaagccctcgcacaacgctataaaggcaaccccacggttgtgggattcgaccttcacaacgaacctcacgatccggcctgttggggctgcggggacccttcgatcgactggagactggcagcggagagggctggtaacgccgttctcagcgtcaatcccaacttgctgatctttgtggagggagttcagtcctacaacggcgattcttactggtggggcggaaatctccaaggcgcagggcagtatcctgtcgtgcttaacgttccgaatcgcctggtctactcagcacacgactacgcgactagcgtgtacccacagacgtggttctccgatcccacatttcctaacaatatgccgggaatctggaacaagaattggggttacttgtttaaccaaaacattgctccagtttggttgggtgaatttggcaccactcttcagtcgacgacagaccaaacctggctgaaaaccctcgtccagtatttgcggccaactgctcagtacggagcagattcttttcaatggacgttctggtcttggaatcctgactccggggatacaggcggtatcctgaaagacgattggcagaccgtggacactgttaaggacgggtacttggcgccgattaaaagctcgatctttgacccagtcggcgctagcgcttccccatcttcacaaccttcgccgagcgtcagccccagcccaagcccaagcccgtctgccagcagaacccccactcccacacctacccccacggcctcaccaactccgacgctcactcctacggcgacgccaacaccaactgcttcacccactcctagccccaccgcagcgagcggggctaggtgcaccgcttcttaccaggtcaactctgactggggtaatggcttcaccgtgactgtggcggtcactaactcaggaagcgtcgcgacgaaaacctggactgtgtcctggacgttcgggggcaaccaaacaatcaccaacagctggaacgctgcagttacgcagaatgggcaaagcgtcacggcgcgcaatatgagctacaacaacgtgattcaaccaggccagaataccacattcggttttcaagcaagctataccgggtcaaacgctgccccaactgtcgcttgtgctgcctca

SEQ ID NO: 1907 - DNA, 1974 bp, Artificial Sequence
  Synthetic Construct, P54583-mTth010-S237-2 DNA
atggctggaggaggatactggcacacttccggcagggagatcctcgacgcaaataacgttccagtcagaatcgccgggattaattggtttggcttcgaaacgtgtaactacgtggttcacggcctgtggtctcgggattacagatcaatgctcgaccagatcaaatccttggggtataatacaattaggctgccctacagcgatgacattcttaagcctggaaccatgccgaactcgattaatttctaccaaatgaaccaggatctgcagggattgacttctctgcaggttatggacaagatcgtggcgtacgccggccaaatcgggctcagaattattttggatcggcacaggccagactgctcaggtcagtcggccctgtggtacacaagctccgtgtcagaggcaacatggatttcagatcttcaagccctcgcacaacgctataaaggcaaccccacggttgtgggattcgaccttcacaacgaacctcacgatccggcctgttggggctgcggggacccttcgatcgactggagactggcagcggagagggctggtaacgccgttctcagcgtcaatcccaacttgctgatctttgtggagggagttcagtcctacaacggcgattcttactggtggggcggaaatctccaaggcgcagggcagtatcctgtcgtgcttaacgttccgaatcgcctggtctactgcctggccgagggctcgctcgtcttggacgcggctaccgggcagagggtccctatcgaaaaggtgcgtccggggatggaagttttctccttgggacctgattacagactgtatcgggtgcccgttttggaggtccttgagagcggggttagggaagttgtgcgcctcagaactcggtcagggagaacgctggtgttgacaccagatcacccgcttttggcccccgaaggttggaaacctctttgtgacctcccgcttggaactccaattgcagtcagagatgttgagactggagaggttctctgggaccctattgttgctgtcgaaccggccggtaaggcgagaacattcgacttgcgcgttccaccctttgcaaacttcgtgagcgaggacctggtggtgcataactcagcacacgactacgcgactagcgtgtacccacagacgtggttctccgatcccacatttcctaacaatatgccgggaatctggaacaagaattggggttacttgtttaaccaaaacattgctccagtttggttgggtgaatttggcaccactcttcagtcgacgacagaccaaacctggctgaaaaccctcgtccagtatttgcggccaactgctcagtacggagcagattcttttcaatggacgttctggtcttggaatcctgactccggggatacaggcggtatcctgaaagacgattggcagaccgtggacactgttaaggacgggtacttggcgccgattaaaagctcgatctttgacccagtcggcgctagcgcttccccatcttcacaaccttcgccgagcgtcagccccagcccaagcccaagcccgtctgccagcagaacccccactcccacacctacccccacggcctcaccaactccgacgctcactcctacggcgacgccaacaccaactgcttcacccactcctagccccaccgcagcgagcggggctaggtgcaccgcttcttaccaggtcaactctgactggggtaatggcttcaccgtgactgtggcggtcactaactcaggaagcgtcgcgacgaaaacctggactgtgtcctggacgttcgggggcaaccaaacaatcaccaacagctggaacgctgcagttacgcagaatgggcaaagcgtcacggcgcgcaatatgagctacaacaacgtgattcaaccaggccagaataccacattcggttttcaagcaagctataccgggtcaaacgctgccccaactgtcgcttgtgctgcctca

SEQ ID NO: 1908 - DNA, 1974 bp, Artificial Sequence
  Synthetic Construct, P54583-mTth010-S237-3 DNA
atggctggaggaggatactggcacacttccggcagggagatcctcgacgcaaataacgttccagtcagaatcgccgggattaattggtttggcttcgaaacgtgtaactacgtggttcacggcctgtggtctcgggattacagatcaatgctcgaccagatcaaatccttggggtataatacaattaggctgccctacagcgatgacattcttaagcctggaaccatgccgaactcgattaatttctaccaaatgaaccaggatctgcagggattgacttctctgcaggttatggacaagatcgtggcgtacgccggccaaatcgggctcagaattattttggatcggcacaggccagactgctcaggtcagtcggccctgtggtacacaagctccgtgtcagaggcaacatggatttcagatcttcaagccctcgcacaacgctataaaggcaaccccacggttgtgggattcgaccttcacaacgaacctcacgatccggcctgttggggctgcggggacccttcgatcgactggagactggcagcggagagggctggtaacgccgttctcagcgtcaatcccaacttgctgatctttgtggagggagttcagtcctacaacggcgattcttactggtggggcggaaatctccaaggcgcagggcagtatcctgtcgtgcttaacgttccgaatcgcctggtctactgcctggccgagggctcgctcgtcttggacgcggctaccgggcagagggtccctatcgaaaaggtgcgtccggggatggaagttttctccttgggacctgattacagactgtatcgggtgcccgttttggaggtccttgagagcggggttagggaagttgtgcgcctcagaactcggtcagggagaacgctggtgttgacaccagatcacccgcttttgtcccccgaaggttggaaacctctttgtgacctcccgcttggaactccaattgcagtcagagatgttgagactggagaggttctctgggaccctattgttgctgtcgaaccggccggtaaggcgagaacattcgacttgcgcgttccaccctttgcaaacttcgtgagcgaggacctggtggtgcataactcagcacacgactacgcgactagcgtgtacccacagacgtggttctccgatcccacatttcctaacaatatgccgggaatctggaacaagaattggggttacttgtttaaccaaaacattgctccagtttggttgggtgaatttggcaccactcttcagtcgacgacagaccaaacctggctgaaaaccctcgtccagtatttgcggccaactgctcagtacggagcagattcttttcaatggacgttctggtcttggaatcctgactccggggatacaggcggtatcctgaaagacgattggcagaccgtggacactgttaaggacgggtacttggcgccgattaaaagctcgatctttgacccagtcggcgctagcgcttccccatcttcacaaccttcgccgagcgtcagccccagcccaagcccaagcccgtctgccagcagaacccccactcccacacctacccccacggcctcaccaactccgacgctcactcctacggcgacgccaacaccaactgcttcacccactcctagccccaccgcagcgagcggggctaggtgcaccgcttcttaccaggtcaactctgactggggtaatggcttcaccgtgactgtggcggtcactaactcaggaagcgtcgcgacgaaaacctggactgtgtcctggacgttcgggggcaaccaaacaatcaccaacagctggaacgctgcagttacgcagaatgggcaaagcgtcacggcgcgcaatatgagctacaacaacgtgattcaaccaggccagaataccacattcggttttcaagcaagctataccgggtcaaacgctgccccaactgtcgcttgtgctgcctca

SEQ ID NO: 1909 - DNA, 2568 bp, Artificial Sequence
  Synthetic Construct, O77044-Tth-S84-1 DNA
tccgcttacgactacaagcaggtgttgcgggactcgctactattctatgaggcccagagatccggccggctcccagccgaccagaaggtcacgtggaggaaggatagcgcgctgaatgaccagggtgaccagggacaagacttgaccggcggctactttgacgctggggacttcgtcaagttcgggttccccatggcttataccgcaaccgtgctggcatggggcctcatagattttgaggccggctactgcctggccgagggctcgctcgtcttggacgcggctaccgggcagagggtccctatcgaaaaggtgcgtccggggatggaagttttctccttgggacctgattacagactgtatcgggtgcccgttttggaggtccttgagagcggggttagggaagttgtgcgcctcagaactcggtcagggagaacgctggtgttgacaccagatcacccgcttttgacccccgaaggttggaaacctctttgtgacctcccgcttggaactccaattgcagtccccgcagaactgcctgtggcgggccacttggccccacctgaagaacgtgttacgctcctggctcttctgttgggggatgggaacacaaagctgtcgggtcggagaggtacacgtcctaatgccttcttctacagcaaagaccccgaattgctcgcggcttatcgccggtgtgcagaagccttgggtgcaaaggtgaaagcatacgtccacccgactacgggggtggttacactcgcaaccctcgctccacgtcctggagctcaagatcctgtcaaacgcctcgttgtcgaggcgggaatggttgctaaagccgaagagaagagggtcccggaggaggtgtttcgttaccggcgtgaggcgttggcccttttcttgggccgtttgttctcgacagacggctctgttgaaaagaagaggatctcttattcaagtgccagtttgggactggcccaggatgtcgcacatctcttgctgcgccttggaattacatctcaactccgttcgagagggccacgggctcacgaggttcttatatcgggccgcgaggatattttgcggtttgctgaacttatcggaccctacctcttgggggccaagagggagagacttgcagcgctggaagctgaggcccgcaggcgtttgcctggacagggatggcacttgcggcttgttcttcctgccgtggcgtacagagtgagcgaggctaaaaggcgctcgggattttcgtggagtgaagccggtcggcgcgtcgcagttgcgggatcgtgtttgtcatctggactcaacctcaaattgcccagacgctacctttctcggcaccggttgtcgctgctcggtgaggcttttgccgaccctgggctggaagcgctcgcggaaggccaagtgctctgggaccctattgttgctgtcgaaccggccggtaaggcgagaacattcgacttgcgcgttccaccctttgcaaacttcgtgagcgaggacctggtggtgcataacagcagtgccggggccttggatgatggacggaaggctgtcaaatgggccaccgactatttcataaaggcccacacaagtcaaaatgagttctatggtcaggtcggccagggtgacgccgatcacgctttctggggaagaccagaggatatgacgatggcgcgcccggcgtacaagatagacacctcaaggcctggctctgatctggcaggcgagacagcggctgctcttgccgctgcttcaatcgtgttccggaacgtcgatggcacttactcaaataacctgttaacacacgctcgccagctattcgacttcgcgaacaactaccggggaaagtatagtgactctattactgacgcaagaaatttctacgcaagcgcagactacagagacgagttggtttgggctgctgcgtggttatacagagcgaccaacgacaacacctacctcaacactgctgagtcactgtacgatgagtttgggctacagaactggggggggggcctgaactgggatagcaaggtgtctggcgtgcaggtgttgttggccaagcttaccaataagcaggcctacaaggacacggtgcagtcttacgtcaattacctaattaataaccagcagaagactcccaagggcctcctctacatcgacatgtggggcacccttcgccacgctgccaacgccgcattcatcatgctcgaagccgccgagctgggcttgtccgcctcctcttatagacagttcgcgcaaacgcaaatcgactacgccctgggcgatggtggccgctcctttgtgtgcgggttcgggagtaatcctcctacgagaccgcaccacagatcctcgtcgtgcccgccagctcccgctacttgcgactggaatacattcaactcacctgacccaaactaccacgtcctctctggggccctagtgggcggacctgatcagaatgacaactacgtcgatgaccgttcagactatgttcacaacgaagtcgccactgattacaacgcgggtttccagtccgcgttagctgctttggtggcccttggttac

SEQ ID NO: 1910 - DNA, 2568 bp, Artificial Sequence
  Synthetic Construct, O77044-Tth-T303-1 DNA
tccgcttacgactacaagcaggtgttgcgggactcgctactattctatgaggcccagagatccggccggctcccagccgaccagaaggtcacgtggaggaaggatagcgcgctgaatgaccagggtgaccagggacaagacttgaccggcggctactttgacgctggggacttcgtcaagttcgggttccccatggcttataccgcaaccgtgctggcatggggcctcatagattttgaggccggctacagcagtgccggggccttggatgatggacggaaggctgtcaaatgggccaccgactatttcataaaggcccacacaagtcaaaatgagttctatggtcaggtcggccagggtgacgccgatcacgctttctggggaagaccagaggatatgacgatggcgcgcccggcgtacaagatagacacctcaaggcctggctctgatctggcaggcgagacagcggctgctcttgccgctgcttcaatcgtgttccggaacgtcgatggcacttactcaaataacctgttaacacacgctcgccagctattcgacttcgcgaacaactaccggggaaagtatagtgactctattactgacgcaagaaatttctacgcaagcgcagactacagagacgagttggtttgggctgctgcgtggttatacagagcgaccaacgacaacacctacctcaacactgctgagtcactgtacgatgagtttgggctacagaactggggggggggcctgaactgggatagcaaggtgtctggcgtgcaggtgttgttggccaagcttaccaataagcaggcctacaaggacacggtgcagtcttacgtcaattacctaattaataaccagcagaagactcccaagggcctcctctacatcgacatgtggggctgcctggccgagggctcgctcgtcttggacgcggctaccgggcagagggtccctatcgaaaaggtgcgtccggggatggaagttttctccttgggacctgattacagactgtatcgggtgcccgttttggaggtccttgagagcggggttagggaagttgtgcgcctcagaactcggtcagggagaacgctggtgttgacaccagatcacccgcttttgacccccgaaggttggaaacctctttgtgacctcccgcttggaactccaattgcagtccccgcagaactgcctgtggcgggccacttggccccacctgaagaacgtgttacgctcctggctcttctgttgggggatgggaacacaaagctgtcgggtcggagaggtacacgtcctaatgccttcttctacagcaaagaccccgaattgctcgcggcttatcgccggtgtgcagaagccttgggtgcaaaggtgaaagcatacgtccacccgactacgggggtggttacactcgcaaccctcgctccacgtcctggagctcaagatcctgtcaaacgcctcgttgtcgaggcgggaatggttgctaaagccgaagagaagagggtcccggaggaggtgtttcgttaccggcgtgaggcgttggcccttttcttgggccgtttgttctcgacagacggctctgttgaaaagaagaggatctcttattcaagtgccagtttgggactggcccaggatgtcgcacatctcttgctgcgccttggaattacatctcaactccgttcgagagggccacgggctcacgaggttcttatatcgggccgcgaggatattttgcggtttgctgaacttatcggaccctacctcttgggggccaagagggagagacttgcagcgctggaagctgaggcccgcaggcgtttgcctggacagggatggcacttgcggcttgttcttcctgccgtggcgtacagagtgagcgaggctaaaaggcgctcgggattttcgtggagtgaagccggtcggcgcgtcgcagttgcgggatcgtgtttgtcatctggactcaacctcaaattgcccagacgctacctttctcggcaccggttgtcgctgctcggtgaggcttttgccgaccctgggctggaagcgctcgcggaaggccaagtgctctgggaccctattgttgctgtcgaaccggccggtaaggcgagaacattcgacttgcgcgttccaccctttgcaaacttcgtgagcgaggacctggtggtgcataacacccttcgccacgctgccaacgccgcattcatcatgctcgaagccgccgagctgggcttgtccgcctcctcttatagacagttcgcgcaaacgcaaatcgactacgccctgggcgatggtggccgctcctttgtgtgcgggttcgggagtaatcctcctacgagaccgcaccacagatcctcgtcgtgcccgccagctcccgctacttgcgactggaatacattcaactcacctgacccaaactaccacgtcctctctggggccctagtgggcggacctgatcagaatgacaactacgtcgatgaccgttcagactatgttcacaacgaagtcgccactgattacaacgcgggtttccagtccgcgttagctgctttggtggcccttggttac

SEQ ID NO: 1911 - DNA, 2568 bp, Artificial Sequence
  Synthetic Construct, O77044-Tth-S325-1 DNA
tccgcttacgactacaagcaggtgttgcgggactcgctactattctatgaggcccagagatccggccggctcccagccgaccagaaggtcacgtggaggaaggatagcgcgctgaatgaccagggtgaccagggacaagacttgaccggcggctactttgacgctggggacttcgtcaagttcgggttccccatggcttataccgcaaccgtgctggcatggggcctcatagattttgaggccggctacagcagtgccggggccttggatgatggacggaaggctgtcaaatgggccaccgactatttcataaaggcccacacaagtcaaaatgagttctatggtcaggtcggccagggtgacgccgatcacgctttctggggaagaccagaggatatgacgatggcgcgcccggcgtacaagatagacacctcaaggcctggctctgatctggcaggcgagacagcggctgctcttgccgctgcttcaatcgtgttccggaacgtcgatggcacttactcaaataacctgttaacacacgctcgccagctattcgacttcgcgaacaactaccggggaaagtatagtgactctattactgacgcaagaaatttctacgcaagcgcagactacagagacgagttggtttgggctgctgcgtggttatacagagcgaccaacgacaacacctacctcaacactgctgagtcactgtacgatgagtttgggctacagaactggggggggggcctgaactgggatagcaaggtgtctggcgtgcaggtgttgttggccaagcttaccaataagcaggcctacaaggacacggtgcagtcttacgtcaattacctaattaataaccagcagaagactcccaagggcctcctctacatcgacatgtggggcacccttcgccacgctgccaacgccgcattcatcatgctcgaagccgccgagctgggcttgtccgcctgcctggccgagggctcgctcgtcttggacgcggctaccgggcagagggtccctatcgaaaaggtgcgtccggggatggaagttttctccttgggacctgattacagactgtatcgggtgcccgttttggaggtccttgagagcggggttagggaagttgtgcgcctcagaactcggtcagggagaacgctggtgttgacaccagatcacccgcttttgacccccgaaggttggaaacctctttgtgacctcccgcttggaactccaattgcagtccccgcagaactgcctgtggcgggccacttggccccacctgaagaacgtgttacgctcctggctcttctgttgggggatgggaacacaaagctgtcgggtcggagaggtacacgtcctaatgccttcttctacagcaaagaccccgaattgctcgcggcttatcgccggtgtgcagaagccttgggtgcaaaggtgaaagcatacgtccacccgactacgggggtggttacactcgcaaccctcgctccacgtcctggagctcaagatcctgtcaaacgcctcgttgtcgaggcgggaatggttgctaaagccgaagagaagagggtcccggaggaggtgtttcgttaccggcgtgaggcgttggcccttttcttgggccgtttgttctcgacagacggctctgttgaaaagaagaggatctcttattcaagtgccagtttgggactggcccaggatgtcgcacatctcttgctgcgccttggaattacatctcaactccgttcgagagggccacgggctcacgaggttcttatatcgggccgcgaggatattttgcggtttgctgaacttatcggaccctacctcttgggggccaagagggagagacttgcagcgctggaagctgaggcccgcaggcgtttgcctggacagggatggcacttgcggcttgttcttcctgccgtggcgtacagagtgagcgaggctaaaaggcgctcgggattttcgtggagtgaagccggtcggcgcgtcgcagttgcgggatcgtgtttgtcatctggactcaacctcaaattgcccagacgctacctttctcggcaccggttgtcgctgctcggtgaggcttttgccgaccctgggctggaagcgctcgcggaaggccaagtgctctgggaccctattgttgctgtcgaaccggccggtaaggcgagaacattcgacttgcgcgttccaccctttgcaaacttcgtgagcgaggacctggtggtgcataactcctcttatagacagttcgcgcaaacgcaaatcgactacgccctgggcgatggtggccgctcctttgtgtgcgggttcgggagtaatcctcctacgagaccgcaccacagatcctcgtcgtgcccgccagctcccgctacttgcgactggaatacattcaactcacctgacccaaactaccacgtcctctctggggccctagtgggcggacctgatcagaatgacaactacgtcgatgaccgttcagactatgttcacaacgaagtcgccactgattacaacgcgggtttccagtccgcgttagctgctttggtggcccttggttac

SEQ ID NO: 1912 - DNA, 2568 bp, Artificial Sequence
  Synthetic Construct, O77044-Tth-T333-1 DNA
tccgcttacgactacaagcaggtgttgcgggactcgctactattctatgaggcccagagatccggccggctcccagccgaccagaaggtcacgtggaggaaggatagcgcgctgaatgaccagggtgaccagggacaagacttgaccggcggctactttgacgctggggacttcgtcaagttcgggttccccatggcttataccgcaaccgtgctggcatggggcctcatagattttgaggccggctacagcagtgccggggccttggatgatggacggaaggctgtcaaatgggccaccgactatttcataaaggcccacacaagtcaaaatgagttctatggtcaggtcggccagggtgacgccgatcacgctttctggggaagaccagaggatatgacgatggcgcgcccggcgtacaagatagacacctcaaggcctggctctgatctggcaggcgagacagcggctgctcttgccgctgcttcaatcgtgttccggaacgtcgatggcacttactcaaataacctgttaacacacgctcgccagctattcgacttcgcgaacaactaccggggaaagtatagtgactctattactgacgcaagaaatttctacgcaagcgcagactacagagacgagttggtttgggctgctgcgtggttatacagagcgaccaacgacaacacctacctcaacactgctgagtcactgtacgatgagtttgggctacagaactggggggggggcctgaactgggatagcaaggtgtctggcgtgcaggtgttgttggccaagcttaccaataagcaggcctacaaggacacggtgcagtcttacgtcaattacctaattaataaccagcagaagactcccaagggcctcctctacatcgacatgtggggcacccttcgccacgctgccaacgccgcattcatcatgctcgaagccgccgagctgggcttgtccgcctcctcttatagacagttcgcgcaatgcctggccgagggctcgctcgtcttggacgcggctaccgggcagagggtccctatcgaaaaggtgcgtccggggatggaagttttctccttgggacctgattacagactgtatcgggtgcccgttttggaggtccttgagagcggggttagggaagttgtgcgcctcagaactcggtcagggagaacgctggtgttgacaccagatcacccgcttttgacccccgaaggttggaaacctctttgtgacctcccgcttggaactccaattgcagtccccgcagaactgcctgtggcgggccacttggccccacctgaagaacgtgttacgctcctggctcttctgttgggggatgggaacacaaagctgtcgggtcggagaggtacacgtcctaatgccttcttctacagcaaagaccccgaattgctcgcggcttatcgccggtgtgcagaagccttgggtgcaaaggtgaaagcatacgtccacccgactacgggggtggttacactcgcaaccctcgctccacgtcctggagctcaagatcctgtcaaacgcctcgttgtcgaggcgggaatggttgctaaagccgaagagaagagggtcccggaggaggtgtttcgttaccggcgtgaggcgttggcccttttcttgggccgtttgttctcgacagacggctctgttgaaaagaagaggatctcttattcaagtgccagtttgggactggcccaggatgtcgcacatctcttgctgcgccttggaattacatctcaactccgttcgagagggccacgggctcacgaggttcttatatcgggccgcgaggatattttgcggtttgctgaacttatcggaccctacctcttgggggccaagagggagagacttgcagcgctggaagctgaggcccgcaggcgtttgcctggacagggatggcacttgcggcttgttcttcctgccgtggcgtacagagtgagcgaggctaaaaggcgctcgggattttcgtggagtgaagccggtcggcgcgtcgcagttgcgggatcgtgtttgtcatctggactcaacctcaaattgcccagacgctacctttctcggcaccggttgtcgctgctcggtgaggcttttgccgaccctgggctggaagcgctcgcggaaggccaagtgctctgggaccctattgttgctgtcgaaccggccggtaaggcgagaacattcgacttgcgcgttccaccctttgcaaacttcgtgagcgaggacctggtggtgcataacacgcaaatcgactacgccctgggcgatggtggccgctcctttgtgtgcgggttcgggagtaatcctcctacgagaccgcaccacagatcctcgtcgtgcccgccagctcccgctacttgcgactggaatacattcaactcacctgacccaaactaccacgtcctctctggggccctagtgggcggacctgatcagaatgacaactacgtcgatgaccgttcagactatgttcacaacgaagtcgccactgattacaacgcgggtttccagtccgcgttagctgctttggtggcccttggttac

SEQ ID NO: 1913 - DNA, 2568 bp, Artificial Sequence
  Synthetic Construct, O77044-Tth-S345-1 DNA
tccgcttacgactacaagcaggtgttgcgggactcgctactattctatgaggcccagagatccggccggctcccagccgaccagaaggtcacgtggaggaaggatagcgcgctgaatgaccagggtgaccagggacaagacttgaccggcggctactttgacgctggggacttcgtcaagttcgggttccccatggcttataccgcaaccgtgctggcatggggcctcatagattttgaggccggctacagcagtgccggggccttggatgatggacggaaggctgtcaaatgggccaccgactatttcataaaggcccacacaagtcaaaatgagttctatggtcaggtcggccagggtgacgccgatcacgctttctggggaagaccagaggatatgacgatggcgcgcccggcgtacaagatagacacctcaaggcctggctctgatctggcaggcgagacagcggctgctcttgccgctgcttcaatcgtgttccggaacgtcgatggcacttactcaaataacctgttaacacacgctcgccagctattcgacttcgcgaacaactaccggggaaagtatagtgactctattactgacgcaagaaatttctacgcaagcgcagactacagagacgagttggtttgggctgctgcgtggttatacagagcgaccaacgacaacacctacctcaacactgctgagtcactgtacgatgagtttgggctacagaactggggggggggcctgaactgggatagcaaggtgtctggcgtgcaggtgttgttggccaagcttaccaataagcaggcctacaaggacacggtgcagtcttacgtcaattacctaattaataaccagcagaagactcccaagggcctcctctacatcgacatgtggggcacccttcgccacgctgccaacgccgcattcatcatgctcgaagccgccgagctgggcttgtccgcctcctcttatagacagttcgcgcaaacgcaaatcgactacgccctgggcgatggtggccgctgcctggccgagggctcgctcgtcttggacgcggctaccgggcagagggtccctatcgaaaaggtgcgtccggggatggaagttttctccttgggacctgattacagactgtatcgggtgcccgttttggaggtccttgagagcggggttagggaagttgtgcgcctcagaactcggtcagggagaacgctggtgttgacaccagatcacccgcttttgacccccgaaggttggaaacctctttgtgacctcccgcttggaactccaattgcagtccccgcagaactgcctgtggcgggccacttggccccacctgaagaacgtgttacgctcctggctcttctgttgggggatgggaacacaaagctgtcgggtcggagaggtacacgtcctaatgccttcttctacagcaaagaccccgaattgctcgcggcttatcgccggtgtgcagaagccttgggtgcaaaggtgaaagcatacgtccacccgactacgggggtggttacactcgcaaccctcgctccacgtcctggagctcaagatcctgtcaaacgcctcgttgtcgaggcgggaatggttgctaaagccgaagagaagagggtcccggaggaggtgtttcgttaccggcgtgaggcgttggcccttttcttgggccgtttgttctcgacagacggctctgttgaaaagaagaggatctcttattcaagtgccagtttgggactggcccaggatgtcgcacatctcttgctgcgccttggaattacatctcaactccgttcgagagggccacgggctcacgaggttcttatatcgggccgcgaggatattttgcggtttgctgaacttatcggaccctacctcttgggggccaagagggagagacttgcagcgctggaagctgaggcccgcaggcgtttgcctggacagggatggcacttgcggcttgttcttcctgccgtggcgtacagagtgagcgaggctaaaaggcgctcgggattttcgtggagtgaagccggtcggcgcgtcgcagttgcgggatcgtgtttgtcatctggactcaacctcaaattgcccagacgctacctttctcggcaccggttgtcgctgctcggtgaggcttttgccgaccctgggctggaagcgctcgcggaaggccaagtgctctgggaccctattgttgctgtcgaaccggccggtaaggcgagaacattcgacttgcgcgttccaccctttgcaaacttcgtgagcgaggacctggtggtgcataactcctttgtgtgcgggttcgggagtaatcctcctacgagaccgcaccacagatcctcgtcgtgcccgccagctcccgctacttgcgactggaatacattcaactcacctgacccaaactaccacgtcctctctggggccctagtgggcggacctgatcagaatgacaactacgtcgatgaccgttcagactatgttcacaacgaagtcgccactgattacaacgcgggtttccagtccgcgttagctgctttggtggcccttggttac

SEQ ID NO: 1914 - DNA, 2568 bp, Artificial Sequence
  Synthetic Construct, O77044-Tth-C348-1 DNA
tccgcttacgactacaagcaggtgttgcgggactcgctactattctatgaggcccagagatccggccggctcccagccgaccagaaggtcacgtggaggaaggatagcgcgctgaatgaccagggtgaccagggacaagacttgaccggcggctactttgacgctggggacttcgtcaagttcgggttccccatggcttataccgcaaccgtgctggcatggggcctcatagattttgaggccggctacagcagtgccggggccttggatgatggacggaaggctgtcaaatgggccaccgactatttcataaaggcccacacaagtcaaaatgagttctatggtcaggtcggccagggtgacgccgatcacgctttctggggaagaccagaggatatgacgatggcgcgcccggcgtacaagatagacacctcaaggcctggctctgatctggcaggcgagacagcggctgctcttgccgctgcttcaatcgtgttccggaacgtcgatggcacttactcaaataacctgttaacacacgctcgccagctattcgacttcgcgaacaactaccggggaaagtatagtgactctattactgacgcaagaaatttctacgcaagcgcagactacagagacgagttggtttgggctgctgcgtggttatacagagcgaccaacgacaacacctacctcaacactgctgagtcactgtacgatgagtttgggctacagaactggggggggggcctgaactgggatagcaaggtgtctggcgtgcaggtgttgttggccaagcttaccaataagcaggcctacaaggacacggtgcagtcttacgtcaattacctaattaataaccagcagaagactcccaagggcctcctctacatcgacatgtggggcacccttcgccacgctgccaacgccgcattcatcatgctcgaagccgccgagctgggcttgtccgcctcctcttatagacagttcgcgcaaacgcaaatcgactacgccctgggcgatggtggccgctcctttgtgtgcctggccgagggctcgctcgtcttggacgcggctaccgggcagagggtccctatcgaaaaggtgcgtccggggatggaagttttctccttgggacctgattacagactgtatcgggtgcccgttttggaggtccttgagagcggggttagggaagttgtgcgcctcagaactcggtcagggagaacgctggtgttgacaccagatcacccgcttttgacccccgaaggttggaaacctctttgtgacctcccgcttggaactccaattgcagtccccgcagaactgcctgtggcgggccacttggccccacctgaagaacgtgttacgctcctggctcttctgttgggggatgggaacacaaagctgtcgggtcggagaggtacacgtcctaatgccttcttctacagcaaagaccccgaattgctcgcggcttatcgccggtgtgcagaagccttgggtgcaaaggtgaaagcatacgtccacccgactacgggggtggttacactcgcaaccctcgctccacgtcctggagctcaagatcctgtcaaacgcctcgttgtcgaggcgggaatggttgctaaagccgaagagaagagggtcccggaggaggtgtttcgttaccggcgtgaggcgttggcccttttcttgggccgtttgttctcgacagacggctctgttgaaaagaagaggatctcttattcaagtgccagtttgggactggcccaggatgtcgcacatctcttgctgcgccttggaattacatctcaactccgttcgagagggccacgggctcacgaggttcttatatcgggccgcgaggatattttgcggtttgctgaacttatcggaccctacctcttgggggccaagagggagagacttgcagcgctggaagctgaggcccgcaggcgtttgcctggacagggatggcacttgcggcttgttcttcctgccgtggcgtacagagtgagcgaggctaaaaggcgctcgggattttcgtggagtgaagccggtcggcgcgtcgcagttgcgggatcgtgtttgtcatctggactcaacctcaaattgcccagacgctacctttctcggcaccggttgtcgctgctcggtgaggcttttgccgaccctgggctggaagcgctcgcggaaggccaagtgctctgggaccctattgttgctgtcgaaccggccggtaaggcgagaacattcgacttgcgcgttccaccctttgcaaacttcgtgagcgaggacctggtggtgcataactgcgggttcgggagtaatcctcctacgagaccgcaccacagatcctcgtcgtgcccgccagctcccgctacttgcgactggaatacattcaactcacctgacccaaactaccacgtcctctctggggccctagtgggcggacctgatcagaatgacaactacgtcgatgaccgttcagactatgttcacaacgaagtcgccactgattacaacgcgggtttccagtccgcgttagctgctttggtggcccttggttac

SEQ ID NO: 1915 - DNA, 2568 bp, Artificial Sequence
  Synthetic Construct, O77044-Tth-S352-1 DNA
tccgcttacgactacaagcaggtgttgcgggactcgctactattctatgaggcccagagatccggccggctcccagccgaccagaaggtcacgtggaggaaggatagcgcgctgaatgaccagggtgaccagggacaagacttgaccggcggctactttgacgctggggacttcgtcaagttcgggttccccatggcttataccgcaaccgtgctggcatggggcctcatagattttgaggccggctacagcagtgccggggccttggatgatggacggaaggctgtcaaatgggccaccgactatttcataaaggcccacacaagtcaaaatgagttctatggtcaggtcggccagggtgacgccgatcacgctttctggggaagaccagaggatatgacgatggcgcgcccggcgtacaagatagacacctcaaggcctggctctgatctggcaggcgagacagcggctgctcttgccgctgcttcaatcgtgttccggaacgtcgatggcacttactcaaataacctgttaacacacgctcgccagctattcgacttcgcgaacaactaccggggaaagtatagtgactctattactgacgcaagaaatttctacgcaagcgcagactacagagacgagttggtttgggctgctgcgtggttatacagagcgaccaacgacaacacctacctcaacactgctgagtcactgtacgatgagtttgggctacagaactggggggggggcctgaactgggatagcaaggtgtctggcgtgcaggtgttgttggccaagcttaccaataagcaggcctacaaggacacggtgcagtcttacgtcaattacctaattaataaccagcagaagactcccaagggcctcctctacatcgacatgtggggcacccttcgccacgctgccaacgccgcattcatcatgctcgaagccgccgagctgggcttgtccgcctcctcttatagacagttcgcgcaaacgcaaatcgactacgccctgggcgatggtggccgctcctttgtgtgcgggttcgggtgcctggccgagggctcgctcgtcttggacgcggctaccgggcagagggtccctatcgaaaaggtgcgtccggggatggaagttttctccttgggacctgattacagactgtatcgggtgcccgttttggaggtccttgagagcggggttagggaagttgtgcgcctcagaactcggtcagggagaacgctggtgttgacaccagatcacccgcttttgacccccgaaggttggaaacctctttgtgacctcccgcttggaactccaattgcagtccccgcagaactgcctgtggcgggccacttggccccacctgaagaacgtgttacgctcctggctcttctgttgggggatgggaacacaaagctgtcgggtcggagaggtacacgtcctaatgccttcttctacagcaaagaccccgaattgctcgcggcttatcgccggtgtgcagaagccttgggtgcaaaggtgaaagcatacgtccacccgactacgggggtggttacactcgcaaccctcgctccacgtcctggagctcaagatcctgtcaaacgcctcgttgtcgaggcgggaatggttgctaaagccgaagagaagagggtcccggaggaggtgtttcgttaccggcgtgaggcgttggcccttttcttgggccgtttgttctcgacagacggctctgttgaaaagaagaggatctcttattcaagtgccagtttgggactggcccaggatgtcgcacatctcttgctgcgccttggaattacatctcaactccgttcgagagggccacgggctcacgaggttcttatatcgggccgcgaggatattttgcggtttgctgaacttatcggaccctacctcttgggggccaagagggagagacttgcagcgctggaagctgaggcccgcaggcgtttgcctggacagggatggcacttgcggcttgttcttcctgccgtggcgtacagagtgagcgaggctaaaaggcgctcgggattttcgtggagtgaagccggtcggcgcgtcgcagttgcgggatcgtgtttgtcatctggactcaacctcaaattgcccagacgctacctttctcggcaccggttgtcgctgctcggtgaggcttttgccgaccctgggctggaagcgctcgcggaaggccaagtgctctgggaccctattgttgctgtcgaaccggccggtaaggcgagaacattcgacttgcgcgttccaccctttgcaaacttcgtgagcgaggacctggtggtgcataacagtaatcctcctacgagaccgcaccacagatcctcgtcgtgcccgccagctcccgctacttgcgactggaatacattcaactcacctgacccaaactaccacgtcctctctggggccctagtgggcggacctgatcagaatgacaactacgtcgatgaccgttcagactatgttcacaacgaagtcgccactgattacaacgcgggtttccagtccgcgttagctgctttggtggcccttggttac

SEQ ID NO: 1916 - DNA, 2568 bp, Artificial Sequence
  Synthetic Construct, O77044-Tth-T356-1 DNA
tccgcttacgactacaagcaggtgttgcgggactcgctactattctatgaggcccagagatccggccggctcccagccgaccagaaggtcacgtggaggaaggatagcgcgctgaatgaccagggtgaccagggacaagacttgaccggcggctactttgacgctggggacttcgtcaagttcgggttccccatggcttataccgcaaccgtgctggcatggggcctcatagattttgaggccggctacagcagtgccggggccttggatgatggacggaaggctgtcaaatgggccaccgactatttcataaaggcccacacaagtcaaaatgagttctatggtcaggtcggccagggtgacgccgatcacgctttctggggaagaccagaggatatgacgatggcgcgcccggcgtacaagatagacacctcaaggcctggctctgatctggcaggcgagacagcggctgctcttgccgctgcttcaatcgtgttccggaacgtcgatggcacttactcaaataacctgttaacacacgctcgccagctattcgacttcgcgaacaactaccggggaaagtatagtgactctattactgacgcaagaaatttctacgcaagcgcagactacagagacgagttggtttgggctgctgcgtggttatacagagcgaccaacgacaacacctacctcaacactgctgagtcactgtacgatgagtttgggctacagaactggggggggggcctgaactgggatagcaaggtgtctggcgtgcaggtgttgttggccaagcttaccaataagcaggcctacaaggacacggtgcagtcttacgtcaattacctaattaataaccagcagaagactcccaagggcctcctctacatcgacatgtggggcacccttcgccacgctgccaacgccgcattcatcatgctcgaagccgccgagctgggcttgtccgcctcctcttatagacagttcgcgcaaacgcaaatcgactacgccctgggcgatggtggccgctcctttgtgtgcgggttcgggagtaatcctccttgcctggccgagggctcgctcgtcttggacgcggctaccgggcagagggtccctatcgaaaaggtgcgtccggggatggaagttttctccttgggacctgattacagactgtatcgggtgcccgttttggaggtccttgagagcggggttagggaagttgtgcgcctcagaactcggtcagggagaacgctggtgttgacaccagatcacccgcttttgacccccgaaggttggaaacctctttgtgacctcccgcttggaactccaattgcagtccccgcagaactgcctgtggcgggccacttggccccacctgaagaacgtgttacgctcctggctcttctgttgggggatgggaacacaaagctgtcgggtcggagaggtacacgtcctaatgccttcttctacagcaaagaccccgaattgctcgcggcttatcgccggtgtgcagaagccttgggtgcaaaggtgaaagcatacgtccacccgactacgggggtggttacactcgcaaccctcgctccacgtcctggagctcaagatcctgtcaaacgcctcgttgtcgaggcgggaatggttgctaaagccgaagagaagagggtcccggaggaggtgtttcgttaccggcgtgaggcgttggcccttttcttgggccgtttgttctcgacagacggctctgttgaaaagaagaggatctcttattcaagtgccagtttgggactggcccaggatgtcgcacatctcttgctgcgccttggaattacatctcaactccgttcgagagggccacgggctcacgaggttcttatatcgggccgcgaggatattttgcggtttgctgaacttatcggaccctacctcttgggggccaagagggagagacttgcagcgctggaagctgaggcccgcaggcgtttgcctggacagggatggcacttgcggcttgttcttcctgccgtggcgtacagagtgagcgaggctaaaaggcgctcgggattttcgtggagtgaagccggtcggcgcgtcgcagttgcgggatcgtgtttgtcatctggactcaacctcaaattgcccagacgctacctttctcggcaccggttgtcgctgctcggtgaggcttttgccgaccctgggctggaagcgctcgcggaaggccaagtgctctgggaccctattgttgctgtcgaaccggccggtaaggcgagaacattcgacttgcgcgttccaccctttgcaaacttcgtgagcgaggacctggtggtgcataacacgagaccgcaccacagatcctcgtcgtgcccgccagctcccgctacttgcgactggaatacattcaactcacctgacccaaactaccacgtcctctctggggccctagtgggcggacctgatcagaatgacaactacgtcgatgaccgttcagactatgttcacaacgaagtcgccactgattacaacgcgggtttccagtccgcgttagctgctttggtggcccttggttac

SEQ ID NO: 1917 - DNA, 2568 bp, Artificial Sequence
  Synthetic Construct, O77044-Tth-S362-1 DNA
tccgcttacgactacaagcaggtgttgcgggactcgctactattctatgaggcccagagatccggccggctcccagccgaccagaaggtcacgtggaggaaggatagcgcgctgaatgaccagggtgaccagggacaagacttgaccggcggctactttgacgctggggacttcgtcaagttcgggttccccatggcttataccgcaaccgtgctggcatggggcctcatagattttgaggccggctacagcagtgccggggccttggatgatggacggaaggctgtcaaatgggccaccgactatttcataaaggcccacacaagtcaaaatgagttctatggtcaggtcggccagggtgacgccgatcacgctttctggggaagaccagaggatatgacgatggcgcgcccggcgtacaagatagacacctcaaggcctggctctgatctggcaggcgagacagcggctgctcttgccgctgcttcaatcgtgttccggaacgtcgatggcacttactcaaataacctgttaacacacgctcgccagctattcgacttcgcgaacaactaccggggaaagtatagtgactctattactgacgcaagaaatttctacgcaagcgcagactacagagacgagttggtttgggctgctgcgtggttatacagagcgaccaacgacaacacctacctcaacactgctgagtcactgtacgatgagtttgggctacagaactggggggggggcctgaactgggatagcaaggtgtctggcgtgcaggtgttgttggccaagcttaccaataagcaggcctacaaggacacggtgcagtcttacgtcaattacctaattaataaccagcagaagactcccaagggcctcctctacatcgacatgtggggcacccttcgccacgctgccaacgccgcattcatcatgctcgaagccgccgagctgggcttgtccgcctcctcttatagacagttcgcgcaaacgcaaatcgactacgccctgggcgatggtggccgctcctttgtgtgcgggttcgggagtaatcctcctacgagaccgcaccacagatgcctggccgagggctcgctcgtcttggacgcggctaccgggcagagggtccctatcgaaaaggtgcgtccggggatggaagttttctccttgggacctgattacagactgtatcgggtgcccgttttggaggtccttgagagcggggttagggaagttgtgcgcctcagaactcggtcagggagaacgctggtgttgacaccagatcacccgcttttgacccccgaaggttggaaacctctttgtgacctcccgcttggaactccaattgcagtccccgcagaactgcctgtggcgggccacttggccccacctgaagaacgtgttacgctcctggctcttctgttgggggatgggaacacaaagctgtcgggtcggagaggtacacgtcctaatgccttcttctacagcaaagaccccgaattgctcgcggcttatcgccggtgtgcagaagccttgggtgcaaaggtgaaagcatacgtccacccgactacgggggtggttacactcgcaaccctcgctccacgtcctggagctcaagatcctgtcaaacgcctcgttgtcgaggcgggaatggttgctaaagccgaagagaagagggtcccggaggaggtgtttcgttaccggcgtgaggcgttggcccttttcttgggccgtttgttctcgacagacggctctgttgaaaagaagaggatctcttattcaagtgccagtttgggactggcccaggatgtcgcacatctcttgctgcgccttggaattacatctcaactccgttcgagagggccacgggctcacgaggttcttatatcgggccgcgaggatattttgcggtttgctgaacttatcggaccctacctcttgggggccaagagggagagacttgcagcgctggaagctgaggcccgcaggcgtttgcctggacagggatggcacttgcggcttgttcttcctgccgtggcgtacagagtgagcgaggctaaaaggcgctcgggattttcgtggagtgaagccggtcggcgcgtcgcagttgcgggatcgtgtttgtcatctggactcaacctcaaattgcccagacgctacctttctcggcaccggttgtcgctgctcggtgaggcttttgccgaccctgggctggaagcgctcgcggaaggccaagtgctctgggaccctattgttgctgtcgaaccggccggtaaggcgagaacattcgacttgcgcgttccaccctttgcaaacttcgtgagcgaggacctggtggtgcataactcctcgtcgtgcccgccagctcccgctacttgcgactggaatacattcaactcacctgacccaaactaccacgtcctctctggggccctagtgggcggacctgatcagaatgacaactacgtcgatgaccgttcagactatgttcacaacgaagtcgccactgattacaacgcgggtttccagtccgcgttagctgctttggtggcccttggttac

SEQ ID NO: 1918 - DNA, 2568 bp, Artificial Sequence
  Synthetic Construct, O77044-Tth-S363-1 DNA
tccgcttacgactacaagcaggtgttgcgggactcgctactattctatgaggcccagagatccggccggctcccagccgaccagaaggtcacgtggaggaaggatagcgcgctgaatgaccagggtgaccagggacaagacttgaccggcggctactttgacgctggggacttcgtcaagttcgggttccccatggcttataccgcaaccgtgctggcatggggcctcatagattttgaggccggctacagcagtgccggggccttggatgatggacggaaggctgtcaaatgggccaccgactatttcataaaggcccacacaagtcaaaatgagttctatggtcaggtcggccagggtgacgccgatcacgctttctggggaagaccagaggatatgacgatggcgcgcccggcgtacaagatagacacctcaaggcctggctctgatctggcaggcgagacagcggctgctcttgccgctgcttcaatcgtgttccggaacgtcgatggcacttactcaaataacctgttaacacacgctcgccagctattcgacttcgcgaacaactaccggggaaagtatagtgactctattactgacgcaagaaatttctacgcaagcgcagactacagagacgagttggtttgggctgctgcgtggttatacagagcgaccaacgacaacacctacctcaacactgctgagtcactgtacgatgagtttgggctacagaactggggggggggcctgaactgggatagcaaggtgtctggcgtgcaggtgttgttggccaagcttaccaataagcaggcctacaaggacacggtgcagtcttacgtcaattacctaattaataaccagcagaagactcccaagggcctcctctacatcgacatgtggggcacccttcgccacgctgccaacgccgcattcatcatgctcgaagccgccgagctgggcttgtccgcctcctcttatagacagttcgcgcaaacgcaaatcgactacgccctgggcgatggtggccgctcctttgtgtgcgggttcgggagtaatcctcctacgagaccgcaccacagatcctgcctggccgagggctcgctcgtcttggacgcggctaccgggcagagggtccctatcgaaaaggtgcgtccggggatggaagttttctccttgggacctgattacagactgtatcgggtgcccgttttggaggtccttgagagcggggttagggaagttgtgcgcctcagaactcggtcagggagaacgctggtgttgacaccagatcacccgcttttgacccccgaaggttggaaacctctttgtgacctcccgcttggaactccaattgcagtccccgcagaactgcctgtggcgggccacttggccccacctgaagaacgtgttacgctcctggctcttctgttgggggatgggaacacaaagctgtcgggtcggagaggtacacgtcctaatgccttcttctacagcaaagaccccgaattgctcgcggcttatcgccggtgtgcagaagccttgggtgcaaaggtgaaagcatacgtccacccgactacgggggtggttacactcgcaaccctcgctccacgtcctggagctcaagatcctgtcaaacgcctcgttgtcgaggcgggaatggttgctaaagccgaagagaagagggtcccggaggaggtgtttcgttaccggcgtgaggcgttggcccttttcttgggccgtttgttctcgacagacggctctgttgaaaagaagaggatctcttattcaagtgccagtttgggactggcccaggatgtcgcacatctcttgctgcgccttggaattacatctcaactccgttcgagagggccacgggctcacgaggttcttatatcgggccgcgaggatattttgcggtttgctgaacttatcggaccctacctcttgggggccaagagggagagacttgcagcgctggaagctgaggcccgcaggcgtttgcctggacagggatggcacttgcggcttgttcttcctgccgtggcgtacagagtgagcgaggctaaaaggcgctcgggattttcgtggagtgaagccggtcggcgcgtcgcagttgcgggatcgtgtttgtcatctggactcaacctcaaattgcccagacgctacctttctcggcaccggttgtcgctgctcggtgaggcttttgccgaccctgggctggaagcgctcgcggaaggccaagtgctctgggaccctattgttgctgtcgaaccggccggtaaggcgagaacattcgacttgcgcgttccaccctttgcaaacttcgtgagcgaggacctggtggtgcataactcgtcgtgcccgccagctcccgctacttgcgactggaatacattcaactcacctgacccaaactaccacgtcctctctggggccctagtgggcggacctgatcagaatgacaactacgtcgatgaccgttcagactatgttcacaacgaagtcgccactgattacaacgcgggtttccagtccgcgttagctgctttggtggcccttggttac

SEQ ID NO: 1919 - DNA, 2568 bp, Artificial Sequence
  Synthetic Construct, O77044-Tth-S364-1 DNA
tccgcttacgactacaagcaggtgttgcgggactcgctactattctatgaggcccagagatccggccggctcccagccgaccagaaggtcacgtggaggaaggatagcgcgctgaatgaccagggtgaccagggacaagacttgaccggcggctactttgacgctggggacttcgtcaagttcgggttccccatggcttataccgcaaccgtgctggcatggggcctcatagattttgaggccggctacagcagtgccggggccttggatgatggacggaaggctgtcaaatgggccaccgactatttcataaaggcccacacaagtcaaaatgagttctatggtcaggtcggccagggtgacgccgatcacgctttctggggaagaccagaggatatgacgatggcgcgcccggcgtacaagatagacacctcaaggcctggctctgatctggcaggcgagacagcggctgctcttgccgctgcttcaatcgtgttccggaacgtcgatggcacttactcaaataacctgttaacacacgctcgccagctattcgacttcgcgaacaactaccggggaaagtatagtgactctattactgacgcaagaaatttctacgcaagcgcagactacagagacgagttggtttgggctgctgcgtggttatacagagcgaccaacgacaacacctacctcaacactgctgagtcactgtacgatgagtttgggctacagaactggggggggggcctgaactgggatagcaaggtgtctggcgtgcaggtgttgttggccaagcttaccaataagcaggcctacaaggacacggtgcagtcttacgtcaattacctaattaataaccagcagaagactcccaagggcctcctctacatcgacatgtggggcacccttcgccacgctgccaacgccgcattcatcatgctcgaagccgccgagctgggcttgtccgcctcctcttatagacagttcgcgcaaacgcaaatcgactacgccctgggcgatggtggccgctcctttgtgtgcgggttcgggagtaatcctcctacgagaccgcaccacagatcctcgtgcctggccgagggctcgctcgtcttggacgcggctaccgggcagagggtccctatcgaaaaggtgcgtccggggatggaagttttctccttgggacctgattacagactgtatcgggtgcccgttttggaggtccttgagagcggggttagggaagttgtgcgcctcagaactcggtcagggagaacgctggtgttgacaccagatcacccgcttttgacccccgaaggttggaaacctctttgtgacctcccgcttggaactccaattgcagtccccgcagaactgcctgtggcgggccacttggccccacctgaagaacgtgttacgctcctggctcttctgttgggggatgggaacacaaagctgtcgggtcggagaggtacacgtcctaatgccttcttctacagcaaagaccccgaattgctcgcggcttatcgccggtgtgcagaagccttgggtgcaaaggtgaaagcatacgtccacccgactacgggggtggttacactcgcaaccctcgctccacgtcctggagctcaagatcctgtcaaacgcctcgttgtcgaggcgggaatggttgctaaagccgaagagaagagggtcccggaggaggtgtttcgttaccggcgtgaggcgttggcccttttcttgggccgtttgttctcgacagacggctctgttgaaaagaagaggatctcttattcaagtgccagtttgggactggcccaggatgtcgcacatctcttgctgcgccttggaattacatctcaactccgttcgagagggccacgggctcacgaggttcttatatcgggccgcgaggatattttgcggtttgctgaacttatcggaccctacctcttgggggccaagagggagagacttgcagcgctggaagctgaggcccgcaggcgtttgcctggacagggatggcacttgcggcttgttcttcctgccgtggcgtacagagtgagcgaggctaaaaggcgctcgggattttcgtggagtgaagccggtcggcgcgtcgcagttgcgggatcgtgtttgtcatctggactcaacctcaaattgcccagacgctacctttctcggcaccggttgtcgctgctcggtgaggcttttgccgaccctgggctggaagcgctcgcggaaggccaagtgctctgggaccctattgttgctgtcgaaccggccggtaaggcgagaacattcgacttgcgcgttccaccctttgcaaacttcgtgagcgaggacctggtggtgcataactcgtgcccgccagctcccgctacttgcgactggaatacattcaactcacctgacccaaactaccacgtcctctctggggccctagtgggcggacctgatcagaatgacaactacgtcgatgaccgttcagactatgttcacaacgaagtcgccactgattacaacgcgggtttccagtccgcgttagctgctttggtggcccttggttac

SEQ ID NO: 1920 - DNA, 2568 bp, Artificial Sequence
  Synthetic Construct, O77044-Tth-T376-1 DNA
tccgcttacgactacaagcaggtgttgcgggactcgctactattctatgaggcccagagatccggccggctcccagccgaccagaaggtcacgtggaggaaggatagcgcgctgaatgaccagggtgaccagggacaagacttgaccggcggctactttgacgctggggacttcgtcaagttcgggttccccatggcttataccgcaaccgtgctggcatggggcctcatagattttgaggccggctacagcagtgccggggccttggatgatggacggaaggctgtcaaatgggccaccgactatttcataaaggcccacacaagtcaaaatgagttctatggtcaggtcggccagggtgacgccgatcacgctttctggggaagaccagaggatatgacgatggcgcgcccggcgtacaagatagacacctcaaggcctggctctgatctggcaggcgagacagcggctgctcttgccgctgcttcaatcgtgttccggaacgtcgatggcacttactcaaataacctgttaacacacgctcgccagctattcgacttcgcgaacaactaccggggaaagtatagtgactctattactgacgcaagaaatttctacgcaagcgcagactacagagacgagttggtttgggctgctgcgtggttatacagagcgaccaacgacaacacctacctcaacactgctgagtcactgtacgatgagtttgggctacagaactggggggggggcctgaactgggatagcaaggtgtctggcgtgcaggtgttgttggccaagcttaccaataagcaggcctacaaggacacggtgcagtcttacgtcaattacctaattaataaccagcagaagactcccaagggcctcctctacatcgacatgtggggcacccttcgccacgctgccaacgccgcattcatcatgctcgaagccgccgagctgggcttgtccgcctcctcttatagacagttcgcgcaaacgcaaatcgactacgccctgggcgatggtggccgctcctttgtgtgcgggttcgggagtaatcctcctacgagaccgcaccacagatcctcgtcgtgcccgccagctcccgctacttgcgactggaattgcctggccgagggctcgctcgtcttggacgcggctaccgggcagagggtccctatcgaaaaggtgcgtccggggatggaagttttctccttgggacctgattacagactgtatcgggtgcccgttttggaggtccttgagagcggggttagggaagttgtgcgcctcagaactcggtcagggagaacgctggtgttgacaccagatcacccgcttttgacccccgaaggttggaaacctctttgtgacctcccgcttggaactccaattgcagtccccgcagaactgcctgtggcgggccacttggccccacctgaagaacgtgttacgctcctggctcttctgttgggggatgggaacacaaagctgtcgggtcggagaggtacacgtcctaatgccttcttctacagcaaagaccccgaattgctcgcggcttatcgccggtgtgcagaagccttgggtgcaaaggtgaaagcatacgtccacccgactacgggggtggttacactcgcaaccctcgctccacgtcctggagctcaagatcctgtcaaacgcctcgttgtcgaggcgggaatggttgctaaagccgaagagaagagggtcccggaggaggtgtttcgttaccggcgtgaggcgttggcccttttcttgggccgtttgttctcgacagacggctctgttgaaaagaagaggatctcttattcaagtgccagtttgggactggcccaggatgtcgcacatctcttgctgcgccttggaattacatctcaactccgttcgagagggccacgggctcacgaggttcttatatcgggccgcgaggatattttgcggtttgctgaacttatcggaccctacctcttgggggccaagagggagagacttgcagcgctggaagctgaggcccgcaggcgtttgcctggacagggatggcacttgcggcttgttcttcctgccgtggcgtacagagtgagcgaggctaaaaggcgctcgggattttcgtggagtgaagccggtcggcgcgtcgcagttgcgggatcgtgtttgtcatctggactcaacctcaaattgcccagacgctacctttctcggcaccggttgtcgctgctcggtgaggcttttgccgaccctgggctggaagcgctcgcggaaggccaagtgctctgggaccctattgttgctgtcgaaccggccggtaaggcgagaacattcgacttgcgcgttccaccctttgcaaacttcgtgagcgaggacctggtggtgcataacacattcaactcacctgacccaaactaccacgtcctctctggggccctagtgggcggacctgatcagaatgacaactacgtcgatgaccgttcagactatgttcacaacgaagtcgccactgattacaacgcgggtttccagtccgcgttagctgctttggtggcccttggttac

SEQ ID NO: 1921 - DNA, 2568 bp, Artificial Sequence
  Synthetic Construct, O77044-Tth-S379-1 DNA
tccgcttacgactacaagcaggtgttgcgggactcgctactattctatgaggcccagagatccggccggctcccagccgaccagaaggtcacgtggaggaaggatagcgcgctgaatgaccagggtgaccagggacaagacttgaccggcggctactttgacgctggggacttcgtcaagttcgggttccccatggcttataccgcaaccgtgctggcatggggcctcatagattttgaggccggctacagcagtgccggggccttggatgatggacggaaggctgtcaaatgggccaccgactatttcataaaggcccacacaagtcaaaatgagttctatggtcaggtcggccagggtgacgccgatcacgctttctggggaagaccagaggatatgacgatggcgcgcccggcgtacaagatagacacctcaaggcctggctctgatctggcaggcgagacagcggctgctcttgccgctgcttcaatcgtgttccggaacgtcgatggcacttactcaaataacctgttaacacacgctcgccagctattcgacttcgcgaacaactaccggggaaagtatagtgactctattactgacgcaagaaatttctacgcaagcgcagactacagagacgagttggtttgggctgctgcgtggttatacagagcgaccaacgacaacacctacctcaacactgctgagtcactgtacgatgagtttgggctacagaactggggggggggcctgaactgggatagcaaggtgtctggcgtgcaggtgttgttggccaagcttaccaataagcaggcctacaaggacacggtgcagtcttacgtcaattacctaattaataaccagcagaagactcccaagggcctcctctacatcgacatgtggggcacccttcgccacgctgccaacgccgcattcatcatgctcgaagccgccgagctgggcttgtccgcctcctcttatagacagttcgcgcaaacgcaaatcgactacgccctgggcgatggtggccgctcctttgtgtgcgggttcgggagtaatcctcctacgagaccgcaccacagatcctcgtcgtgcccgccagctcccgctacttgcgactggaatacattcaactgcctggccgagggctcgctcgtcttggacgcggctaccgggcagagggtccctatcgaaaaggtgcgtccggggatggaagttttctccttgggacctgattacagactgtatcgggtgcccgttttggaggtccttgagagcggggttagggaagttgtgcgcctcagaactcggtcagggagaacgctggtgttgacaccagatcacccgcttttgacccccgaaggttggaaacctctttgtgacctcccgcttggaactccaattgcagtccccgcagaactgcctgtggcgggccacttggccccacctgaagaacgtgttacgctcctggctcttctgttgggggatgggaacacaaagctgtcgggtcggagaggtacacgtcctaatgccttcttctacagcaaagaccccgaattgctcgcggcttatcgccggtgtgcagaagccttgggtgcaaaggtgaaagcatacgtccacccgactacgggggtggttacactcgcaaccctcgctccacgtcctggagctcaagatcctgtcaaacgcctcgttgtcgaggcgggaatggttgctaaagccgaagagaagagggtcccggaggaggtgtttcgttaccggcgtgaggcgttggcccttttcttgggccgtttgttctcgacagacggctctgttgaaaagaagaggatctcttattcaagtgccagtttgggactggcccaggatgtcgcacatctcttgctgcgccttggaattacatctcaactccgttcgagagggccacgggctcacgaggttcttatatcgggccgcgaggatattttgcggtttgctgaacttatcggaccctacctcttgggggccaagagggagagacttgcagcgctggaagctgaggcccgcaggcgtttgcctggacagggatggcacttgcggcttgttcttcctgccgtggcgtacagagtgagcgaggctaaaaggcgctcgggattttcgtggagtgaagccggtcggcgcgtcgcagttgcgggatcgtgtttgtcatctggactcaacctcaaattgcccagacgctacctttctcggcaccggttgtcgctgctcggtgaggcttttgccgaccctgggctggaagcgctcgcggaaggccaagtgctctgggaccctattgttgctgtcgaaccggccggtaaggcgagaacattcgacttgcgcgttccaccctttgcaaacttcgtgagcgaggacctggtggtgcataactcacctgacccaaactaccacgtcctctctggggccctagtgggcggacctgatcagaatgacaactacgtcgatgaccgttcagactatgttcacaacgaagtcgccactgattacaacgcgggtttccagtccgcgttagctgctttggtggcccttggttac

SEQ ID NO: 1922 - DNA, 2568 bp, Artificial Sequence
  Synthetic Construct, O77044-Tth-S406-1 DNA
tccgcttacgactacaagcaggtgttgcgggactcgctactattctatgaggcccagagatccggccggctcccagccgaccagaaggtcacgtggaggaaggatagcgcgctgaatgaccagggtgaccagggacaagacttgaccggcggctactttgacgctggggacttcgtcaagttcgggttccccatggcttataccgcaaccgtgctggcatggggcctcatagattttgaggccggctacagcagtgccggggccttggatgatggacggaaggctgtcaaatgggccaccgactatttcataaaggcccacacaagtcaaaatgagttctatggtcaggtcggccagggtgacgccgatcacgctttctggggaagaccagaggatatgacgatggcgcgcccggcgtacaagatagacacctcaaggcctggctctgatctggcaggcgagacagcggctgctcttgccgctgcttcaatcgtgttccggaacgtcgatggcacttactcaaataacctgttaacacacgctcgccagctattcgacttcgcgaacaactaccggggaaagtatagtgactctattactgacgcaagaaatttctacgcaagcgcagactacagagacgagttggtttgggctgctgcgtggttatacagagcgaccaacgacaacacctacctcaacactgctgagtcactgtacgatgagtttgggctacagaactggggggggggcctgaactgggatagcaaggtgtctggcgtgcaggtgttgttggccaagcttaccaataagcaggcctacaaggacacggtgcagtcttacgtcaattacctaattaataaccagcagaagactcccaagggcctcctctacatcgacatgtggggcacccttcgccacgctgccaacgccgcattcatcatgctcgaagccgccgagctgggcttgtccgcctcctcttatagacagttcgcgcaaacgcaaatcgactacgccctgggcgatggtggccgctcctttgtgtgcgggttcgggagtaatcctcctacgagaccgcaccacagatcctcgtcgtgcccgccagctcccgctacttgcgactggaatacattcaactcacctgacccaaactaccacgtcctctctggggccctagtgggcggacctgatcagaatgacaactacgtcgatgaccgttgcctggccgagggctcgctcgtcttggacgcggctaccgggcagagggtccctatcgaaaaggtgcgtccggggatggaagttttctccttgggacctgattacagactgtatcgggtgcccgttttggaggtccttgagagcggggttagggaagttgtgcgcctcagaactcggtcagggagaacgctggtgttgacaccagatcacccgcttttgacccccgaaggttggaaacctctttgtgacctcccgcttggaactccaattgcagtccccgcagaactgcctgtggcgggccacttggccccacctgaagaacgtgttacgctcctggctcttctgttgggggatgggaacacaaagctgtcgggtcggagaggtacacgtcctaatgccttcttctacagcaaagaccccgaattgctcgcggcttatcgccggtgtgcagaagccttgggtgcaaaggtgaaagcatacgtccacccgactacgggggtggttacactcgcaaccctcgctccacgtcctggagctcaagatcctgtcaaacgcctcgttgtcgaggcgggaatggttgctaaagccgaagagaagagggtcccggaggaggtgtttcgttaccggcgtgaggcgttggcccttttcttgggccgtttgttctcgacagacggctctgttgaaaagaagaggatctcttattcaagtgccagtttgggactggcccaggatgtcgcacatctcttgctgcgccttggaattacatctcaactccgttcgagagggccacgggctcacgaggttcttatatcgggccgcgaggatattttgcggtttgctgaacttatcggaccctacctcttgggggccaagagggagagacttgcagcgctggaagctgaggcccgcaggcgtttgcctggacagggatggcacttgcggcttgttcttcctgccgtggcgtacagagtgagcgaggctaaaaggcgctcgggattttcgtggagtgaagccggtcggcgcgtcgcagttgcgggatcgtgtttgtcatctggactcaacctcaaattgcccagacgctacctttctcggcaccggttgtcgctgctcggtgaggcttttgccgaccctgggctggaagcgctcgcggaaggccaagtgctctgggaccctattgttgctgtcgaaccggccggtaaggcgagaacattcgacttgcgcgttccaccctttgcaaacttcgtgagcgaggacctggtggtgcataactcagactatgttcacaacgaagtcgccactgattacaacgcgggtttccagtccgcgttagctgctttggtggcccttggttac

SEQ ID NO: 1923 - DNA, 2568 bp, Artificial Sequence
  Synthetic Construct, O77044-Tth-T415-1 DNA
tccgcttacgactacaagcaggtgttgcgggactcgctactattctatgaggcccagagatccggccggctcccagccgaccagaaggtcacgtggaggaaggatagcgcgctgaatgaccagggtgaccagggacaagacttgaccggcggctactttgacgctggggacttcgtcaagttcgggttccccatggcttataccgcaaccgtgctggcatggggcctcatagattttgaggccggctacagcagtgccggggccttggatgatggacggaaggctgtcaaatgggccaccgactatttcataaaggcccacacaagtcaaaatgagttctatggtcaggtcggccagggtgacgccgatcacgctttctggggaagaccagaggatatgacgatggcgcgcccggcgtacaagatagacacctcaaggcctggctctgatctggcaggcgagacagcggctgctcttgccgctgcttcaatcgtgttccggaacgtcgatggcacttactcaaataacctgttaacacacgctcgccagctattcgacttcgcgaacaactaccggggaaagtatagtgactctattactgacgcaagaaatttctacgcaagcgcagactacagagacgagttggtttgggctgctgcgtggttatacagagcgaccaacgacaacacctacctcaacactgctgagtcactgtacgatgagtttgggctacagaactggggggggggcctgaactgggatagcaaggtgtctggcgtgcaggtgttgttggccaagcttaccaataagcaggcctacaaggacacggtgcagtcttacgtcaattacctaattaataaccagcagaagactcccaagggcctcctctacatcgacatgtggggcacccttcgccacgctgccaacgccgcattcatcatgctcgaagccgccgagctgggcttgtccgcctcctcttatagacagttcgcgcaaacgcaaatcgactacgccctgggcgatggtggccgctcctttgtgtgcgggttcgggagtaatcctcctacgagaccgcaccacagatcctcgtcgtgcccgccagctcccgctacttgcgactggaatacattcaactcacctgacccaaactaccacgtcctctctggggccctagtgggcggacctgatcagaatgacaactacgtcgatgaccgttcagactatgttcacaacgaagtcgcctgcctggccgagggctcgctcgtcttggacgcggctaccgggcagagggtccctatcgaaaaggtgcgtccggggatggaagttttctccttgggacctgattacagactgtatcgggtgcccgttttggaggtccttgagagcggggttagggaagttgtgcgcctcagaactcggtcagggagaacgctggtgttgacaccagatcacccgcttttgacccccgaaggttggaaacctctttgtgacctcccgcttggaactccaattgcagtccccgcagaactgcctgtggcgggccacttggccccacctgaagaacgtgttacgctcctggctcttctgttgggggatgggaacacaaagctgtcgggtcggagaggtacacgtcctaatgccttcttctacagcaaagaccccgaattgctcgcggcttatcgccggtgtgcagaagccttgggtgcaaaggtgaaagcatacgtccacccgactacgggggtggttacactcgcaaccctcgctccacgtcctggagctcaagatcctgtcaaacgcctcgttgtcgaggcgggaatggttgctaaagccgaagagaagagggtcccggaggaggtgtttcgttaccggcgtgaggcgttggcccttttcttgggccgtttgttctcgacagacggctctgttgaaaagaagaggatctcttattcaagtgccagtttgggactggcccaggatgtcgcacatctcttgctgcgccttggaattacatctcaactccgttcgagagggccacgggctcacgaggttcttatatcgggccgcgaggatattttgcggtttgctgaacttatcggaccctacctcttgggggccaagagggagagacttgcagcgctggaagctgaggcccgcaggcgtttgcctggacagggatggcacttgcggcttgttcttcctgccgtggcgtacagagtgagcgaggctaaaaggcgctcgggattttcgtggagtgaagccggtcggcgcgtcgcagttgcgggatcgtgtttgtcatctggactcaacctcaaattgcccagacgctacctttctcggcaccggttgtcgctgctcggtgaggcttttgccgaccctgggctggaagcgctcgcggaaggccaagtgctctgggaccctattgttgctgtcgaaccggccggtaaggcgagaacattcgacttgcgcgttccaccctttgcaaacttcgtgagcgaggacctggtggtgcataacactgattacaacgcgggtttccagtccgcgttagctgctttggtggcccttggttac

SEQ ID NO: 1924 - DNA, 585 bp, Artificial Sequence
  Synthetic Construct, EU591743
atggcccagacctgcctcacgtcgccccaaaccggctttcacaatggcttcttctattccttctggaaggacagtccgggcacggtgaatttttgcctgttggagggcggccgttacacatcgaactggagcggcatcaacaactgggtgggcggcaagggatggcagaccggttcacgccggaacatcacgtactcgggcagcttcaatacaccgggcaacggctacctggcgctttacggatggaccaccaatccactcgtcgagtactacgtcgtcgatagctgggggagctggcgtccgccgggttcggacggaacgttcctggggacggtcaacagcgatggcggaacgtatgacatctatcgcgcgcagcgggtcaacgcgccgtccatcatcggcaacgccacgttctatcaatactggagcgttcggcagtcgaagcgggtaggtgggacgatcaccaccggaaaccacttcgacgcgtgggccagcgtgggcctgaacctgggcactcacaactaccagatcatggcgaccgagggctaccaaagcagcggcagctccgacatcacggtgagttaa

SEQ ID NO: 1925 - protein, 512 aa, Clostridium stercorarium
  P33558
MKRKVKKMAAMATSIIMAIMIILHSIPVLAGRIIYDNETGTHGGYDYELWKDYGNTIMELNDGGTFSCQWSNIGNALFRKGRKFNSDKTYQELGDIVVEYGCDYNPNGNSYLCVYGWTRNPLVEYYIVESWGSWRPPGATPKGTITQWMAGTYEIYETTRVNQPSIDGTATFQQYWSVRTSKRTSGTISVTEHFKQWERMGMRMGKMYEVALTVEGYQSSGYANVYKNEIRIGANPTPAPSQSPIRRDAFSIIEAEEYNSTNSSTLQVIGTPNNGRGIGYIENGNTVTYSNIDFGSGATGFSATVATEVNTSIQIRSDSPTGTLLGTLYVSSTGSWNTYQTVSTNISKITGVHDIVLVFSGPVNVDNFIFSRSSPVPAPGDNTRDAYSIIQAEDYDSSYGPNLQIFSLPGGGSAIGYIENGYSTTYKNIDFGDGATSVTARVATQNATTIQVRLGSPSGTLLGTIYVGSTGSFDTYRDVSATISNTAGVKDIVLVFSGPVNVDWFVFSKSGT

SEQ ID NO: 1926 - protein, 413 aa, Erwinia chrysanthemi
  Q46961
MNGNVSLWVRHCLHAALFVSATAGSFSVYADTVKIDANVNYQIIQGFGGMSGVGWINDLTTEQINTAYGSGVGQIGLSIMRVRIDPDSSKWNIQLPSARQAVSLGAKIMATPWSPPAYMKSNNSLINGGRLLPANYSAYTSHLLDFSKYMQTNGAPLYAISIQNEPDWKPDYESCEWSGDEFKSYLKSQGSKFGSLKVIVAESLGFNPALTDPVLKDSDASKYVSIIGGHLYGTTPKPYPLAQNAGKQLWMTEHYVDSKQSANNWTSAIEVGTELNASMVSNYSAYVWWYIRRSYGLLTEDGKVSKRGYVMSQYARFVRPGALRIQATENPQSNVHLTAYKNTDGKMVIVAVNTNDSDQMLSLNISNANVTKFEKYSTSASLNVEYGGSSQVDSSGKATVWLNPLSVTTFVSK

SEQ ID NO: 1927 - protein, 346 aa, Thermotoga sp.
  Q60044
MKGLPALLLLLIGCVSSFGSQDVPLRVLAEKLNIHIGFAAGNNFWSLPDAEKYMEVAKREFNILTPENQMKWDTIHPERNRYNFEPAEKHVEFALKNDMIVHGHTLVWHNQLPGWLTGQEWSKEELLNILEDHVKTVVSHFRGRVKIWDVVNEAVSDSGTYRESIWYKTIGPEYIEKAFIWAREADPDAVLIYNDYSIEEINAKSNFVYNMIKNLKEKGVPIDGIGFQMHIDYRGLNYESFKKNLERFAELGLQIYITEMDVRIPLGGSEEYYLKKQAEVYRRIFEICLDNPAVRAIQFWGFTDKYSWVPGFFKGYGKALIFDENYNPKPCYFAIRELMEEKLKER

SEQ ID NO: 1928 - protein, 423 aa, Artificial Sequence
  Synthetic Construct, Tth-P71L
CLAEGSLVLDAATGQRVPIEKVRPGMEVFSLGPDYRLYRVPVLEVLESGVREVVRLRTRSGRTLVLTPDHLLLTPEGWKPLCDLPLGTPIAVPAELPVAGHLAPPEERVTLLALLLGDGNTKLSGRRGTRPNAFFYSKDPELLAAYRRCAEALGAKVKAYVHPTTGVVTLATLAPRPGAQDPVKRLVVEAGMVAKAEEKRVPEEVFRYRREALALFLGRLFSTDGSVEKKRISYSSASLGLAQDVAHLLLRLGITSQLRSRGPRAHEVLISGREDILRFAELIGPYLLGAKRERLAALEAEARRRLPGQGWHLRLVLPAVAYRVSEAKRRSGFSWSEAGRRVAVAGSCLSSGLNLKLPRRYLSRHRLSLLGEAFADPGLEALAEGQVLWDPIVAVEPAGKARTFDLRVPPFANFVSEDLVVHN

SEQ ID NO: 1929 - protein, 423 aa, Artificial Sequence
  Synthetic Construct, Tth-P71T
CLAEGSLVLDAATGQRVPIEKVRPGMEVFSLGPDYRLYRVPVLEVLESGVREVVRLRTRSGRTLVLTPDHTLLTPEGWKPLCDLPLGTPIAVPAELPVAGHLAPPEERVTLLALLLGDGNTKLSGRRGTRPNAFFYSKDPELLAAYRRCAEALGAKVKAYVHPTTGVVTLATLAPRPGAQDPVKRLVVEAGMVAKAEEKRVPEEVFRYRREALALFLGRLFSTDGSVEKKRISYSSASLGLAQDVAHLLLRLGITSQLRSRGPRAHEVLISGREDILRFAELIGPYLLGAKRERLAALEAEARRRLPGQGWHLRLVLPAVAYRVSEAKRRSGFSWSEAGRRVAVAGSCLSSGLNLKLPRRYLSRHRLSLLGEAFADPGLEALAEGQVLWDPIVAVEPAGKARTFDLRVPPFANFVSEDLVVHN

SEQ ID NO: 1930 - protein, 423 aa, Artificial Sequence
  Synthetic Construct, Tth-P71Q
CLAEGSLVLDAATGQRVPIEKVRPGMEVFSLGPDYRLYRVPVLEVLESGVREVVRLRTRSGRTLVLTPDHQLLTPEGWKPLCDLPLGTPIAVPAELPVAGHLAPPEERVTLLALLLGDGNTKLSGRRGTRPNAFFYSKDPELLAAYRRCAEALGAKVKAYVHPTTGVVTLATLAPRPGAQDPVKRLVVEAGMVAKAEEKRVPEEVFRYRREALALFLGRLFSTDGSVEKKRISYSSASLGLAQDVAHLLLRLGITSQLRSRGPRAHEVLISGREDILRFAELIGPYLLGAKRERLAALEAEARRRLPGQGWHLRLVLPAVAYRVSEAKRRSGFSWSEAGRRVAVAGSCLSSGLNLKLPRRYLSRHRLSLLGEAFADPGLEALAEGQVLWDPIVAVEPAGKARTFDLRVPPFANFVSEDLVVHN

SEQ ID NO: 1931 - protein, 784 aa, Artificial Sequence; identical to SEQ ID NO: 1630
  Synthetic Construct, P77853_P136ins-Tth-T134

SEQ ID NO: 1932 - protein, 784 aa, Artificial Sequence; identical to SEQ ID NO: 1634
  Synthetic Construct, P77853_S135V_P136ins-Tth-T134

SEQ ID NO: 1933 - DNA, 1582 bp, Artificial Sequence
  Synthetic Construct, P54583_opt
atggctggaggaggatactggcacacttccggcagggagatcctcgacgcaaataacgttccagtcagaatcgccgggattaattggtttggcttcgaaacgtgtaactacgtggttcacggcctgtggtctcgggattacagatcaatgctcgaccagatcaaatccttggggtataatacaattaggctgccctacagcgatgacattcttaagcctggaaccatgccgaactcgattaatttctaccaaatgaaccaggatctgcagggattgacttctctgcaggttatggacaagatcgtggcgtacgccggccaaatcgggctcagaattattttggatcggcacaggccagactgctcaggtcagtcggccctgtggtacacaagctccgtgtcagaggcaacatggatttcagatcttcaagccctcgcacaacgctataaaggcaaccccacggttgtgggattcgaccttcacaacgaacctcacgatccggcctgttggggctgcggggacccttcgatcgactggagactggcagcggagagggctggtaacgccgttctcagcgtcaatcccaacttgctgatctttgtggagggagttcagtcctacaacggcgattcttactggtggggcggaaatctccaaggcgcagggcagtatcctgtcgtgcttaacgttccgaatcgcctggtctactcagcacacgactacgcgactagcgtgtacccacagacgtggttctccgatcccacatttcctaacaatatgccgggaatctggaacaagaattggggttacttgtttaaccaaaacattgctccagtttggttgggtgaatttggcaccactcttcagtcgacgacagaccaaacctggctgaaaaccctcgtccagtatttgcggccaactgctcagtacggagcagattcttttcaatggacgttctggtcttggaatcctgactccggggatacaggcggtatcctgaaagacgattggcagaccgtggacactgttaaggacgggtacttggcgccgattaaaagctcgatctttgacccagtcggcgctagcgcttccccatcttcacaaccttcgccgagcgtcagccccagcccaagcccaagcccgtctgccagcagaacccccactcccacacctacccccacggcctcaccaactccgacgctcactcctacggcgacgccaacaccaactgcttcacccactcctagccccaccgcagcgagcggggctaggtgcaccgcttcttaccaggtcaactctgactggggtaatggcttcaccgtgactgtggcggtcactaactcaggaagcgtcgcgacgaaaacctggactgtgtcctggacgttcgggggcaaccaaacaatcaccaacagctggaacgctgcagttacgcagaatgggcaaagcgtcacggcgcgcaatatgagctacaacaacgtgattcaaccaggccagaataccacattcggttttcaagcaagctataccgggtcaaacgctgccccaactgtcgcttgtgctgcctcagcggccgcatatatat

SEQ ID NO: 1934 - DNA, 25 bp, Artificial Sequence
  Synthetic Construct, P54583-Tth Primer A
gctgttttgccattttccaacagca

SEQ ID NO: 1935 - DNA, 40 bp, Artificial Sequence
  Synthetic Construct, P54583-Tth Primer C
tgcctggccgagggctcgctcgtcttggacgcggctaccg

SEQ ID NO: 1936 - DNA, 40 bp, Artificial Sequence
  Synthetic Construct, P54583-Tth Primer D
gttatgcaccaccaggtcctcgctcacgaagtttgcaaag

SEQ ID NO: 1937 - DNA, 23 bp, Artificial Sequence
  Synthetic Construct, P54583-Tth Primer F
cccaaaaccttctcaagcaaggt

SEQ ID NO: 1938 - DNA, 40 bp, Artificial Sequence
  Synthetic Construct, P54583-Tth-S10 Primer B
agcgagccctcggccaggcaagtgtgccagtatcctcctc

SEQ ID NO: 1939 - DNA, 40 bp, Artificial Sequence
  Synthetic Construct, P54583-Tth-S56 Primer B
agcgagccctcggccaggcatttgatctggtcgagcattg

SEQ ID NO: 1940 - DNA, 39 bp, Artificial Sequence
  Synthetic Construct, P54583-Tth-C75 Primer B
tcgggtaccctcggcaaggcacgtttcgaagccaaacca

SEQ ID NO: 1941 - DNA, 40 bp, Artificial Sequence
  Synthetic Construct, P54583-Tth-T61-1 Primer B
agcgagccctcggccaggcaattataccccaaggatttga

SEQ ID NO: 1942 - DNA, 40 bp, Artificial Sequence
  Synthetic Construct, P54583-Tth-T67 Primer B
agcgagccctcggccaggcagtagggcagcctaattgtat

SEQ ID NO: 1943 - DNA, 40 bp, Artificial Sequence
  Synthetic Construct, P54583-Tth-T93 Primer B
agcgagccctcggccaggcacaatccctgcagatcctggt

SEQ ID NO: 1944 - DNA, 40 bp, Artificial Sequence
  Synthetic Construct, P54583-Tth-S94 Primer B
agcgagccctcggccaggcaagtcaatccctgcagatcct

SEQ ID NO: 1945 - DNA, 40 bp, Artificial Sequence
  Synthetic Construct, P54583-Tth-S134 Primer B
agcgagccctcggccaggcacacggagcttgtgtaccaca

SEQ ID NO: 1946 - DNA, 40 bp, Artificial Sequence
  Synthetic Construct, P54583-Tth-T154 Primer B
agcgagccctcggccaggcaggggttgcctttatagcgtt

SEQ ID NO: 1947 - DNA, 40 bp, Artificial Sequence
  Synthetic Construct, P54583-Tth-S192 Primer B
agcgagccctcggccaggcagagaacggcgttaccagccc

SEQ ID NO: 1948 - DNA, 40 bp, Artificial Sequence
  Synthetic Construct, P54583-Tth-S237 Primer B
agcgagccctcggccaggcagtagaccaggcgattcggaa

SEQ ID NO: 1949 - DNA, 40 bp, Artificial Sequence
  Synthetic Construct, P54583-Tth-S290 Primer B
agcgagccctcggccaggcactgaagagtggtgccaaatt

SEQ ID NO: 1950 - DNA, 40 bp, Artificial Sequence
  Synthetic Construct, P54583-Tth-S314 Primer B
agcgagccctcggccaggcaatctgctccgtactgagcag

SEQ ID NO: 1951 - DNA, 40 bp, Artificial Sequence
  Synthetic Construct, P54583-Tth-S321 Primer B
agcgagccctcggccaggcaccagaacgtccattgaaaag

SEQ ID NO: 1952 - DNA, 40 bp, Artificial Sequence
  Synthetic Construct, P54583-Tth-S353 Primer B
agcgagccctcggccaggcatttaatcggcgccaagtacc

SEQ ID NO: 1953 - DNA, 40 bp, Artificial Sequence
  Synthetic Construct, P54583-Tth-S10 Primer E
aggacctggtggtgcataactccggcagggagatcctcga

SEQ ID NO: 1954 - DNA, 40 bp, Artificial Sequence
  Synthetic Construct, P54583-Tth-S56 Primer E
aggacctggtggtgcataactccttggggtataatacaat

SEQ ID NO: 1955 - DNA, 42 bp, Artificial Sequence
  Synthetic Construct, P54583-Tth-C75 Primer E
aggggttgtcgtgcacaactgtaactacgtggttcacggcct

SEQ ID NO: 1956 - DNA, 40 bp, Artificial Sequence
  Synthetic Construct, P54583-Tth-T61 Primer E
aggacctggtggtgcataacacaattaggctgccctacag

SEQ ID NO: 1957 - DNA, 40 bp, Artificial Sequence
  Synthetic Construct, P54583-Tth-S67 Primer E
aggacctggtggtgcataacagcgatgacattcttaagcc

SEQ ID NO: 1958 - DNA, 40 bp, Artificial Sequence
  Synthetic Construct, P54583-Tth-T93 Primer E
aggacctggtggtgcataacacttctctgcaggttatgga

SEQ ID NO: 1959 - DNA, 40 bp, Artificial Sequence
  Synthetic Construct, P54583-Tth-S94 Primer E
aggacctggtggtgcataactctctgcaggttatggacaa

SEQ ID NO: 1960 - DNA, 40 bp, Artificial Sequence
  Synthetic Construct, P54583-Tth-S134 Primer E
aggacctggtggtgcataactcagaggcaacatggatttc

SEQ ID NO: 1961 - DNA, 40 bp, Artificial Sequence
  Synthetic Construct, P54583-Tth-T154 Primer E
aggacctggtggtgcataacacggttgtgggattcgacct

SEQ ID NO: 1962 - DNA, 40 bp, Artificial Sequence
  Synthetic Construct, P54583-Tth-S192 Primer E
aggacctggtggtgcataacagcgtcaatcccaacttgct

SEQ ID NO: 1963 - DNA, 40 bp, Artificial Sequence
  Synthetic Construct, P54583-Tth-S237 Primer E
aggacctggtggtgcataactcagcacacgactacgcgac

SEQ ID NO: 1964 - DNA, 40 bp, Artificial Sequence
  Synthetic Construct, P54583-Tth-S290 Primer E
aggacctggtggtgcataactcgacgacagaccaaacctg

SEQ ID NO: 1965 - DNA, 40 bp, Artificial Sequence
  Synthetic Construct, P54583-Tth-S314 Primer E
aggacctggtggtgcataactcttttcaatggacgttctg

SEQ ID NO: 1966 - DNA, 40 bp, Artificial Sequence
  Synthetic Construct, P54583-Tth-S321 Primer E
aggacctggtggtgcataactcttggaatcctgactccgg

SEQ ID NO: 1967 - DNA, 40 bp, Artificial Sequence
  Synthetic Construct, P54583-Tth-S353 Primer E
aggacctggtggtgcataacagctcgatctttgacccagt

SEQ ID NO: 1968 - DNA, 44 bp, Artificial Sequence
  Synthetic Construct, P54583-Tth-C75Tth Primer C alternative
tgccttgccgagggtacccgagtcttggacgcggctaccgggca

SEQ ID NO: 1969 - DNA, 43 bp, Artificial Sequence
  Synthetic Construct, P54583-Tth-C75Tth Primer D alternative
gttgtgcacgacaaccccttcgctcacgaagtttgcaaagggt

SEQ ID NO: 1970 - DNA, 25 bp, Artificial Sequence
  Synthetic Construct, P54583-Psp-pol Primer A
gctgttttgccattttccaacagca

SEQ ID NO: 1971 - DNA, 23 bp, Artificial Sequence
  Synthetic Construct, P54583-Psp-pol Primer C
agcattttaccggaagaatgggt

SEQ ID NO: 1972 - DNA, 22 bp, Artificial Sequence
  Synthetic Construct, P54583-Psp-pol Primer D
attatgtgcatagaggaatcca

SEQ ID NO: 1973 - DNA, 23 bp, Artificial Sequence
  Synthetic Construct, P54583-Psp-pol Primer F
cccaaaaccttctcaagcaaggt

SEQ ID NO: 1974 - DNA, 41 bp, Artificial Sequence
  Synthetic Construct, P54583-Psp-pol-C75 Primer B
acccattcttccggtaaaatgctcgtttcgaagccaaacca

SEQ ID NO: 1975 - DNA, 44 bp, Artificial Sequence
  Synthetic Construct, P54583-Psp-pol-S56 Primer B
acccattcttccggtaaaatgcttttgatctggtcgagcattga

SEQ ID NO: 1976 - DNA, 43 bp, Artificial Sequence
  Synthetic Construct, P54583-Psp-pol-S94 Primer B
acccattcttccggtaaaatgctagtcaatccctgcagatcct

SEQ ID NO: 1977 - DNA, 42 bp, Artificial Sequence
  Synthetic Construct, P54583-Psp-pol-S237 Primer B
acccattcttccggtaaaatgctgtagaccaggcgattcgga

SEQ ID NO: 1978 - DNA, 45 bp, Artificial Sequence
  Synthetic Construct, P54583-Psp-pol-S290 Primer B
acccattcttccggtaaaatgctctgaagagtggtgccaaattca

SEQ ID NO: 1979 - DNA, 46 bp, Artificial Sequence
  Synthetic Construct, P54583-Psp-pol-S353 Primer B
acccattcttccggtaaaatgcttttaatcggcgccaagtacccgt

SEQ ID NO: 1980 - DNA, 44 bp, Artificial Sequence
  Synthetic Construct, P54583-Psp-pol-C465 Primer B
acccattcttccggtaaaatgctcctagccccgctcgctgcggt

SEQ ID NO: 1981 - DNA, 45 bp, Artificial Sequence
  Synthetic Construct, P54583-Psp-pol-C75 Primer E
tggattcctctatgcacataattgtaactacgtggttcacggcct

SEQ ID NO: 1982 - DNA, 48 bp, Artificial Sequence
  Synthetic Construct, P54583-Psp-pol-S56 Primer E
tggattcctctatgcacataattccttggggtataatacaattaggct

SEQ ID NO: 1983 - DNA, 48 bp, Artificial Sequence
  Synthetic Construct, P54583-Psp-pol-S94 Primer E
tggattcctctatgcacataattctctgcaggttatggacaagatcgt

SEQ ID NO: 1984 - DNA, 41 bp, Artificial Sequence
  Synthetic Construct, P54583-Psp-pol-S237 Primer E
tggattcctctatgcacataattcagcacacgactacgcga

SEQ ID NO: 1985 - DNA, 41 bp, Artificial Sequence
  Synthetic Construct, P54583-Psp-pol-S290 Primer E
tggattcctctatgcacataattcgacgacagaccaaacct

SEQ ID NO: 1986 - DNA, 42 bp, Artificial Sequence
  Synthetic Construct, P54583-Psp-pol-S353 Primer E
tggattcctctatgcacataatagctcgatctttgacccagt

SEQ ID NO: 1987 - DNA, 42 bp, Artificial Sequence
  Synthetic Construct, P54583-Psp-pol-C465 Primer E
tggattcctctatgcacataattgcaccgcttcttaccaggt

SEQ ID NO: 1988 - DNA, 25 bp, Artificial Sequence
  Synthetic Construct, P54583-RecA Primer A
gctgttttgccattttccaacagca

SEQ ID NO: 1989 - DNA, 29 bp, Artificial Sequence
  Synthetic Construct, P54583-RecA Primer C
tgccttgccgagggtacccgaatcttcga

SEQ ID NO: 1990 - DNA, 26 bp, Artificial Sequence
  Synthetic Construct, P54583-RecA Primer D
gttgtgcacgacaaccccttcggcga

SEQ ID NO: 1991 - DNA, 23 bp, Artificial Sequence
  Synthetic Construct, P54583-RecA Primer F
cccaaaaccttctcaagcaaggt

SEQ ID NO: 1992 - DNA, 39 bp, Artificial Sequence; identical to SEQ ID NO: 1940
  Synthetic Construct, P54583-RecA-C75 Primer B

SEQ ID NO: 1993 - DNA, 42 bp, Artificial Sequence
  Synthetic Construct, P54583-RecA-S56 Primer B
tcgggtaccctcggcaaggcatttcatctggtcgagcattga

SEQ ID NO: 1994 - DNA, 41 bp, Artificial Sequence
  Synthetic Construct, P54583-RecA-S94 Primer B
tcgggtaccctcggcaaggcaagtcaatccctgcagatcct

SEQ ID NO: 1995 - DNA, 40 bp, Artificial Sequence
  Synthetic Construct, P54583-RecA-S237 Primer B
tcgggtaccctcggcaaggcagtagaccaggcgattcgga

SEQ ID NO: 1996 - DNA, 43 bp, Artificial Sequence
  Synthetic Construct, P54583-RecA-S290 Primer B
tcgggtaccctcggcaaggcactgaagagtggtgccaaattca

SEQ ID NO: 1997 - DNA, 44 bp, Artificial Sequence
  Synthetic Construct, P54583-RecA-S353 Primer B
tcgggtaccctcggcaaggcatttaatcggcgccaagtacccgt

SEQ ID NO: 1998 - DNA, 42 bp, Artificial Sequence
  Synthetic Construct, P54583-RecA-C465 Primer B
tcgggtaccctcggcaaggcacctagccccgctcgctgcggt

SEQ ID NO: 1999 - DNA, 42 bp, Artificial Sequence; identical to SEQ ID NO: 1955
  Synthetic Construct, P54583-RecA-C75 Primer E

SEQ ID NO: 2000 - DNA, 45 bp, Artificial Sequence
  Synthetic Construct, P54583-RecA-S56 Primer E
aggggttgtcgtgcacaactccttggggtataatacaattaggct

SEQ ID NO: 2001 - DNA, 45 bp, Artificial Sequence
  Synthetic Construct, P54583-RecA-S94 Primer E
aggggttgtcgtgcacaactctctgcaggttatggacaagatcgt

SEQ ID NO: 2002 - DNA, 38 bp, Artificial Sequence
  Synthetic Construct, P54583-RecA-S237 Primer E
aggggttgtcgtgcacaactcagcacacgactacgcga

SEQ ID NO: 2003 - DNA, 38 bp, Artificial Sequence
  Synthetic Construct, P54583-RecA-S290 Primer E
aggggttgtcgtgcacaactcgacgacagaccaaacct

SEQ ID NO: 2004 - DNA, 39 bp, Artificial Sequence
  Synthetic Construct, P54583-RecA-S353 Primer E
aggggttgtcgtgcacaacagctcgatctttgacccagt

SEQ ID NO: 2005 - DNA, 40 bp, Artificial Sequence
  Synthetic Construct, P54583-RecA-C465 Primer E
aggggttgtcgtgcacaactgcaccgctttcttaccaggt

SEQ ID NO: 2006 - DNA, 6680 bp, Artificial Sequence
  Synthetic Construct, pAL410
taaggcgcgcctttttgtagaaatgtcttggtgtcctcgtccaatcaggtagccatctctgaaatatctggctccgttgcaactccgaacgacctgctggcaacgtaaaattctccggggtaaaacttaaatgtggagtaatggaaccagaaacgtctcttcccttctctctccttccaccgcccgttaccgtccctaggaaattttactctgctggagagcttcttctacggcccccttgcagcaatgctcttcccagcattacgttgcgggtaaaacggaggtcgtgtacccgacctagcagcccagggatggaaaagtcccggccgtcgctggcaataatagcgggcggacgcatgtcatgagattattggaaaccaccagaatcgaatataaaaggcgaacacctttcccaattttggtttctcctgacccaaagactttaaatttaatttatttgtccctatttcaatcaattgaacaactatttcgaaacgatgagatttccttcaatttttactgctgttttattcgcagcatcctccgcattagctgctccagtcaacactacaacagaagatgaaacggcacaaattccggctgaagctgtcatcggttactcagatttagaaggggatttcgatgttgctgttttgccattttccaacagcacaaataacgggttattgtttataaatactactattgccagcattgctgctaaagaagaaggggtatctctcgagaaaagagaggctgaagctgaattcacgtggcccagccggccgtctcggatcggtacctcgagccgcggcggccgccagctttctagaacaaaaactcatctcagaagaggatctgaatagcgccgtcgaccatcatcatcatcatcattgattaattaacatgtaattagttatgtcacgcttacattcacgccctccccccacatccgctctaaccgaaaaggaaggagttagacaacctgaagtctaggtccctatttatttttttatagttatgttagtattaagaacgttatttatatttcaaatttttcttttttttctgtacagacgcgtgtacgcatgtaacattatactgaaaaccttgcttgagaaggttttgggacgctcgaaggctttaatttgcggccggtacccaattcgccctatagtgagtcgtattacgcgcgctcactggccgtcgttttacaacgtcgtgactgggaaaaccctggcgttacccaacttaatcgccttgcagcacatccccctttcgccagctggcgtaatagcgaagaggcccgcaccgatcgcccttcccaacagttgcgcagcctgaatggcgaatggacgcgccctgtagcggcgcattaagcgcggcgggtgtggtggttacgcgcagcgtgaccgctacacttgccagcgccctagcgcccgctcctttcgctttcttcccttcctttctcgccacgttcgccggctttccccgtcaagctctaaatcgggggctccctttagggttccgatttagtgctttacggcacctcgaccccaaaaaacttgattagggtgatggttcacgtagtgggccatcgccctgatagacggtttttcgccctttgacgttggagtccacgttctttaatagtggactcttgttccaaactggaacaacactcaaccctatctcggtctattcttttgatttataagggattttgccgatttcggcctattggttaaaaaatgagctgatttaacaaaaatttaacgcgaattttaacaaaatattaacgtttacaatttcctgatgcggtattttctccttacgcatctgtgcggtatttcacaccgcatagggtaataactgatataattaaattgaagctctaatttgtgagtttagtatacatgcatttacttataatacagtttctggatggcggcgttagtatcgaatcgacagcagtatagcgaccagcattcacatacgattgacgcatgatattactttctgcgcacttaacttcgcatctgggcagatgatgtcgaggcgaaaaaaaatataaatcacgctaacatttgattaaaatagaacaactacaatataaaaaaactatacaaatgacaagttcttgaaaacaagaatctttttattgtcagtactgattagaaaaactcatcgagcatcaaatgaaactgcaatttattcatatcaggattatcaataccatatttttgaaaaagccgtttctgtaatgaaggagaaaactcaccgaggcagttccataggatggcaagatcctggtatcggtctgcgattccgactcgtccaacatcaatacaacctattaatttcccctcgtcaaaaataaggttatcaagtgagaaatcaccatgagtgacgactgaatccggtgagaatggcaaaagcttatgcatttctttccagacttgttcaacaggccagccattacgctcgtcatcaaaatcactcgcatcaaccaaaccgttattcattcgtgattgcgcctgagcgagacgaaatacgcgatcgctgttaaaaggacaattacaaacaggaatcgaatgcaaccggcgcaggaacactgccagcgcatcaacaatattttcacctgaatcaggatattcttctaatacctggaatgctgttttgccggggatcgcagtggtgagtaaccatgcatcatcaggagtacggataaaatgcttgatggtcggaagaggcataaattccgtcagccagtttagtctgaccatctcatctgtaacatcattggcaacgctacctttgccatgtttcagaaacaactctggcgcatcgggcttcccatacaatcgatagattgtcgcacctgattgcccgacattatcgcgagcccatttatacccatataaatcagcatccatgttggaatttaatcgcggcctcgaaacgtgagtcttttccttacccatggttgtttatgttcggatgtgatgtgagaactgtatcctagcaagattttaaaaggaagtatatgaaagaagaacctcagtggcaaatcctaaccttttatatttctctacaggggcgcggcgtggggacaattcaacgcgtctgtgaggggagcgtttccctgctcgcaggtctgcagcgaggagccgtaatttttgcttcgcgccgtgcggccatcaaaatgtatggatgcaaatgattatacatggggatgtatgggctaaatgtacgggcgacagtcacatcatgcccctgagctgcgcacgtcaagactgtcaaggagggtattctgggccttggtatggtgcactctcagtacaatctgctctgatgccgcatagttaagccagccccgacacccgccaacacccgctgacgcgccctgacgggcttgtctgctcccggcatccgcttacagacaagctgtgaccgtctccgggagctgcatgtgtcagaggttttcaccgtcatcaccgaaacgcgcgagacgaaagggcctcgtgatacgcctatttttataggttaatgtcatgataataatggtttcttagtatgatccaatatcaaaggaaatgatagcattgaaggatgagactaatccaattgaggagtggcagcatatagaacagctaaagggtagtgctgaaggaagcatacgataccccgcatggaatgggataatatcacaggaggtactagactacctttcatcctacataaatagacgcatataagtacgcatttaagcataaacacgcactatgccgttcttctcatgtatatatatatacaggcaacacgcagatataggtgcgacgtgaacagtgagctgtatgtgcgcagctcgcgttgcattttcggaagcgctcgttttcggaaacgctttgaagttcctattccgaagttcctattctctagaaagtataggaacttcagagcgcttttgaaaaccaaaagcgctctgaagacgcactttcaaaaaaccaaaaacgcaccggactgtaacgagctactaaaatattgcgaataccgcttccacaaacattgctcaaaagtatctctttgctatatatctctgtgctatatccctatataacctacccatccacctttcgctccttgaacttgcatctaaactcgacctctacattttttatgtttatctctagtattactctttagacaaaaaaattgtagtaagaactattcatagagtgaatcgaaaacaatacgaaaatgtaaacatttcctatacgtagtatatagagacaaaatagaagaaaccgttcataattttctgaccaatgaagaatcatcaacgctatcactttctgttcacaaagtatgcgcaatccacatcggtatagaatataatcggggatgcctttatcttgaaaaaatgcacccgcagcttcgctagtaatcagtaaacgcgggaagtggagtcaggctttttttatggaagagaaaatagacaccaaagtagccttcttctaaccttaacggacctacagtgcaaaaagttatcaagagactgcattatagagcgcacaaaggagaaaaaaagtaatctaagatgctttgttagaaaaatagcgctctcgggatgcatttttgtagaacaaaaaagaagtatagattctttgttggtaaaatagcgctctcgcgttgcatttctgttctgtaaaaatgcagctcagattctttgtttgaaaaattagcgctctcgcgttgcatttttgttttacaaaaatgaagcacagattcttcgttggtaaaatagcgctttcgcgttgcatttctgttctgtaaaaatgcagctcagattctttgtttgaaaaattagcgctctcgcgttgcatttttgttctacaaaatgaagcacagatgcttcgttcaggtggcacttttcggggaaatgtgcgcggaacccctatttgtttatttttctaaatacattcaaatatgtatccgctcatgagacaataaccctgataaatgcttcaataatattgaaaaaggaagagtatgagtattcaacatttccgtgtcgcccttattcccttttttgcggcattttgccttcctgtttttgctcacccagaaacgctggtgaaagtaaaagatgctgaagatcagttgggtgcacgagtgggttacatcgaactggatctcaacagcggtaagatccttgagagttttcgccccgaagaacgttttccaatgatgagcacttttaaagttctgctatgtggcgcggtattatcccgtattgacgccgggcaagagcaactcggtcgccgcatacactattctcagaatgacttggttgagtactcaccagtcacagaaaagcatcttacggatggcatgacagtaagagaattatgcagtgctgccataaccatgagtgataacactgcggccaacttacttctgacaacgatcggaggaccgaaggagctaaccgcttttttgcacaacatgggggatcatgtaactcgccttgatcgttgggaaccggagctgaatgaagccataccaaacgacgagcgtgacaccacgatgcctgtagcaatggcaacaacgttgcgcaaactattaactggcgaactacttactctagcttcccggcaacaattaatagactggatggaggcggataaagttgcaggaccacttctgcgctcggcccttccggctggctggtttattgctgataaatctggagccggtgagcgtgggtctcgcggtatcattgcagcactggggccagatggtaagccctcccgtatcgtagttatctacacgacggggagtcaggcaactatggatgaacgaaatagacagatcgctgagataggtgcctcactgattaagcattggtaactgtcagaccaagtttactcatatatactttagattgatttaaaacttcatttttaatttaaaaggatctaggtgaagatcctttttgataatctcatgaccaaaatcccttaacgtgagttttcgttccactgagcgtcagaccccgtagaaaagatcaaaggatcttcttgagatcctttttttctgcgcgtaatctgctgcttgcaaacaaaaaaaccaccgctaccagcggtggtttgtttgccggatcaagagctaccaactctttttccgaaggtaactggcttcagcagagcgcagataccaaatactgtccttctagtgtagccgtagttaggccaccacttcaagaactctgtagcaccgcctacatacctcgctctgctaatcctgttaccagtggctgctgccagtggcgataagtcgtgtcttaccgggttggactcaagacgatagttaccggataaggcgcagcggtcgggctgaacggggggttcgtgcacacagcccagcttggagcgaacgacctacaccgaactgagatacctacagcgtgagctatgagaaagcgccacgcttcccgaagggagaaaggcggacaggtatccggtaagcggcagggtcggaacaggagagcgcacgagggagcttccagggggaaacgcctggtatctttatagtcctgtcgggtttcgccacctctgacttgagcgtcgatttttgtgatgctcgtcaggggggcggagcctatggaaaaacgccag

SEQ ID NO: 2007 - DNA, 164 bp, Artificial Sequence
  Synthetic Construct, Truncated Tth
tgcctggccgagggctcgctcgtcttggacgcggctaccgggcagagggtccctatcgaaaaggtgcgtccggggatatcgaaccggccggtaaggcgagaacattcgacttgcgcgttccaccctttgcaaacttcgtgagcgaggacctggtggtgcataac

SEQ ID NO: 2008 - protein, 408 aa, Artificial Sequence
  Synthetic Construct, mTth010_DNA
TGCCTGGCCGAGGGCTCGCTCGTCTTGGACGCGGCTACCGGGCAGAGGGTCCCTATCGAAAAGGTGCGTCCGGGGATGGAAGTTTTCTCCTTGGGACCTGATTACAGACTGTATCGGGTGCCCGTTTTGGAGGTCCTTGAGAGCGGGGTTAGGGAAGTTGTGCGCCTCAGAACTCGGTCAGGGAGAACGCTGGTGTTGACACCAGATCACCCGCTTTTGACCCCCGAAGGTTGGAAACCTCTTTGTGACCTCCCGCTTGGAACTCCAATTGCAGTCAGAGATGTTGAGACTGGAGAGGTTCTCTGGGACCCTATTGTTGCTGTCGAACCGGCCGGTAAGGCGAGAACATTCGACTTGCGCGTTCCACCCTTTGCAAACTTCGTGAGCGAGGACCTGGTGGTGCATAAC

SEQ ID NO: 2009 - protein, 657 aa, Artificial Sequence
  Synthetic Construct, P54583-mTth001-S237
MAGGGYWHTSGREILDANNVPVRIAGINWFGFETCNYVVHGLWSRDYRSMLDQIKSLGYNTIRLPYSDDILKPGTMPNSINFYQMNQDLQGLTSLQVMDKIVAYAGQIGLRIILDRHRPDCSGQSALWYTSSVSEATWISDLQALAQRYKGNPTVVGFDLHNEPHDPACWGCGDPSIDWRLAAERAGNAVLSVNPNLLIFVEGVQSYNGDSYWWGGNLQGAGQYPVVLNVPNRLVYCLAEGSLVLDAATGQRVPIEKVRPGMEVFSLGPDYRLYRVPVLEVLESGVREVVRLRTRSGRTLVLTPDHPLLTPEGWKPLCDLPLGTPIAVPGTDGDVLWDPIVAVEPAGKARTFDLRVPPFANFVSEDLVVHNSAHDYATSVYPQTWFSDPTFPNNMPGIWNKNWGYLFNQNIAPVWLGEFGTTLQSTTDQTWLKTLVQYLRPTAQYGADSFQWTFWSWNPDSGDTGGILKDDWQTVDTVKDGYLAPIKSSIFDPVGASASPSSQPSPSVSPSPSPSPSASRTPTPTPTPTASPTPTLTPTATPTPTASPTPSPTAASGARCTASYQVNSDWGNGFTVTVAVTNSGSVATKTWTVSWTFGGNQTITNSWNAAVTQNGQSVTARNMSYNNVIQPGQNTTFGFQASYTGSNAAPTVACAAS

SEQ ID NO: 2010 - protein, 657 aa, Artificial Sequence
  Synthetic Construct, P54583-mTth002-S237
MAGGGYWHTSGREILDANNVPVRIAGINWFGFETCNYVVHGLWSRDYRSMLDQIKSLGYNTIRLPYSDDILKPGTMPNSINFYQMNQDLQGLTSLQVMDKIVAYAGQIGLRIILDRHRPDCSGQSALWYTSSVSEATWISDLQALAQRYKGNPTVVGFDLHNEPHDPACWGCGDPSIDWRLAAERAGNAVLSVNPNLLIFVEGVQSYNGDSYWWGGNLQGAGQYPVVLNVPNRLVYCLAEGSLVLDAATGQRVPIEKVRPGMEVFSLGPDYRLYRVPVLEVLESGVREVVRLRTRSGRTLVLTPDHPLLTPEGWKPLCDLPLGTPIAVPGPDQKVLWDPIVAVEPAGKARTFDLRVPPFANFVSEDLVVHNSAHDYATSVYPQTWFSDPTFPNNMPGIWNKNWGYLFNQNIAPVWLGEFGTTLQSTTDQTWLKTLVQYLRPTAQYGADSFQWTFWSWNPDSGDTGGILKDDWQTVDTVKDGYLAPIKSSIFDPVGASASPSSQPSPSVSPSPSPSPSASRTPTPTPTPTASPTPTLTPTATPTPTASPTPSPTAASGARCTASYQVNSDWGNGFTVTVAVTNSGSVATKTWTVSWTFGGNQTITNSWNAAVTQNGQSVTARNMSYNNVIQPGQNTTFGFQASYTGSNAAPTVACAAS

SEQ ID NO: 2011 - protein, 657 aa, Artificial Sequence
  Synthetic Construct, P54583-mTth003-S237
MAGGGYWHTSGREILDANNVPVRIAGINWFGFETCNYVVHGLWSRDYRSMLDQIKSLGYNTIRLPYSDDILKPGTMPNSINFYQMNQDLQGLTSLQVMDKIVAYAGQIGLRIILDRHRPDCSGQSALWYTSSVSEATWISDLQALAQRYKGNPTVVGFDLHNEPHDPACWGCGDPSIDWRLAAERAGNAVLSVNPNLLIFVEGVQSYNGDSYWWGGNLQGAGQYPVVLNVPNRLVYCLAEGSLVLDAATGQRVPIEKVRPGMEVFSLGPDYRLYRVPVLEVLESGVREVVRLRTRSGRTLVLTPDHPLLTPEGWKPLCDLPLGTPIAVPEPGKGVLWDPIVAVEPAGKARTFDLRVPPFANFVSEDLVVHNSAHDYATSVYPQTWFSDPTFPNNMPGIWNKNWGYLFNQNIAPVWLGEFGTTLQSTTDQTWLKTLVQYLRPTAQYGADSFQWTFWSWNPDSGDTGGILKDDWQTVDTVKDGYLAPIKSSIFDPVGASASPSSQPSPSVSPSPSPSPSASRTPTPTPTPTASPTPTLTPTATPTPTASPTPSPTAASGARCTASYQVNSDWGNGFTVTVAVTNSGSVATKTWTVSWTFGGNQTITNSWNAAVTQNGQSVTARNMSYNNVIQPGQNTTFGFQASYTGSNAAPTVACAAS

SEQ ID NO: 2012 - protein, 657 aa, Artificial Sequence
  Synthetic Construct, P54583-mTth004-S237
MAGGGYWHTSGREILDANNVPVRIAGINWFGFETCNYVVHGLWSRDYRSMLDQIKSLGYNTIRLPYSDDILKPGTMPNSINFYQMNQDLQGLTSLQVMDKIVAYAGQIGLRIILDRHRPDCSGQSALWYTSSVSEATWISDLQALAQRYKGNPTVVGFDLHNEPHDPACWGCGDPSIDWRLAAERAGNAVLSVNPNLLIFVEGVQSYNGDSYWWGGNLQGAGQYPVVLNVPNRLVYCLAEGSLVLDAATGQRVPIEKVRPGMEVFSLGPDYRLYRVPVLEVLESGVREVVRLRTRSGRTLVLTPDHPLLTPEGWKPLCDLPLGTPIAVPDSEGNVLWDPIVAVEPAGKARTFDLRVPPFANFVSEDLVVHNSAHDYATSVYPQTWFSDPTFPNNMPGIWNKNWGYLFNQNIAPVWLGEFGTTLQSTTDQTWLKTLVQYLRPTAQYGADSFQWTFWSWNPDSGDTGGILKDDWQTVDTVKDGYLAPIKSSIFDPVGASASPSSQPSPSVSPSPSPSPSASRTPTPTPTPTASPTPTLTPTATPTPTASPTPSPTAASGARCTASYQVNSDWGNGFTVTVAVTNSGSVATKTWTVSWTFGGNQTITNSWNAAVTQNGQSVTARNMSYNNVIQPGQNTTFGFQASYTGSNAAPTVACAAS

SEQ ID NO: 2013 - protein, 657 aa, Artificial Sequence
  Synthetic Construct, P54583-mTth005-S237
MAGGGYWHTSGREILDANNVPVRIAGINWFGFETCNYVVHGLWSRDYRSMLDQIKSLGYNTIRLPYSDDILKPGTMPNSINFYQMNQDLQGLTSLQVMDKIVAYAGQIGLRIILDRHRPDCSGQSALWYTSSVSEATWISDLQALAQRYKGNPTVVGFDLHNEPHDPACWGCGDPSIDWRLAAERAGNAVLSVNPNLLIFVEGVQSYNGDSYWWGGNLQGAGQYPVVLNVPNRLVYCLAEGSLVLDAATGQRVPIEKVRPGMEVFSLGPDYRLYRVPVLEVLESGVREVVRLRTRSGRTLVLTPDHPLLTPEGWKPLCDLPLGTPIAVPSSDGLVLWDPIVAVEPAGKARTFDLRVPPFANFVSEDLVVHNSAHDYATSVYPQTWFSDPTFPNNMPGIWNKNWGYLFNQNIAPVWLGEFGTTLQSTTDQTWLKTLVQYLRPTAQYGADSFQWTFWSWNPDSGDTGGILKDDWQTVDTVKDGYLAPIKSSIFDPVGASASPSSQPSPSVSPSPSPSPSASRTPTPTPTPTASPTPTLTPTATPTPTASPTPSPTAASGARCTASYQVNSDWGNGFTVTVAVTNSGSVATKTWTVSWTFGGNQTITNSWNAAVTQNGQSVTARNMSYNNVIQPGQNTTFGFQASYTGSNAAPTVACAAS

SEQ ID NO: 2014 - protein, 657 aa, Artificial Sequence
  Synthetic Construct, P54583-mTth007-S237
MAGGGYWHTSGREILDANNVPVRIAGINWFGFETCNYVVHGLWSRDYRSMLDQIKSLGYNTIRLPYSDDILKPGTMPNSINFYQMNQDLQGLTSLQVMDKIVAYAGQIGLRIILDRHRPDCSGQSALWYTSSVSEATWISDLQALAQRYKGNPTVVGFDLHNEPHDPACWGCGDPSIDWRLAAERAGNAVLSVNPNLLIFVEGVQSYNGDSYWWGGNLQGAGQYPVVLNVPNRLVYCLAEGSLVLDAATGQRVPIEKVRPGMEVFSLGPDYRLYRVPVLEVLESGVREVVRLRTRSGRTLVLTPDHPLLTPEGWKPLCDLPLGTPIAVPGETNGVLWDPIVAVEPAGKARTFDLRVPPFANFVSEDLVVHNSAHDYATSVYPQTWFSDPTFPNNMPGIWNKNWGYLFNQNIAPVWLGEFGTTLQSTTDQTWLKTLVQYLRPTAQYGADSFQWTFWSWNPDSGDTGGILKDDWQTVDTVKDGYLAPIKSSIFDPVGASASPSSQPSPSVSPSPSPSPSASRTPTPTPTPTASPTPTLTPTATPTPTASPTPSPTAASGARCTASYQVNSDWGNGFTVTVAVTNSGSVATKTWTVSWTFGGNQTITNSWNAAVTQNGQSVTARNMSYNNVIQPGQNTTFGFQASYTGSNAAPTVACAAS

SEQ ID NO: 2015 - protein, 657 aa, Artificial Sequence
  Synthetic Construct, P54583-mTth008-S237
MAGGGYWHTSGREILDANNVPVRIAGINWFGFETCNYVVHGLWSRDYRSMLDQIKSLGYNTIRLPYSDDILKPGTMPNSINFYQMNQDLQGLTSLQVMDKIVAYAGQIGLRIILDRHRPDCSGQSALWYTSSVSEATWISDLQALAQRYKGNPTVVGFDLHNEPHDPACWGCGDPSIDWRLAAERAGNAVLSVNPNLLIFVEGVQSYNGDSYWWGGNLQGAGQYPVVLNVPNRLVYCLAEGSLVLDAATGQRVPIEKVRPGMEVFSLGPDYRLYRVPVLEVLESGVREVVRLRTRSGRTLVLTPDHPLLTPEGWKPLCDLPLGTPIAVPQEGVGVLWDPIVAVEPAGKARTFDLRVPPFANFVSEDLVVHNSAHDYATSVYPQTWFSDPTFPNNMPGIWNKNWGYLFNQNIAPVWLGEFGTTLQSTTDQTWLKTLVQYLRPTAQYGADSFQWTFWSWNPDSGDTGGILKDDWQTVDTVKDGYLAPIKSSIFDPVGASASPSSQPSPSVSPSPSPSPSASRTPTPTPTPTASPTPTLTPTATPTPTASPTPSPTAASGARCTASYQVNSDWGNGFTVTVAVTNSGSVATKTWTVSWTFGGNQTITNSWNAAVTQNGQSVTARNMSYNNVIQPGQNTTFGFQASYTGSNAAPTVACAAS

SEQ ID NO: 2016 - protein, 658 aa, Artificial Sequence; identical to SEQ ID NO: 1744
  Synthetic Construct, P54583-mTth010-S237

SEQ ID NO: 2017 - DNA, 1344 bp, Artificial Sequence
  Synthetic Construct, O77044_opt
atgagggtgttcctttgcctgctctcggcgctagctttgtgccaggcggcttacgactacaagcaggtgttgcgggactcgctactattctatgaggcccagagatccggccggctcccagccgaccagaaggtcacgtggaggaaggatagcgcgctgaatgaccagggtgaccagggacaagacttgaccggcggctactttgacgctggggacttcgtcaagttcgggttccccatggcttataccgcaaccgtgctggcatggggcctcatagattttgaggccggctacagcagtgccggggccttggatgatggacggaaggctgtcaaatgggccaccgactatttcataaaggcccacacaagtcaaaatgagttctatggtcaggtcggccagggtgacgccgatcacgctttctggggaagaccagaggatatgacgatggcgcgcccggcgtacaagatagacacctcaaggcctggctctgatctggcaggcgagacagcggctgctcttgccgctgcttcaatcgtgttccggaacgtcgatggcacttactcaaataacctgttaacacacgctcgccagctattcgacttcgcgaacaactaccggggaaagtatagtgactctattactgacgcaagaaatttctacgcaagcgcagactacagagacgagttggtttgggctgctgcgtggttatacagagcgaccaacgacaacacctacctcaacactgctgagtcactgtacgatgagtttgggctacagaactggggggggggcctgaactgggatagcaaggtgtctggcgtgcaggtgttgttggccaagcttaccaataagcaggcctacaaggacacggtgcagtcttacgtcaattacctaattaataaccagcagaagactcccaagggcctcctctacatcgacatgtggggcacccttcgccacgctgccaacgccgcattcatcatgctcgaagccgccgagctgggcttgtccgcctcctcttatagacagttcgcgcaaacgcaaatcgactacgccctgggcgatggtggccgctcctttgtgtgcgggttcgggagtaatcctcctacgagaccgcaccacagatcctcgtcgtgcccgccagctcccgctacttgcgactggaatacattcaactcacctgacccaaactaccacgtcctctctggggccctagtgggcggacctgatcagaatgacaactacgtcgatgaccgttcagactatgttcacaacgaagtcgccactgattacaacgcgggtttccagtccgcgttagctgctttggtggcccttggttac

SEQ ID NO: 2018 - DNA, 25 bp, Artificial Sequence
  Synthetic Construct, O77044-Tth Primer A
gctgttttgccattttccaacagca

SEQ ID NO: 2019 - DNA, 40 bp, Artificial Sequence; identical to SEQ ID NO: 1935
  Synthetic Construct, O77044-Tth Primer C

SEQ ID NO: 2020 - DNA, 40 bp, Artificial Sequence; identical to SEQ ID NO: 1936
  Synthetic Construct, O77044-Tth Primer D

SEQ ID NO: 2021 - DNA, 23 bp, Artificial Sequence
  Synthetic Construct, O77044-Tth Primer F
cccaaaaccttctcaagcaaggt

SEQ ID NO: 2022 - DNA, 52 bp, Artificial Sequence
  Synthetic Construct, O77044-Tth-S84 Primer B
tccaagacgagcgagccctcggccaggcagtagccggcctcaaaatctatga

SEQ ID NO: 2023 - DNA, 52 bp, Artificial Sequence
  Synthetic Construct, O77044-Tth-T303 Primer B
tccaagacgagcgagccctcggccaggcagccccacatgtcgatgtagagga

SEQ ID NO: 2024 - DNA, 46 bp, Artificial Sequence
  Synthetic Construct, O77044-Tth-S325 Primer B
tccaagacgagcgagccctcggccaggcaggcggacaagcccagct

SEQ ID NO: 2025 - DNA, 53 bp, Artificial Sequence
  Synthetic Construct, O77044-Tth-T333 Primer B
tccaagacgagcgagccctcggccaggcattgcgcgaactgtctataagagga

SEQ ID NO: 2026 - DNA, 46 bp, Artificial Sequence
  Synthetic Construct, O77044-Tth-S345 Primer B
tccaagacgagcgagccctcggccaggcagcggccaccatcgccca

SEQ ID NO: 2027 - DNA, 48 bp, Artificial Sequence
  Synthetic Construct, O77044-Tth-C348 Primer B
tccaagacgagcgagccctcggccaggcacacaaaggagcggccacca

SEQ ID NO: 2028 - DNA, 45 bp, Artificial Sequence
  Synthetic Construct, O77044-Tth-S352 Primer B
tccaagacgagcgagccctcggccaggcacccgaacccgcacaca

SEQ ID NO: 2029 - DNA, 46 bp, Artificial Sequence
  Synthetic Construct, O77044-Tth-T356 Primer B
tccaagacgagcgagccctcggccaggcaaggaggattactcccga

SEQ ID NO: 2030 - DNA, 47 bp, Artificial Sequence
  Synthetic Construct, O77044-Tth-S362 Primer B
tccaagacgagcgagccctcggccaggcatctgtggtgcggtctcgt

SEQ ID NO: 2031 - DNA, 50 bp, Artificial Sequence
  Synthetic Construct, O77044-Tth-S363 Primer B
tccaagacgagcgagccctcggccaggcaggatctgtggtgcggtctcgt

SEQ ID NO: 2032 - DNA, 48 bp, Artificial Sequence
  Synthetic Construct, O77044-Tth-S364 Primer B
tccaagacgagcgagccctcggccaggcacgaggatctgtggtgcggt

SEQ ID NO: 2033 - DNA, 51 bp, Artificial Sequence
  Synthetic Construct, O77044-Tth-T376 Primer B
tccaagacgagcgagccctcggccaggcaattccagtcgcaagtagcggga

SEQ ID NO: 2034 - DNA, 50 bp, Artificial Sequence
  Synthetic Construct, O77044-Tth-S379 Primer B
tccaagacgagcgagccctcggccaggcagttgaatgtattccagtcgca

SEQ ID NO: 2035 - DNA, 51 bp, Artificial Sequence
  Synthetic Construct, O77044-Tth-S406 Primer B
tccaagacgagcgagccctcggccaggcaacggtcatcgacgtagttgtca

SEQ ID NO: 2036 - DNA, 48 bp, Artificial Sequence
  Synthetic Construct, O77044-Tth-T415 Primer B
tccaagacgagcgagccctcggccaggcaggcgacttcgttgtgaaca

SEQ ID NO: 2037 - DNA, 40 bp, Artificial Sequence
  Synthetic Construct, O77044-Tth-S84 Primer E
aggacctggtggtgcataacagcagtgccggggccttgga

SEQ ID NO: 2038 - DNA, 39 bp, Artificial Sequence
  Synthetic Construct, O77044-Tth-T303 Primer E
aggacctggtggtgcataacacccttcgccacgctgcca

SEQ ID NO: 2039 - DNA, 49 bp, Artificial Sequence
  Synthetic Construct, O77044-Tth-S325 Primer E
aggacctggtggtgcataactcctcttatagacagttcgcgcaaacgca

SEQ ID NO: 2040 - DNA, 40 bp, Artificial Sequence
  Synthetic Construct, O77044-Tth-T333 Primer E
aggacctggtggtgcataacacgcaaatcgactacgccct

SEQ ID NO: 2041 - DNA, 42 bp, Artificial Sequence
  Synthetic Construct, O77044-Tth-S345 Primer E
aggacctggtggtgcataactcctttgtgtgcgggttcggga

SEQ ID NO: 2042 - DNA, 41 bp, Artificial Sequence
  Synthetic Construct, O77044-Tth-C348 Primer E
aggacctggtggtgcataactgcgggttcgggagtaatcct

SEQ ID NO: 2043 - DNA, 43 bp, Artificial Sequence
  Synthetic Construct, O77044-Tth-S352 Primer E
aggacctggtggtgcataacagtaatcctcctacgagaccgca

SEQ ID NO: 2044 - DNA, 42 bp, Artificial Sequence
  Synthetic Construct, O77044-Tth-T356 Primer E
aggacctggtggtgcataacacgagaccgcaccacagatcct

SEQ ID NO: 2045 - DNA, 38 bp, Artificial Sequence
  Synthetic Construct, O77044-Tth-S362 Primer E
aggacctggtggtgcataactcctcgtcgtgcccgcca

SEQ ID NO: 2046 - DNA, 38 bp, Artificial Sequence
  Synthetic Construct, O77044-Tth-S363 Primer E
aggacctggtggtgcataactcgtcgtgcccgccagct

SEQ ID NO: 2047 - DNA, 41 bp, Artificial Sequence
  Synthetic Construct, O77044-Tth-S364 Primer E
aggacctggtggtgcataactcgtgcccgccagctcccgct

SEQ ID NO: 2048 - DNA, 41 bp, Artificial Sequence
  Synthetic Construct, O77044-Tth-T376 Primer E
aggacctggtggtgcataacacattcaactcacctgaccca

SEQ ID NO: 2049 - DNA, 40 bp, Artificial Sequence
  Synthetic Construct, O77044-Tth-S379 Primer E
aggacctggtggtgcataactcacctgacccaaactacca

SEQ ID NO: 2050 - DNA, 40 bp, Artificial Sequence
  Synthetic Construct, O77044-Tth-S406 Primer E
aggacctggtggtgcataactcagactatgttcacaacga

SEQ ID NO: 2051 - DNA, 43 bp, Artificial Sequence
  Synthetic Construct, O77044-Tth-T415 Primer E
aggacctggtggtgcataacactgattacaacgcgggtttcca

SEQ ID NO: 2052 - DNA, 2694 bp, Artificial Sequence; identical to SEQ ID NO: 1848
  Synthetic Construct, P77853-PspPol-S63 DNA

SEQ ID NO: 2053 - DNA, 2694 bp, Artificial Sequence; identical to SEQ ID NO: 1849
  Synthetic Construct, P77853-PspPol-S67 DNA

SEQ ID NO: 2054 - DNA, 2694 bp, Artificial Sequence; identical to SEQ ID NO: 1850
  Synthetic Construct, P77853-PspPol-S86 DNA

SEQ ID NO: 2055 - DNA, 2694 bp, Artificial Sequence; identical to SEQ ID NO: 1851
  Synthetic Construct, P77853-PspPol-S95 DNA

SEQ ID NO: 2056 - DNA, 2694 bp, Artificial Sequence; identical to SEQ ID NO: 1852
  Synthetic Construct, P77853-PspPol-S112 DNA

SEQ ID NO: 2057 - DNA, 2694 bp, Artificial Sequence; identical to SEQ ID NO: 1853
  Synthetic Construct, P77853-PspPol-S124 DNA

SEQ ID NO: 2058 - DNA, 2694 bp, Artificial Sequence; identical to SEQ ID NO: 1854
  Synthetic Construct, P77853-PspPol-S178 DNA

SEQ ID NO: 2059 - protein, 1038 aa, Aquifex aeolicus strain VF5
  Intein encoding nucleic acids 1
TGCTTCATCGAGGGGACGGAGGTTCTCACTAAGCGGGGGTTCGTGGATTTCAGGGAGCTGCGGGAGGATGATCTGGTCGCTCAGTACGACATCGAGACCGGCGAGATTTCCTGGACGAAGCCATACGCTTACGTCGAGCGGGATTACGAGGGCTCCATGTACCGCCTGAAGCACCCTAAGAGCAACTGGGAGGTGGTCGCTACCGAGGGCCATGAGTTCATCGTGAGGAATCTGAAGACGGGGAAGGAGCGGAAGGAGCCAATCGAGAAGGTCAAGCTCCACCCATACTCCGCTATTCCTGTTGCTGGCAGGTACACAGGGGAGGTGGAGGAGTACGACCTCTGGGAGCTGGTCTCGGGCAAGGGGATCACACTCAAGACTAGGTCTGCCGTTAAGAACAAGCTGACCCCGATCGAGAAGCTCCTGATTGTGCTCCAGGCGGACGGCACAATTGATTCAAAGCGCAATGGCAAGTTCACTGGGTTCCAGCAGCTGAAGTTCTTCTTCTCCAAGTACAGGAAGATCAACGAGTTCGAGAAGATTCTCAATGAGTGCGCGCCGTACGGCATCAAGTGGAAGAAGTACGAGCGCCAGGACGGGATTGCTTACACAGTTTACTACCCCAACGATCTGCCGATCAAGCCCACTAAGTTCTTCGACGAGTGGGTGCGCCTCGATGAGATCACGGAGGAGTGGATTAGGGAGTTCGTGGAGGAGCTGGTCAAGTGGGACGGCCATATCCCGAAGGATCGGAACAAGAAGAAGGTCTACTACTACAGCACCAAGGAGAAGCGCAATAAGGACTTCGTTCAGGCTCTCTGCGCTCTGGGCGGGATGAGGACGGTTGTGTCGCGCGAGAGGAACCCGAAGGCCAAGAATCCCGTCTACCGGATCTGGATCTACCTGGAGGACGATTACATCAACACCCAGACGATGGTGAAGGAGGAGTTCTACTACAAGGGCAAGGTCTACTGCGTTTCTGTTCCAAAGGGCAACATCGTGGTTAGGTACAAGGATTCTGTCTGCATTGCTGGCAAC

SEQ ID NO: 2060 - protein, 459 aa, Acidothermus cellulolyticus 11B
  Intein encoding nucleic acids 2
TGCCAGCCTTACTCTGCGCCGGTTTCAACTCCTGATGGGCCTATTCCTATCGGCAAGCTCGTGGACGCTAATGCGGTCGGGGAGAAGGTGTTCGACGCGTCGGGCGTCACCAGGATTGTTGCTACCACGTGCAACGGGAGGAAGCCAGTCCTCCGCATCAGGACATCCGGCGGGCACGTTCTCGACGTGACTCCAGATCATCTGGTTTGGCAGGTGGTCGACCAGACCGCTGGCAGGTTCGTGCCAGCTGGCCAGCTCCGGGTCGGGGATAGGCTGGAGTGGCACGACAGGGCCAATTCCGATGCTATGGTCGCTGCGTTCACGGCTGACAGCGCTGCTGCGGCTCAGCCAGGCCAGATCGTTGACATTCTCGCGATCGATGAGCTGGGCGTGATGCCTGTCTACGATATTCAGACAGAGTCGGGGGAGTACCTCTCAGATGGCATTAGGGTTCATAAC

SEQ ID NO: 2061 - protein, 1254 aa, Alkalilimnicola ehrlichei MLHE-1
  Intein encoding nucleic acids 3
TGCGTTACAGGGGACACAAGGGTCCTCCTCGCGGACGGGCAGCGGGTTCCTATTCGGGATCTCGTGGGGCAGACGCCTGAGGTCATTTCTGTCAACGCTGAGGGCAGGCTGGAGCCAGCTAAGACCGACCTCGTGTGGTCCGTTGGGGTGCGCCCTCTCCTGCAGGTCAGGCTGGCTTCCGGCAGGACCATCAGGTGCACGCCAGAGCACAGGCTCAGGGGCCTGTGGGATTGGAAGGAGGCCCGCGACATCAGGGTCGGGGATAGGCTGGGCATTGCTCGGGAGCTCCCAGCTCCAAAGGTGACGAAGCGCTGGGCTGAGCACGAGCTGGTGCTCCTGGCTCATCTCGTCGGCGACGGGTCCTACATTAAGGGCCAGCCACTGAGGTACACCACGGCTTCAGAGGCGAACTCCGAGGCTGTTAGCAGGGCCGCTGAGGCTATGGGCTCTACAGTGACTAGGCACCCAGGCAGGGGGCAGTGGCATCAGCTCGTCATCTCAGGCAACGGGAATAGGTGGCACCCACAGGGCGTTGGGAAGTGGCTCAAGCAGCTGGGGGTGTTCGGCCAGAGGAGCCGGGAGAAGCACCTGCCACAGGAGGTGTTCCAGCTCGACAATGATCAGCTGGCCCTCTTCCTGAGGCATCTGTGGGCGACAGACGGCTCGATCACTCAGGGGTCTGCTGGCCGCCCTAGGATCTACTTCTCGACGGCCTCTCGGCACCTCATCCAGGATGTCGCTGCCCTCCTGCTCCGGTTCGGGATCGTTGGCCGCACAAAGCACATTACTCATGGCGACGGGGAGGGCTGGTTCACACTGGATATTTCGGGCGCTGTCCAGCAGCAGAGGTACCTGGAGAAGATCGGGGCCTTCGGCCACCAGGCTCATAACGCTAGGAGGGCTCTCCAGCATCTGAGGGGCCTCGTCGAGAACACCAATGTTGACACGCTGCCGGAGGAGGTGTTCAATTACATCCGGGAGCGCATGAGGGAGGAGGGGATTACACACAGGCAGATGGCTGCTCTCAGGGGCACTGCTTACGGCGGGAGCGCTCATTTCACCTTCTCCCCGAGCAGGGAGACGCTGCTCTCGTACGCGGACATCCTCAACGATCAGCGGCTGCGCATGCTCGCCAATCAGCACGTTTTCTGGGACCGCGTGGTCTCCGTGGAGCCCGCGGGCGAGGAGGAGGTCTTCGATCTCACAGTTCCGGGCAATGCTTGCTGGCTCGCGGATGGCATCGTTTCACACAAC

SEQ ID NO: 2062 - protein, 1815 aa, Aspergillus nidulans FGSC A
  Intein encoding nucleic acids 4
TGCCTCGCCAATGGGACACAGCTGCTGCGCTACGATGGGACAAAGGTCAACGTGGAGGACGTGAAGGAGGGGGATCTGCTGCTGGGCCCAGACGGCGGGCCAAGGAGGGCGTTCAACGTGGTCTCCGGCAAGGACCGCCTGTACAGGATCAAGATTGACGGGGATAAGGAGGATCTCGTTGTGACCGCCAACCACATCCTCGTGCTGCATAGGGCGAAGGCTATGAATACGTCTGTCTGCTTCGACCGGTCAAAGGAGCAGCAGGGCGGGGCTGGCGAGCAGCTGGACATTTCCGAGGTCAGCGCCGCGGAGCGCTACGATACCGTTGAGATGACGGCTGCTGAGTTCGCTGCTCTGCACCCACAGGAGAGGTCCTGGTACAGGGCTATCAGGTGCCCAGGCTTCGAGCTCCCTGAGCAGGACGTCCCAGTTAACCCTTACTTCCTCGGCCTGTGGCTCGGGGATGAGTCCCGGAACCAGAGCGCTATCTACTCGAATCACGAGGAGGCCCTGCGCGAGTTCCTCGTGAGCCATGCCGCGGAGCTGGACATGCACCTCGTTTACCATGGCCAGTCGGCGTACTCTACCGTGTGCAACAAGGATCGCCCAACGAATAAGAGGATCGGCCCTGCCAACCAGACCCAGACGGTCAGGCCAACCATCCGGCAGACACGGCGCACTATTAGGCAGCAGAGGCTGGCTGCTGAGCACGCTGCTGCTGAGTACACCACGCAGAGGGAGACAGCGTCCCTCACTCCGCTCCTGGAGTCACCCACATCCGACAAGCATGGCCTCCTGTCCAGCGTCGAGACTCCAGGGAGGCTGTCAGATTCCGTTACAACTGAGCTCCCCATGAGCAGGTCGGCCTCTGCTATGAGGTCGATCAGGACCGCCAGCGGCCTCTCGGAGTTCAACGACGTGACGAATGTCTCAGCTTCCATGCCGGATATCCAGAACTCTGGCATTAAGAATCAGGGGAGGATCGCTAAGGTGACCAGGCAGCAGGACTCTAAGGGCGAGGTCGATTTCCGCCAGCAGTACTCACAGGCCATTAAGGACGATCTGGAGCTCCTGGAGACGGACATCGAGGACGATGTGGCGTCGTCTGACGAGATTGAGGATGTCTGCGTCGTTGGCAGCGAGAACGAGCTCATCGGGTCCGAGAAGCAGGACCAGAGCGGCAGGAGGAGGCAGATTCACAGGCTGAGGACCGGGCATAGGGGCTACGGGGACCTCTCGGACGATGAGCAGGAGCAGCTCCTGGACAGCGTGGTCGAGCGCTACGCGGGCGATTCGCGGCTGAATACACTCCAGCAGGAGCTGAGCAAGATGGGCATCCTCAACCCAGAGACTGGGCCTATCAATGACAAGAAGCGCATTCCGCAGGTGTTCATGCAGAACAGCCGGTCGGTTCGCCTGTCGGTGCTCGCTGGCCTCCTGGACTCTGATGGGTGGTACATCTACCCCGAGAATATGTTCGGCTTCGCTCAGTCCGAGCTGTGCCACAAGGAGCTCTTCTGGGACGTTGTGACACTGGCTAGGAGCCTCGGCTTCGGGGTCTGGACAAAGAAGCGGATGATGCCGGACCCCACTGGCAAGCGCATGTCACCAATGCTGGTGGCCCAGATCTCCGGCGATCTGGCGGAGATTCCTTGCGTCCTCGCTCGCAAGAAGGCCATGCCGAGGCTGATCCCCCAGTCTCACTCATTCGCCATCAAGGACATTTCTCTGGAGTCAGAGGCGACGGAGTGGGCTGGCTTCAGGGTGGATAAGGATCAGCTCTACCTCAGGCATGACTACGTGGTTCTGCATAAT

SEQ ID NO: 2063 - protein, 1404 aa, Aeropyrum pernix K1
  Intein encoding nucleic acids 5
TCGCTGCCACCATGGGAGCCTATCGTGGTCAGGCGGGGGGATGAGGTTCGGGTTACATCAATCGGGGAGTTCGTGGATTCTTTCCTGGAGGGCGAGGGCGGGCTGGACATCGGCGGGCTCGGCTACTACACCCTGTCGCTCGATACCCGGACGCTGAAGCCAGTCTGGAGGAGGATCCGCGGCGTTATTAAGCACCGGATCCGCGGCAGGCTCCTGAGGGTCAAGGCCTCAAAGGGCCGCTCCATCGACCTGACGGGCTCTCATTCAATCTACAGGATTAGCAGGGGCGGGGGCCTGGAGGTGGTCGGCTCCAGCGACCTGAGGCCAGGCGATTCTCTCGTGACACCTGCTTCAGTCGAGCTCCCAGAGTCCGCCCCTTCGTCTATTAACGCTGCGAGGGAGCTGTGGAGCCGGGGGGTGGAGGGCATCTTCGTTGTGGGGCTCCCAGGCGAGGCTGCTGGGTACAGGGGCGTCGAGCGGTCGCGCGGCTACGACGGGGGCCACGCTATCCCTCTGGAGACGCTCGTGGAGCGCTACGGCGATTCGGTCTGGTCTCTGGTTTCAGGCGCGAAGCTCGCTGTTTCCCGGGGGGCTGCTGGCGACCACCCAGTGCCCGCCACCATTCCGCTGGATACGGGGTTCTACCTCCTGCTCGGCTTCATCGTGTCCGCTGGCAGCGTGGACGTCGAGGGGGGCCATGTTACAGTGACTCTCGGCCCAGGGAGGGAGGGCTACGTGGGCGATGTCGTTGAGGCTGTCAACTCCACTGCTCCAGGCGCTGGGGTCCGCATTTCATCCGGGGCGAGGGGCATGGAGGTTACCATCAGGAGCCGGGTGCTGTCGGAGCTGCTCGCTAGGGTGTTCGGCGCTGGGCCAGGCCCTAATCGGGACATCCCCTCTATTGTCTTCAGGGCCCCGAAGCCCATGAAGCGGGTTTTCCTGAAGGGCCTCTACGCTGGGGGCGGGGTCTTCGACCGGAGCTCGGGCAGCCTGATCTACGCCACCGATTCCCGCAGCCTGCTCAACGGCCTCGCTCTGCTCCTGCTCAATGTGGGCGCTGGCGGGTACAGGATCGACTCGGGGGATTCTGGCAGGGCTCTGGCGCTCATTGTGGAGAATGCTGGCAGGCTCGACGCTATCGGCGAGGTCCTGGAGCACCTCGGCTTCCATGGCGGGAGGGAGGCTGTTCAGGGGGTGGGCGCTCTGGAGAGGGCTACAGCTGGGCTCGCTGGCCAGGCTACTGTCGCTGTTCAGAGGCCAGCTACCCGCGGCGGGCCAGGCGTGGACGTCGCGGGGGTGACGGGCCTGGAGCACCTGGAGGCTAGCACAGAGTTCGTCTACGATCTCTCTGTGGAGGGGGATGAGAACTTCTTCGCCGGGCTCGGGTGGATTCTCGTGCATAAT

SEQ ID NO: 2064 - protein, 1134 aa, Azotobacter vinelandii
  Intein encoding nucleic acids 6
TGCTTCGCTCCTGAGACACTCGTGCATACCGCTGATGGGCCTCGGCCTATTCGGGATCTCCAGCAGGGGGATCTCGTTCTGGGCATCAGCGGCCGCTACAGGGAGGTTACCCACAAGTTCGTGTACAACCAGACGGACGCTATGCTCGCCATCCGCGTCAAGCACGCCGTTGAGCCAATTGAGGTTACAGCTGGCCATCCTTTCTACGCCATCAGGGGCGTGCCACTGGAGCAGTCGGGGGAGCGCACCCTCAGGCAGCTGGAGTCCGGCAAGCGGAGCCCAGAGTGGATCGACGCTGGCGAGCTGGAGAGGGGGGATTACATGGCCCAGGTCATCCCATCTGAGGTGGTCCCTGTCGCGGGCTTCGACGAGGACGATGCTCGCCTCTACGGGATCCTCCTGGGCGATGGGCATCTCAGCAAGAATGGCCTGCAGTGGGGCGTCTCGGGGCACCCACAGAGGGACGGGCACATGGATTTCGTTAGGGCGTACCTGTCCGCTCGGGGCATCCACTTCTGGGAGACCGCGAGGGACGAGACGTACGGGCAGATTCATTGGGCTAGCGGCAGGGGGGTCCGCAGGGATGCTACCACGGGCAGGATCACAGGCGCTGGGGCTGCGACTCTCCCTTTCGAGCACGCCGACCTGTACGATGAGCAGGGCCGGAAGCGCATCGCTAGGCGCTTCTCACATCTCCCAAGGCAGCAGTCCCTCGCTCTGATCAGGTCGCTCCTGGAGTCTGACGGCGGGGTGTCTCGCGGCAAGGAGATCTACTTCACAAACACTTCAAGGCCCCTCATTGAGGGCCTGAGGTACCAGCTCCTGAGGCTGGGCGTGCCAACCGCTGGGCAGTACAGGGAGAGGAGGCAGGACCACGTCGGCCAGAGGGCTGATGGGTCGCCAATCAGGTTCGAGGGCGTGTGCAAGGCGTACGACCTCAGGATTCCGGCTGTTCCAGAGGTGGCTCAGCTGGTCGGCTGCCAGCCAATCGCCAAGCGGAATTGGATTACGTGGCAGGGCTGCGTCTACTCCAGGATCCGGGATGTTCAGCCGATTGCGGTGAAGCCCTTCGTCTTCGATCTCAAGGTGGAGGGGGATGAGAGCTACATGACTACTTCCGGGCTCGCTCACAAC

SEQ ID NO: 2065 - protein, 1464 aa, Batrachochytrium dendrobatidis JEL197
  Intein encoding nucleic acids 7
TGCCTCTCGGGGGATACTGAGGTCGTTCTCGGGAATGGCATGGACGTGGTTCTGCTGACGGATCTCGTGGACGGGGCGTGCGTTTCGACAATCGAGCCAAGGACTGGCGTGGTCAGCCCATCGCTCATCGACCATTACTTCGCCAAGGATGCGACCCGCGTCCTCAAGATCACGCTGGACGATGGCAGGGTTATTAAGGCTGACCCAGAGCACCCTCTGTTCGCTGCTAAGGTGGATGAGACCACGCGCGGCCTCACCGGGCAGTGGCTGAGGGTGGAGGAGCTCACGGTCGGCCACCATGCTCTCCTGGTGTCGCCACAGCAGGCTTACTGCACCTCTGAGCAGTGGACACTCACTCTGTCAGAGAAGGAGGTCTGCACCGCTTCCACGGCTCAGCTCGCTAAGCAGCTGTCCGAGATCGGCCTGGTCGGGGTTCCGATTCCCCTCTCTAAGGTGAAGTCAGCTGCCAGGCTGTTCGGCCTCGTCCTGTCCGCTGGCGACTTCAGCGGGAAGCTCTACGTGGAGAAGGACGAGGATGTTACAGCCGTGAACAGCGACCTCACTGCGCTGGGCTTCTCGCCAGCTCACTGGGTCCGGTACCAGGACGATCAGCAGAAGTGGTTCAAGTGCGACGATTCGAACGGCAAGGCGATCTGCATTACCCTGGTCCCTACGGCTAATGCTCTCCTGCAGACCCTCGGGGCTCACGACGCTGAGAAGCAGCATCGGTACTGCCTCCTGCCAAAGTGGCTCCTGGATGCCCCTACGTCCATCAAGAGGGAGTTCCTCGGCGCTCTGTTCGGCGGGAACGGGGCCCACATCACAATTTCGTGCAATGAGGGCAAGTGGGAGCCGACTATGTCTGCGCTCACACAGCACACTGACGCTGATCATCTGGAGAGCACAGTTGTGTACCTCAAGCAGGTTGCCACTCTCCTGGGCATGCTGAACATCTGCTCCAGCGTGTCGTCTGAGAAGCACATTACAGCCGAGAAGACTGGGTACGCGGTCCACCTGCATGTTGACAACACGGCGGAGAATCTCGTTCGGTTCTACGAGCAAGTGGGCTACCGCTACTGCTTCAATAAGACATCCCAGTCATCCGCCCCCGTGCAGTGGATCAAGGGGTCTCTGTTCTTCATTGAGCAGCACCGCTCAAAGTGCCAGCATGCTTTCGAGCTCCTGCACACCGGCCTCGGGACGAAGGCTGCTGTCTCCGCCGAGATCAACATGCCACACCATAATCCTAGCCACATGCTGAACGTTAAGGAGATCCCGACCGCTCCCGCCGACGAGTACATCACGTGGATTGAGTTCAAGGATCGCTACGTGCATAAGGAGTCCCCGCGGTTCGTGTGGGTCACCATCCACAGCATTGAGGAGGCGCCCGCTGAGAGGCTCTACGACTTCAATACGGTTTCGCAGAATCATAGCTTCTTCGCCAACAGCATCGTCTCTCATAAT

SEQ ID NO: 2066 - protein, 1257 aa, Batrachochytrium dendrobatidis JEL423
  Intein encoding nucleic acids 8
TGCTTCGGGCGGGATACCCCTCTCCTCATGGCGGACGGCACTACTAAGTTCGTTCAGGACATTAAGGCTCTGGATCAGCTCATGGGCGACGATTGCACGCCGCGCATCGTCCAGGAGAGGTCTCTCGTTCACGAGTCAGGGGCTCTGTACAGGGTGGTCCCCAAGAACGCCAATGGCCACGACGCGTTCGTGTGCAACAAGGAGCATATCCTCGTGATGGTCAATGTTAAGCAGCCGTGGGTCAGCCAGACGGTTATCGACGGCGTGGATCAGTTCCATGTCTCGGAGGTTGTGTGCATCGGGAACATTCCGACAGTGCGCTCCAGCGGCAATTTCGCTTCTGCTGTCGAGGCTACGAAGGCTCTGCCAGCTTGGACACTCCTGATCTGGGAGATTAGCGTGCTGGAGTACCTGGCGGTCGACGCTGATCTCAGGCAGCACTTCATGATCTACAAGCCAGCTGGCGGGATTGAGTACCCAACCACGACAAACCTGGACATCGTGCAGCACTTCGGCGCCGAGTCGGTTCCCAACCTGGAGCATGCCGTGATGTGGTGCATCGGCCTGTGGATTCTCCTGGGGGACGTCGATACAGCCGGCAACCCAGTTCTCATCCTGAGCGGCATTGACCACCTCCATCCTCTGATCAAGACTCTCCACTCGCATTCTCAGAAGCTGTCAATTTCCTTCACCAACCAGCTCGACGAGGGGGTCGCTGATATCAGCAAGCCAACCATCATTGCCCTCGGCGACAAGTTCGGGCTCCTGTTCAAGTCCCTGGGCATCGAGAGCGCTGAGTGCATTCCTGATGCCCTCCTGAGGTCGTCTAAGCTCCACAGGGCTGCTCTCCTGGCTGGCCTGGTGGAGGGGAGCAACGCTTTCTCGATCGTCAAGGACACTCCAAAGCATTGGGATATTTCCTGCAAGAACAATATGATCTTCGAGAATATTAAGAGGCTCTCATCCAGCCTCGGCCTGTGCGTTGACACGGTGACACCAGCGACTATCACCCAGCAGGTGTCCGTCAAGACGCTGCAGATCCGGATTTCGGGCCCTCGCATGCACTACGTGTCTGAGCTCATCAGCAACGACTCGCTGAAGACTACCTCTGTCGTTTCAATCGATTCCTGGCTGAACGTCAAGTCAAATGCCTGCGAGTTCGAGATCGAGTCCATTGGCTGCGGGGAGTACTTCGGCTTCACAGTTATGGGGCCAAACTCAAGGTTCCTCCTCGGGGATTTCACAGTCACACACAAC

SEQ ID NO: 2067 - protein, 1155 aa, B.subtilis M1918 (prophage)
  Intein encoding nucleic acids 9
TGCGTTACGGGGGAGACGCTGCTGCTGACGGAGAATGGCTACGAGAAGGCCGCTGATCTCTACAAGAAGCAGAACAATCTGAAGGTTGTGATCGACAACAGGACAAAGGACTTCGCTGTGGATAGCAAGGGCACCACGATCGTCGACGCTATTCCAATGCAGCTGACGAAGAAGGATGCCGAGATCTTCAAGGTCAAGACCAAGCAGGGCTACGAGATTCGCGCGACGGAGTGGCACAAGTTCTACGTTAAGAGGGACGGCGAGATCCAGAAGCTGCAGCTCAACCAGCTGAAGACCGGGGATAAGCTCCTGGTCCAGTCCGCTGAGGGCGCTTACGGGAAGATCCATGAGCCCGACCTCGCCTACATTATGGGCATCATTGCGGGCGATGGGACCATCACGGAGAAGACCGCCAAGATCTACCTCTACGACAACAAGAAGGTGCTGGAGCAGAAGGTTACGGATGCGGTGCACAGGATCATTCACAAGCATAAGGTCGACCGGGCTTACAAGCATAATACATCACTCCTGCCAACTTTCAACATGGCGAATCCTGAGAAGCAGGACCTCCTGTACATGAACTCCACAGTTCTGTTCGATATCCTCAAGAAGTTCGGCATGAATAAGGAGCGCAAGACTAGGGTCCCGGAGTTCATTTTCCAGGCCAACAAGGAGACACAGGCCGCGTACCTGAGCGGCCTCTTCCAGACTGACGGGTGCGTGAACGCGAATCACAAGGCTAAGGCCCTGACCATCGAGCTCACGTCCATTCATTACGAGAGCCTGCAGGATGTTCAGAAGCTCCTGCTCAATATGGGCGTGTACACAACTATCTACTCGAACAATAAGCGGTCTCAGGAGCTGCTCCCAGACGGGAAGGGCGGGTCGAAGCTCTACAACGTCAAGCCCACCCACAAGATCTCAATTCAGGATCGCAACTCCCGCGAGCTGTTCATGAGCATCGTCGAGCTCAAGGACTACGATGTTTACAAGTTCAACCTGCTCACAGAGACTCTCCAGCCGAAGTCGCGCAAGCCCAAGCACGACTTCACGGCCGAGATCATTTCTATCGAGGAGGACGGCGTGGAGGATGTCTACGATACTACTCAGGAGGATTACCACTCTCTCATCTTCAATGGCATCGTTACGGGCAAC

SEQ ID NO: 2068 - protein, 1110 aa, Chlorochromatium aggregatum
  Intein encoding nucleic acids 10
TGCGTTACCGCTGACACACTCATCGCTACTGACAGGGGGCTGGAGAGGATCGGCAACATCGTGGGGGAGTCTAGGGGCATCAAGTCTATTGACGGCAAGCTCCACTGGGTCGAGAACATCTTCCCGACAGGGACTAAGCCCGTTTACCAGCTGAGGACCAAGTCTGGCTACCAGCTGAAGCTCACCGGGGATCATGTGGTCTTCACGGAGAATAGGGGCGACGTCAAGGCTTGCGAGCTGAGGAAGGACGATATGGTCCGGCTCGTTGGCGCTCCATTCGGGAAGGAGACCACGGGCTCCACAGATATCGCCCAGCTCATTGGGCTCCTGACTGGCGACGGGTGCATCACAACTGCCAACGAGATTGCTGCTTCGGGCGAGCAGAGGAGGACCGCGTTCCTGACGGTTTCTAAGGCTGAGCAGGAGATTGCGGAGTGGGCTAACCAGTTCATCAATACGCTGAGGCCGGAGCTCGGCGAGCACAATAAGTCGGGGTCTGTGACCGAGACGGCCACCACGGCGCGGGTTGCTGTGGGCTCCCCACGCATCCTCAAGCAGTTCGAGGCGTTCGCTGTTCTGGATAAGGGCAGCGTGCATAAGCTCTTCACAGACAAGGTGTTCCAGCTGGCTCAGTCGGAGCAGGCTGCTCTCCTGAGGGGCCTGTTCACAGCTGACGGGACTGTCGCCAACTACTCCGATAAGTCCCAGTACATCGCTCTGGACGCTACGAGCCTGGAGCTCCTGCAGCAGGTCCAGCTCCTGCTCTTCAACTTCGGCATCAAGTCCAAGATCTACGAGAATAGGAGGGTGGGCGAGCTCGTCTCCCTGCTCCCAGACGGGAAGGGCGGGATCAAGGAGTACCCTGTGCAGCAGATGCACAGCCTCAGGATCTCGCGGTCCAGCCGCATTCTGTTCGAGCAGCAGATCGGCTTCATGGCCGAGTCGAAGAAGTACGAGGCCCTGGCGGAGCTCAACCGCACAGTGTCCACTTACAGGGACAGCGCGTACGATGCTGTCGCCTCTCTGACCTACTCAGGCGAGGAGGCCGTTTTCGATCTCACGGAGCCGGAGACGGATCATTTCATTGCTAATGGCATTGGGGTTCATAAT

SEQ ID NO: 2069 - protein, 828 aa, Chloroflexus aurantiacus J-10-fl
  Intein encoding nucleic acids 11
TGCCTCCATGGGGATTCGCTCATCGTGACAGATCATGGGCTCGTTCCTATGCGGGAGGTCGTGAATCATCGCCAGCGGCTGCAGGTCTCAGACGGCGAGAGGCAGCAGACAGTGTACGACTGGAACCGGTTCGCCGATTACCCAACCGTCACGATGAGGACCAGGGCGGGCTTCACACTGACTGGGTCCCACAATCATCGCATCATGCTCGCTGACGGCACCTGGAGGAGGCTGGACGAGCTCCAGATCGGGGATCGGGTGCGCATTGCTGGCGGGACCGAGCTGTGGGCTACGGAGCCAGCTCTCCTGAGGTGCAGGAGGCCGCTGCCCAGGGTCCTCGTTACCGCTGGCGCCCCGGCCGCGACCACGTCCAGCCCCCACAGGCGGGGGTACAGGAGGGCTGCTGCTGTGGTCGTTGACGAGAAGCTCGCTGCTGCTATCGGCAGGCGCTGCGTTACGCATGCTGACCAGCAGGCCCTGGATGCGATTAGGAGGTCGCCAAGGCCTCAGGTGGTCGCGTTCCTCCGCGCTTTCTGCCAGGGCGCTGGGCAGTCGGTCGCTTCTGGCCTGACCCTCACGTGCGCTGACGCTGATCTGGCCACAACTGTGCAGCTCCTGCTCACAAACCTGGGCGTCCTCGCGCACAGGACTGACACCACGGTTCGGATTGATAATGGCGACGATCTGGAGAGGGCTTACACAACTCTCGCCACACCGACTGGCTGGACCGACGAGGTTGTGGCGCTGGAGCATGGGACGGCTGATGTCTACGACATTTCTGTTACTGCTACTCATCGCTACGCTGCTCAGGGCTTCATCAACCACAAC

SEQ ID NO: 2070 - protein, 438 aa, Coxiella burnetii
  Intein encoding nucleic acids 12
TGCGTGACAGGGGACACTCTCATCTGCCTCGCTGACGGGCGCCGCGTTCCTATTCAGGATCTCGTGGGGCATTCGCCGGAGGTTATTGCGGTCGACGATAAGGGCCGCCTCGTTTGCGCTAAGTCAGAGGTCATCTGGAAGGTCGGCGAGCGGTCCGTTTTCGAGATCAAGCTGGCTTCCGGGAGGAGCATTAAGGCTACCGCTGAGCACAGGCTCCTGGCGTTCAAGGGCTGGAGGCATGTTAAGGACTTCAAAGTGGGGGATAGGCTCGCTATTGCTCACCAGGTCCCAGAGCCAGACAGGCTCCTGCAGCATTGCCAGTCGGACCTGTTCTGGGATAGGATCGTGTCGATTGAGGAGAAGGGGTCTGAGGAGGTCTACGATCTCACAGTTCCAAAGTACGCTTCTTGGCTCGCGGATGGGGTTGTTTCACATAAT

SEQ ID NO: 2071 - protein, 1368 aa, Chlamydomonas eugametos (chloroplast)
  Intein encoding nucleic acids 13
TGCCTGACATCGGACCATACGGTTCTCACTACAAGGGGCTGGATTCCTATCGCTGACGTTACTCTGGATGACAAGGTCGCTGTTCTCGACAACAATACGGGCGAGATGTCCTACCAGAACCCACAGAAGGTCCACAAGTACGACTACGAGGGCCCTATGTACGAGGTTAAGACTGCCGGGGTCGATCTGTTCGTTACCCCAAACCATAGGATGTATGTGAATACCACGAACAATACAACTAACCAGAATTACAACCTCGTTGAGGCTTCCAGCATCTTCGGCAAGAAGGTGCGGTACAAGAACGACGCGATCTGGAATAAGACCGATTACCAGTTCATTCTCCCGGAGACAGCCACTCTGACCGGGCACACGAACAAGATCTCGTCTACACCGGCGATTCAGCCCGAGATGAACGCTTGGCTCACGTTCTTCGGCCTGTGGATCGCGAACGGGCATACCACGAAGATTGCCGAGAAGACAGCGGAGAACAATCAGCAGAAGCAGCGCTACAAGGTCATCCTGACGCAGGTGAAGGAGGACGTCTGCGATATCATTGAGCAGACACTCAACAAGCTGGGCTTCAATTTCATCAGGTCCGGGAAGGACTACACGATTGAGAACAAGCAGCTCTGGAGCTACCTGAATCCGTTCGACAACGGCGCCCTCAATAAGTACCTGCCCGATTGGGTCTGGGAGCTCTCATCCCAGCAGTGCAAGATCCTCCTGAACAGCCTCTGCCTGGGCAATTGCCTGTTCACTAAGAACGACGATACCCTCCACTACTTCTCCACCAGCGAGAGGTTCGCTAACGACGTGTCGCGCCTCGCTCTGCATGCTGGCACAACTTCTACTATCCAGCTGGAGGCCGCGCCATCAAACCTGTACGATACCATCATTGGGCTCCCTGTTGAAGTGAATACCACGCTGTGGCGGGTCATCATTAACCAGAGCTCGTTCTACTCGTACTCTACTGACAAGTCTTCAGCCCTCAACCTGAGCAACAATGTTGCGTGCTACGTGAACGCGCAGAGCGCTCTCACACTGGAGCAGAACTCGCAGAAGATCAATAAGAACACTCTCGTCCTGACCAAGAACAATGTTAAGTCACAGACGATGCACTCCCAGAGGGCTGAGAGGGTGGACACGGCTCTCCTGACACAGAAGGAGCTCGATAATTCGCTGAACCATGAGATCCTGATTAATAAGAACCCGGGCACCTCTCAGCTGGAGTGCGTGGTCAATCCCGAGGTCAACAATACGTCCACAAACGATAGGTTCGTGTACTACAAGGGGCCGGTCTACTGCCTCACTGGGCCTAACAATGTTTTCTACGTTCAGAGGAATGGCAAGGCTGTTTGGACTGGCAAC

SEQ ID NO: 2072 - protein, 1035 aa, Carboxydothermus hydrogenoformans Z-2901
  Intein encoding nucleic acids 14
TGCGTTACGGGGGACACTCTCGTTTTCACTGACAAGGGGCTGATTGAGGCTCGCAAGCTGGAGGTCGGCATGAAGGTCTGGTCGGGGGACGGCTGGAACGAGATCAAGGAGGTCATTAACAATGGGGTGAAGCCGGTCCTGAAGCTCAAGCTGAAGACCGGCCTGGAGATCAAGGTTACGGAGGAGCACAAGATCTTCACAGGCGAGGGGTGGAAGGAGGCCAAGGACCTCAAGGTTGGCGATAAGCTCTACCTGCCGGTGTCTTACCCCGAGCTGGACTTCCCCGTCAAGGAGGAGAACGATTTCTACGAGTTCCTCGGCTACTTCCTGGGCGACGGGTCACTCTCCGTTAGCAACCACGTGTCCCTGCATGTCGGGAATGACAAGGAGCTCGCGCTGTACTTCAAGGAGAAGGTTGAGAAGTACGCTGGCGCTGCTTACCTGATCGAGAGGGACGGGCAGTACATCATTGATGTGCATCGCAAGGAGTTCGCCGAGAAGATCAAGAAGATTTTCGGCATCGAGATTACCGACTCGAAGGAGAAGGATATCCCGTCCAGCCTCCTGGCGGTGAACTCCGAGGCTATGAAGGCTCTCCTGAGGGGCCTCTTCTCGGCTGACGGGTCTGTCTACGATGCTAATGGCTCTATCACAGTTGCCCTGTCGTCTACTTCATACCCACTCCTGCGGAAGGTCCAGATCCTCCTGCTCTCACTCGGCATTCCTTCCACACTGACTGGGGAGAAGGACCAGGATGTGAAGATCATTAAGGGCAACGAGTACGAGACCCTCCCAACGTACCGCCTGATCATTAGCGGGGAGAGGGCCTCGCTCTTCTTCAATAAGATCGGCCTGATTGGGGAGAAGAAGAAGAAGTTCCTGGAGCTGATGGCGGGCAAGACCACGTACTCCACCCTCAACAATCACCTGTACCAGGAGATCGTGAGCATTGAGCCCGCTGGCGAGGAGGAGGTCTTCGATATTACAGCTCCACCAAAGTACACTTGGATTACCAATGGCATTCTCTCTCTGGAT

SEQ ID NO: 2073 - protein, 405 aa, Clostridium thermocellum
  Intein encoding nucleic acids 15
TGCTTCGTGGCGGGCACTATGATCCTGACAGTCGCGGGGCTGGTCGCTATTGAGAATATTAAGGCGGGGGACAAGGTCATCGCTACTAACCCGGAGACATTCGAGGTGGCTGAGAAGACCGTCCTGGAGACCTACGTGCGCGAGACCACGGAGCTCCTGCACCTGACGATCAATGGCGACGTCATTAAGACAACTTTCGAGCATCTCTTCTACGCCAAGGATGTCGGGTTCGTTGAGGCGAAGGAGCTGCAGGTCGGCGACAAGCTCCTGGATTCCAAGGGGAACGTGCTCGTGGTCGAGGACAAGAAGATCAAGATTACCGATGAGCCCGTTAAGGTGTACAATTTCCAGGTTGATGACTTCCACACATACCACGTTGGGTGCAATGGGGTTCTCGTTCATAAT

SEQ ID NO: 2074 - protein, 999 aa, Clostridium thermocellum
  Intein encoding nucleic acids 16
CAGCTGGCTCTGGACACTCCTATTCCTACGCCTGACGGGTGGACAACTATGGGGGAGATCAAGGCGGGGGACAAGGTTATCGATGAGAAGGGCAGGCCGTGCAATGTGGTCGCTATCTCCGAGATTGACGATACAGAGCAGGCCTACAAGATCAACTTCCGGGACGGCACTAGCATTGTCGCCGGGGAGCGCCACCTCTGGAAGGTTCAGGTGACCAACAATGGCAGGAGGGAGAAGCTCCTGACCACGGGGGAGATGTACCAGAAGCAGTTCAAGACCAAGTCGAAGGAGAATCGCGCGCTCTTCAGGATCCCAATTGCCGACGCGTTCATCCTCCCTGAGAACAAGCTGCCGATTGATCCCTACCTGTTCGGCTACTGGATCGGCAACGGGAATGCTGTGAAGCCGGAGATCACAGTCATGCGCGACGATGTCGACGAGGTTATCAAGAACATTCCCTACAAGCTCCATAATAGGTACAAGCAGGAGGGCAACTCAGACATCCTGGTTTACAAGGAGCTCAAGTCCATTCTGGTGAAGAACTTCAGGGAGAAGCGGATCCCAATTGAGTACCTCAGGGCTTCTGCTCAGCAGCGGAAGCGCCTCCTGCAGGGCCTGATCGACTCAGATGGGTGCGTCTCCACAGCCAAGAGCCAGGCGATCTACGTTACTATTCTCTTCGAGCTGGCCAAGGACGTGCAGGATCTCCTGTGGAGCCTCGGCATCAAGAACACACTGAAGACTGCTCCATCGGCTCGCTACGGCATCGAGACCGGGGAGATCTGCTACCTCATTAAGTTCACGGCGTTCAATGACCTGGAGGTGAGCGGCCTCGATAGGAAGCTGAAGAGGGGGCGGGAGCGCAACATCAAGACCCGGTCGCACTTCCATTACATCAAGTCTATTGAGAAGACCGGCAAGACGAAGATGCGCTGCATCCAGGTTGATTCTCCAAGCAGGCTCTACCTCGCTGGCAAGTCTATGATTCCAACACATAAC

SEQ ID NO: 2075 - protein, 1008 aa, Chlorella virus NY2A infects Chlorella NC64A, which infects Paramecium bursaria
  Intein encoding nucleic acids 17
TGCGTGGCGGGGGACACTAAGATTCTCACATCATCGGGCTACCATCCCATCAAGGACATGGAGGGCAAGCAGGTTCGGGTTTGGAATGGCTACGAGTTCTCGGAGACAATCGTTCACAAGACTGGGGTGAACCAGAAGCTCATTATGGTGTCTCTGGACGATGGCACCGAGCTCAGGTGCACGCCGTACCATAAGTTCTACATCGAGACCGGGTCGCGGCCAGCTGACAAGTCTCGGGTCATGGAGGTTCGCGCTGGCGACCTGGAGAAGGGGGACCGCATCATTAGGTTCGAGCTGCCGACAATCACTGTCGGCGAGACCACGATGAGCGACAAGGAGGCCTACACAAAGGGCTTCTTCTCTGCGGATGGGTGCGTCATTAAGTCAAAGTACGGCGAGGATGAGTACAGGATCTCGGTTAAGCGGGAGGACAAGATTGAGGCTCTGACGAAGTATGTGGATGTGATCAAGTCCCACACAAACCGGTTCCGCACTCATTTCTACGTGCCAGACTACGTCCAGAATAAGTTCGAGGTCCCTATCAACTCAATGGTTAATGAGAAGATTTCCTGGCTCGCCGGCTTCATGGACGGCGATGGGTGCGTTATCCGCTACAAGGACATTGAGAACATGCAGGCGGTGTCCATCAATAAGAGCTTCCTGCAGGATATTAGGCTCATGCTGCAGACCATCGGCATTCACTCCACGATCAACAAGTTCATGCCGAATCGCGTGATGAAGATGCCCGATGGCAGGGGCGGGACCGACATGTACAACGGGGCTGAGAGCTGGAGGCTCCAGATCGACTCGGAGGGCGTCCGCAAGCTCTTCGCTCTGGGGTTCACGCCGCGCAGGCTGAAGATGAACGGCTCCAGGAAGCGGCACCATAAGACCAATAAGTTCACGCGCGTGGTCAGCGTGACAGACCATGGCGATGTCGAGGACACTTACTGCTTCAATGAGCCAAAGAGGCACATGGGGGTCTTCAACGGGGTCATTACGGGGCAG

SEQ ID NO: 2076 - protein, 1182 aa, Crocosphaera watsonii WH 8501 (Synechocystis sp. WH 8501)
  Intein encoding nucleic acids 18
TGCTTCGATGGCAAGACAAAGATTCTCACAAATCAGGGGTTCATGACGCTGCGGCAGGTTTACGAGCAGGGCTACGAGGGGCTCTCAACGCTGTCACTCAACACCAAGACGCACAAGATCGAGTGGAAGCCAATTCTGGACACCATGAAGCGCCAGTCCGAGATGATCGATATTTCCGTTAGCCAGACTGGCAGGATCACCGACAACACGCTGCGGCTCACCCCTGATCATAAGATGGTCAATCTCAGGGGCGGGAAGTACACAAAGACTGAGATCCAGGACCTCCTGAAGCAGCAGGAGATGCTGACTGTGGCCCAGACCATCCCGAGCCTCGGCAACAATAAGCACCAGGAGGCGGACCTGGCTTACTTCCTCGGCGGGATCATTACGGATGGCTCGATCTACACATCCAGCACTCGGGGGGAGGTCCAGTTCATCCAGAAGGACGTTCCGGAGAAGCAGGCTTTCATTTCGAAGATGAACGATCTGGCCAATTCGCTCTACGGCAAGTCTTTCACGGCGCACATCAAGCCCGTGTCGTCTTCATACATTAGGGGCCAGAAGGTCACGGGGCAGGCTACAGCGTACAGGCTGCATTCCAAGGCTATCGCCTACGACGTCAAGGAGCGCGAGAACAATATTACACAGCTCCTGCTGGAGAACGAGGCTGAGCTGTCTTACCATTTCCTCGGCGGCGTGATCGACGGCGATGGGTGCTACCACAAGAACAGGCTCCATATCTACATTTCAGAGGAGAATCTGCTCCAGGCCGTCATCATTGCGTGCCTGAAGATGAATACTGTGCCGCAGGTCACCAAGAACCGGAATATCTACCACCTCCAGATTGTGGAGAAGCTGGAGGTCATCCTCCGGTACACCCAGCGCGTCAAGGGCGAGGTTACCCCCAGGACGATCCAGACACGGTTCTTCGCGACGCGCCAGCTGTTCGAGAACCAGGAGACAGGCCAGATCAAGCTCCGGCAGGACAACAATTGCCTGATTTCTGATAAGCAGCTCCGCGAGATGGGCGAGTTCGAGGAGCTGATCGACGGGGATACTCGCATGCAGAGGGTTATTCAAGTGGGCGAGAAGAGCGACGGGGATGTTTACAACATCACCGTGGCGGAGCATCATAACTACGTCGTTTTCACAGCCAAGTACACACCAGTCGTCGTTTGCAAC

SEQ ID NO: 2077 - protein, 1041 aa, Crocosphaera watsonii WH 8501 (Synechocystis sp. WH 8501)
  Intein encoding nucleic acids 19
TGCGTCGCGCCGGAGACAAAGATCCTCACAGACAGGGGGCAGATCGCCATCGCTGACGTCGCGGGGGAGAAGGTCAATATTTGGAACGGGTCGGAGTGGTCTGAGGTTCTCGTGAAGAAGACAGGCGAGAACCAGCCGCTCCTGAAGGTGCACTTCTCAAATGGCGAGTCCCTGGACTGCACTTACTACCACAAGTTCCATGTCCAGGAGAACTACAAGGGGAAGGTCAAGATCGTTGAGGCTAAGGACCTCCAGGAGGGCGATAAGCTGATTAAGTACCGGCTCCCACTGGTGGAGTCCGAGAATGACATCGATTTCCCTTACGCCTACACCAGCGGCTTCTTCTCGGGCGACGGGTCTCATGATGGCATGGGGAAGCCGGAGATTGACCTCTACGGCGAGAAGAAGGAGCTCCTGCCCTTCGTCACGGTTAGGAACAAGTACTACGGCGGGTCATACGGCGACAAGTCCTGGCGCATCGAGAGGGATGAGGTGGCCGTCTACGACGATGTTAACCAGGACCGGATCGTGTGCAAGCTCCCGCTGGATATTCCCGCGAAGTTCACAGTTCCCGTGAATGGCTACACTATCCAGAGCAGGCTGGAGTGGCTGGCTGGCCTCCTGGACGCGGATGGGACAGTCGCTAGGAACGGCGACAATGAGAGCCTGCAGGTTGCGTCGACCCACCAGCAGTTCCTCCTGGACATCCGCCTCATGCTGCAGACGCTCGGCGTCGACTCTAAGGTGGTCAAGATGGATGAGATGGGGTACAGGTCGCTGCCAGACGGCAAGGGCGGGTACCAGGATTACTTCTGCCAGGCGAAGTACCGCCTCCTGATTTCCAGCAACGGCCTCTTCCAGCTGGGCGAGCTCGGGCTGAAGACCAACAGGCTCCAGTGGAATCTGAGGGAGCCTCAGAGGGAGGCTTCCCAGTTCATCAGGGTGGAGAAGGTCGAGCTCACCTGCCGGTACGACGATACGTACTGCTTCTCAGAGCCAAAGAGGCATCTCGGCATGTTCAATGGCATCCTCACAGGGCAG

SEQ ID NO: 2078 - protein, 1821 aa, Debaryomyces hansenii CBS767
  Intein encoding nucleic acids 20
TGCCTCGCTTCGGACACTCTCGTTCGCACATCGGAGGGGGACAAGCCAGTCGCTGAGGTCGCTATCGGGGACTACCTGCTGGACGCTGAGGACAAGCCAGTCCTCTGCATGGGCGCTAACCCTTCCCAGACCGGGCGCATGAAGGAGATCGCTTACCAGGACTTCGATTCGAAGAAGAGGGTGTCTTTCAAGTGCACACCGGACCACCACCTGGAGCTGACACTCACTGATTCCACTCCCTCCCTCAGCGGCAAGTCAGTCACCTGGTTCTCCAGGTGCACGGGGGCTCACCTCAGCGAGGAGGTGTCGGAGGTCTACCTGGACAACATGGTTTCGATCTTCTACAATGATCTGGTTGACTCGACGGATTCTGCGGTGGACAAGGATTCCATTCACGAGGCCGTGGACCTGGCGCTGGAGGATCACTACCATAGGGGCAACTCTGACCAGTACTCAATCCATCTCAATGAGTACATCAGCCGGATTGCCGATAAGGAGCTGCAGAACGAGCCGGAGTTCATCCGGGAGTGCATTCACGACGCCGCGAATCGCTTCGTCATCACCTCCAGCGGCAACAGGAATATTAAGTCGGAGTCTTTCGACGATAAGCTCCTGCTCTCACGCTCCAGGTCGTCTACAGCTGACAGCGATTCGGACTACGTGATCACTGACGCCTCCGTCCACTCTCATTCAAACAATTCATCCGTCTACCTCGCCTCACCAGACTCCATGATCCCTGATGGCGCTGCCAACCGCTTCGAGAATATTGCGTCCAAGCTGAAGGAGCCAGTGTGCAACTGCGGCGGGATCCGGAAGATTTTCCGCAGCTTCGGCACCACGGAGGACGCTGAGCTCGCTTACTCCCTGCTCCTGAGCGAGCACTACTACAGGCTGGACCCACGGTTCGTCACAGATGGCTACACTTTCCAGGCCTCGGTTGAGCAGTACGAGAACATGTGCTCTCAGGAGGTGCAGAATATGCACCTGAAGCTCTACCGCTCACCTCTCAAGTTCGTGGAGAGGGAGCATAACTCCGCTGAGCTGCCAGTCGACCCATACTTCCTGGGCCTCTGGCTGGGCGATGGGGACAGCTCGGGGACAACTATCATGACCACGGATCGGGAGATTGTGGTCTGGCTCAACTCCTACGTCGAGCGCCTGAACCAGAATAAGCCGGAGGGCTGCTTCCCCCTCAAGCTGACCGAGCAGCTGATCTACGGCGCTGGGCACACGTCCAAGAGCGGGCATACAACTAAGGTCGACGTTAGGAATTACAAGATCTCTTCAGGCGATGCTTTCGTGCGGTCGGGGACATACTGGAACCCGATTTTCGACGGCCTCAAGAAGCTGGGGCTCCTGAACAATAAGAGCGCTGGCATCCCCCAGGAGTACATGAACTCTGACGAGCAGAATAGGCTCTCAGTTATTGCCGGCCTGATGGATTCCGACGGGTGCTACGTGAAGAGCCACAACACCTACCGCTTCACCCAGCTCACGGAGGACCATAAGAAGATCGTCTACGATCTGAAGGAGCTCGCCCTGAGCTGCGGCATTAACACCACGGGGGTCGAGCTCTCGGTTAAGCCGCTGGGCTTCAATAAGCACAAGCATTCTACCGAGTATGTGGTGTACCTCGGCAACGGGAGCCAGAAGTTCCAGGAGCTCCTGCTCCTGCCACGGAAGAAGATGGAGATCAGCAAGAAGCACGTGTCGCTGGACGCGCGCCCTTTCACGGTTAGCGACGTGGAGGATGGCGAGTTCCGGGCTATTGAGGTTTCAGGGGGGGTTTTCCAGCTCGCTAATAGGCTCGTGGTTGCTAAT

SEQ ID NO: 2079 - protein, 882 aa, Frankia species CcI3
  Intein encoding nucleic acids 21
TGCCAGCCATACGACGCTCTCGTTTCAACGCCATCGGGGCTCGTTCCTATCGGGGCTCTCGTGGAGACAGACGCGGTCGGCATGAAGGTGTTCGATGCGCACGGCCTCACACAGGTCATTGCTACTAAGAGCAACGGGGTTAAGGACGTGCTGAGGATCTGGACCCGCGCGGGCCACGCTCTCGACGTCACGGCCGATCATCTGGTTTGGAGGTCCACAAGCGCTGGCGCTGGGGCTTTCGTGCCAGCTGGCGCTCTCAGGGCTGGGGACACACTGGAGTGGCATAGGACTATTGCTCCAGGCGAGGGGGAGATCACGAGCCGCGAGATTGCTGAGGCTGCTCTCGCTGGCAGGCTGCAGGCTGATGGCTTCGTCGGGCGCTACGCTGGGACCAATGCTTCGCTCACGATCGAGGCGATGACCGTTCCAACGAGGCTCTACGACGCTCCACTGCCAGTGGTCGCTGCCTACCTCAGGTCACTGTTCCAGGCTGATGGCTACGTCTCGCGCAGGGAGAGGTCTACCCTCATCGGCCTGGACATGATTTCCGAGGGGCTGATCAGGGGCGTTCAGGGGCTCCTGGCTAGGTTCGGCATCTTCGCCAGGGTGCGGAGGGAGGCTGATCCACGCCCTGACAGGCACGATCTCTGGTCCCTGGGCATTCAGAACGCTGGGGACAGGCGGACCTTCGCCGATGAGATCGGCTTCCTCGACCCAGTGAAGGCGGCTAAGCTGGAGGCTTCCTTCGACCAGCCAGGCCAGGCTGCTAAGCCTGTCAAGAGGCTCCAGATCGAGAGGATTGAGCCGAGGGGCCCGATGCCCGTCTACGACATTCAGACAGATTCCGGGGAGTACCTCTCTGCTGGGCTCAGGGTTCATAAC

SEQ ID NO: 2080 - protein, 1338 aa, Gemmata obscuriglobus UQM2246
  Intein encoding nucleic acids 22
TGCGTGGTCGCGGGCACTGAGGTCACAGACGCTGAGACAGGGGCGGTCGTTACGGTCGGGGAGCTCTTCGAGTCGCGGAGGGCGGTCACAGTCCACGCTCTCGGCGCTGACAGCAAGCTGAGGCCAAGGCCTGTTACTGATGTGGTCTGGAACGGGCGCAAGAGGGTGTACCGCCTCACCACGGAGCTGGGCAAGTCGATCACAGCCACTGACAACCATCCTTTCCGCGTGCTGGATGGCTGGAAGAATCTCGGGGAGCTGAAGCCAGGCGACAGGATCGCTGCTCCAAGGAGGCTGGCGGTCCCTTCGGCTGGCACCTGGCCGCAGCACGAGATTGTTGCGCTCGCTGGGCTCCTGTCTGAGGGCAACACGTGCCATCCCACAACTCTCTACTTCTACGGGAATGACCGGGTTCTGATCGACGATTTCGCGCGGGCAATTGGCCAGTTCCCCGATACAGTCGCCAAGGTTTACGCTAGGCCAAACAGGAGGAACCTGGAGGTGCGCGCTAACACAGGCAGGGACACTCGCCTGAAGTCAAGGGCGGAGAGGGATGCTGCTGTGGCTCTCCTGGCTCCACCAACGAGGTCCGGCGCTTTCGTCTGGGCTCAGAGGCTCGGCATCCTGGGGAAGACCGCTACGGAGAAGTTCGTGCCTCACGACGTCTTCCGGCTCTGCGACAGCGATCTGGAGCTCTTCCTGGGCAGGCTGTGGGCTGGCGACGGGTTCATTGCTAATGATACCCTCAAGGTCCCGTTCTACGCTACGTCCAGCAGGAGGCTCGCTCAGGACGTGCAGCACCTCCTGCTCAGGCTGGGCATCGTCGGGAGGATTCATGAGAAGCAGTTCAAGTACAAGGGCGGGCTCAAGCCCGGCTTCACAGTGCACCTGATCGGCGACGGGGCTGCTGAGGCCTTCCTCGATAGGATTGCTCCACACTGCCTGGGGAGGGAGCATGCTGTCACTATCCTCAGGGAGCATGTTGCTACCACGGCGAGGGGCCTCACCTCCAAGGACACGGTTCCGCTGGAGGTGCGCGCTTGGGTCGACGATGGGAGGAGGGCGAGGGGCCTCACCTGGGACGAGCTGGAGCAGCAGTCGGATGTCTCTACACAGGAGTTCTACGGCACTCCAGCTCCAGGCAAGAAGGGGTTCCGGAGGGCTACGATCGCTAAGCTCGCTGCGTTCTTCGGCTCACAGAGGCTGGCTGCTGTTGCTGACTCCGATGTGTTCTGGGACAGGGTTGTGAGCATTGAGTACGCGGGCGTGCAGGATACCTACGATCTCACAGTGGATGAGGATCATAATTTCGTTGCTAATGGGCTCATCGTTCACAAT

SEQ ID NO: 2081 - protein, 861 aa, Gemmata obscuriglobus UQM2246
  Intein encoding nucleic acids 23
TGCCAGCCTGCGGGGACACAGGTCGCTAAGGTTATTAAGGAGGGGAGGTGGAGGGAGGATTCGGTTATTGAGCAGGTTCCTATTGAGTCACTCCAGCCAGGCGACAGGGTGGTCTCCTTCGGGAACGCGAAGATCTACCGCAGGGGCCGCGCTGTGACAGGGATTACTTCCCGGCGCCACACAGGCAATCTGCATAGGGTCGAGGTTGGGGAGTTCCGCACCAGGGCCACGCCAGAGCACAGGTTCACCGTCCGGTTCGACCCAGCTAGGCCTAAGGCTGGCCTCCTGTACCTCATGAGGAGGGGCGATAGGTGGAGGGTGGGCGTCTGCGGGATGTTCAACTCGCGCGGCTTCGGGGTTTCCGTGCGGCTGAGCCAGGAGAGGGGCGACGCTGCTTGGGTGCTCGGGGCCTTCGCGACACTGACTGAGGCTAGGATCGCCGAGCAGGTTGTGAGCTGCCGGTACGGCATTCCAACCACGGTCTGGGAGACCGGCAGGAATCCTGGGGCTTCGTGGGCTCAGAGGGACCAGGCTGGCATCGATGCCATCTACCAGAGGCTCGGCGTCGATAGGATCCGGGCTGGGGTTGACAGGCTCCTGAGGGATCACGGCCTCTCTGCTGGGCTGCCACTCCTGGCTGCCAACGAGCCCGGCAATTTCTCGTGCAGGCAGTCTAGGCAGGTGGCTGCTTGCAACCTGGTGCCAGGCGTCATGCAGGTCCCAGTTCCAACGGCTGGCGAGAGGTTCGAGTGGAGGGACCTCACCGCTACGAGCTTCGAGAGGGTTCATGATCTGGAGGTGTGGAGCATGGATGTGGAGAGGGATAAGCATTACGTTGCGGATGGCATCGTTGTGCATAAC

SEQ ID NO: 2082 - protein, 1236 aa, Gloeobacter violaceus, PCC 7421
  Intein encoding nucleic acids 24
TGCTTCGCTGCGGGGACGCTGCTGCATACTGAGCAGGGCTACGTTCCGGTGGAGCAGGTCGTGGCGGGGGTCGGGACAAGGGTTTGCACACACCAGGGCTTCCGGAACATCTCTGAGCGCTTCGATAATGGGGAGGCCGAGGTTTTCAGGGTGACCACGCGGAAGGGCTACTCCGTGGAGGTCACTGCGAACCACAAGATGGCTCGCCTCGACGAGAATGGCGATCTCCTGCTCGACGAGCTCTCACATCTGCAAGTGGGCGACAACCTGCTCCTGCTCCTGGGGTCCAATCCGGTGACCGAGAAGGTCCGGCTGCAGTGCATCCCAGCTGGCTACCGCTCCAGCATCGAGATTGCTCAGCCGCCCGAGCTCGATGAGCAGCTGGCTTACCTCCTGGGCTACGCCTACGGCGACGGGTGCGTCGGCAGGGGGGCTACATACAACTACCTCAGCCTGGCTGTGTCGCACACTTACCCGAATGTCCGCGACCAGCTCGCCGCGATCATTAGGGAGAAGTTCGGCCTGACAACTAAGATCTACTCAGGCTCCGGGGCGGTTTGGAACCTCCTGGTGCATTCCGCCAATCTCCTGGATTGGCTCAAGGCGAACGGCCTCCTGAAGCAGAAGGCTGCGGACCTCGCCATGCCAGAGGCGATTCTGCGCTCGCCTTCGTCTGTGGTCGGCGCTTTCCTGTCTGGGTACTTCGACGCTGATGGCTGCGTGAGGGGCGGGAAGGGCGGGTACGGGTTCGATTGCACGAGCAAGGCTTTCGTCGGCGCTGTTCAGCTCCTGCTCCTGGCCGAGGGGATCGTGTCCAACCTCCACACCACGGACCGGAGCCGCCAGGGCTGGCGCACAATCTACAGGCTCAATGTCTGCGGCACCGAGTTCAAGCGCAGGTTCCAGACGCTGTGCTGCAGGTCTGCGAAGGTTGTGCATTCACCAATGGTGCTCGGCAGGGATGGGACCGGCGGGTACCCACCTGCTCTGGTTAGGGGCGCTTCGTACCAGAGGGTCGTTGCTGTCGGCGGGAAGCACCTCCTGTACACGGCGCTCCTGAAGGTCATCGAGAAGACAAGGACTGCTGGCAAGCAGGCTCTCGCTGAGAGCCTGTGCCAGCATGTCAACTACTTCCCGGACCCCATCGTCGCGATTGAGTCGGTTGGCACGCAGAGGGTTTACGATATTGAGGTGGAGGGCATGCATCTGCTCGGCAATGGCATCTACACAAGCAAC

SEQ ID NO: 2083 - protein, 1476 aa, Halorhodospira halophila SL1
  Intein encoding nucleic acids 25
TGCCTCGCCTACGACGCGGAGATCGTTCAGGCTGACGGGGGGGTTAAGACTATTGAGCAGATCGTTAGGGAGCGGCGGGCGCATCTCGCTACGGTCGGCGCTGACTGGAGGCTGACATGGACTGAGCCGTGCGATTACGTTGACGATGGCCACAAGCCCGTCTTCGAGGTTACCACGCGCCTCGGGCGCAGGATCGAGACAACTCTGACACACCCGTTCCTCACTGTCCATGGCTGGCAGAGGCTGGAGGACCTCGCTGAGGGCGATGCTATCGGGGTCCCAAGGCAGCTGCCAGTTTTCGGCCAGGAGCCCATTAGGGACTGCGAGGTGAGGCTCCTGGGCCACCTGATCGGGGATGGCGGGCTCACCGGCTCGCCACCCAGGCTGACGTCTGGGCAGGAGGCGATGACAGCTGACTTCCTGGAGGCTGTGGATGCTTTCGGCGGGGTCGAGGCTAAGCCAATCAGGGCGTCCCGGAGGACGCAGAGCTGGGTGGTCGTTGGCGCTGCTCAGGCCCGCGCTGCTGCTAGGTCCAGCTTCGCTTCACTGGTCGACGCCCTCATTAGGAGGTCCCCTCTCACCGGCAGGGCTATCGCTAGGAACCTGGGGGTGGCGCCAGCTACCCTCACGTACTGGAGGCAGGGCGTGAATGTCCCTGACGCTGCTATGGTTGGGCTCCTGGCTGGCGAGCTGGGGGTTGATGTGGGCGAGCTCAGGCCAGAGCCTGTGGCTCGCAGGAACGACCGCAATCCACTGCAGGCTTGGCTCGATAGGCTGGGCCTCGCTGGGAAGTCCGCTCACGAGAAGACTGTGCCAGACTGCGTCTTCCGGCTGCCTCGCGAGCAGCTCGCTAGGTTCCTGAACCGGCTCTTCTCGTCTGACGGGTGGGTGACACATCTGGCTAGCGGCCAGGGGCAGATTGGCTACACCACGGTCTCGGAGGCTCTCGCTAGGCAGATCCAGCACCTCCTGCTCCGGTTCGGCGTTCTGGCTAAGCTCAGGCATAGGTCCGTGCGCTACCAGGACGGCAGGAGGCCAGCCTGGCAGCTGGATATTACTCACGCGGAGAGCATCCTCACCTTCGCTGAGCAGATCGGCATTCTGGGGAAGGAGCAGCGGCTCGCCTCTGTTGCTGCTTCAGTGCGCGGCAGGAGGAGGCAGTCGCACACGGACCATATCCCCTGCGAGATTTGGCAGTTCATCGATAGGGCCAGGGGCGAGTGGACATGGGCTGAGCTGGCTAGGAGGGCTGGGGTCGCTTCATCCAATATCCACGCCTACAGGAGGGGCATGTCTAGGCAGAGGCTGGCTGCTTTCGCTGACGCTCTCGGCTCAAGGGAGCTGAGGCAGCTCGCGAGCTCGGACCTGTACTGGGATCGGATCGCCTCCATTCGCCCGCTCGGCCATAAGCAGGTGTACGATCTCACTATTCCAGAGACTCATAACTTCATTGCTAATGATGTTTGCGTGCATAAT

SEQ ID NO: 2084 - protein, 1431 aa, Haloarcula marismortui ATCC 43049
  Intein encoding nucleic acids 26
TGCGTGCATGGGGATACAAGGGTTACTCTCGCTGATGGGCATGAGCGGCCTATTCGGGAGGTCGTGGAGTCAAATCTGGATGATCCGAAGCCAGTCGACGATGGGGTTTGGGATACCGTGGACTTCGATGTCCCTTCTCTGCAGTCAGACGGCACAGTTGCGACTCAGAACGCTACGAAAGTGTGGAAGCGGAAGGCGCCGGAGACACTCTACCGCATCAGGACCGCTACGGGCAGGGAGCTGGATGTCACACCATCACACCCTCTCTTCGTTCAGTCCGACGGGAGGTTCCAGGCTAGGAAGGCTGAGGAGCTGGAGTCTGGCACCCATGTTGCTGTGCCCAGGAAGGTTTCAACTAACGCCTGCAATGAGCTCGACGTCACCTTCCGGCAGTCTCAGGCCCACAACCGCATCGACCTCGATCTGCCACCACAGTGGACGCCAGAGCTCGCTAGGCTGATCGGGTACATTGTTGCGGAGGGCTACGTGGAGCAGAGGCCTGATAATACGGGCTACGTGTCCATCACAAACAATGACCGGGAGGTGCTGGACGATGCCAAGAGCGTCCTGGAGACTCTCAACCTGAATGTCACCGAGCGCTCCAGCCACGAGGGGAAGACGGCGAGGGAGCTCCTGTGCAGCGCTGGCGAGTTCGTGTCCTTCCTCGCCAGCCTGGACGAGACACTCCTGCAGTCGTCTGCTGAGAGGAGGGTCCCGCAGGATATTATGAGGGCTTCCGACAACGTGGTCACCGGGTTCATTCGGGGCTACATCGAGGGGGAGGGCCATGTGTCAACGTCCCAGCGCGAGATCACAGTCGCGAGCATGTCGAAGCCGCTCCTGGAGGACGTCAGGACCCTCCTGGTTACGCAGGGCATTACAGCCCAGCTGCAGCCCCGGAACAATGGGTCCTACAGGCTCAGGATCTCCGGCCAGAGCTTCCACGACTACGCGGAGCAGATCGGCTTCATTACTGCCCGCAAGACCGAGGCTTGCAGGCAGTTCGAGGGGACGCATGGCAACACAAATCTGGACATTGTGCCGAACCTGGGCCCAGAGCTCAGGCGCATCCGCGAGGCTCTCGGGCTGACTCAGAGCGAGTGCGGCCTCCCAAGGTCGACCTACCAGCACTACGAGAGGGGCAGGAGGAATCCCTCGCGGGATTCTCTGGAGTCAGTGCTCGACGCTTTCGAGACTAGGCTGGCCGAGATGAACAATGACACTCCAATTTCGGATACCGCTAGGTCTGACGGCGGGGGCACGGGCTCGCTCAGGCAGGATCTCAACGGGCTGGCTGCTCTCGTGGAGGGCGACATCGCCTGGGATCGCATCGAGTCCATTGAGCCTATCGAGCATGACGAGAAGTGGGTCTACGATCTGGAGATTGAGGGCACACATAACTACCTCACAAATGGGGTCGTCTCTCATAAT

SEQ ID NO: 2085 - protein, 1614 aa, Haloarcula marismortui ATCC 43049
  Intein encoding nucleic acids 27
TGCCTGACTGCGGATTCGGACGTTCTCGTTAGGTCGGAGAATGGGGATATTGAGCGCCAGACGGTGGACTCTCTCTTCTCGGACGGGCAGGTGGTCCTCGCGGACGGCGATACCGACATCGCTGTTTCTAAGGAGACACCGACTGTGCTCTCACTGGACGAGGCGACTGAGAGGGTGAGCGAGCAGGAGTCGACCCTCGTCTCTGAGAGGCCACTGAGGGACGATGAGAGCGTCCGCACCATCGAGACGTCGAGGGGCGCTGTCACCGTTACGGACGATCACCCAATGTACATCAGGCAGGACGGCGAAGTGACTGTCCGGCCTGCTTCCGACATTGAGGCTGGGACCGATCTCGTGGCTGCTAGGAGGCCACCAGACACGATGGTCGAGCCATCAGATGAGACGGTTCTGTCCTGGGAGACATTCGCTGCCGATTGCGACAAGCATTCTAAGCTCTACGGCGTCGACTGCGGGACAGAGCTGGCTGCTCAGAGGGCTGCGCGCGATGAGTCCCAGACTGCTTTCGCTGAGCGCTACGGCTCGTACGGGTCTGCTGTGGGCAAGTACGAGAGGGGGGAGAAGGACGTTCCGGTGTGGCTCCTGGGCGAGCTCGACATCAGGCCAGATCGGATTCACGGGCTGAACTACGAGACGTCGTTCGAGAATCCATTCCCTCTGGAGTGGTCCCCAGAGCTGGCTCAGGTCATCGGCTGCCTCCTGGGCGACGGGAGCATTCACCGGAACGACGATGAGAATGTTGTGGACGTGCGCTACCATAACACAGATGAGGCTCTCATCGAGCGCTTCGCCAGGGACATCGAGCGCCTGTTCGATATTGAGCCAACAGTCACTGACAGGCCTGGCAGGGAGAGCCACCATAAGAGGAAGTACCAGGTCGATGTTCCATCGGCTGTCGGCAGGGTGCTCGTCTGCGTTCTGGAGGCCGTGACGGAGAACGGCACACCAGGGCTCCCAGACGCGGTCCGGCCTGCTTTCGTTGGCGCCCTGTTCGACGATGAGGGCCACATCTCCCGCGAGGGGAAGGCGTTCATTAGCAATACAGACCATACTCTCCTGACCGGCGTCGGGGAGATGCTCGCTGAGATGGGCATCGAGACCAAGCTCGCGCCAGACCAGCACAAGCTGCATATTAGGGGCAGGAGGAACCTGGAGCAGTTCCTGGACCGGATCCCTATTGCGAGCGATGAGAAGTTCTACCGCGGCCTCGATGCTCTGGACGCCTACGATGTGACCACGAGGAAGGCTGAGCTCCTGGAGGCGATCAGGCAGGAGCCAAAGACCTCGGCTGCTCTCGCTCAGACTCTGGGCGTGACCAGGGGGTCCGTCAATAAGTACCTCAGGGAGCTGCGGGAGTCCGGCCACATCGAGAAGCAGATTGAGGGGTCAAACCGGTCCCTCGACGAGAATCGCACGGTTCAGTATGTGGCGGCTGATTTCGAGGGCTCCGTGTACGCTACGCTGAGGGGGGAGCCGTCCAGCGTGACAGTCGAGGACGTTGAGAGGCGGGAGTACGACGGCCCCGTGTACGATCTGACGGTTTCAGAGAATGCTCCAAACTTCGCTGTCAATGGGGGGGCTGTGGTTCATAACTCT

SEQ ID NO: 2086 - protein, 546 aa, Halobacterium salinarum NRC-1
  Intein encoding nucleic acids 28
TGCGTGCGGGGGGACACTACGGTCGCTCTCGCTGACGGGTCGGAGCGGGAGATTCGGGATCTCGTGGAGGCTAATCTGGATGACCCTCGGCCAGTTGACGATGGGGTGTGGGACGGCGTGGATGTCGCTGTTCCTTCCCTCGCTGCTGACGGCAGGCTGGTTCAGCGCAGGGCGACAAAAGTGTGGAAGCGGGAGGCTCCGGAGACAATGTACCGGGTCCGCACTGCTGCTGGCCACAGGCTCACCGTCACGCCATCGCATCCTCTGTTCGTGGCTGGGTCTCACGGCCCAGACGCCGTCAGGACGGAGGACCTGGAGGTTGGGCAGCTGGTGGGCGTCGCCCCGGACGGCGATGGGTCGGGCCAGGTCGCTCCAGACGGCGGGGTTATCAGGGATGCTCAGCCAGCTCCAGTGGGCGACGCTGAGACCGTCGCCTGGTCCGCGATCGAGAGCATTACGGAGGTCGAGCCGGATGAGGAGTGGGTGTACGATCTGGAGGTGGAGGGCACTCATTCATACCTCACGGATGGGGTCGTTTCACACAAC

SEQ ID NO: 2087 - protein, 1311 aa, Haloferax volcanii DS70
  Intein encoding nucleic acids 29
TCAGTTACGGGGGACAGGCCAGTGGTCGTTAGGGATCCGGGGGGCACAGTTCGCATTCTCCCAATTGAGGATCTCTTCGCTAGGGGGACCACGGAGTCAGAGGTCCTCATCGCTGCTGACGGCGATGTGGTCGCTTCCGCTACACCAGGCAAGACTAGGAGGGCTCTCGACGGGTGGGATGCTCTGTCCGTGAACGAGGACGGCGAGGCTGAGTGGCAGCCAATCGCGCAGGCTATTCGGCACAACACCGACAAGCCTGTTGTGAATCTCCAGCATAAGTTCGGCGAGTCAACAACTACCCGCGACCACTCCTACGTCGTTCCAGGCGAGGATGGGCTGACGACAGTTTCCCCAGACGATGTGGCTGAGCCTTACCGCGTCAGCGGCGTTCCAGACGTGGAGCCCGTCGAGCAGGTGGATGTCTACGAGGTTCTCAGGGGCTACGAGAGGGAGTACGAGGACGGCAGGTCGGTGGGGTCTGATAACTCAATCACAAAGAGGAAGCAGATTCACGCGGACGATGAGTATGTGTGGTTCGGCCATGAGCACCATAGGGACGTTGATTCGACCGTTAAGGTGAAGCGGTTCGTGGACATCGATTCTGAGGACGGCGCTGCTCTGATTAGGCTCCTGGGGGCCTACGTCCCAGAGGGCTCCGCCAGCACCGGGGAGACTGCGACCAGCAAGTTCGGCGCTTCGCTCGCTGAGTCTGACAGGGAGTGGCTCGCTCAGCTGCAGAGGGATTACAGCCGGCTGTTCGAGAATACTACCGCTGGCATCATTACATCGGACAGGAGGGCTGAGAGGACTGTGGAGTACCAGACGGACACAGGCGGGGCTTCGGTCACCTACAACGATGAGACGCTCAAGCTGCAGATGATGAATGAGCTCGCGGCTGTGTTCTTCAGGGAGTTCGCTGGCCAGACGAGCAGGGGGAAGCGGATCCCGTCGTTCGTCTTCCACCTGCCCGAGGAGAAGCAGGACCTCTTCCTGACCCTCCTGGTGGAGGGCGATGGGAGCCGCGAGTTCCCAAGGTACACGGAGGCCTACGCGCAGCGGAACTTCGACTTCGAGACGACATCTCGCGAGCTCGCTGCTGGCCTGTCAATGCTCCTGACGCAGAGGGGGCAGAAGCATTCTCTCAAGTACCGGGACTCCAAGGATAGCTACACTATCCGCACCTGCTCCACGTACAGGGAGGGCAGGGACCCAGTCCTGACCGAGGCTGACCACGATGGCTACGTGTACGACCTCTCAGTGGAGGAGAATGAGAACTTCGTGGATGGGGTTGGGGGCATCGTGCTGCATAAT

SEQ ID NO: 2088 - protein, 645 aa, Haloquadratum walsbyi DSM 16790
  Intein encoding nucleic acids 30
TGCTTCTCGGGGGATACGGAGATCGCTCTCGCTTCGGGGGATTCTATTACTTTCGAGTCGCTGGTGGACGCTTACGAGCGGGGGGAGACACACTACTGCTACACTATCGGCGACGATGGGCGGATCCGCATTGAGGAGATTATGAACCCGCGGGTGACCCAGGAGGACGCTGCTCTCCTGGCCGTTACGCTCGATAATGGCGAGGTCATCAGGTGCACACCCGACCATGAGTTCATGCTCCGGGATGGCAACTACTGCGAGGCGCAGAATCTGACCGACGGGCAGAGCCTCATGCCACTGTACAGGACCACGACAGAGATGACTGAGACTACCGAGACGACAGAGACTACCGGGACAGCTGAGATGGTGAAGCAGCCGTTCGCCCAGAACAATTGGGAGTCCGTCAGCCAGCTCGCTAACCGCTACAATCGCAGGCACACGACAACTGACCATATCGTTGAGACGCAGCAGATTCAGTCACAGCAGCAGTCCCAGATCGAGACCGTCCAGATTTCTGAGAGGGCGGACGTTCACAACCATACCGTGATCTCGGTCGAGTCTCTGACCGAGACGGCTGATGTCTACGATCTGGAGGTTCCAGTTACTCATAATTTCGCTCTCGCTTCCGGGGTTTTCGTTCATAAT

SEQ ID NO: 2089 - protein, 627 aa, Haloquadratum walsbyi DSM 16790
  Intein encoding nucleic acids 31
TGCGTTTCGGGGGAGACAGACATCGCTCTCGTGGAGGGCAAGACCGCTACTATCGGGGAGCTCGTGGAGTCGGCGCTGACAGACCCAAAGCCGGTTGACGATGGCGTGTGGGACACCGCGGATTTCACCGTGACGTCGGCTATCGAGACGGGCGAGCTCATTGAGCGGGACGTCACACGCGTTTGGAAGAGGCAGTCCCCCGAGACGATGCGGCAGATCCAGATTGCTGGCGGGAGGAGCGTGACAGTCACTCCATCGCACCCCGTTTTCGTGGAGCATAATGGGTCTTACACCGCTAGGAGGGCTGACTCCCTGAGCGCTGGCGAGTCAGTGGCTATCGCTGACGATGTCGCCGACTCACACCCGATTTCCGTCGATAACACTGCGAATACCCTCAACCCAAGGTCGATGTCTACGCCTGGCATCACCACGGACGGCGGGCTGTACAGGACAGGGTCCGATGGCGGGATTGTCCATGCCGAGGTTGGCAAGGAGGACGTTACTGATTGCCTCACAACTGACAGGATCACCGCTGTGAAGACCGTCACGCCAACAGCTGAGTGGGTCTACGATCTGGAGGTGGAGGGCACACACGCCTACCTCACAAACGGGGTTCTCTCACACAAC

SEQ ID NO: 2090 - protein, 1716 aa, Haloquadratum walsbyi DSM 16790
  Intein encoding nucleic acids 32
TCATACCATCCTAGGTCGGAGGTCCTGCTCGCTGACGGGCAGCGGATTGACATCGGCACTTTCGTGGATTCGCGCATTGAGAAGAATAACGCCAATGTTATCGACGGCATTAACTGCGAGATCCTGCCGGTGGACGATATTGATGTTTACACCGTGGACACAGATACTGGGTCCGCTAGCACGGTTTCCATTGACAGGGTGAGCCGGCACCCAGCTCCATCCGAGTTCATCCGCGTGAAGTTCAGCAACGGCAGGTCGGTTCTCGTGACCCCGGAGCATCCCATGTTCATCGACGATGGGTCAGAGACCAAGACGGTCCAGGCTAATGCTCTGAGCGGCGGGGAGTTCGTTCCAGCTCCTCACCATCTCCCAGGCGTGAACACCGACGCGTCCAGCGTCTCCGACGATATCAATGATGTTAGCACCATTAGGACGCACGTGAGGTCCCGGGCGCGCGCTAAGGCTGAGGTCGAGGTTCGCGCTACGGACGGCGAGTTCAAGCTCATCGATGCCGCGCAGACCCTGGGCATCATTACGGCTGTGGGGAAGGTGAGCGTCGACGCTCCAGAGCGGGGCATCATTGTCGACATGGATCGCACAGTTGACTCGTCTAAGGATTCGATCAACAATGTCCTGGGGTCTGTTATTCCTTCAAACGACAATGATTCTATCACTAGGGTCCAGGACACAGGCTCGACTGGGAACCAGTGGAGGTGGTCTGTGAATACCTTCATCGAGCGGATGATCGAGATTGCTCCAGCTGTCACGGCTGACAGGCCAAACAGGAGGGTGCCTGATGCTGTCCTCGGCGGGAGCGAGGCTGTGGTCCAGCAGTTCCTGACAGGCGTGATCATTGCTGCCGGGCGGATCCTCGACGAGACTATCCGCATCTACGCTTCATCCAACGAGCTCGCCTGCGACTACGCCGATGCGTTCCTCAGGCTGGGCATCACCGCTTCCGTCGAGGACGGGCCAGCTGAGATCGCGGCTCAGACCGTGATCAAGTGCGACAGCGATTACGAGCGCGCGTGCGGCATGTTCGACATCAGCTCGTCTAGGACCACGCCCTCCGATACATCATCCCAGAACAATCAGAGCTCGGTCACCGCCCAGAACGAGGACACGCACCAGACAACTAGCCATGAGATCCTCCCGTCGGGCATTGCGGATGAGCTGCAGAGCATCAGGCAGCTCCTGAACATTCCCGCCTCGGAGCAGCTGGCGTCTATCACGGCTGGCGACGATGGGATCGCGCTCTCGATTGCTAGGGCCGAGATCAACCTCCTGCGGGACCACATTGAGACACTGCGCATGGATACTGAGAATGTCAGCATTGGCCGCGACGATTGCGTTACACCGACTATCTCTTCATCCAGCAAGTACAAGTACGCGAAGAACTCAATCACCTCCGACGAGAATCTCCAGCTGTTCGGCCAGTCACAGGCCCAGCTGTCCGAGAGGACAAAGACCACGGAGTCGTCTTCAATCTCGGCGTCTACTGACCTCGTGTCTATCCCAGCTAACATTTCAGAGAATAGGCTCGTGGCTGCTACACAGAGGCTGGACGAGGTCGAGACTCGCTGCAACCGGCGCTACCACAGGGTCATCGCCGTTGACACGGTGTCCAATGCCGGCCCTCATGCGTGCGAGTGGGTCTACGATATTACTGTGGAGCCTACCAACACTTTCATTTCTTCCGGGGTCGTTCTGCATAAC

SEQ ID NO: 2091 - protein, 1074 aa, Haloquadratum walsbyi DSM 16790
  Intein encoding nucleic acids 33
TGCTTCACTCCTGATACAAATGTTCTGACGCCTAATGGGGTTCGCAATATTCGGGATCTCACGGTCGGGGATTCGGTTTACTCGCTGAACCCGGAGACCATGCAGATGGAGATCAAGCCGGTGACACAGACTCACGAGTACCCCGACTACCAGGGCGACCTCATCGATATTCAGACAAACGAGATCGATTTCCGCGTCACTCCAAATCATAGGATGCTGGTTGAGGCTACCGGCACGGACACCACGTCCACCAACGACTACGATTTCATCGAGGCCGGGAATCTCGATATTTCCAGCCGGTACGAGCTGCCTCACGGCTGGTCCGTTGACCATACGGATAGCCTCGGGGCCTACATCGACCTGATTACCCTCCTGAGGGAGCAGTCAGACACGTACAACGTCCTCTCCGATGGCGGGATGACAACTGCTGCTACGGCTGACATCAATCACAACAATGTCACCCGCAGGGTTGACTCTGATACGTTCGTGTCACTGATTGGCTGGTATGTGGCTACAGGGCGGGTCTCGCGCACTCAGAACGGCTCTGACAGGGTCTACCTCCAGCTGTCCCAGACAAATACTAAGGCGCGGACCCAGCTCACGATGCTCCTGGACGAGCTGGGCGTGGACTGGCAGGCTGATAACGAGAAGATCCACTTCGTGTCTCATGTCTGGACGGAGCTCTTCGACACCACGTGCGGCCGCACAGAGAAGAACAAGCACATCCCGGAGCTGATTTTCGACGCTTCAGCCTCCCAGAAGAGGGCGTTCTTCGATGCTATCATTAACGGCAGCGGGGTCAAGAATGACGATTCGTACCAGTACCACACCTCGTCTGAGGACCTCAGGGACGATATCCTCCGGCTGTGCGTTCATATCGGCATTGTGGCGCGGTACGACTACATCAACGATGAGTCCTGGCGCATTGAGTGCACCGAGACGGCCAATCCCGACTTCACACTGACTCATAGCGGCAGGCAGTCGACAGCTGAGGATGGGGTTTACTGCGTGACTGTGGCGGATAATCAGACTCTGCTCGCCGGGAGGAATGGCACCTTCCAGTGGACAGGCAAC

SEQ ID NO: 2092 - protein, 1587 aa, Haloquadratum walsbyi DSM 16790
  Intein encoding nucleic acids 34
TGCTTCCATCCTGAGACTAAGATTTGGTTCAGGGACACAGACAATGAGTGGCATCATGAGACTATTCAGACTTTCGTGGAGGACCGCCTGGACGATCCAGAGATCGATGCGGTTGGCACGCTCGTGCAGGAGGTCGACGATAACACAGACCGGGAGATCTCTGTGCCTTCAATTGACGATAATGGCAACGAGCGCCTGCAGTCAGTTACTGCTGTGTCCAAGCACAGGGCCCCAAATCATCTCGTGCAGATCGAGACCATTAGCGGCAGGGAGATCACAATTACTCCTGACCACGAGATGCATATCTTCGAGCAGGGCAACCTGGTGTCGAAGCAGGCTTCTAAGATCACGTCAGGGGAGTACGCCGTCATCCCGAAGCGCCTCCAGACGATTTCCCCATCCAGCCACACACCTCAGCATGATCTCCTGAGGGAGTTCCTCACGCGGGATGAGCTGACAGCCGACAGGCTCATCATTCACACGTCTGACCCAGTCCGGCTCTGCAACCGCGTTTTCCCTGAGGAGGTGACATCATGCAAGGATGCGGTTGAGATCATGCAGAATACTGCTTGCCATCTGGACAAGAACAAGGAGACCCTCATCGGCTGGCTGGGCGAGGGGCGCATTCCGGTCGCTCTCCTGAGGGGGTTCGTTGAGACGGACGAGGCGCTCCTGATGAGCATCCCCGACGATGTTCAGATTGGCCTGAGGGGGGAGAAGGTGCGCATCGACAGGCACATTGGCTTCACGGAGGAGCTCACATCGCTCCTGGGCTACTACGCTGCTGCTGGGATCGTGCATACCCAGACGAATCCCATTTCCTACGAGAGCGCGCAGCAGGAGCAGTCGAGGATCACCTTCTACAACATTGATACACAGACTCAGACCGACCTCCTGAATGCCCTGAACTCTGTCTTCGAGATCGAGCCGATTCAGTACAACCTGGACGGCGAGATCCTCGGCGTGCCAGGGGAGCTCATTAGGAGGGTCTTCGATACTGTCTTCGACGTTGGGACCCAGCCATCCCACAAGCGGATCCCCCAGGCTCTGTTCGATGCCTCAGAGTCCCACATCACGAGCTACCTGCGCTGCTTCTTCTCCACTCATGACAGCCTCACCACGGATACCAGGGACATCAGCGCTACAACTGTGTCGCGGGAGTTCAAGGAGGACATCATTGCTGCTCTCAGGAGGCTGGGCATCACAGCTGAGGTCACCACGCAGCAGAGCAGGTCGGTGCCAGAGGTCCTCCCAGACTGGTACGCGATCGACGATATTACGCACCATGACGCTGATAATTCCCTCAACCTGACACGGTCCTACGTGATCTCTATTGCGTCGTCTGATGCTGTTACCCTGCAGAGGGACAGGCAGGCTCAGGAGCAGATCAAGTACGACGCGCAGGGCCTCATCGCCAACAATAACGCGATTCACCAGAGCAGGCAAGTGACTGATGGCGGGAGGAAGGACTACATCACTGAGCCGATCACCGACATTGAGTATGTGGACGCGGATATCGACTACACCTACTGCCTCACTGTTTCGGAGACTCACTCACTCATCGTTAATGATCTCTCTCAGAAGCAG

SEQ ID NO: 2093 - protein, 1632 aa, Haloquadratum walsbyi DSM 16790
  Intein encoding nucleic acids 35
TCGGTCGCTGCGGACTCGCGGCTGGTCGCTGTTTCGCCGGATGACAAGATCGTTTTCACTACTATTGAGGATTTCTGGAAGAAGCTGAACACGCCAATCGAGCGCAATGGGAAGTTCCGGAAGCGCACATGCGTCTCTGAGGGCTGGCAGACTTACGCTTTCGACGAGAACCACGAGGCCTCACTGAGGCCTATCGAGAAGGCGATTCGGTACACCGCTGATGAGTCTGAGCAGCTCAGGAGGATCACCACGCAGCTCGGCAGGTCGCTGGACATTACGGATGAGCACTCTCTGTTCCGCTACGACGATGGCATCGAGGAGGTGGCTGGGGACGATCTGACCGCTGGCGACATCATTGTCGCGCCGAGGACCCTCGATGTTGAGGTGACGCAGACAACTCTCGACCTGTCCGAGTACATCCACGATAACGAGAGGTGCCCAAGCGAGCAGACCGGCTCGGGGGAGCTCAATCTGGCCTCCAAGAGCGCGATCTCGGACTCTAGGAACAAGGAGACCCCGGGCGTGACGCATAATATCCTCCCCCAGCGGAGCAAGTTCACCGACGAGATGACCACGCTCTCACCAACGGCTGTTGGCGGGCTGGAGTCCGAGCAGAACGAGACCCTCAGGGTCGGCGAGAGCACGGGGGCCATCGAGAGGTACATTAATGTGGACGATTCGTTCGGCTGGCTCCTGGGGCAGTTCATCGCGCAGAGGTCAATTTCCACAGACGCTCTGACCATGACGGTCCACACTGCCGCGGAGAAGCATGCCGAGCGGATCGTTGCGACCAGCGACTCGGTGTTCGGGATTAAGCCAACGGTGAACTCCATCGAGCGCGGCTACGAGATTGTGTTCCCTTCCGTCTTCGACACAATCGTCAGCGGCCTCACTGCGAAGGAGCAGAGCGAGCCCGAGCAGGACGTGGATCACACACATACTGACGAGATCGGCATTCCGGAGTGCATCCTGCACGCCCCCGACGATATTGTCCTCTCCTTCCTGCAGGGGTTCATCCTCGCGGAGAACGCTCAGCGGAAGGGCAATGCTGCCTCCGAGGCCAGCGAGATGGTCTCTGAGTCAGAGACAACTGTTACCCTGGAGACGCCATCGGTCGGCGTTAAGGACGGGCTCGTGTTCCTGTGCCACAGGCTCGGGGTCATCACGGATATTTCGGAGAAGTCTGGCGAGGAGTACAGCGTTCATTTCGAGGAGTCTCGCTACACAGTGTCAATCGCCACAGAGGGCAAGACTAACCCCCTCGACCAGATCCTGAATGGGGAGAGGCCAACAATGCCTGAGGGCGTGAGCGTCCCAGTTCCAGATGCTCTCCTGACTATCCACGAGTCAATTGCCAACTCCCCACATATCGACCAGGTCATTCCTGATACCGTGGTCCAGCAGGAGACAGTTTCCCTGGAGACTCTGCAGAGCCTCCTGACCGGCCTGTCGACGGTGGACCTCCCAGCTCAGCTGGAGGCTAAGCGCGACGAGCTCACACTCCTGACTGAGGGCGATCTCTCTTACCTGAGGGTGGAGTCAGTCGAGTGCGTTGACTACGATGGCTACCTGTACGATCTCCAGGTTGGGGGGGAGCCAGTTTTCACAGCTAATTGGCTCTACGCTCATAAT

SEQ ID NO: 2094 - protein, 1224 aa, Haloquadratum walsbyi DSM 16790
  Intein encoding nucleic acids 36
TGCCTCACTGCGGACTCAACAGTCATGCTCAAGGAGAAGGGGATGGTCTCGGTCTCGGAGGTGGAGACAGGGGATCAGATCGCTCAGCGCTCCGACACAGGCTTCCAGTACAAGCCGGTGGAGGAGACTCACGCGTACGAGAACGCTGAGACACTCACTGTCACCCTGACGAACGGCTGCTCTATCCGCGGGACCCCGAATCACAGGCTCATGGTCGACGATGAGTGGACGCGCATCGACGAGATTCAGCCCGATCAGGAGGTTCATTACACACTCGGCTGGCTGAGGGAGACTAACCAGTCCCCGCCCAAGCTCCACTCTCAGTCACATACCACGGTGAATCAGACAGCTGACTCCATCAGCCCGGATTCCAGCGAGCCCATTGAGCTGTCGGAGTCTGAGAACGCGGACACGGGCAACAGGCACAATTCTGCTGTTGCCGTGAAGCAGTCACGGACACAGACTCAGCTGATCAGCGACGAGGTGGTCTCGCGGCCAGAGCACACCAGGAGGCCTGATCAGCTCTCCGAGGAGCTGGCTGAGCTCCTGGGCCTCTGGATCGACACGGGGCTGTGGCATCAGAGCGGCGTCCAGTTCAACGTTGAGCGCGAGAATATCGCGGAGTACATTGACCAGCTCTCACAGCAGCTGTTCGATACCCCAGCTGCTATCTCCGACACGGATGGCACCTACACGGTGGACATTACAGATCATAAGCTCAAGGAGTGGTGGAAGGCTAACTTCGGCGGGAAGCCAGACGGCACTCAGTCGTCTTACGTCCCACAGATGATCAAGGAGGCCCCTACAAATGTTATTGAGGCGTTCCTGAGGGGGTGCTTCACTGCTGAGGGCGGGCTCAGGAAGGACATGAGGCCACGGCTGTGCACCTCATCCGAGGATAGCATCGACGATATTGCGGTCCTCATGATGGGCCTGGGGTACCCTGTGGAGAAGTCGGTCATCAGGAACGCTGACGGCGAGCCGTACTACTCGGTTATGCCCGCTACCGACGATGGGCTCTCTGCCTTCCTGCACGACGTGGGCTTCATCGATGAGCGGCGCGAGATCGGGCTCTCCAACATTGAGAGCTCGGATAGCCGGGCCCTGAACAATACCCATAAGATCGAGGTTGAGTCAATTGTGGAGTCCCCACCTGCGACGGTCTACGACATTACAGTGGCGGATAATCATGAGTACGTTACAGATGGCATCATTTCACACAAC

SEQ ID NO: 2095 - protein, 1314 aa, Haloquadratum walsbyi DSM 16790
  Intein encoding nucleic acids 37
TGCGTGGAGGAGAATAGCCTGGTTTCTACCGATGAGGGGCTGCGGCCTATCAAGGATCTGGACAATACTACTGCGGAGTTCGAGCAGTGGGACGAGATCGATGTCGGCGTTACCACGGACGGCGGGACCAAGACGGCTACAGCTGTTTACGATAACGGCTTCGCCAATGTGCGCCAGATCCAGACCGAGAGCGGGTTCAACATTGCTGCTACCCCAAATCACCGGTTCCGCACGCTGTCCAGCGACGGCACTTACACCTGGAAGGAGGCTGGCAAGTTCGAGTCCGGGGACCGCGTGATCCTGCAGAGGAACACCTTCGATGCTGGCTCCCGCGTGTCCCTGGAGGCTAATGAGAGGGCTGACGATGCCCAGGACACAACTGAGGGCCCAGAGCTGCCAGGGAGGATGACGTCCGAGCTGGCCGAGTTCCTCGGCTACTTCATGGGCAGCGGGTACATCTCGGACGAGACCCATGCTTCCGTGGATCTGGTGGTCGACAGCGATGCCACGGAGCTCAACTCATACCTGTCCAATCTCGGCGAGCAGCTCTTCAGGATTACCCCGGCCGTCGAGTCTCAGGAGATGTCACAGGTTCTGTCCTTCCGGGACTGCCACCTCAGCCGCTACTTCGAGGATAACGGCTGGAAGAAGACGGACACAGGCCATAATGGGGATGCTTCGGCTGCTTTCGTCCCAGAGCAGATCCTGGAGGGCGACGAGCAGGTTGTGAACGGCTTCCTCAGGGGGGTGTTCGAGGCGATTGGGACGGTCTCGGAGAAGATCGAGATTCTGACCACGTCTACAACTCTGGCTGACCAGCTCCAGAGCCTCCTGCTCTCGCTGGGCCACGTGTTCACCCGGGATAGCACGAAGCTCGTCGAGACAAACAATTACCATGACGATCAGCTGAGGCAGAGGCTCTGCGGCGCTACTAGGAGGGAGGACGAGCGGTTCATGAACGAGATCGGGTCACTCATTGAGCCAGATGAGCTGAACCTCTCCACACGCGCGGACAAGAATGATACTTACCCTTCGTCTGTTATCGACCACGTGCAGACACTGGACGGCTACGATTCAGTGTCCGAGAGCCTCAAGTCTCGCATTAACCAGTCACAGGTCGACGGGACGGTTAGCAGGAAGCTGATCAAGGATATTGAGGCGGAGACTGCTGAGACCGTCTCGATCGCCGACCATGAGCTCACAGGCTTCTACGCGGCTACTGTGGAGTCTGTCACGGAGGACACAGCGTACACTAAGGATATTTCAGTTCCAAGCAACAACACATACATCGCCGACGGGTTCGTTACTCATAAT

SEQ ID NO: 2096 - protein, 642 aa, Haloquadratum walsbyi DSM 16790
  Intein encoding nucleic acids 38
TCTATTGAGGCTGATGAGTCAATCGTTATTAGGCGGGACGGGGAGACTGAGCTGACGGAGATCGGGTCGTTCGTGGACACTATTCTGGCCGCGGACAACCAGGAGACCCGGATCACGGATGGCCACGAGATTGCGCTCGCTCCGAATGGGCTGGAGGTTCCCTCCCTCGACACCGATGAGCAGATCAGGTGGAAGCACATTGAGGCGGTGAGCCGGCATGCTTCGCCAGACGAGATCCTCCTGATTGAGCTGGAGTCAGGCAGGTCCATCAGGGCTACCAAGGCTCACTCCTTCGTCACGAGGAGGGACGGCGATGTTCTCCCAGTGGCTGGCGAGACACTGGTGGTCGGGGACGTCCTCCCTACTGTTGGCAGCTACGATCATGCGTCGGGGTCTATCTCAGTGCCGCTGCAGTCCCAGAGCGTCGCTGCTGACGGCGGGACCGTTGAGCCCAACACAAATATCACTGCCAACGCGGAGCGCGATTCGGCCTCTATTACCTCTGCGGGCATCATTGGGTCGGCTACGTGGGAGAGGATCTCCAGCATTGAGACAGTGGCGCCGGAGTACGAGTATGTGTACGATCTCTCTGTTTCCGGGCTGGAGACTTTCACTACGGGGGAGGGGGTCGTTACTCATAAT

SEQ ID NO: 2097 - protein, 1284 aa, Kineococcus radiotolerans SRS30216
  Intein encoding nucleic acids 39
TGCCTCACTGCGGGGACAAGGGTTCTGCGGGCTGATACGGGGGCGGAGACTACTATGGGGGAGCTGTTCGCGCTGCAGGCTAGGGACGTTCCGGTGTGGTCACTCGACGAGTCCCTGCGCTACGTCCGCAGGCACCTCACTAGGGTTTTCCCAACCGGGGTGAAGCCAGTCTTCCGGCTGAGGACTGCTAGCGGCAAGACTGTCCGCGCTACCGCTAACCATCCATTCCTCACCTACGATGGGTGGAAGCCTCTCGGCGAGCTGTCGGTGGCTGACAGGCTGGCGGTTCCGAGGCACGTGCCAGCTCCAGAGAGGGTGGCTTCATGGACGGACGATCAGGTCCTCCTGCTCGGCCATCTCATCGGCGATGGGTCCTTCGTCAAGAGGCAGCCACTCCGCTACGCTAGCGTTGACGAGGCTAACCTGTCGGCTGTGACGGAGGCTGCTGCTAATGCCTTCTCCATTGTCGCGGTTCGGGACGAGTACGCTGCTGCTAGGTGCACCACGCTCAGGCTGCCAGCTCCTTACAGGCTGACCCACGGCAGGAGGAATCCACTCGCTGCTTGGCTGGACGAGCTCGGCCTGTTCGGGCTCAGGAGCTACGAGAAGTTCGTCCCGCAGGAGGTTTTCCACCTGCCCAAGAGGCAGATCGCTCTCTTCCTGCGGCATCTCTGGGCGACTGATGGCTCTGTGACGCTGACAAGGCAGTCACGCGGCGGGAGGATCTACTACGCCTCGACATCTCTCCAGCTGATTCAGGACGTCTCCAGGCTGCTCCTGCGGTTCGGCATTAGCACGAGGGTGCGGACAACTACCCCAAAGGGGGACCACAGGCCTGGCTACACACTCGATGTTTCTGGCGTGGACGATCAGAGGCGGTTCCTGCAGGAGATCGGCGTCCATGGGGCCAGGGGCGCTACCGCTGACAGGCTCCTGGAGGTCATCAGGGATGTCTCCGCGAACACGAATGTCGACACAGTTCCCAGGCAGGTTTGGGACGATGTGCGCAGGCTCCTGGTGGAGAAGGAGATGACGCACAGGGAGTTCGCTGCTGCTATGGGGACATCGTTCGGCGGGTCCAGCCTCTGGAAGCATGCTCCATCTCGCGAGAGGCTCGGCAGGGTGGCCCAGGTCCTGGACTCGGCCGAGCTCGATGTTCTGGCGGTGAACGACGTCCTGTGGGATGAGGTGGTCGCGATCGAGCCTGACGGCGAGGAGCAGGTCTACGATGCTACTGTTCTCGGGGGGCACAACTTCGTGGCGGATGGCATTGCTGTTCATAAT

SEQ ID NO: 2098 - protein, 1140 aa, Methylococcus capsulatus Bath
  Intein encoding nucleic acids 40
TGCGTTACGGCTGACACATGGGTTATGACGGCCTCGGGGGCTAGGCAGGTTCGGGATCTCATTGACAGGCCATTCGAGGCGGTCGTGGACGGCGAGTGCCACCCAACAGAGTCCCGCGGCTTCTTCTTCACTGGGGATAAGCCTGTGCTCAGGCTGTCGACGGCTGAGGGCCACACACTCAGGCTGACTGCGAACCATCCGGTTCTCAGGGTGTCCAAGATGACCAGGCAGCTGCGGGAGACGGAGTGGGTTAAGGCTGGCGAGCTCAGGCCACACGACAAGATCGTCCTCCACGATCATAGGGCTCTGCCATCCTGGGACGGCGCTCATACCGAGGCTGAGGGCTACCTGATCGGGCTCCTGATTGGCGGGGGCACCCTCACGAGGGACAAGGCTATCCTGTCTATTTGGGATGCTGCTGCTCCAAAGGTGGCTAACGGGGGCGGCTCAGTCCCAGCTGCTGGCGTCGCCGGGGTTATGAGGGCTGCTGAGCTCGCTGCTCGGACCCTGCCACACCGCACGGACTTCAATGGCTGGCAGACCACGATGGAGGGCAGGGGGGAGTACCACATGGCTACAGGCGCCCTCCATACTCTCGCTCTGGAGCTCGGCCTGACACCAGGGGATAAGCGCCTCACTGCGCCTCTGGAGACAACTTCCAGCGCTTTCCACAGGGGCCTCCTGAGGGGGATGTTCGACGCCGATGGCTCGGTTCAGGGGTCTCAGAGGAAGGGCGTGTCCATCAGGCTCCCACAGACCGACCTCGGGAACCTGCAGACGGTCCAGAGGATGCTCCTGAGGCTGGGCGTTGCTAGCACCATTCATCAGAATAGGAGGCCAGGCGGGACCAAGGTCCTCCCAGATGGCGAGGGCGGGGCTAAGGGGCACTCATGCCAGGCCGCGCATGAGCTGATCATTTCCGGCGAGAATGTGGTCAGGTACGCTGAGCGGATCGGCTTCGCCGACTCGGATAAGATGGACAGGCTCACCGCTCTCCTGCAGAGGTACAGGCACACGAGGCATGCTGAGAGGTTCATCGCGACAGTGCAGAGCCTGGAGGACGATGGCATGGAGGCCGTCTACGATGTTACAGTGGCGGACGTTCATGCTTTCGATGCTAATGGGCTCTACGTTCATAAT

SEQ ID NO: 2099 - protein, 495 aa, Methanoculleus marisnigri JR1
  Intein encoding nucleic acids 41
TGCTTCGCGGGGGACACTGAGATTACTGTTTCGGACGGGCGGCGCTGGATGTCGCTCCCTATTAGGCAGTTCGTTACTGAGAATTTCGACATCTCAAAGCCGGGCCTCGATCACGTTGGGACATTCTACTCCGACCCAAGGCAGCCATTCTACGTCCGCTCGATTGATTCTCAGGGCAAGACAAGCCTCAAGCGGGTGACTTCCGTCAGCGTTCACAGGGCTCCAGCTCATCTGGTCCGGTTCGCTACCAGGAGGGGGAGGGTCCTCACCGTTACGCCTGACCATGCGATGCTGGTGTGGGACACGGATTACCTCCGCAAGATCAAGGCTCTGGAGGTGGCTGTCGGCGACAGGGTTCCAGTGGAGGAGGGCGGGCTCGTGGTCGCTGATGAGGTTGTGTCTAGGGAGACGGTGCAGGCTCTGGACGATCGGGTCTACTGCCTCACTGTGGCGGAGAATCATACTCTCGTTGCTAATGGCATCTTCTGCGGGCAG

SEQ ID NO: 2100 - protein, 810 aa, Methylobacterium extorquens AM1
  Intein encoding nucleic acids 42
TGCTTCGCTGCGGGCACTCTCATCAAGACACCAAAGGGGCCTGTTCCTATTGAGCAGATTCAGTCGGGGGATCTCGTTTTCAATGCGATCGGCATTGGGGTGGTCGAGGGCATCGTGTGCCAGCAGAAGCAGACCATTACGCTGGAGCTGTCTGACGGCACATCAATCGTCTGCACTCACGATCATCCATTCTTCTGCCCTCGCGGCTGGGTCGCTGCTGGCGACCTGGAGGTTGGCTCCGGGCTGTTCAGCCACGAGGATCTCCGCAGGCTGTGGTCGGGCGGGGCTTCTCTCGGCCTGGAGTCCGGGTCCAGCGACGGCAGGGGGGCTGTTCGCTCGTCTGAGGTGCTCCTGAGGATCCTCAGGGAGGAGGCTCGCGAGCCAGATGCTGGCTACTGCGGGCCAGCCGAGGACGTGCGCAACGCGTCTACCGATAGGGCTCATGCTGAGGGCGCTTGGTGGCAGTGGCAGGCTGACCCGATTGCGTCAGATGAGGCTGCTAGGTCCGCTGGCAGGAGGGTCGCTGACCGCGTTAGGGACGAGGATAGGAGGGAGGCTAGGCCAGAGCCAACCGCTGTCCTCCTGCAGGACAGGCACTGCGAGCCACTGGCTAACGATCGGAATAGGAGCGGCAGGGAGCATTCATCCCGGGGCACGGGGGAGGCTGAGGGCCAGCGGCAGGGGGACGTGCCATGCTCGGTCCGCGTTGTGAGCATCTCGCGCGAGGAGAGGGGCGGGCCTGAGGCGGTGTACAACCTCAGGGTTTCAGGGCATCCAAGCTACTTCGCTGGGGGGGTTCTCGTTCATAAT

SEQ ID NO: 2101 - protein, 495 aa, Methanospirillum hungateii JF-1
  Intein encoding nucleic acids 43
TGCTTCCATGGGGACACACTCATTGAGATCTACGCTGACGGCATTCTGGAGGAGATTCCGATCAGGCGGTTCGTTCTGGAGCATCTGGATCTCTCGCAGGCTGGCGTGGACGCTCTGGGGACGTTCTACGCTGATCCGGTCCGGCCAGCTCACGTGCGCTCCGTCGACACAGGCGGGATCCCACACCTCCGCAAGATTACTTCCGTTAGCGTGCATAAGGCCCCTGCGAACCTGATCCAGTTCTCGACCTCTAGGGGCAAGAATCTCCTGGTGACGCCGGATCATGCTATGCTCGTTTGGGACGTGTCCTACCTCCGCAAGATCAGGGCCCTGGAGGTCAAGATTGGCGACGCTGTCCCAGTTTGGGAGTCAGGGGTGGTCATCTCCGACAGGATCGTCAGCATTGATTACGTTCCCTGCGAGGACGAGCGGGTGTACTGCCTCACTGTGGATAGGGATCATAATGTTGTGGGCAATGGCATCTTCACTGGGCAG

SEQ ID NO: 2102 - protein, 1497 aa, Methanococcus jannaschii (Methanocaldococcus jannaschii DSM 2661)
  Intein encoding nucleic acids 44
TGCCTGCACCCTGACACATACGTTATTCTCCCTGACGGGCGCATGAAGAAGATTTCGGAGATTGATGAGGATGAGGTTCTCTCAGTCAACTTCGAGGACCTGAAGCTCTACAATAAGAAGATCAAGAAGTTCAAGCACAAGGCTCCGAAGATCCTCTACAAGATTAAGACCGCGTTCTCCGAGCTCATCACCACGGGCGAGCATAAGCTGTTCGTGGTCGAGAACGGGAAGATCGTCGAGAAGTGCGTTAAGGACCTCAATGGCAGCGAGCTGATCGGGGTTGTGAGGAAGCTGAACTACTCGTTCAACGACAATGTCGAGTTCAAGGATGTCTACGTTGAGCGCCACTACAAGCTCGACGAGACAATCAGGAACAAGCTGCGCAAGGTGAGGGAGAAGCTGGGCCTCACTCGGAAGGATGTGGAGAAGCTCTGCGGGGTCAAGGAGATCTACATTGTTAAGATCGAGACAGGCAAGCTGGAGTCAATTGAGGAGGAGCGGCTGAAGAAGCTCTGCTCCCTGTACGGGATCAACTTCGAGGAGATCATCTACCGCGACAACCTCCACTACACTAATCCAGTCAAGTTCCCTAAGACACCGACTCCCGAGCTGATGCAGATCATTGGCTACATCATTGGCGACGGGCATTTCCCCTCGAATCGGATGCTGCGCCTCAAGGATGAGCGCAAGGAGGTCCTGGAGGAGTACAACCAGCTGTTCAAGACGGTGTTCAACCTGGAGGGCAATATCAAGAAGGGCGACGGGAACTACTACATCCTGGAGATCAACAGCAAGTACCTGATCGATTGGTTCAGGGAGAACATTCCGGAGCTCTTCAACAAGACAGGCAATGAGAGGACTCCCGAGTTCGTGTTCCGGCTCAACAATGACCTGGTCGCTTCTTACCTGCGGGGCATCTTCGATGCCGAGGGGTACATTCGCGCCGAGGCGAAGCAGATCGGCATTGGGATGACATCAAAGTGCTTCATCAAGGAGATTCAGTTCCTCCTGCTCAGGTTCGGCATCCTCGCCTCCTACAGCAAGATTAAGCGGAAGGAGGAGAACTGGAACAATACCCATAAGCTGCTCATCTCGGACAAGAAGTCTTTCGAGCTGTTCAAGAAGTACATCGGCTTCACGGCGAAGGATAAGATGGAGAAGCTGGAGGCTATCCTGAACAAGATGAAGGGCCTCAATTTCCGCTACATCTCCATTCCACTGACCAAGAAGGAGATCAGGGAGTTCGTGGGCGTCCCTCTGAAGACGATTAAGAACGGGGACAATTACTGCACCGATTACACGATCGAGAAGATCATTGAGGAGCTCAACTCCAAGGGCCTGTACGACAAGGCCGAGTACCTCAAGCGCTTCCTGGACGCGGATATCGTTTGGACGAAGTTCAAGATTGAGGAGGTGGAGAGCGATGTTGAGTATGTGTACGATCTGGAGGTGGAGGACTACCACAACTTCATTGGCAATCTCATCATCAACCACAAC

SEQ ID NO: 2103 - protein, 1503 aa, Methanococcus jannaschii (Methanocaldococcus jannaschii DSM 2661)
  Intein encoding nucleic acids 45
TGCCTCAACGCTAACACTGAGATTCTGCAGGAGTCGGGGTTCCGCAAGATTACGGAGCTGAATAAGGATGAGAAGGTTTTCGCGCTGTGCGGCAAGGAGATCAAGCCAGTCGACGGGTGGAAGGTTCACAAGACGCCTCAGCATGAGTACAACATCGTGGTCAAGACAGTCAATGGCCTGGAGATTACCACGACACCAAACCACATCTTCCTCGTTAAGGAGAATGGCTCGCTGAAGGAGAAGGAGGCCAAGGACCTGAAGGTTGGGGATTACGTTGCGACGGTGGACCGGATTCGCGTGAAGGAGAAGGACATCGATCTCTCTAACGGCGACCTGTACTTCATTGGGTACTTCATCGGCGATGGGTACACAGGCGTGATCGAGAAGAACACGCTCAAGGCTACACCGGATCTGGCCTTCAACCCCAAGTACCCGCCCAATTTCGACGATTCGGAGCTCCACAAGAAGTACTTCCTGAAGTGCCGGATTTCAAAGGGCGTCGCTCATTACATCTACTCCAAGAAGCTCCGCAAGATTTTCAACAAGCTCAATATGCTGACCAAGGACAACAAGAATATCGATGCGTTCTGCAACCTCCCGCTGGACAAGCTCGCCTACCTGATCGCGGGCCTCTTCGACTCCGATGGGTACATCTACCTGAACCGGAAGAATATTGAGTTCTACTCGATCTCTGAGAAGCTCGTGGAGCAGCTGCAGTTCGTCCTCCTGCGGTTCGGCATTCACTCCAGCATCCGCAAGAAGAAGACCAAGACCATGGTGTCCCCAACTAACGGGAAGGAGTACAAGTGCAAGGACATCTACGTCCTCACCATCCGCGATTTCATGAGCATTAAGAGGTTCTACGAGAACATCCCTCTCCGCCATGAGGAGAAGCGCAGGAAGCTGGAGGAGATCATTAAGAATAAGGAGATCGGCCAGATTCCGTCTGAGTTCGTTGCGCTGAGGTTCACCCCCATCGCTAAGATTTGGTGCGACTGCGGCTTCTCAGTGGATCTCACTATGTTCAAGCCGCGCACCAAGAGGCAGCGGGAGCTGAACAAGAAGAGGGTGAAGCTCCTGTTCGAGCTCCTGGACGGCAAGAAGCTCATCACGAACTACAAGGAGTACTACAGCAAGAGGAAGAATCCCTACTTCGATTTCATTGTCCGGGAGAAGATCAACGGCAACAATTACTACAGCCTCAATGAGAAGGGGAGGGTTCTGATGTCGCTCCTGAACAAGCACATCAAGGACAAGGAGAATCTGGAGGAGATGTACAACTTCCTCGTGAATCTGGAGAAGTGCCCAATTTGCGGCAAGCCTATCCATAAGGAGATGAGGTACTCCTGGAAGAAGGAGTGCTACGACGGGGATATCTACTGGGACCGGATCAAGGAGATTAAGAAGATCAAGGTCAACGACAAGTACGCCTACGATATCGAGCTGCCAGATGACGGGTCTAATTCACACTACATCGTTGCTAACGGCTTCATCGTGCATAAC

SEQ ID NO: 2104 - protein, 1176 aa, Methanococcus jannaschii (Methanocaldococcus jannaschii DSM 2661)
  Intein encoding nucleic acids 46
TGCGTTCCGCCTGACACTCTGCTCATCCTGGAGAATGGGTTCAAGCGCATCGTGGACATTAAGGTCGGGGACAAGGTCCTGACGCACGAGAACCGGTTCAAGAAGGTTGAGAAGGTGTACAAGCGCAGGTACATCGGCGACATCATTAAGATTAAGGTGCGCTACTTCCCAGAGGAGATCATTCTCACCCCAGAGCACCCTGTCTACGCTATCAAGACGGAGAAGAGGTGCGATGGCTCTCATGGGATCTGCAAGTTCAACTGCCTCACACAGTACACTAATCCTTCATGCAAGAAGCGGTACCGCAAGTACAAGAGGGAGTGGATCATTGCCAAGGACCTGAAGGTCGGCGATGTGATCGTCTACCCGATTCCCAACAGGGTTCGGGACATCAAGTACCTCTCCCTGGATAAGTACCTCAGCAATATCAAGAGGGAGTTCTGCCGCTCCCGCATCCCGGAGAAGATTGAGGTCTCTGAGGAGTTCTGCCGCCTCGTTGGCTACTTCCTGTCCGAGGGGTACTGCTTCAGGGACGGCATCGGGTTCGCTCTGGGCGAGAACGAGAAGAAGATCATTGACGATATCGAGTACCTCATGAAGAAGATTTTCAATCTGAAGCCCAAGATCCGCGACGATGGCCGCTCAGAGGGGATCGAGCTCAAGTACTACTCCCGGGTGCTGCGCGACTTCTTCGGCGATATGTTCTACTGCGGGGACGAGAAGCGGGCCTGGAACAAGGCGCTCCCAAATGAGTTCCTCTACCTGCCTAAGAACAAGCAGCTGCAGATCTTCATTGGCTGGTGGAGGGGCGATAAGGGGGTCACCACGTCGGAGATTCTGATGAACCAGCTCAGGCTGATCAGCCTCCGGCTGGGCTTCATCATTACCTTCTCGAAGCACGTTCCGAAGAATCCCAAGATCGGCGACAGGGAGGTCATCAAGTACCATGCTAGGTGGCAGGGCCGCGTGTCCATCCTCGACGAGAAGATTGTCGATGAGCTCAAGAACGAGGACATCAAGCTGCCGAAGAAGGATGTTCGCTACGGCTGGATCAAGGGGAATTACCTGTACGCTCCCATCATTAGGATCGGCCGGGAGTACTACGACGGGTTCGTCTACAATCTGGAGGTGGAGGATGACTCTTCATACGTTACAGTCTCAGGCACTCTGCACAAC

SEQ ID NO: 2105 - protein, 1638 aa, Methanococcus jannaschii (Methanocaldococcus jannaschii DSM 2661)
  Intein encoding nucleic acids 47
TGCCTGATGCCGCATGAGAAGGTGCTGACGGAGTACGGGGAGATTAAGATTGAGGACCTGTTCAAGATCGGGAAGGAGATCGTGGAGAAGGACGAGCTCAAGGAGATCAGGAAGCTGAATATTAAGGTGCACACTCTCAACGAGAATGGCGAGATCAAGATCATTAACGCCCCATACGTGTGGAAGCTCAAGCATAAGGGGAAGATGATCAAGGTCAAGCTGAAGAACTGGCACTCGATCACCACGACACCGGAGCATCCCTTCCTGACCAACAATGGCTGGATCAAGGCGGAGAATATTAAGAAGGGGATGTATGTGGCTATCCCTCGCAAGATCTACGGCAACGAGGACTTCGAGAAGTTCATCGAGTTCATTAATTCCAAGATCCTCACGAACGAGCTGATTGTGAAGGTCAATGAGAAGGACCTCAAGAACGTTGAGCTGCCGTCAACAAAGATCTACAAGAAGCAGAAGAACGTGTTCCGCTCCGAGGATATCATTGAGCACAACCTCAATATCGAGAAGATTTCGTTCTCTCCACGGATCCACCGCTGCGGCAAGCCACAGCATTACATCAAGCTCCCTAAGTCTCTGAACGAGTGGAAGGCCATCTTCTACTTCGCTGGCGTGATGTTCGGCGACGGGTGCGTCGATCGGATCGCGAACAATGACGAGGAGGTCTTCAACAAGCTGAAGTCACTCAACAATCTGGGCATCGAGGTTGAGAGGATTAAGCGGAAGTCCAGCTACGAGATCATTTTCAAGAACGGGAAGAATGCTCTCATCAACCTCCTGAAGATTCTGTTCGATTACCCGTCTGAGAAGAAGTCACATAACATCAAGATTCCGCAGATCCTCTACATTGCTCCCAAGGAGCTGGTGGCCGAGTTCATCAAGGGCTACTTCGACGCCGATGGCTACGTGAATCTCCGCCAGAACAGGATCGAGGTTATTTCAGCGTCCAAGGAGTTCATCGAGGGCCTGTCCATTCTCCTGCTCCGCTTCGAGATCACTTCCAAGATCTACGAGATTAAGAAGAGCTACAAGGAGACCAAGAAGAAGTACTACCAGCTCAACATCGTCGGCAAGAGGAACCTGAAGAATTTCAAGAACATCGGGTTCTCCATTAAGTACAAGGAGGAGAACCTGAATAAGATCATTGAGAAGAGCAGGAAGTCGGAGAAGTACCCCATCAACAAGGACATGAAGCGCCTCAGGATTCTGTTCGGCATGACGCGGAATGAGGTTAACGTGAGCTACTACGCCAAGTACGAGAACGGGAAGGAGATCCCATCGTACGAGATTGTGAAGAAGTTCCTCAATTCTCTGAAGCCTAAGAACCTCGATAAGAAGATCAAGGTTCTGGAGGGCAAGGAGCGCGACGTGAATTACCTCAAGGCTTTCGAGAGCGATGGCCTGATCGAGAACGGGAGGCTCACCAAGCTGGGCAGGGAGGCCCTCAATATCTGGAAGAACCACGAGTTCGGGAAGGAGAATATCGACTACATGAAGTCGCTGATCGAGAACATTGCGTTCGTCGAGGTTGAGGATGTCGAGATCATTGACTACGATGGCTACGTTTACGATCTCACAACAGAGACTCATAACTTCATTGCTAATGGCATCGTGGTTCATAAT

SEQ ID NO: 2106 - protein, 504 aa, Methanococcus jannaschii (Methanocaldococcus jannaschii DSM 2661)
  Intein encoding nucleic acids 48
GCTCTCGCCTACGATGAGCCTATCTACCTCTCGGATGGCAACATTATCAATATCGGGGAGTTCGTGGATAAGTTCTTCAAGAAGTACAAGAACAGCATCAAGAAGGAGGACAATGGCTTCGGGTGGATCGATATTGGCAACGAGAATATCTACATTAAGTCCTTCAACAAGCTCAGCCTGATCATTGAGGACAAGCGGATCCTCCGCGTCTGGCGCAAGAAGTACTCGGGGAAGCTGATCAAGATTACCACGAAGAACCGCAGGGAGATCACACTCACTCACGATCATCCGGTTTACATCTCTAAGACCGGCGAGGTGCTGGAGATTAATGCCGAGATGGTGAAGGTCGGGGACTACATCTACATTCCCAAGAACAATACCATCAACCTCGATGAGGTTATTAAGGTGGAGACGGTCGACTACAATGGCCACATCTACGATCTGACTGTGGAGGATAATCATACTTACATTGCTGGCAAGAATGAGGGCTTCGCTGTTTCCAAC

SEQ ID NO: 2107 - protein, 1236 aa, Methanococcus jannaschii (Methanocaldococcus jannaschii DSM 2661)
  Intein encoding nucleic acids 49
TGCATTGAGGGGGACGCTAAGATTCTGACGGATCGGGGGTTCCTGAAGATGAAGGAGGTTTACAAGCTCGTGAAGAATGGGGAGAAGCTCAAGGTCCTCGGCCTGAATGCTGAGACACTGAAGACTGAGTGGAAGGAGATCATTGACGCTCAGAAGAGGGAGGCTAGGCGCTACGAGATCGGCGTGTACCGCAAGAATAAGAACACCAAGGACACGATCAAGATTACACCGGATCACAAGTTCCCCGTGTTCGTCAACGGCGAGCTCAGCAAGGTGCAGCTGTGCGACATCATTGATAACAATCTCTCAGTCCTGTCCATCGACTACATTCCAATGATCGAGGAGAAGTACGAGTCCCTCGCTGAGGTCATGTACCTCGGCGGGGCTGTCCTGAGCGATGGCCATATCGTTCGGAGGAACGGGAAGCCAATTCGGGTCCGCTTCACACAGAAGGACACTGAGGAGAAGAAGGATTTCATCGAGAAGGTTAAGGGCGACGTGAAGCTCATCGGCGGGAATTTCATCGAGATTTCGAACCGCAACAATGTCATCGAGTACCAGACCTCTAGGAAGATTCCGTCAGAGATCCTGGGCTTCATTGAGGTTAATATTAACACAATCCCCCTCTACGCCACTAAGGACGAGATCGCCGATCTGATTGCGGGCTTCGTTGACGGCGATGGGTGCCTCTCCGGGAAGAGGAGGGTGGAGATCTACCAGAACTCCAGCCACATTAAGAAGATCGAGGGCCTCATCGTCGGGCTCTACAGGCTGGGCATCATTCCGAGGCTGCGGTACAAGCGGTCGTCTACCGCGACGATCTACTTCAACAACAACCTGGAGACCATCCTGCAGCGCACGCGCAGGATTAAGCTCGACAAGCTGAAGGAGTTCAAGAAGCCAGTGGAGGACAAGAAGCTGATCGATATTTCGCAGATCCTCCCTGAGCTGAAGGAGTTCGACTACAAGGGCTACCTCTACAAGACCTACAAGGAGAAGCTGTTCATCGGGATTAACAAGCTGGAGGAGTACCTGTCTAAGATCGACAAGGATGGCATTGAGCGCATCAAGCAGAAGATCAAGCTCCTGAAGGAGAGCGACATCTACTCGATCAGGATTAAGAAGGTCGGCGAGGATTACGGGGAGGTCTACAATATCACGGTTAAGGCGGAGAACGAGTTCAATCATAACTACGTGGTTTGGACTAAGCATTACACACCTATCGTGGTTTTCAAC

SEQ ID NO: 2108 - protein, 1107 aa, Methanococcus jannaschii (Methanocaldococcus jannaschii DSM 2661)
  Intein encoding nucleic acids 50
TGCCATCCAAAGGGGACAAAGGTCGTGGTCAAGGGCAAGGGCATCGTGAATATTGAGGACGTTAAGGAGGGGAATTACGTTCTCGGCATCGACGGCTGGCAGAAGGTTAAGAAGGTCTGGAAGTACGAGTACGAGGGCGAGCTCATTAACGTTAATGGGCTGAAGTGCACACCGAACCACAAGATCCCCCTCCGCTACAAGATTAAGCATAAGAAGATCAACAAGAACGATTACCTGGTGAGGGACATCTACGCGAAGTCGCTCCTGACCAAGTTCAAGGGCGAGGGGAAGCTCATCCTGTGCAAGGACTTCGAGACGATTGGCAACTACGAGAAGTACATCAATGACATGGATGAGGACTTCATCCTCAAGTCCGAGCTGATCGGCATTCTCCTGGCTGAGGGGCACCTCCTGAGGAGGGATATCGAGTACTTCGACTCCAGCCGGGGCAAGAAGCGCATTAGCCATCAGTACCGCGTGGAGATCACGGTCAACGAGGATGAGAAGGACTTCATCGAGAAGATTAAGTACATCTTCAAGAAGCTCTTCAACTACGAGCTCTACGTGCGCCGCAAGAAGGGCACCAAGGCCATTACGCTCGGGTGCGCGAAGAAGGATATCTACCTCAAGATTGAGGAGATCCTGAAGAACAAGGAGAAGTACCTCCCGAATGCCATCCTGCGGGGGTTCTTCGAGGGCGACGGCTACGTGAACACAGTTAGGCGGGCTGTGGTCGTTAATCAGGGCACTAACAATTACGATAAGATTAAGTTCATCGCCAGCCTCCTGGACAGGCTCGGCATCAAGTACAGCTTCTACACATACTCGTACGAGGAGAGGGGGAAGAAGCTGAAGCGCTACGTGATCGAGATTTTCTCTAAGGGCGACCTCATTAAGTTCTCAATCCTGATTTCGTTCATCTCTCGCAGGAAGAACAATCTCCTGAACGAGATCATTAGGCAGAAGACTCTGTACAAGATCGGCGATTACGGGTTCTACGACCTCGACGATGTGTGCGTCTCACTGGAGTCCTACAAGGGCGAGGTGTACGATCTCACTCTGGAGGGCAGGCCTTACTACTTCGCCAATGGCATCCTCACTCATAAT

SEQ ID NO: 2109 - protein, 1428 aa, Methanococcus jannaschii (Methanocaldococcus jannaschii DSM 2661)
  Intein encoding nucleic acids 51
AGCATTCTCCCTGACGAGTACCTGACTATTATTGAGGAGGATGGCATTAAGGTCGTGAAGATCGGGGAGTACATTGATGATCTCATGCGCAAGCACAAGGACAAGATCAAGTTCTCGGGCATCTCTGAGATTCTGGAGACAAAGAACCTCAAGACTTTCTCCTTCGATAAGATCACGAAGAAGTGCGAGATTAAGAAGGTGAAGGCGCTGATCAGGCACCCATACTTCGGCAAGGCTTACAAGATCAAGCTCCGGTCTGGCCGCACCATTAAGGTCACGAGGGGGCATTCACTGTTCAAGTACGAGAACGGGAAGATCGTCGAGGTTAAGGGCGACGATGTGCGGTTCGGGGACCTGATCGTGGTCCCAAAGAAGCTCACCTGCGTCGATAAGGAGGTTGTGATCAACATTCCTAAGCGGCTGATCAATGCTGACGAGGAGGAGATCAAGGATCTCGTCATTACCAAGCACAAGGACAAGGCCTTCTTCGTTAAGCTCAAGAAGACGCTGGAGGATATCGAGAACAATAAGCTCAAGGTCATCTTCGACGATTGCATTCTCTACCTGAAGGAGCTCGGCCTGATCGACTACAACATCATTAAGAAGATTAATAAGGTTGACATCAAGATTCTGGATGAGGAGAAGTTCAAGGCCTACAAGAAGTACTTCGACACCGTCATCGAGCATGGCAACTTCAAGAAGGGGCGCTGCAATATTCAGTACATCAAGATTAAGGACTACATCGCGAACATTCCCGACAAGGAGTTCGAGGATTGCGAGATCGGCGCCTACTCGGGGAAGATTAATGCGCTCCTGAAGCTCGACGAGAAGCTGGCTAAGTTCCTCGGCTTCTTCGTGACACGCGGGAGGCTGAAGAAGCAGAAGCTCAAGGGCGAGACTGTCTACGAGATCTCAGTTTACAAGTCCCTCCCGGAGTACCAGAAGGAGATCGCTGAGACATTCAAGGAGGTCTTCGGCGCCGGGTCCATGGTTAAGGACAAAGTGACTATGGATAACAAGATCGTGTACCTCGTCCTGAAGTACATTTTCAAGTGCGGCGACAAGGATAAGAAGCACATCCCCGAGGAGCTCTTCCTGGCCTCCGAGAGCGTGATCAAGAGCTTCCTGGACGGCTTCCTCAAGGCCAAGAAGAACAGCCATAAGGGGACCTCGACGTTCATGGCGAAGGATGAGAAGTACCTCAACCAGCTGATGATCCTCTTCAATCTGGTTGGCATTCCGACAAGGTTCACTCCCGTGAAGAACAAGGGCTACAAGCTCACCCTGAATCCGAAGTACGGGACGGTGAAGGACCTCATGCTGGATGAGGTCAAGGAGATCGAGGCGTTCGAGTACAGCGGCTACGTCTACGATCTCTCTGTGGAGGATAATGAGAACTTCCTCGTCAACAACATCTACGCTCATAAT

SEQ ID NO: 2110 - protein, 1644 aa, Methanococcus jannaschii (Methanocaldococcus jannaschii DSM 2661)
  Intein encoding nucleic acids 52
TGCCTGACGGGGGACACTAAGGTCATCGTGAATGGGGAGATTCGGGAGATCGGGGAGGTTATTGAGGAGATTTCTAACGGGAAGTTCGGCGTGACACTCACTAACAATCTCAAGGTCCTGGGCATCGACGAGGATGGGAAGATTCGCGAGTTCGACGTGCAGTATGTGTACAAGGATAAGACCAACACGCTCATCAAGATTAAGACAAAGATGGGCAGGGAGCTGAAGGTTACCACGTACCACCCGCTCCTGATCAATCATAAGAACGGCGAGATTAAGTGGGAGAAGGCGGAGAACCTCAAGGTCGGGGACAAGCTGGCTACGCCCCGCTACATCCTCTTCAATGAGAGCGATTACAACGAGGAGCTCGCTGAGTGGCTGGGCTACTTCATCGGCGACGGGCACGCCGATAAGGAGTCGAATAAGATCACATTCACTAACGGGGACGAGAAGCTGCGGAAGCGCTTCGCCGAGCTCACCGAGAAGCTGTTCAAGGATGCGAAGATCAAGGAGCGCATTCATAAGGACAGGACGCCAGATATCTACGTCAACTCCAAGGAGGCGGTTGAGTTCATCGACAAGCTCGGCCTGAGGGGGAAGAAGGCTGATAAGGTGCGGATCCCTAAGGAGATTATGCGCTCAGACGCTCTCAGGGCGTTCCTGAGGGCTTACTTCGACTGCGATGGCGGGATCGAGAAGCACTCCATTGTTCTCAGCACCGCTTCGAAGGAGATGGCCGAGGACCTGGTGTACGCTCTCCTGAGGTTCGGCATCATTGCCAAGCTGCGGGAGAAGGTCAACAAGAACAATAACAAGGTTTACTACCATATCGTGATTTCCAACTCCTCCAACCTCCGCACCTTCCTGGACAACATCGGCTTCTCTCAGGAGAGGAAGCTCAAGAAGCTCCTGGAGATCATTAAGGATGAGAATCCGAACCTGGACGTGATCACGATTGATAAGGAGAAGATCCGGTACATTAGGGACCGGCTCAAGGTCAAGCTGACACGCGACATCGAGAAGGATAATTGGTCCTACAACAAGTGCAGGAAGATCACTCAGGAGCTCCTGAAGGAGATCTACTACCGGCTGGAGGAGCTGAAGGAGATCGAGAAGGCCCTGGAGGAGAACATCCTGATTGACTGGGATGAGGTGGCCGAGCGCAGGAAGGAGATCGCGGAGAAGACAGGCATTCGCTCCGACCGCATCCTGGAGTACATTCGGGGGAAGCGCAAGCCAAGCCTCAAGAACTACATCAAGATTGCCAATACTCTGGGCAAGAACATCGAGAAGATCATTGACGCGATGCGGATCTTCGCTAAGAAGTACTCGTCTTACGCGGAGATCGGCAAGATGCTGAATATGTGGAACTCATCCATCAAGATCTACCTGGAGTCTAATACCCAGGAGATCGAGAAGCTGGAGGAGATTAGGAAGACGGAGCTCAAGCTGGTCAAGGAGATCCTCAACGACGAGAAGCTGATCGATTCTATTGGCTACGTCCTCTTCCTGGCGTCAAATGAGATCTACTGGGACGAGATCGTTGAGATTGAGCAGCTCAACGGGGAGTTCACCATCTACGATCTGCATGTTCCACGCTACCACAACTTCATTGGGGGCAACCTGCCTACTATTCTCCACAAC

SEQ ID NO: 2111 - protein, 1308 aa, Methanococcus jannaschii (Methanocaldococcus jannaschii DSM 2661)
  Intein encoding nucleic acids 53
TCGGTCTCTAAGGACACACCTATTCTCGTGAAGATTGATGGCAAGGTTAAGCGCACTACTTTCGAGGAGCTGGACAAGATCTACTTCGAGACCAACGACGAGAATGAGATGTACAAGAAGGTGGACAACCTGGAGGTGCTGACAGTCGATGAGAATTTCCGGGTTCGCTGGAGGAAGGTGTCGACTATCATTAGGCACAAGGTCGACAAGATCCTCCGGATTAAGTTCGAGGGCGGGTACATTGAGCTGACGGGCAACCATTCCATCATGATGCTCGATGAGAATGGGCTGGTGGCCAAGAAGGCGAGCGACATCAAGGTCGGCGATTGCTTCCTCTCGTTCGTCGCGAACATCGAGGGCGAGAAGGACCGGCTCGATCTGAAGGAGTTCGAGCCAAAGGACATCACCTCCCGCGTCAAGATCATTAACGACTTCGATATCGACGAGGATACGGCTTGGATGCTCGGCCTCTACGTGGCTGAGGGCGCTGTTGGGTTCAAGGGCAAGACCTCAGGCCAGGTTATCTACACGCTCGGGTCCCACGAGCATGACCTCATCAACAAGCTGAATGACATTGTGGATAAGAAGGGCTTCAGCAAGTACGAGAATTTCACAGGCTCGGGGTTCGACCGGAAGCGCCTGTCTGCGAAGCAGATCCGCATTCTCAACACTCAGCTGGCTAGGTTCGTGGAGGAGAACTTCTACGACGGCAATGGGCGCAGGGCTAGGAACAAGCGGATCCCGGATATCATTTTCGAGCTCAAGGAGAATCTGAGGGTCGAGTTCCTCAAGGGGCTGGCTGACGGCGATTCCAGCGGGAACTGGCGCGAGGTGGTCAGGATTTCGTCTAAGTCTGACAATCTCCTGATCGATACAGTGTGGCTCGCCAGGATCTCAGGCATTGAGTCATCCATTTTCGAGAACGAGGCGCGGCTGATCTGGAAGGGCGGGATGAAGTGGAAGAAGTCTAATCTCCTGCCGGCCGAGCCCATCATTAAGATGATCAAGAAGCTGGAGAACAAGATTAACGGCAATTGGCGGTACATCCTCCGCCACCAGCTGTACGAGGGCAAGAAGCGCGTCTCCAAGGACAAGATCAAGCAGATTCTGGAGATGGTCAACGTTGAGAAGCTGTCCGACAAGGAGAAGGAGGTTTACGATCTCCTGAAGAAGCTGAGCAAGACCGAGCTCTACGCGCTGGTTGTGAAGGAGATCGAGATCATTGACTACAACGATTTCGTCTACGACGTCTCTGTTCCAAACAATGAGATGTTCTTCGCTGGCAATGTTCCAATTCTGCTCCACAAC

SEQ ID NO: 2112 - protein, 1629 aa, Methanococcus jannaschii (Methanocaldococcus jannaschii DSM 2661)
  Intein encoding nucleic acids 54
TGCCTGACGGGGGACGCTAAGATTACTCTGCCTGACGAGCGGGAGATCAAGATTGAGGATTTCATTAAGATGTTCGAGGAGCGCAAGCTGAAGCACGTCCTCAACAGGAATGGGGAGGACCTGGTGCTCGCTGGCGTCAAGTTCAACTCCAAGATCGTTAATCACAAGGTGTACAGGCTGGTCCTGGAGAGCGGGAGGGAGATCGAGGCTACCGGCGACCATAAGTTCCTGACGAGGGATGGCTGGAAGGAGGTGTACGAGCTCAAGGAGGACGATGAGGTTCTGGTGTACCCGGCTCTGGAGGGCGTTGGGTTCGAGGTGGACGAGCGCAGGATCATTGGCCTGAACGAGTTCTACGAGTTCCTCACAAATTACGAGATCAAGCTGGGGTACAAGCCACTCGGCAAGGCGAAGTCATACAAGGAGCTGATTACTCGCGACAAGGAGAAGATCCTCTCTAGGGTCCTGGAGCTCTCCGATAAGTACTCCAAGAGCGAGATCCGGCGCAAGATTGAGGAGGAGTTCGGCATCAAGATTTCTCTGACCACGATCAAGAACCTCATTAATGGGAAGATCGACGGCTTCGCCCTGAAGTATGTGCGCAAGATCAAGGAGCTCGGCTGGGATGAGATCACCTACGACGATGAGAAGGCTGGGATCTTCGCCAGGCTCCTGGGCTTCATCATTGGCGACGGGCACCTGTCGAAGTCTAAGGAGGGCCGGATCCTGATTACAGCTACTATTAACGAGCTGGAGGGGATCAAGAAGGATCTGGAGAAGCTCGGCATCAAGGCCTCGAACATCATTGAGAAGGACATTGAGCATAAGCTCGATGGGAGGGAGATCAAGGGCAAGACCTCTTTCATCTACATTAACAATAAGGCCTTCTACCTCCTGCTCAACTTCTGGGGGGTCGAGATTGGCAATAAGACGATCAACGGGTACAATATTCCAAAGTGGATCAAGTACGGCAACAAGTTCGTTAAGAGGGAGTTCCTGAGGGGCCTCTTCGGGGCTGACGGCACAAAGCCTTACATCAAGAAGTACAACATCAATGGGATTAAGCTGGGCATTCGGGTGGAGAACATCTCCAAGGATAAGACTCTGGAGTTCTTCGAGGAGGTCAAGAAGATGCTGGAGGAGTTCGAGGTCGAGAGCTACATTAAGGTTTCGAAGATCGACAACAAGAATCTGACCGAGCTCATCGTCAAGGCCAACAATAAGAACTACCTGAAGTACCTCTCAAGGATCTCCTACGCGTACGAGAAGGACAATTTCGCTAGGCTGGTGGGCGAGTACCTCCGGATCAAGGAGGCGTACAAGGACATCATTCTGAAGGAGATCGCCGAGAACGCGCTCAAGGAGGCCGATGGCGAGAAGAGCCTGAGGGAGCTCGCTAGGAAGTACAACGTCCCGGTTGACTTCATCATTAATCAGCTGAAGGGGAAGGATATCGGCCTCCCCCGCAACTTCATGACGTTCGAGGAGTTCCTCAAGGAGAAGGTGGTCGACGGCAAGTATGTGTCCGAGCGGATCATTAAGAAGGAGTGCATCGGCTACCGCGATGTGTACGACATTACTTGCCACAAGGATCCTTCTTTCATTGCTAACGGCTTCGTCTCTCATAAC

SEQ ID NO: 2113 - protein, 1482 aa, Methanococcus jannaschii (Methanocaldococcus jannaschii DSM 2661)
  Intein encoding nucleic acids 55
TGCCTGACACCGGACACATACGTGGTTCTCGGGGACGGGCGGATTGAGACTATTGAGGACATCGTGAATGCTAAGGAGCGCAACGTGCTCTCCCTGGACCTCGATAACCTCAGCATCAAGATTGACACGGCGATCAAGTTCTGGAAGCTGCGCTACAACGGCAATCTGAGCAAGATCACACTCTCGAACAATTACGAGCTCAAGGCTACTCCGGACCACTGCCTCCTGGTGCTGAGGGATAACCAGCTCAAGTGGATCCCCGCCAAGGACATTAAGGAGAACGATTACATCGCGATGCCGTTCAATTACAAGGTCGAGCGGAAGCCCATCTCCCTCCTGAACCTCCTGAAGTACCTGGACATCACAGATGTTCTCATTGAGTTCGACGAGAACTCCACTATCTTCGAGAAGATTGCCGAGTACATCCGCAACAATATTAAGACCTCAACGAAGTACAAGTACCTCAGGAACCGCAGGGTCCCGCTGAAGTACCTCATCGAGTGGAATTTCGACCTGGATGAGATTGAGAAGGAGGCTAAGTACATCTACAAGTCCGTTGCCGGGACCAAGAAGATCCCCCTGTTCAAGCTCGACGAGAGGTTCTGGTACTTCGCTGGCCTGGTCCTCGGCGACGGGTCGATCCAGGATTCTAAGATCCGGATTGCCCAGACCCCACTGAAGGACGTGAAGAGCATTCTCGATGAGACGTTCCCTTTCCTGCACAACTGGATCTCGGGCAATCAGGTCATCATTTCTAACCCAATCATTGCCGAGATCCTGGAGAAGCTCGGCATGAGGAACGGGAAGCTCAATGGCATCATTTTCTCACTGCCTGAGTCCTACATCAACGCCCTCATTGCGGGGTACTTCGACACCGATGGCTGCTTCTCGCTCCTGTACGACAAGAAGGCGAAGAAGCACAACCTGCGCATGGTCCTCACGTCAAAGCGGCGCGATGTTCTGGAGAAGATCGGGATCTACCTCAACTCCATCGGCATTCTGAATACACTCCATAAGTCTAGGGAGGTGTACTCACTCATCATTTCCAACAAGAGCCTGGAGACTTTCAAGGAGAAGATCGCGAAGTACCTGAAGATTCGGAAGGAGGCTTTCATCAACGGCTACAAGACATACAAGAAGGAGCATGAGGAGCGCTTCGAGTGCGACCTCCTGCCAGTTAAGGAGGTGTTCAAGAAGCTCACCTTCGAGAAGGGCCGGAAGGAGATCCTGAAGGACTCCAAGATCCACATTGAGAACTGGTACAAGGAGAAGACCAACAATATCCCGAGGGAGAAGCTGAAGACGGTTCTCCGGTACGCGAACAATAGCGAGCATAAGGAGTTCCTGGAGAAGATCGTGAACGGGGACATTTCGTTCGTGCGCGTCAAGAAGGTGGAGAATATCCCGTACGATGGCTACGTCTACGATCTCTCTATCAAGCATAATCAGAACTTCATCTCTAATGGGGTCATTTCACACAAC

SEQ ID NO: 2114 - protein, 1359 aa, Methanococcus jannaschii (Methanocaldococcus jannaschii DSM 2661)
  Intein encoding nucleic acids 56
TCGCTGGGGCGGGATGAGCTGATTTTCATTAAGGAGGGGGACAAGCTGAAGGTTTGCAAGATCGGGGAGGCTATTGATGAGTTCATGGAGAAGTACAAGGATAAGATCATTGTTGATGGGGACACGGAGATCCTGTACCTCGACGGCATTGCTGAGGTGTACACCATCTCCGTGAACGTCAAGACGGGGAAGGCCGAGTTCAAGAGGGTCTACGCGATCAGCCGCCACAAGCCGAGGGGCAAGGTCTACAAGGTTATCGGCAAGGACGGGACCTCTATCATTGTTACGGAGGATCACTCACTCTTCAACTACGACGAGAACGGCAATCTGGTTTGCGTGAAGCCGCGCCAGATGAAGCATATCATTAGGAACTTCAACAATCCCTACGATGTGGAGTACCGGATCGGCGACTACATTGAGACAAATTACCAGAGGACTGATTCCAAGTACAACAGCCGGCAGAATGACATTCCCGAGAAGCTCAAGATCACAAAGGAGCTGTGCCAGTTCCTGGGCCTCTTCGTCGCGGAGGGGTCATACATCACTAACGGCATCTCCATTACCACGAAGGACGATGACATCGCTAAGTTCATTGAGCGGTTCGTGAAGGAGCAGATCAACGAGAATATTGCCGTCAAGCGCTACGAGGATTCGGTGCGGTTCGTCAACAAGGGGTTCTACCGCTTCCTCAAGGAGCACATCAATGGCAAGGCGATTAACAAGAATAGCCCGGAGTTCATCCTGAAGGGCGACAAGGAGATGAAGCTGGCTTTCCTCGGCGGGCTGATCTCGGGCGATGGCTACGTGTCCAAGGACGGCCGCGTGCAGATCTACACAACTTCCGAGCAGCTCCTGGGGCAGCTCCATCTCCTGCTCAGCGACCTGGGCATGATCTACTCGATTACAAAGATCAAGGAGGAGGGCGAGAAGATCGAGATTAAGCGGAACGAGATCGTCCGCAATTACAAGCTCTACGTTATCGAGATTGCCAAGAACTGCACCGAGGACCTGAAGCCCTACGTGATCCCCAAGTACAAGAAGGAGAGGATCAAGCCAGCGAACTACGATCAGCTCCCTTACGACTACCGGATCATTAAGGAGCACCTGCGCAAGATCACCGATAAGAAGCCATACAACGACTACGCCTGGAAGTCCAACAATCGCAAGCTGAAGCTCAACACGCTGGAGAAGATCGAGCAGCTCAATCCACATCTGAGGGAGGAGATTAACAAGTTCAAGCTGAATATCCCTTTCGAGATTAAGGAGATCAAGGAGATTGACTACAACGGCTACGTCTACGATCTCTCAGTGGAGGATAATGAGAACTTCATCACAGCTACAGGCATCCTCTGCCACAAC

SEQ ID NO: 2115 - protein, 1599 aa, Methanococcus jannaschii (Methanocaldococcus jannaschii DSM 2661)
  Intein encoding nucleic acids 57
TCGCTCCCTTACGATGAGAAGATCCTCATTTTCGAGAATAACGAGTACAAGCTGGTCAAGATCGGGGAGTTCGTGGAGAAGTACCTCAACCGCTACAAGGACAGGGCCATCACCTACGGCGATAACAATATCGAGGTGTACATTAAGGACGAGAATATCTACGCCCCATCGTTCGACAAGGATGGCAAGATCGTCCTGAAGCCTATCACGCACGCGATTCGGCATCGCGGGAAGGAGATCTACGAGATTGAGCTGGAGTCGGGCAAGAAGGTTAGGGTGACCGGGGACCACTCTGTGTTCACGATCAACGACAATCTGGATGTGGTCGAGGTCAAGGCTAGCGACCTCAAGGTTGGCGATTTCATCATTACACCGAAGATCATTCCCTCAATCTCCAAGGACAAGATCTACCTCTCGGAGATCGTCAAGAACAAGGACAAGTACTACGTTAAGATCAAGGATCACATCAAGTTCATTGAGGAGCATGAGGAGATCCTCAAGGAGTCCTACAAGGAGTACAAGACTAAGTGGAAGGACCTGAAGCCGGTTCTCAAGAAGAAGAACGCGTTCCGGCTCGATCTGATCGAGGACCTGGTCGATAAGGAGAAGATCGAGAAGATTTCTTACGGCCACGCTAACTACATCAACAATAAGATTAAGCTCGACGAGAAGTTCGGCTACCTGATCGGGGCCTTCCTCTCAGAGGGCCATTGGAACGACAAGTGCGTGGAGATTTCCAGCACCAACAAGGAGTTCATCGAGAATCTGGTCGAGATCATTGAGGAGATTCTCGGCAAGGACGCGTACTACATCACAGTGAAGGGGGACAAGCGCAGGTACAAGGACCTCTACGTGATCGGCCTCAACAAGACTGTCGCTATGATCTTCGAGTCCCTCGGGCTGAACAAGCTGTCGTCTAATAAGGAGATCCCGAGCATTCTCCTGTCGAATGAGACGTTCCTGAAGGGCCTCATCAAGGGGTACATTGACGGCGATGGGTCAATCTACGTCGACGAGTCTAAGCGGGATTACTCAATCCGCCTGTACACCACGTCCGAGACACTCCGCGACACTCTCTGCCTGGCGCTCAAGATCCTGGGCATTAACTACCGGCTCTCCATCGACAAGAAGAGCAAGGTTAACGAGAATTGGCGCGATTGCTACGTGATCAAGATTACCGGCAAGGAGAACATTGAGAAGCTCCTGGACGTCGAGATCAAGAACAATGGCGGGAAGGATGTTATCCCGAAGATTGCCGAGAAGTTCAAGGAGATCATTAACCAGTACTCCCAGAGGGAGTGGAAGGAGCGGTTCGGCATTGACGTGAACAATCTGCATATCTGGGAGGATCTCAAGAAGGGCTACATGAGCAGGTACCGGGCGAAGAAGGTTCTCAACATTATGAAGAATGTGAAGGAGATCGAGGAGAAGTACGGCAGGCTCCTGGACAAGATCGGGCAGCTGATTGACAACGATCTCCTGTTCGAGCGCATCAAGAGCATTAGGGTGCTCGACGAGATCCCCGAGTATGTGTACGATATTTCCGTGGAGGGCACAGAGAACTTCATTGGGGGGGAGGGCTTCATTTGCCTGCATAAT

SEQ ID NO: 2116 - protein, 1356 aa, Methanococcus jannaschii (Methanocaldococcus jannaschii DSM 2661)
  Intein encoding nucleic acids 58
TGCGTGGACGGGGATACTACAGTGCTGCTGGACGGCAAGCTCATCAAGATCAAGGATCTGGAGGACAAGTGGAAGGACGTGAAGGTCCTCACATCGGACGATCTGAACCCGAAGCTCACTTCCCTGAGCAAGTACTGGAAGCTCAATGCTGACGAGTACGGGAAGAAGATCTACAAGATTAAGACCGAGCTGGGCCGGGAGATCATTGCGACGGAGGATCACCCCTTCTACACCACGAACGGCCGCAAGAGGTGCGGGGAGCTCAAAGTGGGCGACGAGGTCATCATCTACCCGAACGATTTCCCCATGTTCGAGGACGATAATAGGGTTATTGTGGACGAGGAGAAGATCAAGAAGGTCATCAACAACATTGGCGGGACCTACAAGAACAAGATCATTAATGAGCTGAAGGACAGGAAGCTCATCCCGCTGACGTACAACGATCAGAAGGCTAGCATTCTCGCCCGGATCGTTGGCCACGTGATGGGCGACGGGTCTCTCATCATCAACAACAAGAACTCCCGCGTGGTCTTCCGCGGCGACATTGAGGATCTCAAGACCATCAAGGAGGACCTCAAGGAGCTGGGCTACGATGGGGAGGAGATCAAGCTGCATGAGGGGGAGACCGAGATCACGGACTACAACGGCAAGAAGCGCATCATTAAGGGCAAGGGGTACAGCTTCGAGGTGAGGAAGAAGTCGCTCTGCATCCTCCTGAAGGCTCTGGGCTGCGTCGGCGGGGACAAGACAAAGAAGATGTACGGCATTCCAAACTGGATCAAGACTGCGCCTAAGTACATCAAGAAGGAGTTCCTCTCGGCTTACTTCGGCTCTGAGCTGACAACTCCGAAGATCCGCAACCACGGCACCTCATTCAAGGAGCTCTCCTTCAAGATCGCGAAGATTGAGGAGATCTTCGACGAGGATAGGTTCATTAAGGACATCAAGGAGATGCTCAAGGAGTTCGGCATCGAGCTGAAGGTCAGGGTTGAGGAGGGGAACCTCCGGAAGGATGGCTACAAGACAAAGGTCTACGTGGCCTCCATCTACAACCATAAGGAGTTCTTCGGCCGGATCGGGTACACCTACGCGAATAAGAAGGAGACGCTGGCCCGCTACGCGTACGAGTACCTCCTGACGAAGGAGAAGTACCTCAAGGACCGCAACATCAAGAAGCTGGAGAACAATACAAAGTTCATTACTTTCGATAAGTTCATCAAGGAGAAGTGCCTGAAGAATGGCTTCGTTAAGGAGAAGATTGTCAGCATCGAGGAGACCAAGGTCGACTACGTTTACGATATTACTACTATTTCAGAGACTCATAACTTCATTGCTAATGGCTTCCTCACGGGCAAC

SEQ ID NO: 2117 - protein, 1413 aa, Methanococcus jannaschii (Methanocaldococcus jannaschii DSM 2661)
  Intein encoding nucleic acids 59
TCGCTGCCATACGAGGAGAAGATTATTATTAAGGAGGGGGAGTTCATTAAGCCAGTGGAGATCGGGAAGCTCGTGGATGAGATGATTGAGCGCTTCGGCTTCGAGAAGATCGGGAACTCTGAGGTCTGCGACCTCCCGATCGATATCTACGCCCTCTCACTGGACCAGGATGAGAAGGTGCACTGGAAGCGGATCATTTCGTGCATCCGCCACAAGCATAATGGCAAGCTGATCAAGATTAAGACCAAGAGCGGGAGGGAGATTACCGCGACGCCGTACCACTCGTTCGTCATCCGGAAGGATAACAAGATCATTCCCGTTAAGGGCTCCGAGCTCAAGATCGGGGACAGGATTCCGGTGGTCAAGCATATCCCCGCGAATTGCGTTGAGGCTATCAACATTTCCGACTACGTGAGCGGCAATTACGTTGTGGATAACATCAACAATAAGATTGCCCCAAAGATCAACGGCAAGTCCATTCCTAACAATATCAAGCTCGACTACGATTTCGGCTACTTCATCGGGATCTACCTCGCGGAGGGCAGCGTCACCAAGTACTTCGTTAGCATCTCGAATGTGGACGAGCTCATTCTGAACAAGATCCGGGCCTTCGCGGACAAGCTCGGCCTGAACTACGGGGAGTACGATAACAATAACGGCTTCGCGGAGTCGCATGACATCCGCATCTACTCCTCCACCCTCGCTGAGTTCCTGTCTAATTTCGGCACCTCGTCTAACACGAAGAAGATCGCCGAGTTCGTGTTCGGGGCGAACAAGGAGTTCGTCCGGGGCCTCATCAGGGGGTACTTCGACGGCGATGGGAATGTCAACGCCGACAGGAAGGTCATTCGGGTTACATCTAACTCAAAGGAGCTCATCGACGGCATCGCTATTCTCCTGGCCCGCTTCAATATCTTCAGCATTAAGACAAAGACTAAGAACCAGTTCGTGCTGATCATTCCCCACCGCTACGCGAAGAAGTTCCATGAGGAGATCAATTTCTCGGTCGAGAAGAAGAAGTCCGAGCTGGAGAGGCTGGTGTCATCCCTGAACGACGATAAGACATACGACTCAATCGATATGATTCCATCCATCGGCGATGCTCTCACTAAGCTGGGGGAGAAGGTCGACTACCCTAAGGTTATCCTCAAGAAGTTCGAGCGGAAGCAGAAGATCGGCAGGGCTACCCTCCAGAGGCACCTGCGCAGGATCGAGGAGCTGGCTGTGAAGAAGGGCGTCAACATCCTCGCCCTGAAGGAGTACTGGCTCCTGAAGAAGGCCGTTGAGTCCGACGTGATCTGGGATGAGATTGTCAAGATCGAGGAGATTAGCTGCGACAAGAAGTATGTGTACGATATTTCTGTGGAGGGGCTGGAGACTTTCACTACTTTCGATGGGGTTCTCACTCATAAT

SEQ ID NO: 2118 - protein, 1464 aa, Methanococcus jannaschii (Methanocaldococcus jannaschii DSM 2661)
  Intein encoding nucleic acids 60
TGCCTGACATCAAATTCAAAGATCCTGACAGACGATGGCTACTACATTAAGCTGGAGAAGCTCAAGGAGAAGCTGGACCTGCATATTAAGATCTACAACACCGAGGAGGGCGAGAAGTCCAGCAATATTCTGTTCGTGTCGGAGCGCTACGCGGATGAGAAGATCATTCGGATCAAGACCGAGTCGGGGAGGGTCCTGGAGGGCTCTAAGGACCACCCGGTGCTGACGCTCAACGGCTACGTGCCCATGGGCATGCTCAAGGAGGGGGACGATGTGATCGTCTACCCATACGAGGGCGTGGAGTACGAGGAGCCTTCCGACGAGATCATTCTCGATGAGGACGATTTCGCGGAGTACGACAAGCAGATCATTAAGTACCTGAAGGATAGGGGCCTCCTGCCGCTCCGGATGGACAACAAGAATATCGGCATCATTGCTAGGCTCCTGGGGTTCGCCTTCGGCGATGGGAGCATCGTGAAGGAGAACGGCGACAGGGAGAGGCTCTACGTGGCCTTCTACGGGAAGAGGGAGACCCTCATCAAGATTCGGGAGGACCTGGAGAAGCTCGGCATCAAGGCCAGCCGCATCTACTCCCGCAAGCGCGAGGTCGAGATCAGGAACGCGTACGGCGACGAGTACACATCCCTGTGCGAGGATAATTCTATCAAGATTACTTCAAAGGCCTTCGCGCTGTTCATGCATAAGCTCGGGATGCCCATCGGCAAGAAGACGGAGCAGATCTACAAGATTCCAGAGTGGATCAAGAAGGCCCCTAAGTGGGTTAAGCGGAACTTCCTGGCTGGCCTCTTCGGGGCTGACGGCTCTCGCGCGGTCTTCAAGAACTACACCCCGCTGCCCATCAATCTCACGATGTCGAAGTCTGAGGAGCTCAAGGAGAACATCCTGGAGTTCCTCAATGAGATTAAGCTCCTGCTCGCTGAGTTCGATATCGAGTCAATGATCTACGAGATTAAGTCCCTGGACGGCCGCGTTAGCTACAGGCTCGCCATCGTGGGCGAGGAGTCAATTAAGAACTTCCTGGGGCGCATCAATTACGAGTACTCCGGCGAGAAGAAGGTCATCGGGCTGCTCGCGTACGAGTACCTCCGCAGGAAGGACATCGCTAAGGAGATTCGCAAGAAGTGCATCAAGAGGGCGAAGGAGCTGTACAAGAAGGGCGTTACAGTGAGCGAGATGCTCAAGATGGATGAGTTCAGGAACGAGTTCATCTCGAAGCGGCTGATTGAGCGCGCTGTCTACGAGAATCTCGACGAGGACGATGTTCGGATCTCCACTAAGTTCCCGAAGTTCGAGGAGTTCATCGAGAAGTACGGCGTCATTGGCGGGTTCGTTATCGATAAGATTAAGGAGATCGAGGAGATTTCATACGACTCCAAGCTGTACGACGTGGGCATCGTTTCAAAGGAGCATAACTTCATTGCTAACAGCATCGTGGTTCATAAT

SEQ ID NO: 2119 - protein, 1005 aa, Methanococcus jannaschii (Methanocaldococcus jannaschii DSM 2661)
  Intein encoding nucleic acids 61
TCGGTGGACTACAATGAGCCTATTATTATTAAGGAGAATGGGGAGATTAAGGTCGTGAAGATCGGGGAGCTGATTGACAAGATTATTGAGAACTCCGAGAATATCCGCAGGGAGGGCATCCTGGAGATTGCCAAGTGCAAGGGGATCGAGGTTATTGCGTTCAACTCGAATTACAAGTTCAAGTTCATGCCAGTTTCGGAGGTGTCTAGGCACCCTGTGTCTGAGATGTTCGAGATCGTGGTCGAGGGCAACAAGAAGGTCAGGGTTACACGGTCCCATAGCGTCTTCACTATCCGGGACAATGAGGTTGTGCCGATCCGCGTGGACGAGCTGAAGGTCGGGGATATCCTGGTTCTCGCGAAGGAGCTCCCCAACATCGAGGAGGACATCGAGATTGATAAGAAGTTCTCAAAGATCCTGGGCTACATCATTGCTGAGGGGTACTACGACGATAAGAAGATCGTGCTCTCTTACGACTACAACGAGAAGGAGTTCATCAATGAGACCATTGATTACTTCAAGTCACTGAACTCCGACATCACGATCTACAGCAAGGATCTCAATATCCAGATTGAGGTGAAGAACAAGAAGATCATTAATCTCCTGAAGAAGCTGCGCGTCAAGAACAAGAGGATCCCGAGCATCATTTTCAAGTCGCCCTACGAGATCAAGAAGTCTTTCATCGACGGCATTTTCAACGGGAAGGATGCTAAGGTGTTCGTCTCAAAGGAGCTCGCCGAGGACGTGATCTTCCTCCTGCTCCAGATTAAGGAGAACGCCACAATCAATAAGAAGTCGATCAACGATATTGAGGTCTACGAGGTTCGGCGCATCACCAACATCTACACGAATCGGAAGCTGGAGAAGCTCATCAACTCCGACTTCATTTTCCTCAAGATCAAGGAGATTAATAAGGTCGAGCCGACGAGCGGCTACGCGTACGACCTCACTGTTCCAAATGCGGAGAATTTCGTTGCTGGCTTCGGGGGCTTCGTGCTCCACAAT

SEQ ID NO: 2120 - protein, 1362 aa, Methanococcus jannaschii (Methanocaldococcus jannaschii DSM 2661)
  Intein encoding nucleic acids 62
TGCTTCCATCCGGATGAGGTTCTCTTCATTGATCGGGGGCGGGGGCTGGAGTGCATTACTTTCAAGGAGCTGTTCGAGCTGGAGGACAAGGACAACGTGAAGATCCTCTCCTTCGATGGCGAGAAGCTCAGCCTGAAGAAGCTCAAGCTGGCCTCCAAGCGCTACTACAATGACGATCTCATCACCCTGCGGTTCAACCTCGGCCGCGAGATCAAGATTACGAAGGACCACCCAGTGGTCATTCTGGAGGATGGCGAGCTCAAGATCAAGCTGACATCTGACGTGAAGGAGGGGGATAAGGTCATCCTGCCCTACGGCAACTTCGGGGAGGAGAGGGAGATCGAGATTGACATCCTGGAGGAGCTGAGCAAGACAGATCTCATTGAGAAAGTGTGGATCCACAACAAGGACCTGGCGACTAATGAGTTCAACATCATTAAGCCATACCTCTCGAATAAGTACCCTCATGACGTCAAGAGGAACGGCACCATCCGGGCTAAGGACATTCTCCCGATCAAGGAGATTCTGGATAAGTACGGGTCCAAGAACCGGCTGTTCACGGCGAAGTCGAAGTCTACCACGATCCCCTACAAGATTAAGATCGACAAGGATTTCGCTCGGCTCATTGGCTACTACCTGAGCGAGGGGTGGATCTCGAAGGACTACGGCCGCAACGGGGTTGTGCGCAAGAGGATTGGCCTCTGCTTCGGGATCCACGAGGAGGAGTACATTAACGACGTTAAGAATATCCTCAACAAGCTGGGCATCAAGTACATTGAGAAGATCAAGGATGGGTCACATTCCATTCTCATCTCCAGCAAGATCCTGGCTTACGTCTTCGAGAATATTCTGAACTGCGGCATCAACTGCTACAATAAGAACATCCCGCCCCAGATGTTCAATGCCAAGGAGGAGATCAAGTGGGAGTTCCTCAAGGGCCTGTTCCGCGGGGACGGCGGGATCGTCAGGCTCAACAATAACAAGAATCTGAACATCGAGTTCGCCACCGTTTCTAAGAAGATGGCGCACTCACTCCTGATTCTCCTGCAGCTCCTGGGCATCGTCGCTTCGGTTAAGAAGTGCTACAATAACAAGTCTACAACTATGGCCTACATCATTAGGATTAACGGCCTGGAGCAGGTCAAGAAGATCGGCGAGCTGTTCGGGAAGAAGTGGGAGAATTACAAGGACATTGCCGAGTCATACAAGCGGAACATCGAGCCGCTCGGCTACAAGAAGTCCGATAATTTCGCGATCCTGGAGGTTAAGGAGATCATTAAGGAGCATTACTCCGGCTACGTGTACTCAGTGGAGACAGAGAACTCACTGCTCATTACAAGCTACGGCATCCTCATTCACAAC

SEQ ID NO: 2121 - protein, 1182 aa, Methanopyrus kandleri AV19
  Intein encoding nucleic acids 63
TCTATTCCGGGGGATGAGGTCGTTTGGGCCAAGGTGGACGGGGAGGCCAAGCTCATTCCTATTGAGGATCTCTACGAGCTCTGGAAGGAGGGCAGGGATGTTGAGGTGGCTGCTCTCACGGAGGAGGGGGTGGTCTGGTCCAGCGTCGACAGGGTTGCTAGGCACAGGAGGCGGACAGGCCTGGTGAAGATCATTACAAGGACTGGGCGGGAGGTCATCGTTACAGAGGACCATTCCGTGTTCACTGTCCGGGACGGCAAGATTGTGGATGTCCCAACCTCAGAGCTCTCCGAGGGCGATTGGATCGTCCTCCCAGCTAGGCTGCCAGCTGGCGACTCAGATGAGATTGACGGGATCAAGATTGACGAGGATCTCGCGTTCCTCCTGGGCCTCTACGTGGCTGAGGGGTCCCTGACCAACCAGAAGGACGCTGTCAGGATCCACAATAAGGATCCTGAGGTCATCGAGGAGATTGACCGCATCGTTAGGGAGAAGGGCTGGGAGGGGCGGTACTACGAGAGCGACCATTCGTACTGGATCAAGAGCCGGAAGCTCCGCCAGCTGTGCGAGAAGCTCGGCACTAAGGCCAGGGAGAAGAGGCTCGGGCCACTCCTGTCGCTGAAGCCTGAGCTCCTGGCTGCTGCTCTGAGGGGCTACTACACGGGCGACGGGTCGTTCTCTGTGAAGCCGCACGGCCGCTCTGCCATCATTGAGGCGACCACGGTCTCAAAGAGGCTCGCTGATGAGCTCCTGGTGGCCCTCCAGATTCTGGACATCGTCGCGCGCCGCTACGAGTGCGACGATACCAAGGGCTCGACGCGGTACCGCGTGATGATTACCAAGTCTGAGTACATCCGCACGTTCGTTGAGAAAGTGGGCTTCGCCCAGTCCGAGAAGAACGAGAGGATCCGGAAGTTCCTCGCGGAGAGGAAGTGGACACGCGGCAGGTCCGATATTCCGACTGAGCTGATCGGGAGCCCCTACACCTACGTTGAGGTGGAGTACATCTCTGACAGGGTGGCTGCTGATGGCGGGCTCATGAAGGCCGAGCTGGAGCATCTGTACTTCGACAAGATTAAGGAGATCGTTCCCCTGGATCGCGACGATGAGTATGTGTACGACGTCGTGGAGGTTAAGCTCGGGCATAATTTCGTTGGGGGGCAGGGGGTTCTGCTCCACAAC

SEQ ID NO: 2122 - protein, 1566 aa, Methanopyrus kandleri AV19
  Intein encoding nucleic acids 64
TGCGTGGCGCCGGAGACAAAGATCTGCCTCGCTGACGGGCGGTTCGTTAGGGCCGATGAGCTGTTCGAGGAGCTGAAGGAGCGGGGGCGCCTGGTTAAGTGCGACGAGAGCGAGGAGGTGTACGAGCTGAGGGAGCCAGTTGGGGTGTCCAGCCTCGACAAGGATGCGGTGGAGATCGTCGAGGGCAAGATTACGCACGTGTGGCGCCTCAAGGCCGACAAGCTGGTCGAGGTTGAGGTGAAGAACGGCAGGTCGATCCGGACCACGCCAGAGCATAAGTTCCTGGTCCTCGATCCTTCTGGCGAGATCGTTGAGAAGAGGGCCGATGAGCTGGAGATCGGGGACTACATTGTGTGCACCCAGAAGCTCGTCCACGAGGGCATGTCGGAGGAGGAGCTCAAGAGGGAGGTGTTCCGCAGGCTGGGCAGGGACTTCTTCGTCCATCTCCCGGAGGAGGAGGCCGAGAGCGTTCTGGAGCTCGCGAAGGAGCGGGGCATCAAGGCTCTCTGGGAGACGCTGGAGGTGGACATTGAGGAGAACTCGTTCTACTACCAGCTCAGGAAGGGGCGCATCAGGGCCGATATTCTCGTCGACCTGGCTGAGGAGCTGGGCCTCGACCTGGCTGATCTGTACGACGCCGTCGAGGTTTCATACAGGTCCAATACCAAGTCCACGAAGCCAATCAGGCTCCCAGAGCCAGAGGACCTCTTCTACCTGGCGGGCCTCATGTTCGGCGATGGGTGCTGGAACCAGCTGACCAATGGCTCCGAGGCCATCCAGGGGGAGGTGAAGCGCATTGCGAGCGACATGGGCCTGGAGGTGCGCGTGCGCCGCTACGAGGGGAAGACAGCCCGGATCGACTTCCCAGAGACTGTGCCTCGCATTCTGGAGGCTCTCTTCGATTACCCAAGGCGGAAGAAGGCCCACCGGATCCGCGTCAACGATTTCCTCACAAGGGCGCCTCTGGACTGCATCGCTGAGTTCATTCGGGGCTACTTCGACGCGGATGGCACAGTTGAGGAGGGGCGGAGCGCTGTTTCGGTGACTTCGGTCTCTCGCGAGTTCCTGGAGGATCTCCAGCTCCTGCTCCAGAAGTTCGACGTGGCTTCTTACCTGAGGGAGGGCGATGGGGCTTACACCCTCTACGTGTCCGGCGCTAGGTCACTGGAGAGGTTCCCAGGGTTCAGGGAGCCAGAGAAGGCTGAGAAGCTGAAGAAGCTCATGGAGAAGGCCTCGTCTTCAGAGCTGGAGAAGGTCCCGATCTCCGGCGAGATTCTCAGGGAGGTCAGGGGGGACGTTCCCACAACTCGCATGTTCAACTGCTACTCAAATTACGAGGGCGGGCAAGTGGGCCTCACCAAGTCCAGCCTGGAGAAGGTCATCTCCACGCTGGAGGCTGTCGGCGTTGAGGGGGAGGCTCTGGAGAGGCTCAAGGCTCTGGCGCGGGACGATGTGTGCTTCCTGGAGGTGGTCCGCGTTGAGGAGGTGGAGTACGACGGCTACGTCTACGACTTCACAGTGGAGGAGCATCATAACTTCGCTGCGGAGGGCTTCGTGGTTCATAAT

SEQ ID NO: 2123 - protein, 915 aa, Methanopyrus kandleri AV19
  Intein encoding nucleic acids 65
TCGGTTTCGGCTGATACTCCTATTCTCGTTAGGCGGGGGGGGGAGGTTCTGCGGGTTACTTTCGAGGATCTGGACTCATGGTACTTCGGCGACAGGGGCGGGGAGTATGTGGACGTGTCTGACCTGGAGGTCCTGACCGTTGACCGGAACTTCCGCGTCACGTGGGCTCGCGTTAGCAAGCTGATCCGGCACCGCGCCAGGAAGATTCTCAGGGTGCATCTGGAGGACGGCACAATCGAGCTCACTGGGAATCACGCCGTCATGGTTCTGGATGAGGGCGGGCTCAGGGCTGTCAAGGCTTCGGAGATTGAGGAGGGCTCATTCCTCCTGTCCTTCGTGGCGGAGCTGGACGAGCAGCCAACAGATGGCGGGACCGTGGTCACGTCCGTCGGCTCGGGGTCTCGCGTGAGCGACACCACGTACGAGCTGCCAGTGGAGGTCCGCGTTGAGCTCCTGAGGGAGCTCGCCGACGATGGCGTGATCGAGGCGAGCGAGGACGTGTCGGTCGATCTCGCTTGGCTGGCCCGGATTTCTGGCGTCGAGTCACGCGTTACCGACGATGGGGTGGAGCTCGTCTGGGAGACAAGGACTGGCGACCTCCTGCCAGCTGATCCAGTGCTCAAGCTGGTCGAGCGGCTGGAGTCGGACCTGGTCGACGACCTGGAGTCTTGGGTCTTCGATGGCAGGGTGTCAAAGGAGGCGGTTCGGAAGGTGCTGTCCAGCGTGGACGCTAAGAACCTCAGGGGGGATGCTAGGAGGGCTTACAGGATGCTCCGGACCCTGGTTCGCTCCGACGTGCATGCGGTTAAGGTGGAGGACCTGGATGTCATGGACTACGATGGCTACGTGTACGACGTTTCTGTTCCAGGCAATGAGATGTTCTTCGCCGGGGAGGTTCCAGTTCTGCTGCATAAT

SEQ ID NO: 2124 - protein, 1446 aa, Methanopyrus kandleri AV19
  Intein encoding nucleic acids 66
TGCCTCGCGCCGGGGACAAAGATTCTCACGGAGCATGGCTGCTGGGTTAAGGTGGAGGATCTCCCTAAGATGCTGACCGATCAGAAGCTGAAGGTTTACGACGTGGATGAGGGCCGCGAGGACGATTCCGAGATCAAGTTCGTCATGGAGAGGGGCATTGAGGAGGACGAGAGGGCTGTGGTCCTCGTGACCGAGTCAGGCCTGACGATCGAGGGGTCCGAGGATCACCCAGTCCTCACCCCTGAGGGCTACGTTGAGCTGGGGGAGATTGAGGAGGGCGACCTCGTTGTGGTCTACCCGTTCGAGGGCGTCGAGTACGAGGAGAAGGAGGGCACGATCCTCGACGAGTCCGATTTCGAGGACGTGGATCCCCAGGTCCTCAGGTACCTGGAGGAGAGGGACCTCATCCCACTGAGGTGGAGCGATCCAAAAGTGGGGACGCTCGCCAGGATTCTGGGCTTCGCGATGGGCGACGGGCACCTGGGCGAGCAGGCTGGGCGGCTCACCCTGTCTTTCTACGGCGACGAGCGCACGCTCAGGGAGCTGAAGCGCGACCTGGAGTCACTGGGCGTCAAGGCGAACCTCCATGTTCGCAAGCGCCGCTACGAGATCGAGACAGCTAGCGGCCGCTACGAGGGGGAGGCTACTTCGGTTGAGCTGCGGGTGGCGTCGCGCTCTTTCGCTCTCCTGATGGAGAAGCTCGGCATGCCAAGGGGGCGGAAGGTGGAGACCCCGTACAAGGTCCCCGATTGGATCAAGGAGGCGCCTCTGTGGGTGAAGAGGAACTTCCTCGCTGGGCTGTTCGCTGCTGACGGCTCGGTTGTGAAGTTCAAGCGGTACACACCGCTCCCCATCAATCTGACTCAGGCCAAGGTCGAGGAGCTGGAGGAGAACCTGCGGGAGTTCATGAATGACGTGGCGAAGCTCCTGCGCGAGTTCGGCATTGAGACCACGCTGTACGAGGTCAAGAGCAAGAAGAACGTCGTTTACAAGCTGGCCATCGTGGGCGAGGAGAATATTAAGCGCTTCCTCGGCAAGGTCGGGTACGAGTACGATCCAGAGAAGAAGGTGGAGGGCCTCGCTGCCTACGCGTACCTCAAGCTGAAGGAGCGCGTCAAGAAGGACAGGAAGGAGGCTGCTGAGACAGCTGCTGAGGTGTACGAGGAGACAGGCTCCATCACTAAGGCCCATGAGGCTGTCGCTGACGTGGTCAACAGGAGGTTCGTGGAGAGGGTTGTGTACGACGGCGGGATTTCCAGCGTGCGGGTCCCAGAGGATTTCCCTACCTTCGAGCGGTTCAAGGAGGAGAGGGTTCTCGCTGGCGGGTTCGTGATCGAGGAGGTCGTTGAGGTCAAGGGCGTTGAGCCGGAGTACGACAGGTTCTACGATATTGGGGTTTGCCACGGGGCTCATAACTTCATTGCGGATGGGGTCGTCGTTCATAAT

SEQ ID NO: 2125 - protein, 1551 aa, Methanopyrus kandleri AV19
  Intein encoding nucleic acids 67
TGCTTCGCGCCTGGGACAAGGGTTATTACGGCCTCGGGGGACGTGGTGGAGATTGATGAGATCGTGGAGCGGGCTGCGGAGACGGCTGTGGACGGCGGGCTGAGGGAGGGCTCTACAGAGGTTACTGTGGGGGTCACCAACGTCAGGACGCTGGCTGCTTGGGACGGCGATCTCACCTCTAATGACGTGGTCGCGGTGGAGAAGATCGAGGCTCCGTCACGGGCCGTTCGCGTGAGGACCAGGTCCGGCGCTGAGCTGGTTGTGAGCGAGGACCACAAGTTCCTCGTGGACACGGAGGATGGCCCAAGGATGGTCGAGGCTAGCGAGCTCAAGTCGGGGGATGAGCTGTACTCGGTGCGGGAGCTCCGCGTGTCTGAGAAGGTCCCAACATACCTGGAGCTCCTGCTGGAGGCCGAGGACAAGTTCTACGTGCATCCTACTGAGGAGTTCGAGGAGGCTGTCGCTGAGCGCTACGGCTCCCTGGCTGAGGCTTGCAGGGAGAAGGAGCTCCCATACAGGGCCAGGGAGGCTAAGGAGCGCAGGTACTACGAGCTGAGCGAGTTCGCTAGGCTCGCTACGGCTGTTATCGAGTCGGTGGACGAGGCCACAGAGTACATTGATTACGTCACTGCGGGCGGGCGGAAGCGCGTTAAGTTCTCCAGCCCAAGGCCAGGCAAGGAGGTCATGTATGTGGCGGGCCTGATCGCTTCAGACGGGTCCGTTGATACAGAGAGGGGCTTCGTGATGTTCTCAAACACTGAGCGGGAGCTGCTCTCCGCGTTCGAGGAGATTGTCACAGAGGAGTTCGGCGTTGACGCCTCGAAGACCGAGAACCAGAATGGGGTCACGATGCTGAGGGTCAATTCCCGGGTTCTCGCGCGCGTGTTCGAGAGGCTGGCTGACCCGAAGACTGTCCTCAAGATGCCCCGCGAGCTCGTGGCTGCTTACCTGGCTGGCTACGTCGACGGCGATGGGCACCTGAAGGATGGGAAGATCGTGATTACCACGGCTGACAGGGAGAGGGCTGGCGATCTCCAGCTGCTCCTGAAGAGGCTGGGGGTGCCAAGCGTCCTCAGGGAGAGGGACGGCGCTTACGATGTCGTTGTGACAGGGCACGACGCTGCTGAGCTCGCTGAGGAGCTCCCACTGAGGCATCCTAAGAAGGCTGAGGCTGCTGCTTCCATGTCGTCTGGCAGGCGCTCATCCAGGTTCGACCGGGTGAGCAGGAGGTTCGGGAGGCTCCTGAGGGAGGTGCGCAGGAAGTACGGCGTCAGGGCTTCCGATCTGGGGAGCTCGTCTACCATCTCTCAGATTGAGTCAGGCGAGAGGAGGGCTACGAGGAGGCTCGCTCTGGAGATCGTCGAGAGGCTGGAGGAGGTCGTTGGCGACGTTGAGGAGGTGCGGGAGCTCAGGGAGCTGGCTGAGGGCAACTACGTGCTGGATGAGGTGGTCGAGGTCGAGACGGTTGAGTACGAGCATGAGTACCTCTACGATGTTACAGTGGTTCCAGATCATACTCTCGTGGTTGAGAATGGCATCATTACAAGCAAC

SEQ ID NO: 2126 - protein, 951 aa, Mycobacteriophage Bethlehem
  Intein encoding nucleic acids 68
TGCTCGTGGACAAACGCTAGGGCGGTTACAAGGCGGGGGTTCGTGCATGTGGATGATCTCACTACTGATGATGAGGTCATGTCGGTCGACGATCAGGGCAGGACAATCTGGCAGCAGATTGACGAGGTGGTCCGGTTCCCGTTCAGCGGCACGCTCTACTCGCTGGGCGGGAGGGAGATCAACGCTACCATTACGGCCAATCACCGGGTTGTGGGCCTCAACCGCGAGAAGACCAAGTGGGTTGAGCATACACCAACTTCCCTGCCTGGCAACAAGATGTGGGTGTACACCGCTGGCGAGGGGAGCAATGAGGACTACCCGCTCACCGATACGGAGATCAGGCTCGCTGTGTGGGGCCTGACAGACTCGCACAGGTCTCCCGATGGCCGGTGGACTTTCTACCAGTCCGGGGAGAAGGCGGAGCAGGTCAGGAAGCTCCTGGCTGACGCTGGCATTGAGTACAGGGAGAGGGCTAGGAACAGGGGCATCACCGAGATTGATGGGAAGGTCCTCAAGGCGCCGCCCAAGACGCAGTACGAGTTCTCGCTCGGCAAGGTTCAGGAGCTGGACGATCTCCTGGACAGGGGGAGGAGCGAGCTGCCAACATGGACTCTCTCCCTGAGCCAGAGGCAGGCTAGGCTCTTCCTGGAGGAGTACAGGTTCACCGACGGCACGGATACCACGTCAGCTGGGGACTCCTACGTCCTCTACGTTTGCAAGGATCGCATGAGGGAGCAGCTCCAGATGCTGGCTGCTGCTAACGGCCTCAGGGCTTCCACAACTGAGTACAGGCCAGGGCATTGGAGGCTGAACATCTCTAATAGGGCGCTCTCAGGCCTGTACAAGAATACCGTGGAGGAGGTCGCTTACGAGGGGGAAGTGTGGTGCCTGCGGGTTCCAAATGGCAGGTTCTTCATTGAGGATGGGGGCAAGATTCATCTCACGGGCAAC

SEQ ID NO: 2127 - protein, 993 aa, Mycobacteriophage Catera
  Intein encoding nucleic acids 69
TCGCTCGCCTGCTCTACTCCTATTCTGACTACAAATGGGTGGTCAACTATGGGGGCTCTCCAGGACGGGGATGAGGTCTACGCGCCTGACGGCCAGCCTACCAAGGTCATCAAGGCCCACCCCATTAACCTCAATAGGCCATGCTTCAAGGTCCGGTTCCGCGACGGCCAGGAGGTGGTCACGGATGCGGAGCATCTGTGGCAGGTGAACGACCGGAACAATGGCGGGAGGGATCGGGTCATGACCACGCAGGAGATCGCTGACGCTCCATGGGGCGGGCGCTACAGGTTCCGGGTCCCAGTTACCGAGCCTCTCCAGACGCCAGAGGCTGACCTGCCAGTGGATCCATGGCTCCTGGGCGCTTGGCTCGGCGACGGGGATGCCTCGATGGTCTCTATCTGCTCCGGCAGCCAGGACCTCGATTACCTGATTTCTAGGGTCGAGGGCCTCGGGCTGTCACACAGGGTTAACCGCTACGGCTCACGCGCCGCTTCCGTCTACGTGCATGGCATGAGGGCTGTGTTCTCGGAGCTCGGGCTCCTGAAGAATAAGCACATCCCCGACAGGTACCTGACCGCTTCTGTCGCTCAGAGGAGGCAGCTCCTGGCTGGCCTGATGGACAGCGATGGGACAGTTTCGGATCGCCAAGTGACTATTAGCATGAAGAACGAGAGGCTCATGAGGCAGGTGCTCCAGCTGGTCCGGTCCCTGGGCTACAGGGCTGGCTTCGGGAGCCGCATGGCTAGGCTCAATGGCAGGGACTGCGGGCTGGTCTACGTGGTGCGCTTCCATACAGGCTGGGGGGAGTCGCCCTTCGACATGCCACGCAAGAGGGATGGCTGGGAGCAGGCGACAAAGACTTCCGTTCAGAACCTCCGGCTGAATGCCATCGTTGCGGTGGAGCCTGTCGAGACCGTCCCGGTTCGCTGCATTACTGTTGCTCATGAGTCTTCGCTCTACGTTGCTGGGGAGGGGTTCGTTCCTACACATAAT

SEQ ID NO: 2128 - protein, 1308 aa, Myxococcus xanthus DK1622
  Intein encoding nucleic acids 70
TGCGTTAAGAATGATTCGCTGATTTTCACTGATCGGGGGCTGGTCACTGCGGCGGAGCTCGCTGTCGGGGTTCCTGAGGAGCATGCGGCCTTCACGGAGGTTGGCGTGGACACATCCACTGGGAGGGCGACCACGAACGCTGTGTACAATGGCGGGAGGAGCCCAACCAAGAGGGCTAGGCTCGCCCTGGGCTACGAGCTGGAGGCGACGCCAGAGCACCCAATCAGGGTTCTCAGGGACGATGCGCTGGCTTGGGTGCGGATGGACGAGCTCCATGTCGGCGATCGCGTTGCTCTGAGGAGGGGCTCGGAAGTGTGGGGGCGCTCCAGCCTGCCAGAGGCGTTCAGGTGGGTCAAGCCTAAGTACGCCGCGAACCTCAAGCTGCCAAAGGGCCTCGTGCTGGACGAGGTCGCTGCTGAGGCTTGCGGCCTCCTGGTCTCCGAGGGGACCCTCACGAAGCGCCTGGTTACAGAGTTCACTAACGCCGACGCGGATAATGTGGGCTTCATCTCGCGCTGGGCGGCTTCTATCGGCATTGACCTCTCAAGGAACGGGAGCGATTCGATTCAGTACCTCCTGTGCTCCGTGGTCCTCAGGGAGTGGCTGGCTTGGCTCGGCCTGGACTACACCAGGGCCGCTGGGAAGTGCATCCCGCGGGCGGTCCGCTTCGGCGGGAGGGACATTATGAGGGCGTTCCTCAGGGGCCTGTTCGACGGGGATGCTTCTGTCGATCCCCTCAAGGGCGTTATCGAGTTCTGCACAGCCTCAGAGAGGATGGCGCGGGAGGTCCAGGTTGCTCTCCTGGGCCTCGGGATTCTGGCTTCTCGCCACTCAAGGACTGTGGCCGGCTACGAGCAGCTGTACTGGCGGGTGACCGTCAACGACGTGGCCACGTTCGAGAGGGAGGTCGGCTTCTCGTCTAACTGGAATAGGCTCAGGCTGAGGGAGGCTGTGGCGCGGGCAGAGGGCAGGTGCCGGAACCCGAATGTTGATACAGTGCCCATCAACGGGCTCGTCGAGAGGCTGTACAGGACTGCCCAGAAGCAGCTCTCCTGGTCATCCCAGGAGGGCCGCATCTTCGGGAATTACGTGCACGGCGAGCATGCTCCAAGCAGGGCTGCTCTGGAGAGGATGGTCCAGCGCTGGGGGTCGGAGTGCCCAACCGAGTGCCTCCCTATCGAGGCCTTCCTGGAGCTGCCTGTTGCCTTCCTGTCCGTGGAGAGCATTGAGGACGGCGAGGCGGATGTCGTGGATCTCTCAGTTCCAGAGACGCATGAGTTCGTTGCTAATGGGGTCGTTTGCCATAAT

SEQ ID NO: 2129 - protein, 1275 aa, Nocardia farcinica IFM 10152
  Intein encoding nucleic acids 71
TGCCTCCCAGCCTCAACGCGGATTCTCAGGGCGGACACTGGCGCGGAGTCAACTCTCGGGGAGCTGCTGGCCTCGGGGGAGCAGCCTCTCGTTTGGTCCCTGGACGAGAGGATGAGGATGGTCGCTAGGCCGATGGTTAAGGTGTTCCCCTCGGGCAGGAAGGAGGTGTTCAGGCTGAGGCTCGCTTCTGGGAGGGAGGTCGAGGCTACCGGCAACCACCCGTTCCTCACGGTGGACGGGTGGATCCCACTGGATAGGCTCACAGTCGGCGACAGGCTGGCTACTCCAAGGAGCGTGCCAGAGCCCGTCCACACAGAGAGGATGGCCGATGCGGAGGTGGTCCTCCTGGCTCACATGATCGGCGACGGGTCGTGCGTCCGCAGGCAGCCCGTTCGCTACGCCTCCATTGACGAGCAGAATCTCGCTGCGGTGAGCGAGGCTGCTGAGCATTTCGGCGTGACGGCGGTCAGGGACGATTACGCTGCTGCCCGCGTCACCACGCTGAGGCTCCCAGCTCCTTACAGGCTGTCACGCGGCAAGAGGAACCCAATTGCGGCTTGGCTCGATGAGCTGGGCCTCTTCGGGCTGAGGTCCCACGAGAAGTTCATCCCACGGCGCGTCTTCGCTCTCCCTAATGACCAGGTTGCCCTGTTCCTCCGCCATCTGTGGGCCACAGATGGCTCCGTGAGGTGGGACAGCACTTACAGGCAGGCGCGCGTCTACTACACATCCACTAGCAGGCGGCTCATCGACGATGTGGCGCAGCTCCTGCTCAGGCTGGGCGTTCACGGGCGCATTCGCAGGGTGACCAAGCCAGGGTACAGGGACGCTTGGCATCTCACCATCGACGGCGCTGATAACCAGACGGTGTTCCTGAGGGATGTCGGCGTTCACGGGGCCCGGGGCGACGCTGCTCAGGTGGCTCTGGCTGAGCTGGAGCCACTGGTCCGGAACACCAATGTTGACACGGTGCCTAACGAGGTTTGGAATCAGGTGCGCCACCTGCTCGCGACAAAGAACATTACTCATCGCGAGTTCTCGGCTGCCATGGGGTCTAGGTTCTGCGGCTCAACCATGTGGAAGAGGTCGCCCTCTCGCTCAAGGCTCGCCCGCGTCGCTGCTGTTCTGGACGATGCGGATATCGAGATGTACGCTACCAATGACGTGTTCTGGGATAAGATCGTCGAGATTACGTCTCTCGGCGAGCAGGACGTGTACGATGGCACTGTTCCAGGCACTCATAACTTCGTTGCTCAGTCTATCTCTGTTCATAAT

SEQ ID NO: 2130 - protein, 939 aa, Nocardia farcinica IFM 10152
  Intein encoding nucleic acids 72
TGCTTCCCTGCGGGCACAGTCGTTTCGGGGCCATCGGCGGAGGCGGCTACAAGGCGCTGGTTCGAGGGGGAGCTGGTCGTTTTCACTACCGCTAGCGGGAAGCAGCTCTCGCTGACCGGCAACCACCCAGTGCTCACGCGCGGCGGGTGGGTCCCCGCCAACCTCCTGAATGAGGGCGACGAGGTGGTCAGGTCGACAAGGCCACAGGGCGCTACTCCACTCGTTGTGCCTGACCACCATCAGGTGCCGGCGCTGATCGAGGATGTCTGGGGGAGCTTCGCTGTTAATGGCCTCCACAGGGTGCCAGCTGCTCCTGAGGACTTCCATGGGGATGGCCAGAGGGGGGAGGTCGACATCGTTGGCCCAGATCGGACCCTGTGGTGCGGCCACGACGCTGCTATTGCTCAGCAGCGGGAGCAGCAGTTCTTCACCCGCAGGACGGAGTCCAGCGGCCTCCTGGTGGCTGAGTCCGTCGCTCAGCTCGTTGACCTGTGGCAGGCTCCACACTCTGGCTCGTCTATCGGGCGCTCAGGCCTCCCATTCGCTCTGATTGGCGGGCATGGCGGGGGCCCTGTCGAGAGGGGCCTCACGGTTGCTGCTGGGGGCTACCCAGGCCTCCATGAGGCCCTGGCGGACTACCGGCCCGGCGATGCTGTGCTGCCACCACAGGGGGTCTTCGCTGGCTCATCCGAGATCGGGGGCGACGATTGCGTGATTGGCAAGGTCGACTCCACACGCTGGGATGCTCCAGCTCTCCCCTTCCTGGTGGAGGGGAGGGCGGGCTACGCTAGCAGGGGGAAGGAGCTCTTCGACCGGCTGACTGGCCAGGTCGAGCTCGATCGCATCGTTATTCTGCGGCGCGTGCAGTGGTCCGGCCACGTCTTCTCGCTCACAAGCTCAGAGGGGTGGCATACGGGCAACTCGCTCATCGTCTCTAAT

SEQ ID NO: 2131 - protein, 1227 aa, Nocardia farcinica IFM 10152
  Intein encoding nucleic acids 73
TGCTTCCCTGCGGGCACACCAGTGGACACTATCGATGGGCCAAAGCCTATTGAGTCGCTGCGGGCTGGGGATCGGGTTCTCTCGCATGACGGCTCGTACGCCACGGTGGAGAAGCTGATCGAGAACACAAATGATCAGCCACTCGTCTCCATTAGCCACTTCGGCCATAAGGAGCCTATCAGGTGCACGCCGGAGCACCCCATTCTGGTGTGGACGGACCGGGATGTCGAGACACTCATCGACGGCGATGGGGCTGACCCGTTCAACGGCTTCGTGTGGCTGGCTGCTCAGGACGTCCATCCATCCGATTTCATTGTTGCTACTGCTCCACTGGAGACCCGCGAGAGGAGGGTGTTCGACCTCATGAATCACGTCGGCGAGGGGACGTACGAGGAGGTTGACGGCCTGATCCGGAAGGTGAACACAGATGCGAGGCATCGGAATAAGCAGCGCCACAGGCAGGGCTTCGTCGCTGTTACCCGCTACGTGGAGGAGAGCTACGACCTCGGCCTGATCCTCGGGTGGTACCTCGCCGAGGGCCATGTCTCGAAGCGCTCTGGGGTTGAGGATGTGAGGCCAACGGGCGTGCATTTCACACTGGGGGCTAACGAGATTGAGAGGCACGTCGAGCTCGGCATGGCCTTCAAGCAGGTCTTCGGCGTTGACCTGGTGCTCCACACTAACCATTCAGATCACTCCACCAGGATGGTTTGCAATTCTAAGATCGTGGCTAGCCTCCTGCTCTCGCTGGCTGGCACGGGGTACTCAACAAAGCGGCTCGCGCACGAGGTCATGACCGCTGACGAGGATTTCCAGAGGGGCCTGCTCGTCGGGCTCTTCCGCGGCGACGGGTGCACCACGACAGGCGGGATGGTCCTGGACCTCGTTAACCAGGAGCTGATCGATCAGGTCCAGCTGCTCCTGAGGAGGCTCGGCATTGTTAGCGTGGTCCGCACGTACACAAACCAGGCTGGCAATCCGACTGGGCAGGTGTTCGTCCCAGGCCTGCCTGGGACCAACGAGGAGTTCATCTTCGACGTGGATAAGAACCTCCAGAATTACACTGGCAGGAAGGGGACCAAGCGGACTACCTACCAGGTTGTGCATGGCCGCCACGTCTACGGGATTCGGGCTGTTGAGAGGACTGGCGAGACCCCAAGGCAGGTCTACAATCTGCATGTGGAGGGCACTCATACTTACACTATTAGGGGGGCTGTGGTTCATAAC

SEQ ID NO: 2132 - protein, 1017 aa, Natronomonas pharaonis DSM 2160
  Intein encoding nucleic acids 74
TGCGTGGACGGGGACACAAGCGTTACTCTCGCCTCGGGGGATGAGAAGCCTATTCGGGACATCGTGGAGTCAACACTGGAGGATCCGACAGAGATCAGCGACGGCTTCTACCAGGAGTCGGACATTGATGTGCTCACCACGGATGGCGGGGCTGTCGCTCCAGGCAGGGCTACCAAGGTTTGGAAGCGGCAGGCTCCCGAGAAGATGTACAGGATCCGGACAGAGTCCGGCAGGGAGCTGGAGGTCACTCCAAGCCACCCCCTGTTCGTGCAGTCAGAGGGCGGGCTCTCCCCACTGGTCGCTGACGATCTCAGCGAGAACGACTTCGTGGCTGTCCCGAGGGCGCTGCCAGCTGACGATGGCGACGATTTCGGGCAGCATGTGGACGATCTGGGCTCCGTCACCGCTCGGAAGACGGCTGACGCTGAGGCCGTGCGCTCCGAGGACGCCGCGACAACTCCAGATGTTATCCCTAACGTGGGCGACCAGCTCCGCAGGATTCGCACCTCGCTCAGGCTGTCTCAGCACGACTGCGGCCTGCCAAGGTCGACGTACCAGCAGTACGAGAGGGGGGACCGGAATCCTTCGCGCTCTAGGCTCCAGACAGTCCTGACTGCGTTCGAGCGGCGCATCGAGCAGCTCTCCAGCCTGTCTGACAGGGTGGACGATGGCGACTCAGATGCCATTGCTGCCGCGCGGGACGAGCTCAATCCATCACAGGCTTCCCTGGCTAGCGGCATGGATGCTACCAGGACGGCTATCGGGGACGATGAGAGGACGGAGGCTAGGCCAGACGGCGGGGCGGTTGCTGATGCTGAGAGGGCTGTGGCTGACGCTCTCTGCAGGGCGCTGGCTGTCGCCGACGATGTTGAGAGGCTCAGGTCGCTGGCTGACGGCGATATCGGGTGGGACAGGATCGATTCTATTGAGCCAGTCGAGCCTGAGGACGAGTGGGTTTACGATCTGGAGGTGGAGAGCACACACTCATACCTCTCTAATGATGTTGTTTCGCATAAT

SEQ ID NO: 2133 - protein, 1476 aa, Natronomonas pharaonis DSM 2160
  Intein encoding nucleic acids 75
TCAATTCCTGCGGATGAGCAGGTCGTGGTTAGGCGCAATGGGGAGACGGAGCTGACGGAGATCGGCCCTCTCGTGGATTCGCTGATGGATTCTCGCGAGACCAGGTCATTCGACGATCACGAGGTCACGCTCGCTCCAGACGGCATCGAGGTTCCCTCTCTGTCCAGCGAGGAGACCGTTGAGTGGAAGCCGATTGAGGAGGTGTCACGCCACGAGACGCCAGACGAGCTCCTGAGGTTCGAGCTGGAGTCGGGCAGGTCTATCAGGGCTACCAAGGCTCATTCTTTCGTCACGCGCCAGGAGAACGAGGTGGTCCCAGTTGCTGGGGAGGAGCTGGAGGCTGGCGACTGGCTCCCTGTTGTGGCTTCGCTGGACGCCACCGATACGCAGGAGACAGTGGACCTGAGGAAGTACCTCCCGGCGGGCGATTACTGGTACACTTCCGTGCTCGCCGACGGCGGGGCTGAGGCTGTCCCAGGCGGGCCCGACCAGCTGAGGAACAAGAGGGCTGCTCTGGAGGCTGGCGAGCTCGCTGAGCACACAGCTTACCCAGTGCAGGGCACTGTCGGGCTCCCAGAGCAGTTCCCTCTGGACGAGGAGACCGGGTTCTTCGTGGGCGCTTGGCTGGCTGAGGGCAGCCTCGCGGATCATTACGTTTCCATCAGCAATGTGGACGCTGCCTTCCAGAGCCGCATTAGGTCGTTCGCCGAGCGCTTCGATCTCACGGTCAACGAGTACGAGAATGACTCCGGGTTCGCGGCTGGCTACGATATCCGGCTGAACGGCACCATTCTGAGCGACTTCCTCAGGGCTGCTTGCACGGACGATGGCGAGAAGTCGATCCCCGGGTTCGCTATTGGCGCCAATGAGGCGTTCCTCAAGGGGCTCCTGCAGGGCTACTTCTCCGGCGATGGGAACGTGGGCACCAATGCGATCAGGTCGTCTTCAACAAGCGACAGGCTGACTGCTGGCGTTGGGCTCCTGCTCGCTAGGTTCGATGTGTACGCCACACTCGGCCAGCAGGAGGACTCACGCACTCTGAGGGTCCCAAAGAAGCACGTTTCCCGGTTCGACAACCGCATCGGCATGGTCGGGGAGAGGGGCGCTGAGCTGGAGGCTCTCGCTGAGTCAGCTGACTCCGATGGGCCAGACGCTACAGATCAGATCCCTAACTTCGGCGATGCTCTGGAGGCTGTGGCTGAGGCTGCTGACATCCCACAGAGGCAGGTCAATTCGGCCACGAAGCGGCAGCGCATTGACAGGTCTCGGCTGGCTAGGCTCGTGGCTGCTGCTGAGGCCGAGCTGGACGGGGAGCAGTCCGAGCTGGATGCGCTCAGGCAGGCTGTCACAGGCGACGTCGTTTGGGATCGGATCGAGTCCATTGAGACTGTGGAGAGCGACCATGAGTATGTGTACGATGTTTCAGTGGAGGGGCTGGAGACTTTCACAACTGCGGATGGGGTCGTTACTCATAAT

SEQ ID NO: 2134 - protein, 966 aa, Natronomonas pharaonis DSM 2160
  Intein encoding nucleic acids 76
TGCTTCATCGGGGATACTCTCATTCCGCTCGCTGACGGCAAGTCTTACCGCATCAAGGATCTCATGGACTGGGGGACGGAGTTCATCGTTTACGCGTGCACCCCAACGGGCAAGATTGTGGCTGCTCAGGCTACCGCTAAGCTCACGAGGAGGAACGCTCCACTCGTGAAGGTCATCCTGGACAATGGCGAGGAGATCATTTGCACACCCGACCACCAGTTCATGCTGCGGGATGGGACTTACAAGGAGGCCCAGCTCCTGCAGGCGGAGACATCACTCATGCCATTCTACTCCAAGACTGACAAGGATGGCTACACACTGATTACTCAGCCTTACTCCAGCAGGTGGCAGAAGGCTCACTGGATCATTGCTAGGTCTGGCCTCCTGGGGAAGGTGCCAAGGTTCGAGGGCCAGAAGACGTTCATCCACCATCAGAACTTCGACGAGAGCGATAACCGCCCCGAGAACCTGGAGTTCATGGGCAACAGGGACCACTCGGCGTACCATCGCTCTCTGGTGGAGAGGAATCAGCACTGGCATTCCGCTGAGTTCGAGGAGAAGAGGGTCGCTAGCCTCGCTCAGAAGGCTAAGACCTCGGAGGGCTACCAGTACTACGCCGAGAGGGGGACGCGGAACATCTTCCAGTACATGGAGCAGCAGCCAGAGCACTTCAAGAATGCGGTCGCTGGCAACGGGAATAGGGGCAAGCAGTACCTCGTTGAGTACAACAAGACAGAGAAGGGCAGGGGGAAGTCGCAGGAGATCGCGAACCGGTACTACACCTGCGAGATTTGCGGCGTCGACGTTAAGACGCCCATCGGGCTGCACAACCATCGGCGCAAGGAGCACCAGTGCAATCATAAGGTGGTCGCCGTGAACCTCCTGAATTACACCGAGGATGTCTACTGCCTCACTGTTCCGGAGTACCACAACTTCGCTCTCAAGGCTGGGGTCTTCGTTCATAAT

SEQ ID NO: 2135 - protein, 1056 aa, Nocardioides species JS614
  Intein encoding nucleic acids 77
GCTCTCGCTCTGGATACCGCTCTCCCTACGCCTTCGGGGTGGACTACTATGGGGGACGTTCAGGTTGGGGATCAGCTCTACGATGCGCACGGCAGGCCAACCACGGTGGTCGCTGCTACCGAGGTGCTCACGGGGAGGCCTTGCTACGAGGTCGAGTTCTCAGACGGCTCCCGCATCGTTGCCGATGCGCAGCATCAGTGGCTGACCGAGTCTAGGGCTGCTCGGAAGTCACGCTGGGCTGCTGACAAGCAGTACAACCGCGCCAGGAACCAGAATATCGTCGCGAGCGTTGTGACAACTGAGGCTATTGCTGGGACCCTCAGGGTGGGCGCTGACCAGAGGGCCAATCACGCTGTCCTCACGGCTGATCCACTGTCCGGCAGCGACGTCGATCTGCCAATCCCACCCTACGTTCTCGGCGCTTGGCTGGGCGACGGGCACTCGGCGTCTGCTAGGATCACCTGCGAGACGCCAGAGATTCCTATGTACCTGGAGGCTTGCGGGCTGAGGGTCGACCATCAGGGCGCGATGCTCTACTCCCTGAAGTTCCCAGACGGCGATCCGAGGGGCAGCGTCCAGGGCGTTCTCAGGACCATCGGCGTGCTGAACGACAAGCACATTCCAGCGGATTACCTCAGGGCTTCCGAGGGCCAGAGGAGGGACCTCCTGGCTGGGCTGATGGACACAGATGGCACTGTCGTTAGGGGCGTTGGGTCGTGCCAGTTCGCTGTGACAAACAAGCGGCTCGCGGACGATGTCTACGAGCTCGTGGTCTCTCTGGGGTACAAGTGCGGCAGGACCACGAGGAGGGTGCAGGGCAGGAGCCCAGAGACATCGACTTGCCATATCCTCAATTTCTCGACGGTGGACGATGTCTTCAGGCTGGAGCGGAAGCACCTCCTGCATAAGGAGGAGAGGCCAGTGACACGGGCTAGGATCGCCAGGCGGTACATTACTGCCGTTCGCCCAATTGAGTCCGTTCCTGTGAGGTGCGTGGAGGTTGATAATACAGAGCATCTCTACCTCGCCGGGGAGAGCATGATTCCAACTCATAAT

SEQ ID NO: 2136 - protein, 1221 aa, Nostoc species PCC7120, (Anabaena sp. PCC7120)
  Intein encoding nucleic acids 78
TGCCTCCCTGAGGATGCGCTGGTTCATACCGCTAAGGGGCTGGTCCCTATTCGGGATGTTCAGGTCGGGGATCTCGTTCAGACACCGCTCGGCTTCCGCAGGGTGGTCGACAAGTTCGATCAGGGCTTCCAGGACGTGTACGAGATCGAGACTAACGCGACCTACCCACGCGCTACGCTCAATCACAGGCAGGCTGTCCTGGAGGACGCTAAGGGCGGGATCGTTTGGAAGCATATTGCTTCGCTGGAGGCCGGCGATAGGCTCCTGCACAACAAGCAGGTCCTCCCGGGCACTGTTACCCATCTGCCCGCGGACTTCACTGAGAGCAGGCCATCACACTCCCGGACCGCCAAGTCGTTCGTTGTGCCTGAGCTCACGGCTGAGGTGGCTTGGCTGATCGGCTTCACACATGGCGACGGCTACGTGGCTCTCGGCAGGAACAAGTACGATAAGCCGTACGGGCGGGTTGAGTGGTCCATGAACTCCCTGGACGCTGAGGTCACCTCCCGCATCCAGGCTAAGATTGATGCTGCTCTCGCTCTGTTCGGCCTCTCCGCTGTCCACAGCATCACGAAGGGCGAGAACACAGCTAAGAGCATCTGCTCCAGCATTCGGCTGGCCGAGTACTTCCACCGCCATATCAAGCAGCCAAATATTCCTCTCACTGTGCCGTCATTCATCCTGCAGGGCTCCGTCGACATTAGGGCTGCTTACCTCGCTGGCCTGATGGACTCCGATGGGGCTGTGAACAATAGGCCACCACACCTCATCACATCGGTGTACCGGTCTTTCATTCGCCAGGTCTCGGTCGTTCTCTCGTCTCTGGGCATCGCCGGGAGGCTGACCACGACATACCCCCAGAACTCTAATTGGCAGGTCAAGTACAACCTCACGATCCCGGCGCTGAAGGAGCGCTACAATGCTCTCATTTCTCCCCATTCAGCCAAGGGCGAGCTCAGGCAGGGGCTGAAGATGTACGGCTTCACGGTTCCAGGGGCCGTGATGCGGGAGACGTACACATACTCTGAGATGAGGGAGATGGGCTTCCAGGGGTCACGGACAGTTGACGCCAACTACGAGCGCTACGTGGCGGAGGCTGACATCTCCCTCGATATTCCTGTGACTGTCAAGGGCCTGGGGAGCTACGATCACGTGCAGACCTACGACATTGAGGTTGATGAGGCTCATTGCTTCTACTGCGATGGCTACCTCACACATAAT

SEQ ID NO: 2137 - protein, 492 aa, Pyrococcus abyssi
  Intein encoding nucleic acids 79
TGCGTGGATTACGAGACTGAGGTCGTGCTGGGGAATGGGGAGCGGAAGAAGATCGGGGAGATCGTGGAGCGGGCTATTGAGGAGGCTGAGAAGAACGGCAAGCTCGGGCGGGTTGACGATGGCTTCTACGCTCCGATCGACATTGAGGTCTACTCGCTCGATCTGGAGACCCTCAAGGTTCGGAAGGCGCGGGCAAATATCGCGTGGAAGCGCACAGCTCCAAAGAAGATGATGCTGGTGAAGACTAGGGGCGGGAAGCGCATTAGGGTCACCCCGACGCACCCCTTCTTCGTTCTGGAGGAGGGCAAGGTGGCTATGAGGAAGGCCCGGGACCTGGAGGAGGGCAACAAGATCGCCACGATTGAGGGGCTCTCCGTGAGCTGGGACGAGGTCGCGGAGATCCTGGAGTACGAGCCAAAGGATCCTTGGGTCTACGATCTGCAGGTTCCAGGCTACCACAACTTCCTCGCTAATGGCATCTTCGTTCATAAT

SEQ ID NO: 2138 - protein, 804 aa, Pyrococcus abyssi
  Intein encoding nucleic acids 80
TGCGTCGCGCCTGAGACACTGATTATTACTGAGAATGGGACAAAGGAGATCGGGGAGGTCGTGGAGCGGTGGATGAAGGAGCTGGGCGAGATCGAGTACGACGATGGCATTTCGTACTCTCCGGCCTTCGAGAAGGTTGCGTCCCTGAACGGCGGGAAGGTGAAGATGCTCCCGGTCCGCAGGGTTTGGAAGCTGAGGAGCCCAGGCAAGATGATCAAGATTCGCTCAGAGTCCGGGAAGCAGATCACCGTCACGCCAGAGACAAAGCTCCTGACTATCATTGACGGCTCGCTGGAGTGGGTGGAGGCTCGCAAGCTGAAGAAGGGGAACTACGTTGCGGTGGTCAATAAGGAGAGGAGCATCGTGCCTATTGGCGACTTCCTCGCTAAGCTCCTGAAGTTCTACGGGGTCGAGCTGAACCTCAATGAGGCTGTTGAGCGCGACCAGGCCAGGAAGCTCCTGGAGACCCTGAAGTCTAAGGGCCTCTCAGATGTCACGATCGAGATTCCAGAGAAGCTCCGGCGCTTCATCAAGTGCGACCGCGTGCGCTACGTGGATCTGGTTGAGATGCTCTCCAGCATGGAGGGCGAGCTGAAGGAGGAGGTCATGCTCCTGCTCTCCGACGTGGGGGATATCCACGAGGTCATTCAGGAGCGGCTGAAGGAGATCGGCAAGATTCTGGAGAGCGACGCGTCGTGGGAGAGGATCGCTGAGGTGGAGGAGGTTGTGCGGGATGGCCATGTCTACGATCTCACAGTGGAGGGCTCTCATTCTTTCATTGCTAATGGCTTCGTGGTTCATAAC

SEQ ID NO: 2139 - protein, 1182 aa, Pyrococcus abyssi
  Intein encoding nucleic acids 81
TGCCTCCTCCCTGATGAGAAGGTCGTGGTTCCCTCGGTCGGGTTCGTGACACTCAAGGAGCTGTTCGAGACGGCTTCCAAGGTCGTGGAGCGCGACGATGAGAAGGAGATCAGGGAGCTCGACGAGCGGATTACCAGCGTTAACGGCGATGGGAAGACGGGCCTGGTCAAGGCCTCCTACGTGTGGAAGGTTAGGCACAAGGGCAAGGTCATCCGGGTCAAGCTCAAGAATTGGCACGGCGTTACAGTGACTCCGGAGCATCCCTTCCTCACCACGAAGGGGTGGAAGAGGGCTGACCAGCTGAGGCCAGGCGATTACGTCGCGGTTCCTAGGTTCATCCATGGCAACGAGGACGAGAAGATTTTCCTCTCCTACGTGAAGGTCAAGAAGTCTGGCGAGGAGTGGAAGGAGTACTTCTACCTGGCGGGCAGGAAGGGGAACATCGATGTCAATCTCCTGTTCGTTGCTCCAAAGCGCTACGTGGTCGAGTTCCTCCGGGGGTACTTCGAGGAGCGCTCCGAGGTCAAGGGCGAGAGCGTTATCGTGGAGGCTCGGGAGCTGGTGGAGCCTCTCAGCCTGGCTCTCCTGAGGTTCGGCATCTTCTCTAAGATTCAGGGGTCAAAGCTCATCGTCACCGGCAAGCGCAACCTGGAGGCCTTCAAGGACTACATTGGCTTCAAGGATGAGAGGGAGAAGGCCCTGGAGGAGGCGATCGAGAAGGTGAAGGGCTCCGAGGTCTACCCGATCTTCGAGGAGATTCGCAGGCTCCGCCTCCTGTTCGGGTTCACAAGGGAGGAGCTGGGCTCATACGCTAAGTACGAGAACTCCGAGGCCCCGACTTACGAGGAGCTCATGGAGATCCTGGACTTCATTGAGAGGGGGTCCCCCAGCCTCTCGAAGAAGATCGCGATTCTGGAGGGCAAGCTGAAGGCTGAGCTCAGGGTGCTGGAGGAGGAGGGCCTGATCAAGGACGGGAAGCTCACCCCACTGGGCAGGGAGCTCCTGGAGGTCTGGCGGAACCGCGAGTTCGATTCCAAGGACGTCGATTACATCCGGAACATTGCGGAGACGCTGGTGTTCATCCCCGTTGAGAATGTGGAGGAGGAGGAGTACGACGGCTACGTTTACGATCTCACTACGGAGACTCATAACTTCATTGCTAATGGCATCCTCGTTCATAAT

SEQ ID NO: 2140 - protein, 588 aa, Pyrococcus abyssi
  Intein encoding nucleic acids 82
GCGCTCTACTACTTCTCTGAGATTCAGCTCCCTAACGGCAAGGAGTTCATCGGCAAGCTCGTGGATGAGCTGTTCGAGAAGTACCATGACAAGATCGGCAAGTACAAGGATATGGAGTATGTGGAGCTCAACGAGGAGGACACATTCGAGGTCATCTCAATTGGGCCAGATCTGTCCGCTAGGAGGCACAAAGTGACTCATGTCTGGCGGCGCAAGGTTAAGGACGGCGAGAAGCTCGTGAAGATCAGGACCGCTAGCGGGAAGGAGCTCGTGCTGACGCAGGACCACCCGGTTTTCGTGCTCCTGGGCAGGGACGTCGCTAGGAGGGATGCTGGCAACGTCAAGGTTGGGGACGAGATTGCGGTGCTCAATACGCGGCCCGATTTCTCGGTCCTGTCTCCGCCCGCTATGCCAGAGCTCCTGTCTGAGCCTTTCAATTACGAGCTGTCCAGCATCGGCGACGTCGCTTGGGATGAGGTGGTCGAGGTTGACGAGATTGATGCCAAGGGCCTCGGGGTGGAGTACCTGTACGATCTCACAGTGGATATCAATCATAACTACGTTGCTAATGGCATTGTCGTTTCTAAT

SEQ ID NO: 2141 - protein, 999 aa, Pyrococcus abyssi
  Intein encoding nucleic acids 83
TGCTTCAGCGGGGAGGAGACAGTCGTTATTCGGGAGAATGGGGAGGTCAAGGTGCTCAGGCTCAAGGATTTCGTGGAGAAGGCTCTGGAGAAGCCAAGCGGCGAGGGGCTGGACGGCGATGTGAAGGTGGTCTACCACGACTTCCGCAACGAGAATGTCGAGGTTCTCACCAAGGATGGCTTCACGAAGCTCCTGTACGCTAACAAGAGGATCGGGAAGCAGAAGCTCCGCAGGGTTGTGAATCTGGAGAAGGACTACTGGTTCGCTCTCACCCCCGACCATAAGGTCTACACCACGGATGGCCTGAAGGAGGCCGGGGAGATCACAGAGAAGGACGAGCTCATCTCTGTCCCAATTACTGTTTTCGATTGCGAGGACGAGGATCTGAAGAAGATCGGCCTCCTGCCTCTCACCTCGGACGATGAGCGGCTGCGCAAGATCGCCACGCTCATGGGCATTCTGTTCAACGGCGGGTCTATCGACGAGGGCCTCGGGGTGCTCACACTGAAGTCCGAGAGGAGCGTTATCGAGAAGTTCGTGATTACCCTCAAGGAGCTGTTCGGCAAGTTCGAGTACGAGATCATTAAGGAGGAGAACACAATCCTGAAGACTAGGGACCCGCGGATCATTAAGTTCCTCGTCGGCCTGGGGGCTCCAATTGAGGGCAAGGATCTCAAGATGCCATGGTGGGTTAAGCTGAAGCCTTCACTCTTCCTGGCCTTCCTGGAGGGCTTCCGGGCTCACATCGTGGAGCAGCTGGTCGACGATCCGAACAAGAATCTCCCCTTCTTCCAGGAGCTGTCCTGGTACCTCGGCCTGTTCGGGATCAAGGCGGACATTAAGGTTGAGGAAGTGGGCGACAAGCATAAGATCATTTTCGATGCTGGGCGCCTCGACGTCGATAAGCAGTTCATCGAGACGTGGGAGGACGTGGAGGTCACCTACAACCTCACTACGGAGAAGGGCAATCTGCTCGCCAATGGGCTCTTCGTTAAGAAC

SEQ ID NO: 2142 - protein, 1365 aa, Pyrococcus abyssi
  Intein encoding nucleic acids 84
TGCTTCCCCCCTACTGAGGAGGCGGTTTTCAAGTTCGGGGATAAGGTTAAGATCGCTACTTTCGAGGAGGTCGCTAAGAATTTCAAGTTCGAGCACAAGGTCGAGATCGACGGCTTCAAGGGGGAGTACAGCATTCCCAACGACCTCTACGTGCTGACCTTCAATGATGGCAAGGCCGAGTGGACCCGGGTCACGAAGTTCCTCCGCAGGAAGCACGAGGGGAAGATCCGCGTCATTAAGACCAAGACGGGCAGGACGATCAGGACCACGCCAGAGCATAAGTTCTTCGTTTACAAGGACGGGGAGCTGGTGAAGAAGAGGGCTGACGAGCTGGAGCCAGGCGATGAGCTGGTGCTCCTGTGGCGGTTCGAGTCCGAGGAGACACTCACTGAGATCAACCTCCTGGAGGCTTTCAAGGACCTGCCACAGGAGGAGAAGGAGAAGGTCTACGTTCGGGGGATTAAGGACCTCGATCTGACGCCTCTCAAGGAGAAGTACGGCGACAAGGTCTACTACTGGGCGAGGCAGGATTCGATGCCGCTCTCTGTGTTCTACGAGCTCAACGTCGACCTGGATAAGGAGTTCAGGCTGGGCCGGGACGCTACAACTTACGAGCTCCCATCTAAGCTGAAGATCACACCTTCACTCGCCAAGCTGATTGGCTACTTCGTGTCAGACGGGAACTACTCCGACAAGGATCTCCGCATCACTGTGGGCCACGAGGATGTCGAGAAGGAGATCGTTAATATTCTGGAGGAGCTCGGCCTGCCATACTCGTTCCTGGAGTGGGAGGGGAAGACCAAGCAGATCGTTATTGGCTCTCGCCTCCTGAGGCTGGTCTTCAAGCATGTTTTCAAGATCCCAGAGGGGGCTCCAAACAAGAGGCTCCCGGAGGGCTTCCTGTCCTTCCCCTTCGAGGCTAAGGTGGCTCTCCTGAGCGGCCTCTTCAATGGCGACGGCTACGTGGTGCGCGGCGAGCACCATCTGTCGATCGGGTACGCGTCCACAAGCAAGGGCCTCATCAGGGATATTCTGTACCTCCTGGCTTCCCTGGGCATTTTCGCCCGGGTGTACCGCGTCCCTAAGGAGAAGATGAAGGGGGCCAACCACGACCTCTACAAGCTGTACATCGCGGGCACCGATCTCGTTCGCCTGGTGGAGCTCCTGGAGCTCAGGGAGGGCCATCGGGAGAAGCTGGGCGAGATCGGGAATCGCAAGCCGGCGAGGGTGAAGAAGATCGCTGACTTCTACATTGACGTTGTGGATGAGGTCAGCGAGGAGGAGTACTCGGGCTACGTTTACGATCTGGAGGTGGAGAATGAGGGGCATAGCTTCGTTGCTGCGGATGGCATCCTCGTTTCAAAT

SEQ ID NO: 2143 - protein, 555 aa, Pyrococcus abyssi
  Intein encoding nucleic acids 85
TGCTTCCCAGGCGATACACGCATTCTCGTTCAGATTGACGGGGTTCCTCAGAAGATTACTCTCAGGGAGCTCTACGAGCTGTTCGAGGATGAGCGCTACGAGAACATGGTTTACGTGCGCAAGAAGCCGAAGAGGGAGATCAAGGTGTACAGCATTGACCTGGAGACAGGCAAGGTGGTCCTGACTGACATCGAGGATGTCATTAAGGCCCCAGCGACGGACCACCTCATCAGGTTCGAGCTGGAGGATGGGCGGTCTTTCGAGACCACGGTGGACCATCCTGTCCTCGTTTACGAGAACGGCCGGTTCATCGAGAAGCGCGCTTTCGAGGTCAAGGAGGGGGACAAGGTGCTGGTCTCAGAGCTGGAGCTGGTTGAGCAGTCCAGCTCGTCTCAGGATAATCCGAAGAACGAGAATCTCGGCTCCCCAGAGCACGACCAGCTCCTGGAGATCAAGAACATCAAGTATGTGCGCGCGAATGACGATTTCGTGTTCTCGCTCAATGCTAAGAAGTACCACAACGTCATCATCAATGAGAACATCGTTACACATCAG

SEQ ID NO: 2144 - protein, 1497 aa, Pyrococcus abyssi
  Intein encoding nucleic acids 86
TGCCTGACGGGGGACGCTAAGGTTATCGCTAATGGGGAGCTGACAACGATCGGGGAGCTGGTGGAGCGCATCTCAAATGGCAAGCTGGGCCCAACCCCCGTCCGGGGCCTCACGGTTCTGGGGATCGACGAGGATGGCAAGCTCGTGGAGCTGCCAGTCGAGTATGTGTACAAGGACAAGACCAGCGAGCTGGTCAAGATCAGGACGAGGCTCGGCAGGGAGCTGAAGGTTACCCCATACCACCCTCTCCTGGTGAACCGCAGGAATGGGAAGATCGAGTGGGTGAAGGCTGAGGAGCTGAAGCCAGGCGACAGGCTCGCTATTCCGTCCTTCCTCCCCGCCATGCTGAACGATAATCCTCTCGCTGAGTGGCTGGGCTACTTCTTCGGCAACGGGTACACAGACAGCGAGGAGCGCGTGGTCTTCGAGTCTAAGTCAAAGGAGCTCAGGAAGCGGTTCATGGAGCTCACTAGGAAGCTGTTCCAGGACGCCGAGATCAAGGAGGATTCCGGCAAGGTTTACGTGTCCAGCTCGGAGGTTAAGCGCCTCGTGAAGTCACTGAACAAGGATTCCATCCCAGAGCAGGCTTGGAAGGGGCTCAGGAGCTTCCTGAGGGCGTACTTCGACTGCAATGCTGAGATCAAGGATAAGATCATTGTGTCTACGGCTGGCAAGGAGATCGCCGAGCAGATTTCATACGCTCTCGCTGGCCTGGGGATCGTGGCTGAGGTCGACGATAAGGGGTCGGTCATCATTTCTGACCCGGAGAACGTTTCTAGGTTCCTGGATGAGATCGGCTTCTCAGTCGAGGAGAAGAAGGAGGAGGCTAAGGCCCTGATTAAGAAGTCGACCCTCAACCTGGGCATCTACGTGGACAAGGAGCTCATTTCCTACGTCCGGGAGAAGCTCAAGCTGAGCTTCTACGAGAATGAGACGATGTGGTCGCCAGAGAAGGCCCGCGAGATCGCGTGGAAGCTGATGAAGGAGATCTACTACCGGCTCGACGAGCTGGAGCGCTTCAAGAAGGCGCTCTCCAAGAGCGTGATCATTGATTGGTCGGAGGTCGAGAAGAAGAAGGAGGAGATCAGCGAGAAGACAGGGATCTCGGTGAACGAGATTCTGGAGTACGCCAAGGGCAAGAGGAAGCCGTCTCTGGAGGAGTATGTGAAGATCGCGAAGGCTCTCGGCGTGGAGCTGAAGGAGACACTGGAGGCGATTTTCACTTTCGGGAAGAAGTACCTGGGCTACGTGATCTCCGACGAGATTGAGACCCTGGAGGAGGTCAGGAAGGAGGAGCTCAAGCGGCTGAAGGAGCTCCTGAACGACGAGAAGCTGAAGAAGGGGGTCGCCTACCTCATCTTCCTGGCGCAGAATGAGCTCCTGTGGGATGAGATCATTGAGGTCGAGAAGCTCAAGGGCGACTTCGTTATCTACGATCTGCATGTTCCAAAGTACCACAACTTCATCGGGGGCAATCTGCCAACTGTTCTGCATAAT

SEQ ID NO: 2145 - protein, 1824 aa, Pyrococcus abyssi
  Intein encoding nucleic acids 87
TGCGTTACAGGGGACACAAAGGTCTACACGCCTGATGAGCGGGAGGTTAAGATTAGGGATTTCATGAATTACTTCGAGAATGGGCTGATCAAGGAGGTGTCTAATCGCATCGGGAGGGACACAGTCATTGCCGCGGTTTCCTTCAACAGCCGCATCGTGGGCCACCCAGTCTACAGGCTCACTCTGGAGTCCGGGAGGATCATTGAGGCCACTGGCGACCACATGTTCCTCACCCCTGAGGGGTGGAAGCAGACGTACGATATCAAGGAGGGCAGCGAGGTCCTCGTTAAGCCAACCCTGGAGGGCACGCCTTACGAGCCAGACCCCAGGGTCATCATTGATATCAAGGAGTTCTACAACTTCCTGGAGAAGATCGAGCGCGAGCACAACCTCAAGCCACTGAAGGAGGCGAAGACGTTCAGGGAGCTCATCACAAAGGACAAGGAGAAGATTCTGAGGAGGGCTCTGGAGCTGAGGGCTGAGATCGAGAACGGCCTGACCAAGCGGGAGGCGGAGATCCTGGAGCTGATTTCTGCTGATACGTGGATCCCTCGCGCTGAGCTGGAGAAGAAGGCCAGGATCTCAAGGACCCGGCTGAATCAGATTCTCCAGCGGCTGGAGAAGAAGGGGTACATCGAGCGGCGCATTGAGGGCCGCAAGCAGTTCGTGCGGAAGATCCGCAATGGCAAGATTCTCCGGAACGCCATGGACATCAAGCGCATTCTGGAGGAGGAGTTCGGCATCAAGATTTCATACACCACGGTCAAGAAGCTCCTGTCCGGGAACGTTGATGGCATGGCGTACCGCATCCTCAAGGAGGTCAAGGAGAAGTGGCTGGTTCGCTACGACGATGAGAAGGCGGGGATCCTGGCTAGGGTGGTCGGCTTCATTCTCGGCGACGGGCACCTGGCTAGGAATGGCCGGATCTGGTTCAACTCCAGCAAGGAGGAGCTGGAGATGCTGGCTAACGACCTCCGGAAGCTCGGCCTGAAGCCGTCGGAGATCATTGAGCGCGATTCGTCTTCAGAGATCCAGGGGCGGAAGGTGAAGGGCCGCATCTACATGCTCTACGTGGACAATGCTGCCTTCCATGCCCTCCTGAGGTTCTGGAAGGTGGAGGTCGGGAACAAGACCAAGAAGGGCTACACGGTTCCGGAGTGGATCAAGAAGGGCAATCTCTTCGTCAAGAGGGAGTTCCTCAGGGGCCTGTTCGGGGCTGACGGCACCAAGCCCTGCGGGAAGCGCTACAACTTCAATGGCATCAAGCTGGAGATTCGGGCTAAGAAGGAGTCCCTGGAGCGCACGGTGGAGTTCCTGAACGACGTCGCCGATCTCCTGAGGGAGTTCGACGTTGATTCGAAGATCACAGTGTCTCCGACTAAGGAGGGCTTCATCATTAGGCTCATCGTGACACCCAACGACGCCAATTACCTCAACTTCCTGACACGGGTGGGGTACGCCTACGCGAAGGATACTTACGCCAGGCTCGTCGGCGAGTACATCCGGATTAAGCTCGCGTACAAGAACATCATTCTGCCCGGCATCGCTGAGAAGGCCATTGAGCTGGCGACAGTCACTAACAGCACGTACGCGGCTAAGGTTCTCGGCGTGTCGAGGGACTTCGTTGTGAATCGGCTGAAGGGGACACAGATCGGCATTACTAGGGATTTCATGACCTTCGAGGAGTTCATGAAGGAGCGGGTGCTGAACGGCTACGTGATCGAGAAGGTCATCAAGAAGGAGAAGCTCGGCTACCTGGACGTCTACGACGTTACTTGCGCTCGGGATCATAGCTTCATTTCCAATGGGCTCGTTTCTCATAAT

SEQ ID NO: 2146 - protein, 1197 aa, Pyrococcus abyssi
  Intein encoding nucleic acids 88
TGCATCGATGGCAACGCTAAGATTATTTTCGAGAATGAGGGGGAGGAGCATCTGACAACTATGGCTGAGATGTACGAGCGCTACCGCCACCTCGGCGAGTTCTACGACGAGAACTACAATCGCTGGGGGATTGATGTGTCCAGCGTCCCGATCTACGTGAAGTCCTTCGACCCAGAGACGAGGAGGGTGGTCAAGGGCAGGGTCCGGGCCATCTGGAAGTACGAGCTGGGCGAGGAGATTCCGAAGTACGAGATCCGCACACACAAGGGCACTAAGATTCTCACCAGCCCATGGCATCCTTTCTTCGTCCTGACACCAGACTTCGAGGTTATCGAGAAGAGGGCGGACGAGCTCAAAGTGGGCGATATCCTGATTGGCGGGATGCCTGACGGGGAGGATCACGAGCTCATTTTCGACTACTGGCTGGCTGGCTTCATCGCTGGCAACGGGAATCTCGACGATTCGGAGAGGGAGTACAAGGCCCGCGAGCTCCTGGATGGCATCGAGAACGGGATTCCGCCCAAGATCCTGAGGAAGGGCAAGAATGCCGTCCTCTCTTTCATCACGGGCCTGTTCGACGCTGAGGGGCACGTTAACGATAAGTCAGGCATTGAGCTCGGGATGGTGAATAAGAAGCTGATCGAGGCTGTCACACATTACCTCAACAGCCTGGGCATCAAGGCCCGCATGAGGGAGAAGCGGCGCAAGAATGGCATCGACTACATTATGCACGTGGAGGAGTACTCGTCTCTCCTGCGGTTCTACGAGCTCATTGGCAAGCATCTGCAGAACAATGAGAAGAAGGAGAAGCTGGAGATCCTCCTGCACAAGCATAACGGCGGGGCGTTCGATCTCTCACTGAACTTCAATGCTTTCAAGGAGTGGGCCTCCAGGTACGGCGTCGAGTTCAAGACCAACGGGAATCAGATCCTCGCTATCATTGGCAACGAGAAGGTTAGCCTGGGCCAGTGGCACGCGAGGGGGCATGTGTCGAAGGCTGTCCTGGTTAAGATGCTCCGGAAGCTGTACGAGGTTACTAAGAACGACGAGGTGAAGGAGATGCTCCACCTGATCGAGTCCCTGGAGGTTGTGAAGGAGATCACCATTACGAACGAGCCCAAGACCTTCTACGATCTGACAGTGGATAAGTACCAGAACTACCTCGCCGGGGAGAATGGCATGATTTTCGTGCATAAT

SEQ ID NO: 2147 - protein, 1314 aa, Pyrococcus abyssi
  Intein encoding nucleic acids 89
TGCTTCACAGGGGACACTCGCATCCTGACGGAGAAGGGGCTGATTCCTATTGAGGAGATCGTGCATGAGACGGGCAAGAAGCCAAAGGTGGTCACACACGCTGGCCTCAAGGACATCATTGAGACTTACGATAACGGGGAGATGGAGGTTTTCCGCGTGACCACGGAGGACGGCTACGAGCTCAAGGTGACCGGGGACCATAAGTTCCTGGTCTTCGATGAGAACGGCAATCCAACGCTCAAGCCTCTGAAGGAGCTCAAAGTGGGGGACTACGTCTACATCCTGGCTCCAGAGTGGAAGGGCGGGGAGTATGTGGAGCTCGATACAAACATCGAGCTGAAGGGCAAGGGGTACAACGTTAATCTGCCCTCGAAGCTCGACGAGAAGCTGGCGTACCTCCTGGGCATCATCTACGCTGATGGGCACATCCGCCATTACTTCGAGAACGGCAAGCGCAAGAACTCCAAGATCGAGATCTACCTCCACCAGGACGAGACCGAGATCAAGGAGAAGGTGAAGAGGTACTTCAAGGAGATCTTCGGCATTGAGCCAAAGGAGTTCCTCAAGGAGGAGCAGCATAAGGTCATCCTGGTTATTCCTTCCACGAAGATTGTCAAGTTCCTGGAGATCAACGGCCTCCTGAAGGACAAGAGCGAGAATATTCGGGTTCCGGAGGCTATCTTCCGCTCCCGCCCATCTGTGATCGCTGCGTTCCTGGCTGGCTTCTTCGACGGCGATGGGTCGATCGATCAGAACTACCGGATCGCCTTCAAGTCCATTAGCCGCGAGTTCATCAAGGAGGCTCAGCTCCTGTTCCTCGCCCTGGGCATCGTGACATCCATTCAGGAGTACAACCCGCCCAATCCAAACAATAAGACAGTTTACACTCTCCGGGTGCAGACTCGCGACATGAAGATCAAGGCGTTCAACGTCCTCAAGGAGAGCGTTAAGCTGTCGAAGATTATGAAGGAGGCTATCTCTAAGCTGGAGGAGAACGGCAAGAATAAGAAGTTCTCATTCCCGTTCAACGCCATCTACCACATTAAGGACCCCAAGATCAGGGCGAAGATTCAGCGGGATTACAAGATCCTCTCATACAATTCCAAGGTGACCCATAGGGCCTTCATCAACAATATTCTCAAGCTGAAGGAGGAGCTCGGCCTGGACGATGAGGAGGTCAAGTACTTCGAGATGCTGAGCAAGCTCTACCCAACCAAGATCACGAAGATTGAGCCTCTGGGGAAGGCGCACGTCTACGATCTCCAGGTTGAGGATGTTCATCTGCTCACAGGCAATGGCATCTACACAAGCAAT

SEQ ID NO: 2148 - protein, 1146 aa, Pyrococcus abyssi
  Intein encoding nucleic acids 90
TGCGTGGTCGGGGAGACAAGGATTCTGACGCCTGAGGGCTACATCAAGGCTGAGGAGCTGTTCAAGCTCGCCAAGGAGCGGGGCAAGATGGAGGCCATCGCTGTGGAGGGCATTGCTGAGGGCGGGGAGCCATACGCGTACTCTCTGGAGATCCTCCTGCCTGGCGACAAGCAGGTCAAGTACGAGACCGTTCACGGGAACGCTGTGGAGGTCGCCGATCCGGTTTCAGTGCCCGCCTACGTGTGGAAGGTCGGCATGAAGGAGGTTGCCCGCGTGAGGACAAAGGAGGGCTACGAGATCACCGCCACGCTCGACCATAAGCTGATGACTCCGGAGGGCTGGAAGGAGATCAAGGACCTGAAGCCAGGGGATAAGATTCTCCTGCCTAGGTTCGAGGTGGAGGAGGACTTCGGCTCCGAGAGCATCGGGGAGGATCTCGCGTTCGTCCTGGGCTGGTTCATTGGCGACGGGTACCTCAACGTTAAGGATAAGCGGGCGTGGTTCTACTTCAATGCTGAGAAGGAGGAGGAGATCGCCTGGAAGATCCGCGAGATTCTGGCTAAGAGGTTCGAGATCAAGGCCGAGCCACACCGCTACGGCAACCAGATTAAGCTCGGCGTCAGGGGGAAGGCGTACGAGTGGCTGGAGTCCATCGTTAAGACCAACGAGAAGAGGATCCCGGAGATTGTGTACCGGCTCAAGCCCAATGAGATTGCCTCATTCCTCAGGGGCCTGTTCTCCGCTGACGGCTACGTGGACAATGATATGGCTATCCGCCTCACGTCGAAGTCTCGGGAGCTCCTGCGCGAGGTCCAGGATCTCCTGCTCCTGTTCGGCATCCTGTCCAAGATCTACGAGAGGCCGTACAAGCGGGAGTTCAAGTACACCACGAAGGACGGCGAGGAGCGCACATACACAACTGAGGGGTACTACGAGCTCGTGATCGCGAACTACTCCCGGAAGATCTTCGCTGAGCGCATTGGCCTGGAGGGGTACAAGATGGAGAAGCTCAGCCTGGAGAAGATCAAGGTCGACGAGCCCATTGTCACCGTTGAGTCGGTGGAGATCCTCGGCAAGAAGCTGGTCTACGACTTCACTGTTCCAGAGCATCACATGTACATTTCCAATGGGTTCATGAGCCACAAC

SEQ ID NO: 2149 - protein, 1308 aa, Pyrococcus abyssi
  Intein encoding nucleic acids 91
TGCCTCGCGCCTGGGTCAAAGGTCCTCACGGAGCATGGCTACTGGCTGAAGGTGGAGGAGCTGCCGGAGAAGTTCAAGCTGCAGGGCGTTAAGGTGTACAACCTGGACGAGGGCCACAACGATACAAGCAATGTTGCTTTCGTGGCTGAGAGGGAGGTGGAGACTGGCGAGATGGCCGTCCGCGTTACCACGGAGTCCGGCAGGATCATTGAGGGGAGCGAGGACCATCCAGTCCTGACCCCTGAGGGCTACGTTTACCTCGGGAACCTGAAGGAGGGCAATCTCGTGATTGTCTACCCGTTCGAGGGGGTTGAGTACGAGGAGAGGAAGGGCGTGATCCTCGACGAGGATGCGTTCAAGGACGAGGATCCCCAGGTGCTCTCCTTCCTGAGGGAGAAGGGCCTCGTCCCACTGCGCTGGGACGATCCCCGCATCGGGACAATTGCTCGGATCCTGGGCTTCGCTTTCGGCGACGGGTACCTCGGGGAGATGGGCGGGAGGCTCACACTGACTTTCTACGGCAAGGAGGAGACGCTCCGGGAGCTGAAGAAGGACCTGGAGCGCCTGGGCATTTCGGCCAACCTCTACGTGCGCGAGTCTATCGAGACAACTAGCGGCCACTCGGAGGGGAAGTCCCTCAGCATCGAGCTGCGCGTCACATCGAGGTCTTTCGCGCTCTTCCTGGAGAAGCTCGGCATGCCGAGGGGGAAGAAGACTGAGAAGGCGTACAGGGTGCCAGGCTGGATCCTGGAGGCTCCTCTGTGGGTCAAGAGGAACTTCCTCGCTGGGCTGTTCGCTGCTGACGGCTCGATTGTCGAGTTCAAGGGCAACACCCCGCTCCCCATCAATCTGACGCAGTCAAAGTCCGACGAGCTCGCCGAGAATCTGGTGGAGTTCCTCGGGGATGTCGCCAAGCTCCTGGCGGAGTTCGGCATCGAGACCACGCTGTACGAGGTTAAGTCCAAGAAGGGGGTGACCTACCGCCTCTCTATTGTCGGCGAGGACTCAATCAGGACGTTCGTTGAGCGGATCAATTACGAGTACGATCCCGAGAAGAAGGTGAAGGGCCTGATTGCTGCCGCGTACCTCAAGCTGAAGGAGAGGATCGTGAAGGAGGCGCATGAGGCTGTCAAGGACGATTTCCCAACCTTCGAGGAGTTCGCTAAGGAGAGGGGCTACGAGGGCGGGTTCGTCGCTGAGAAGGTGGTCAAGGTCGAGAGGGTTAAGCCTGAGTACACGAAGTTCTACGATATTGGGGTTTACCATGAGGCTCACAACTTCATTGCTAATGGCATCGTCGTTCACAAC

SEQ ID NO: 2150 - protein, 1287 aa, Pyrococcus abyssi
  Intein encoding nucleic acids 92
TGCGTGGACGGGGACACTCTCGTGCTGACAAAGGAGTTCGGGCTCATCAAGATCAAGGACCTCTACAAGATTCTGGACGGCAAGGGGAAGAAGACAGTGAACGGCAATGAGGAGTGGACAGAGCTGGAGAGGCCAATCACTCTGTACGGCTACAAGGACGGGAAGATCGTCGAGATTAAGGCTACCCACGTTTACAAGGGCTTCTCCGCCGGGATGATCGAGATTCGGACCCGCACGGGCCGCAAGATTAAGGTCACGCCCATCCATAAGCTCTTCACAGGCAGGGTTACTAAGAATGGGCTGGAGATCCGGGAGGTCATGGCCAAGGACCTCAAGAAGGGCGATCGGATCATTGTGGCGAAGAAGATTGATGGCGGGGAGCGCGTGAAGCTGAACATCCGCGTCGAGCAGAAGAGGGGCAAGAAGATCCGGATTCCGGACGTCCTCGATGAGAAGCTGGCCGAGTTCCTCGGCTACCTGATCGCTGACGGGACCCTCAAGCCAAGGACGGTGGCCATCTACAACAATGATGAGTCTCTCCTGCGCAGGGCTAACGAGCTCGCCAATGAGCTGTTCAACATTGAGGGCAAGATCGTCAAGGGGCGCACAGTTAAGGCGCTCCTGATCCACTCAAAGGCTCTCGTGGAGTTCTTCTCCAAGCTGGGCGTCCCGCGCAACAAGAAGGCCAGGACTTGGAAGGTCCCGAAGGAGCTCCTGATCTCAGAGCCCGAGGTGGTCAAGGCGTTCATTAAGGCTTACATCATGTGCGACGGCTACTACGATGAGAACAAGGGGGAGATCGAGATTGTGACCGCTAGCGAGGAGGCTGCTTACGGCTTCTCGTACCTCCTGGCTAAGCTGGGGATCTACGCCATCATTCGCGAGAAGATCATTGGCGACAAGGTCTACTACAGGGTTGTGATTTCCGGCGAGAGCAACCTGGAGAAGCTGGGGATCGAGAGGGTTGGCCGGGGGTACACGTCGTACGATATCGTCCCAGTTGAGGTGGAGGAGCTCTACAACGCTCTGGGCAGGCCTTACGCTGAGCTGAAGAGGGCGGGCATCGAGATTCATAATTACCTCTCGGGGGAGAACATGTCTTACGAGATGTTCAGGAAGTTCGCGAAGTTCGTCGGCATGGAGGAGATCGCTGAGAACCACCTCACCCATGTTCTGTTCGACGAGATCGTGGAGATTCGGTACATCTCCGAGGGCCAGGAGGTGTACGACGTTACTACGGAGACTCATAATTTCATTGGGGGCAACATGCCTACTCTGCTCCACAAC

SEQ ID NO: 2151 - protein, 1947 aa, Podospora anserina
  Intein encoding nucleic acids 93
TGCCTCTCGCCAGATACTATGGTTCGCACTACTAACGGGGACAAGCCAATCAGGGACATCGCGGTCGGGGATCAGCTCTTCGATCACGAGGACAGGCCAGTGCAGTGCCTCGCTGCTGAGGCTATCCAGACCTCCCGGATGATGAAGGTTACCTACACGGGCTACAACAGCGTGTCGAAGTCCAGCTTCACATGCACTCCAGACCACATCATGACCCTCGTTGCGTACGGGGTGAAGCCTTTCCGCCATTCTAACTCAAATAGGGTGACCTGGTGGACGAGGTGCGACAGGACGGAGCTGGGCGCTGATGCTGTCGAGATCAAGTGGGATGCTGCCATGCACGACCTCTACACAGAGTACCGCGAGCAGCTGGGCAGGAGGCCAACTGACGCTGAGGTCCGGAAGTACCTCAAGGCTATCACCAGCACGCGCGTGGTCCCAGATTCGGAGGACGATGACTCTCAGAGGGTCGAGGAGACGTACCAGTCGCCCGTTCTCATTAAGCTCCTGGCGAAGCTGAAGGCTATGGATGTGGACGTCGATGGCGAGGACGAGTCTGTTGTGCTCATGCTCCTGCAGCAGCACATGGAGGACTACCTGGAGCACATGATCCCAGAGCCTGAGGATATTTCCGACGAGGATAACGATGACCTCATCATTGACCTGGATACAAATAGGAAGCGGAAGATCGGCACAATTTCTACTCTGTCGTCTCGCATCTCAGACAAGACTTTCAGGCAGTCCCCGAGCATTAAGTCATCCCCCGTGAACTCTCAGCAGCAGTCACAGAATGAGGCTTCGCAGTCTACCGTCCCGACGTACGCCTCGGTTCTCACCGAGGATGACCACCGCGAGATGTTCGCGCCAGTGCGGTCAAAGCTGGCTGTCCGCGACCCTAAGTGCAAGTGCCAGAACCTCTCCTGCAAGGGCCTGAGGCGCGTCAGCACAGTTTTCGAGACTTCGGAGCAGGCTGACCTGGCTCTGGAGCTCCTGAGCGGGGATCACTACCGCGTCGTTGACCCATGCGCCGTGCAGGATATGGAGGTCTTCACAATGACTCTGGAGGAGTACCAGGCTACCTGCACGGCTCCTATGACGCAGCATAAGTCCAAGCTGCGCCTCTACAGGAGCCCGCTCAGGTTCCAGCCATACCAGGGCTCAGTGTCCCCAGTCCCAATCGACCCGTTCTGGTTCGGGTTCTGGCTGGGCAACGGGACCAAGAACAATTCCGAGATTACAAGCACTGATCCCGAGGTTGAGGTGTACACGCAGGCGCTCGTGGATAGGCTGAATAGGGACTCGATCCCACCAGGCAAGGCTCCACTGAAGGTCTCTAAGTACAAGATCGACATTGGCACCAAGCACGTGTACAAGGGGGAGGAGATCAAGACCACGAAGGTCGCCCATCGCCTCAGGGTCATGAGCACCGTTTCGAACCTGGACAAGACGCACTGGAATCCAGTGCATGATGGCCTGAGGGAGCTCGGCCTCCTGGGGGACAAGTCCGGCGGGATCCCTGACTGCTACATGAACGCGGATGAGAATACAAGGCTGGCTGTGCTCGCCGGCCTGATTGAGTCAGACGGCTGGCTCTCCCACGGGCTGAACTGCTACGGCTTCGGGCAGTACACCTACGAGCTCAAGAAGCTGGTCGAGGACGCTCGGAAGCTGGCTCTCTCCTGCGGCATCCAGTGCAACCCCATTTTCGAGAGGAAGAATGGCAAGGATCGGCCAGAGCCTGGGTGGTTCTTCTACATGGGCAGGGGGGTCGAGAAGTTCCAGCCACATCTCCTGCTCCCTCGGAAGCGCATGACCATCCCGTTCACAACTAGCAAGAACAGGGACGTTCGGCCATTCGACGTGGAGGATGCTGGCGACGGGGAGTTCAGGCTCATTGAGGTTTCAGGGGAGCTCTTCCAGCTCGCGGATAGGACTGTGGTTCATAAT

SEQ ID NO: 2152 - protein, 1719 aa, Paracoccidioides brasiliensis Pb18
  Intein encoding nucleic acids 94
TGCCTCGCTAAGGGGACACTGCTGCTGCGCTACGATGGGACAAAGGTGGAGGTGGAGAATGTTCGGGAGGGGGATCTGCTGCTGGGCCCAGACGGCGGGCCTAGGAGGGCGTTCAACATTGTGGGCGGGAGGGACCGGCTCTACAGGATCAAGATGGAGGGCGGGAAGGAGGATCTGGTGGTCACCCCAAATCACATCCTGGTCCTCCATCGCGAGAAGAGGGACGGCGTCGATAAGGTTTACGCTAGGCCATTCGCTCTCCCACTCCTGCAGGAGGACGCCACCGACGATGGCGAGGATCTGTCGGAGATCTCTGCGATTGAGCACTTCGACACCATGGAGATCACGGCTGCTGACTTCGCTTCCCTCGATCCGAACGAGCGCAAGCTGTACAGGCTCTTCACGAGCCCAGGCTACGAGCTGAATGGGAGGCCAGTGCCCATTGACCCGTACTTCCTGGGCCTCTGGCTGGGGGATCGCTCCAGGACCAAGTCCAGCATCTACACGAACCACGAGGAGGAGATCCGGGAGTTCATTGCGGACCATGCTGCCGAGCTCGATCTGCAGCTCGTGTCATACGTCTCCAATCGCCCATCCCTCGCGGCTATGAAGAACGGCAATCAGCTGCCTCTCAGGCACCAGGCTAGGCAGACGATCAGGAAGCAGCGCATTGCCGCGAAGAGCATCACACAGCCAGGCGGGGCTAGGTCGTCTTCATACCCTGCCACCAACGGCGGGCTGTCCAGCAATACAGTGACTAGCCTCCACTCGCGGGAGCGCCATCCACTGTCCGAGTCGTCTGCTGCCGCGACGATGAACCTCCTGCCACGCTCCACAAGCGTCTCGACTTCTGTTGCTGCCCAGCCTAAGTCATCCATGAGCACATTCATCACTGACGCTATTCTCCCTTCGGAGAGCTCGAACATCTCTGTCATTTCAGATTCCGGCATCGAGATTAGCAAGTCTTCAAAGATGCTGTCGGAGGAGGAGGCCGACCTGGATCTCTTCGACATTGATTCGGAGGACGAGGAGATCGAGGACCTCGATGAGAAGAAGAACGTTAGCAATGTGGACGAGTTCCCGAAGCGGCGCAGGATCCACTACCTGAGGACCGGCTGCCGGACGTACGGGGAGCTCTGCCCAGGCGAGGAGGACCAGATCCTGGAGGATATTGTTGGCAGGCCAGACGGGACCACGTCTGTGGAGTCACTCCTGCTCGCTCTGGAGGCTCTGGGGCTCCATACCTGCGGCACGAACGACAGCGGGTCGGATAAGAAGCGGATCCCCTCAGTGTACATGAAGAACTCCCGCGCCGTGCGCCTGGCTCTGCTCGCTGGCCTCATCGACTCTGGCGGGTGGTATGTGGATTCAGAGAACACATTCGGCTTCAGCCAGACTGAGGACTCTAATTCAACCCTGATCTGGGATGTTGTGACCCTGGCTAGGAGCCTCGGCTTCTCCGTCAGCACAAAGCGGCGCATGACTCACAAGCCGACCAGGACGCAGCATAAGGCGCAGGAGTTCGCTCAGATTTCGGGCAACGTCGCGGAGATCCCATCTCTGCTCGCTAGGGAGAGGGGCGTTGAGAGGCCAATCTCCCAGGCGCACAGCTTCAAGATCAAGGACATTCAGCTGGAGACAGAGGCCACTGAGTGGGCGGGGTTCAGGGTGGATCAGGATCAGCTCTACCTCAGGCATGACTTCCTCGTTCTGCATAAT

SEQ ID NO: 2153 - protein, 483 aa, Penicillium chrysogenum
  Intein encoding nucleic acids 95
TGCCTCGCTAAGGGGACAAGGCTGCTGCGCTACGATGGGACAGAGATCAACGTGGAGGACGTGCGGGAGGGGGATCAGCTGCTCGGGCCAGACGGCGAGCCAAGGAGGGCGTTCAACATCGTTTCCGGCATTGACCGGCTCTACCGCGTGAAGATCGGCGGGGAGAAGGAGGATCTCGTGGTCACCCCGAACCACATTCTGGTGTTCTACAGGGAGGGCCCATCCGATGGGCCTGAGAATGCGGAGCGGCAGACAGTCGAGATCACTGCCGCGGAGTTCGCTACCCTCAGCACGGAGGAGCGCTCCCTGTACAGCGCGTTCACCTCGCCAGCTGTCGAGAAGGGCGCTGAGGGGTCAGCTGCTCAGATGCATTCCTTCAAGGTTGAGGACATTTCGCTGGAGTCTGAGAAGACGGAGTGGGCCGGCTTCAGGGTGGATAAGGATCAGCTCTACCTCAGGCATGATTACCTCGTTCTGCATAAC

SEQ ID NO: 2154 - protein, 1101 aa, Pyrococcus furiosus
  Intein encoding nucleic acids 96
TGCGTCGCGCCAGATTCGCTCGTGGTCGTCAATGATAAGGTTCAGGAGATCGGCAAGCTGACAGAGGAGTGGGGGCGGGAGGTCGGGTTCCTGGAGTACTCCAGCGGCATCTTCTACGCTCCGTACCTCGGCAGGGGGATTTCACTGGACCTCGTTACAGGGAAGGTGAAGCCGTCTGTGGTCTCAAAAGTGTGGAAGCTGAAGTCCCCCGAGGAGCTCGTCACCATCAAGACCATTACGGGCAAGGAGATCACAGTGACTCCAGAGACCAAGCTCCTGACGTTCAACGGGACACTGGAGTGGAAGGAGGCGGGCAAGATCAAGCCTGGGGATTACGTGCTGACTGTCAAGAAGCTCCACATCAATGGCAAGCAGGAGACCCTGGACGAGAAGCTCGCCTACAAGAGGGGGCTGAGCCTCTCGGATCCACTGGAGTTCTTCTCCTCCTCCGAGAGGACTATCTCCGCGTACCTGAAGGGCATTTTCGACAAGGTCGGCAGGCTCGTTGGGGATACCGCCGTTATCAAGGTGGACAAGGATATGGCGAAGAGGCTGCAGATCCTCCTGCTCAGGCTCGGCATTGTCTCCAGCGTTGACGAGACGGGCAAGGTCATCATCGGGCGCGAGTACATCCAGAAGATTCTGGGCTACAACGTTTCCGTTGTGACGCACGAGGTCGAGCTCTTCAGGGAGTTCATCGCCGAGATTTCCAAGTTCTACGGCACAAGCGAGGAGGACGTCTACTCGTCTCTGCATGAGAAGGGCGAGCTCGATATCGGGACTGTCCCAGTTGAGCTGCCTGAGGGCCTCCGGGAGGAGATCAATCGCGAGAGGGCTACGTACAGCGAGCTGGTGAAGATCGCCCAGGAGATTAAGGACGAGAAGCTGTACAACAAGCTCGCGTGGATCCTGTCGGAGGTCACGGAGGAGGAGGCTAAGATTAAGGAGAAAGTGAATACACTCAAGGTCATCCTGTCATCCGATCTCATTCCGGAGCGCGTGGAGTCGGTCAAGATCATTAAGTCTCCGTACCCCTACGTGTACGATCTCACAGTGGAGGGCTCTCATTCTTTCATTGCTAATGGCTTCGTGGTTCATAAT

SEQ ID NO: 2155 - protein, 1161 aa, Pyrococcus furiosus
  Intein encoding nucleic acids 97
TGCCTGCTGCCGGAGGAGAAGGTCGTGCTGCCTGAGATCGGGCTGGTTACGCTGCGGGAGCTGTTCGAGCTGGCTAATGAGGTCGTTGTCAAGGACGAGGAGAAGGAGGTTCGGAAGCTGGGCAAGATGCTCACAGGGGTTGATGAGCGCGGCAACGTGAAGCTCCTGAATGCCCTCTACGTGTGGAGGGTCGCGCACAAGGGCGAGATGATCCGGGTTAAGGTGAACGGGTGGTACTCCGTCACCGTTACGCCGGAGCATCCCTTCCTGACGAATAGGGGGTGGGTGAAGGCTGGCGAGCTCAAGGAGGGGGACTACATCGCTATTCCGCGCAGGGTCTACGGCAACGAGGATCTGATGAAGTTCTCGAAGATCGCCAAGGAGCTCGGCATTAAGGGGGACGAGAAGGAGTTCTACCTGGCCGGCGCGTCTCTCGATATCCCGATTAAGGTGCTCTTCCTGGCTCCCTCCAAGCTGGTCAGCGCCTTCCTCCGCGGCTACTTCGACGCGAAGGGGGTGGTCAGGGAGAACTACATCGAGGTTCCACTGTTCGAGGATCTCCCTCTCCTGCTCCTGAGGTTCGGCATCGTCTCGCGGATTGAGAAGTCTACCCTCAAGATCTCAGGCAAGCGCAACCTGGAGCTGTTCAGGAAGCACGTGGGGTTCACGGACTCCGAGAAGGCTAAGGCCCTCGATGAGCTGATCTCCAAGGCCAAGGAGAGCGAGAGGTACCCAATTCTGGAGGAGCTGAGGAGGCTCGGCCTCCTGTTCGGGTTCACACGGAACGAGCTGCGCATCGAGGAGAATCCAACTTACGAGGTGCTGATGGAGATCCTGGAGCGCATTGAGAGGGGCTCACCTAACCTGGCGGAGAAGATCGCTGTCCTGGAGGGCCGGATTAAGGAGGAGAACTACCTGCGCATCCTGGAGGAGGAGGGCCTCATTGAGAATGGGAAGCTGACCGAGCTCGGCAAGGAGCTCCTGGAGGTCTGGAGGAACCGGGAGTTCGACTCGAAGGACGTTGATTACGTGAGGAACATCGTGGAGAATCTGGTCTTCCTCCCCGTCGAGAAGGTTGAGCGGATCGAGTACGAGGGCTACGTCTACGACGTTACTACGGAGACTCATAATTTCGTTGCTAATGGCATCCTCGTTCATAAT

SEQ ID NO: 2156 - protein, 1566 aa, Pyrococcus furiosus
  Intein encoding nucleic acids 98
GCTCTCTACGATTTCTCGGTTATTCAGCTCTCTAATGGGCGGTTCGTTCTCATCGGGGATCTCGTGGAGGAGCTGTTCAAGAAGTACGCCGAGAAGATCAAGACCTACAAGGACCTGGAGTACATTGAGCTGAACGAGGAGGATAGGTTCGAGGTGGTCTCAGTCTCCCCGGACCTCAAGGCGAATAAGCACGTTGTGTCTCGGGTGTGGAGGAGGAAGGTCCGCGAGGGGGAGAAGCTGATCCGCATTAAGACCAGGACGGGCAACGAGATCATTCTCACACGCAATCATCCCCTGTTCGCCTTCAGCAACGGGGATGTCGTTAGGAAGGAGGCTGAGAAGCTCAAAGTGGGCGACAGGGTTGCCGTGATGATGCGGCCGCCCTCACCACCTCAGACTAAGGCGGTGGTCGACCCAGCTATCTACGTTAAGATTTCCGATTACTACCTGGTGCCAAACGGCAAGGGGATGATCAAGGTCCCTAATGACGGCATTCCGCCCGAGAAGGCCCAGTACCTCCTGTCTGTGAACTCATACCCCGTTAAGCTCGTGAGGGAGGTCGATGAGAAGCTCAGCTACCTGGCTGGGGTCATCCTGGGCGACGGGTACATTTCCAGCAATGGCTACTACATCTCGGCGACCTTCGACGATGAGGCGTACATGGACGCTTTCGTCTCCGTTGTGAGCGATTTCATCCCAAACTACGTGCCTTCCATTAGGAAGAATGGGGACTACACAATCGTCACTGTTGGCTCTAAGATTTTCGCCGAGATGCTCTCACGGATCTTCGGCATTCCGCGCGGGAGGAAGTCCATGTGGGACATCCCCGATGTCGTTCTCAGCAACGACGATCTGATGCGCTACTTCATCGCCGGCCTCTTCGACGCGGATGGCTACGTGGACGAGAATGGCCCGAGCATCGTGCTGGTCACCAAGTCGGAGACGGTCGCCAGGAAGATCTGGTATGTGCTCCAGCGGCTGGGCATCATTTCGACGGTTTCTCGGGTGAAGTCGCGCGGCTTCAAGGAGGGGGAGCTCTTCCGGGTTATCATTTCTGGCGTGGAGGATCTCGCTAAGTTCGCCAAGTTCATCCCACTGAGGCACTCCCGGAAGCGCGCTAAGCTCATGGAGATCCTGCGCACAAAGAAGCCTTACAGGGGCAGGCGCACTTACAGGGTCCCAATCTCGTCTGACATGATTGCTCCACTGAGGCAGATGCTCGGGCTGACCGTGGCTGAGCTCTCAAAGCTGGCCTCCTACTACGCGGGCGAGAAGGTCAGCGAGTCGCTCATCCGCCATATTGAGAAGGGGAGGGTGAAGGAGATCAGGAGGTCGACGCTGAAGGGCATCGCTCTCGCTCTGCAGCAGATTGCTAAGGATGTGGGCAACGAGGAGGCTTGGGTCAGGGCTAAGAGGCTCCAGCTGATCGCTGAGGGCGACGTCTACTGGGATGAGGTGGTCAGCGTCGAGGAGGTTGACCCGAAGGAGCTGGGCATCGAGTATGTGTACGATCTCACAGTGGAGGATGATCATAACTACGTTGCTAATGGCATTCTCGTTTCTAAT

SEQ ID NO: 2157 - protein, 1203 aa, Pyrococcus furiosus
  Intein encoding nucleic acids 99
TGCTTCTCGGGGGAGGAGGTTATTCTCATTGAGAAGGACGGGGAGAAGAAGGTTTTCAAGCTGCGGGAGTTCGTGGACGGGCTGCTGAAGGAGGCTTCTGGCGAGGGGATGGACGGCTCAATCCGGGTGGTCTACAAGGATCTCCAGGGCGAGAACATCAAGATTCTCACCAAGGATGGGCTGGTGAAGCTCCTCTACGTGAACCGCAGGGAGGGGAAGCAGAAGCTCAGGAAGATCGTTAATCTGGAGAAGGACTACTGGCTCGCCCTGACCCCGGAGCACAAGGTCTACACGATCAAGGGCCTGAAGGAGGCGGGGGAGATTACCAAGGACGATGAGATCATTCGCGTCCCGCTCACGATCCTGGACGGCTTCGATGTTGCGGAGAAGTCCATTAGGGAGGAGCTGGAGAGGCTGAGCCTCCTGCCCCTCAACTCAGAGGATTCCAGGCTGGAGAAGATCGCGGGCATTATGGGGGCTCTCTTCGGCTCGGGCGGGATCGACGAGAACCTCAATACACTGTCTTTCGTGTCCAGCGAGAAGAAGACTATCGAGCAGTTCGTCAAGGCTCTCAGCGAGCTGTTCGGCGAGTTCGACTACAAGATCGAGGAGAAGGAGAACTCCATCATCTTCCGCACCTGCGATAAGCGGATCGTGACATTCTTCGCTACTCTGGGCGCCCCAGTTGGGGACAAGTCAAAGGTGAAGCTCAAGCTGCCATGGTGGGTCAAGCTCAAGCCTTCCCTCTTCCTGGCCTTCATGGACGGCCTGTACTCGTCTAACCGCAATGATAAGGAGATCCTGGAGATTACCCAGCTGACGGACAACGTGGAGACATTCTTCGAGGAGATCAGCTGGTACCTCTCGTTCTTCGGCATTAAGGCCGAGGCGGAGGAGGACGAGGAGAAGGATAAGTACAGGGCTCGGCTCACTCTGTCATCCAGCATCGACAACATGCTGAATTTCATTGAGTTCATCCCGATTTCGTTCTCTCCCGCCAAGAGGGAGAAGTTCTTCAAGGAGATCGAGAAGTACCTGGAGTACTCCATTCCCGAGAAGACGGAGGACCTGAAGAAGCGCGTCAAGAGGGTTAAGAAGGGCGAGCGGCGCAACTTCCTGGAGTCCTGGGAGGAGGTTGAGGTGACCTACAATGTTACTACGGAGACAGGCAATCTGCTCGCTAATGGGCTCTTCGTTAAGAAC

SEQ ID NO: 2158 - protein, 1575 aa, Pyrococcus furiosus
  Intein encoding nucleic acids 100
TGCCTCACAGGGGACACTAAGGTTATCGCTAATGGGCAGCTGTTCGAGCTGGGGGAGCTGGTGGAGAAGCTCTCGGGCGGGCGGTTCGGCCCAACGCCAGTGAAGGGCCTCAAGGTCCTGGGGATCGACGAGGATGGCAAGCTCCGCGAGTTCGAGGTTCAGTATGTGTACAAGGACCGCACCGATAGGCTGATCAAGATTAAGACGCAGCTGGGCCGGGAGCTCAAGGTGACACCATACCACCCTCTCCTGGTCAACCGCGAGAATGGCGAGATCAAGTGGATTAAGGCCGAGGAGCTGAAGCCAGGGGACAAGCTCGCGATCCCGTCGTTCCTCCCCCTGATTACCGGCGAGAACCCTCTGGCTGAGTGGCTGGGGTACTTCATGGGCTCTGGGTACGCTTACCCATCGAACTCTGTGATCACCTTCACGAATGAGGACCCTCTCATCCGCCAGAGGTTCATGGAGCTGACCGAGAAGCTCTTCCCGGACGCGAAGATCCGGGAGCGCATTCATGCTGATGGCACGCCCGAGGTCTACGTGGTCTCCAGGAAGGCTTGGAGCCTCGTTAACTCAATCTCCCTCACCCTGATTCCACGGGAGGGCTGGAAGGGGATCCGGTCGTTCCTGCGCGCCTACTCTGACTGCAATGGCCGGATCGAGTCAGATGCTATTGTGCTCTCCACGGACAACAATGATATGGCCCAGCAGATCGCCTACGCGCTGGCTTCGTTCGGGATCATTGCGAAGATGGACGGCGAGGATGTCATCATTAGCGGGTCGGACAACATCGAGAGGTTCCTCAATGAGATTGGCTTCTCTACACAGTCAAAGCTGAAGGAGGCCCAGAAGCTCATCAGGAAGACTAACGTGCGGTCTGACGGCCTGAAGATCAATTACGAGCTCATTTCATACGTTAAGGACAGGCTCCGGCTGAACGTGAATGATAAGCGCAACCTGAGCTACAGGAATGCGAAGGAGCTGTCGTGGGAGCTCATGAAGGAGATCTACTACCGGCTGGAGGAGCTGGAGCGCCTCAAGAAGGTCCTGTCCGAGCCGATCCTCATTGACTGGAACGAGGTCGCCAAGAAGAGCGATGAGGTTATCGAGAAGGCCAAGATTCGCGCGGAGAAGCTCCTGGAGTACATCAAGGGCGAGAGGAAGCCCTCCTTCAAGGAGTACATCGAGATTGCCAAGGTTCTGGGGATCAACGTGGAGAGGACAATCGAGGCTATGAAGATTTTCGCCAAGAGGTACTCCAGCTACGCGGAGATCGGCCGGAAGCTGGGGACTTGGAACTTCAATGTGAAGACAATCCTGGAGTCCGACACTGTCGATAACGTTGAGATCCTGGAGAAGATCCGCAAGATTGAGCTGGAGCTGATCGAGGAGATTCTGAGCGACGGGAAGCTCAAGGAGGGCATCGCGTACCTGATTTTCCTCTTCCAGAACGAGCTCTACTGGGATGAGATCACCGAGGTCAAGGAGCTGAGGGGCGACTTCATCATCTACGATCTGCACGTTCCAGGCTACCACAACTTCATTGCGGGCAACATGCCAACAGTCGTTCATAAC

SEQ ID NO: 2159 - protein, 1119 aa, Pyrococcus furiosus
  Intein encoding nucleic acids 101
TGCCTGCATCCTGACACTCTCATTCTCACATCACAGGGGGTTCGCAAGATCAAGGAGCTCTCGCGGGAGGGGGAGGTTTTCGCTCTCGACTTCAACCTGAAGCTCTCCAAGGCGAAGTACAGGCTCCTGGAGCGGGACGCTGATGAGCAGATGTACAAGGTGACCCTCCTGGACGGCACGGAGCTGTACCTCACAGCCGATCACCCAGTGCTCGTCTACAGGGAGGGCAATCTGGCTTTCGTTCCTGCCGACAAGCTCCGGGAGACGGATCATGTGGTCCTGGTGCTCAACAAGTCTGCTCGGGACAATTACGGCTTCCTCGATCTCCTGCTGGAGATTACTGACTCACAGGAGGATTACGCCATCCTGGAGAACGGCGAGACCCTGTCGCTCCACTCTCTGAAGATGCTCGTGGAGCGCGGGGAGATCAAGGACATTGCGGTTGTGGGCTTCTCGCATAACAATTTCGGGAAGGTCATGCTCAGGGATGAGCTGTGGTACCTCATCGGCTACCTGGCTGGGAAGGGCGGGGAGATCAAGGGCAACGGGGTCGTTATTTCCAGCAGGACGAAGGAGATCGTCGGCCTGACAAAGAGCCTCAACATCGACCTGATTGAGACCGAGGAGGGGATCGTGCTCTCAAATAAGTCCTTCGTCCGGCTGCTCCACCTGATCCATTACACGCCGCGCGTCCCCGAGGTTTACGGCATCATTAACAATACAGAGTGGCTCAAGGCCTTCCTGGCGGGCTACTACGACGCCACTCTGCTGGAGGGGCTGACCCTGGAGGCTCTCTACAAGATCAAGGTCTACCTGCAGCTGCTCGGCATCCGCGCGAAGATTGAGGACAACAAGCTCAAGGTTCACCTGGAGGATCTCCAGCGGTTCCGCGAGCTGCTCGGCAAGTTCAGCCGCCGCAAGCTCTACGTGGAGACTTCGCAGGTTCCGGTGTTCACCGACTTCGATGAGCGCTCCTACGACTTCCCAAGGATCCTGGGCGGGGATATCTACATCATTGGCATCAAGAGCATTGAGAAGTTCCATTACAAGGGGAAGGTCTACGATCTCGTCGTGGAGAACTACCACAACTTCATTGCTAATGGCATTGCTGTGCATAAT

SEQ ID NO: 2160 - protein, 780 aa, Pyrococcus horikoshii OT3
  Intein encoding nucleic acids 102
TGCGTCGCGCCTGATACTCTCATTAACACAGACAACGGGCGGGTGGAGATCGGCAAGTTCGTGGAGGAGTGGATGAAGGAGGTCGGGGAGATTTCGGAGGAGGGCATCTCTTACGCCCCGTGCTTCCGCAAGGTCGAGACCTTCAAGGACGGGAAGATTGTTGAGAGCCCAATCCGCAGGGTGTGGAAGCTCCGGGCTCCTAAGAAGCTGGTGCGCATTAAGACAGAGAACGGCCGCAGCATCGCCCTCACAAGGGAGACTAAGCTCCTGACTATCAATGATGGCGAGCTGTCGTGGGTCGAGGCTGGGGAGGTGAAGGTCGGCACCTACGTTGGGACGGTGAAGTCAGAGAAGGACGTGATTCCAGGCGCTGGGAAGACCATCAGGGATGTCTCCAAGCTCTACAACATGGAGATGGAGGTCAAGGACTACCTGACGAGGGAGGAGGTTCGGAAGGCGATTGAGAAGCTGGAGGAGATCATGAACCCGATGAATATCAAGATTCCCGGCGTGCAGGAGTCCTACGAGGAGCTCCTGCGGAAGCTGGAGACCACGAACGATGAGCGGGTTCGCAATGAGACACTCATCCTCCTGTCCGACGTGAGCGATGCCCACGAGCTGGCGAAGGAGAAGATCGAGAAGATTAAGGAGATCGTGAACTCCGAGGTCCATTGGGAGAAGGTCACCGAGGTTGGCGAGGTGGACGGGGTCGAGTATGTGTACGATCTCACAGTGGAGGGCTCTCATAATTTCGTTGCTAATGGCTTCATCGTTCATAAT

SEQ ID NO: 2161 - protein, 1332 aa, Pyrococcus horikoshii OT3
  Intein encoding nucleic acids 103
TGCCTGCTGCCGGAGGAGCGGGTTATTCTGCCTGACTACGGGCCTATTACTCTGGAGGAGCTCTTCAATATGACAAAGGAGACAGTGTTCAAGGACGAGGAGAAGGAGGTCCGGAAGCTCGGCATCCGCATGCCAGTGGCTGGCGTCGATGGGCGGGTGCGCCTGCTGGAGGGCCCCTACGTTTGGAAGGTGCGCTACAAGGGGAAGATGCTCAGGGTCAAGCTGAAGGACTGGCACAGCGTGGCTGTCACACCAGAGCATCCCTTCCTCACCACGCGGGGCTGGGTGCGCGCTGACCAGCTGAAGCCCGGGGATTACGTTGCCGTGCCAAAGATCCTCCCTGGGAAGGACGATAAGGAGAAGTTCCTCCAGTATGTGCACGAGAAGCTGAAGGGCAAGGTTCATATTAAGCTGCCGTCCAGCGACGAGGAGTGGGAGACATTCTTCTACTTCGCCGGCACTATCTTCGGGCGCGAGAACTCGGTGAATCCAGAGGGCCTCACCCACGAGGTCAAGGCTCTCCTGGAGCTCTTCAAGGTTCTGTTCGAGTACCCGAGGGAGGTCCTCCGGGTTCTGTTCATGGCCCCGGTGCGCTACGTGGCGAACTTCCTCCGCGGCTTCTTCGACATTAACGGCTACGTCAATGGGGAGGAGCTGAGGGTCGAGGTTAGGGGGGCTCCACATGAGGTTCTGGAGGAGCTCTCCCTGATCCTCCTGAGGCTGGGCATCGTGTCCAAGATCTACCCTACGAGCCTGGCTATTTCGGGCAGGAGGAACCTGGAGCTGTTCCGGCGCTACATCGGGTTCTCGGAGAAGCAGAAGGCCAAGGAGCTGGAGGGCATCATTAGGCGGTCTGAGAACTCAGAGTCCTACCCAATTTTCGAGGAGCTGCGCAGGATCAGGCTCCTGTTCGGCTTCACCCGGGCGGAGCTCTCGTCTACGATCCCACTGTACTCTAAGTACGAGTCAAAGGAGGCTCCTTCATACGAGATCCTCATGAAGATTCTGAATACAATCGAGAAGGGGTCTAAGGACCTCAACAAGAAGATCACTATTCTGGAGGGCAGGGTGCGGGATCACGAGTACATTGAGGAGTTCAAGCGCGAGGGCCTGATCAAGGACGGGAAGCTCACCGAGCTGGGCAAGGAGCTCCTGGAGGTCTGGCGCAACAGGGAGTTCGACTCCAGGGATGTCAACTACCTCCGGAATATCATTGAGAACTTCGTTTTCCTGCCGGTGGAGAAGATCGAGGAGTTCGAGTACGATGGCTACGTCTACGACGTTACTACAGAGACTCATAATTTCATTGCTAATGGCATCCTCGTTCATAAT

SEQ ID NO: 2162 - protein, 1425 aa, Pyrococcus horikoshii OT3
  Intein encoding nucleic acids 104
TGCGTTTCGGGGGACTCTAAGGTCCTGACGGAGAAGGGGCCAGTGGAGATTCGGCATCTCAATTCGGGCATGATCGTGGGCATCAATGGCTTCAAGAGCAGGTTCGTCAAGTTCCAGGAGCTGCACCAGGTCAAGTACCAGGAGTACGGGGTTAAGATCCGGACCCAGCTCGGCTTCGAGGTGAAGTGCACCAGGGAGCATCGGTTCCTCACGATTGACAAGAACGGCGAGCTGCGCTGGGTTGAGGCTTGGAGGCTCAAGGAGGGCGATTACGTGGGGATCATTCGCAAGCTGCCGTCTCCCAACTCAAAGGTTCTCATCCTGGACTTCCTCCCGGAGTCGACGTACCTCTGGCTGAATAAGGAGTTCCTCAAGAAGCTGAAGGTCTCTATCAAGGAGAAGTTCGGGTCAATTAAGAACTACGCCAAGGAGCGGGGCTTCAATTCCAGCTACCTGGTGAAGCAGCTCAACGGGCTGTCCCCATTCCGCTGGGGCAGGCTCAGGGTTATCCTGAATGATGTGTCGATCGAGATTTCTCGGGACGATATCGAGCGCATTACATCACGCAGGGGCAAGTACTCCCTCCCACCAGAGCTGACTCCTGGCATCGCTAGGCTCCTGGGGTTCTGGATGGCTAGCGGCTCGCTCAACCGCAATACCCTGATCTTCTACTCGCAGGACAAGAAGATTCTGGAGCGCTACGAGGATCTGTGCAAGCGCGAGTTCAGGGTCAAGGGGCGGATCAAGGCCCAGGACAAGGGCACGTACATCCTGGAGATTCCCTCGTCTCTCCTGTCTTTCGTCTTCAAGAACCTCGCGCGCCCAAAGCTGGAGGTTCCACCGATCATCTACATCCTGCCTGAGAAGCACAAGGAGGAGTTCCTCGCTGGCTACTTCGACGGCAACGGGTTCATCAAGATTGAGAATGGGAGGATCCATTCCCTCGGCTTCTTCGCCTTCAACCGCAAGTTCGCGGAGGGGATCAGGGATATTCTCCTGCAGCTCGGCATCCTGTCATCCATTAATGAGCAGACATTCGAGGTGAGCATCATTGAGGGCGAGAAGTTCCTGAAGATCGTCAACTCCTGGCGCAGCAATTACTACAAGGAGTGGGAGGACGTGATCCCGAACCTGGAGAAGAGGCTGAAGGAGATTGAGGAGAAGCTCGGCTACCCCGGGACTTACAATCGGCGCGAGATCAGGCGGTCCGAGCTCAAGGCGATCATTAAGCTGTACGAGAAGGTGGCTCGGGAGAGGGGCCTGAACGACGTCCTCAAGGAGCTGAGCTACCTCAAGGAGCTGTCGGAGGGCGACATCTTCTTCGATAGGATCACCAGCATTGAGCCAGTGTACCTCGATGTCGCGTACGGCATCATCAACTCAGAGACAGGCAACTACGTGGTTAATGGCTTCGTTTCAAAGAAC

SEQ ID NO: 2163 - protein, 1422 aa, Pyrococcus horikoshii OT3
  Intein encoding nucleic acids 105
TGCTTCTCAGGGGAGGAGGTTATTATCGTGGAGAAGGGCAAGGACCGCAAGGTCGTTAAGCTGCGGGAGTTCGTGGAGGACGCTCTCAAGGAGCCATCCGGCGAGGGGATGGACGGCGATATCAAGGTGACATACAAGGACCTGCGCGGCGAGGATGTCAGGATTCTCACTAAGGACGGGTTCGTGAAGCTCCTCTACGTGAACAAGCGCGAGGGCAAGCAGAAGCTCAGGAAGATCGTCAATCTGGACAAGGATTACTGGCTCGCCGTTACACCTGACCACAAGGTGTTCACTTCTGAGGGCCTGAAGGAGGCGGGGGAGATCACGGAGAAGGACGAGATCATTAGGGTCCCACTCGTTATCCTGGATGGCCCTAAGATTGCCTCAACATACGGCGAGGACGGGAAGTTCGACGATTACATCCGCTGGAAGAAGTACTACGAGAAGACTGGCAACGGGTACAAGCGCGCCGCGAAGGAGCTGAATATCAAGGAGAGCACCCTCAGGTGGTGGACGCAGGGCGCTAAGCCAAACTCGCTGAAGATGATCGAGGAGCTGGAGAAGCTGAATCTCCTGCCTCTGACCTCTGAGGACTCACGGCTGGAGAAGGTCGCCATCATTCTCGGCGCGCTGTTCTCAGACGGGAACATCGATCGCAACTTCAATACCCTCTCCTTCATCTCCAGCGAGCGGAAGGCCATTGAGCGCTTCGTGGAGACGCTCAAGGAGCTGTTCGGCGAGTTCAACTACGAGATCAGGGATAATCATGAGTCCCTCGGCAAGAGCATTCTGTTCCGGACCTGGGACCGCAGGATCATTCGCTTCTTCGTCGCGCTGGGCGCTCCGGTTGGGAACAAGACGAAGGTGAAGCTGGAGCTGCCGTGGTGGATCAAGCTGAAGCCCTCGCTCTTCCTGGCCTTCATGGACGGCCTCTACTCGGGCGATGGGTCTGTCCCAAGGTTCGCTCGCTACGAGGAGGGCATCAAGTTCAACGGGACCTTCGAGATTGCTCAGCTGACGGACGATGTGGAGAAGAAGCTCCCCTTCTTCGAGGAGATCGCTTGGTACCTCTCCTTCTTCGGCATTAAGGCCAAGGTTAGGGTGGACAAGACAGGGGATAAGTACAAGGTTCGGCTGATCTTCTCACAGTCCATTGACAACGTGCTCAATTTCCTGGAGTTCATCCCGATTAGCCTCTCGCCCGCTAAGAGGGAGAAGTTCCTGCGGGAGGTCGAGTCCTACCTCGCTGCTGTTCCAGAGTCGTCTCTGGCTGGCAGGATCGAGGAGCTCAGGGAGCACTTCAACCGGATCAAGAAGGGCGAGCGGCGCAGCTTCATTGAGACCTGGGAGGTGGTCAATGTGACCTACAATGTTACTACGGAGACAGGCAATCTGCTCGCTAATGGGCTCTTCGTTAAGAAT

SEQ ID NO: 2164 - protein, 1380 aa, Pyrococcus horikoshii OT3
  Intein encoding nucleic acids 106
TCTATCCTCCCTGATGAGTGGCTGCCTATCGTGGAGAATGAGAAGGTTCGGTTCGTTAAGATCGGGGATTTCATTGATCGGGAGATCGAGGAGAACGCCGAGCGCGTTAAGAGGGACGGCGAGACCGAGATCCTGGAGGTGAAGGATCTCAAGGCCCTGTCCTTCAATCGCGAGACGAAGAAGAGCGAGCTCAAGAAGGTCAAGGCGCTGATCCGCCACAGGTACTCCGGCAAGGTGTACAGCATTAAGCTCAAGTCGGGGCGCAGGATCAAGATTACCTCAGGCCATTCCCTGTTCAGCGTCAAGAACGGCAAGCTCGTTAAGGTGCGGGGGGACGAGCTCAAGCCAGGCGATCTGGTGGTCGTTCCAGGCCGCCTCAAGCTGCCTGAGTCGAAGCAGGTGCTCAACCTGGTCGAGCTCCTGCTCAAGCTGCCAGAGGAGGAGACGTCTAACATCGTCATGATGATTCCTGTTAAGGGGCGCAAGAATTTCTTCAAGGGCATGCTCAAGACACTGTACTGGATCTTCGGCGAGGGGGAGAGGCCAAGGACTGCTGGCAGGTACCTCAAGCACCTGGAGAGGCTCGGCTACGTGAAGCTCAAGAGGAGGGGCTGCGAGGTTCTCGACTGGGAGTCCCTGAAGAGGTACCGGAAGCTGTACGAGACACTCATCAAGAACCTGAAGTACAACGGCAATAGCCGCGCTTACATGGTGGAGTTCAATTCTCTCAGGGACGTGGTCTCACTGATGCCGATCGAGGAGCTCAAGGAGTGGATCATTGGCGAGCCGAGGGGGCCAAAGATCGGCACTTTCATTGATGTCGACGATTCGTTCGCGAAGCTGCTCGGGTACTACATCTCCAGCGGCGACGTGGAGAAGGATAGGGTCAAGTTCCACTCCAAGGACCAGAACGTGCTGGAGGATATCGCCAAGCTCGCGGAGAAGCTGTTCGGGAAGGTGAGGAGGGGCAGGGGGTACATTGAGGTCAGCGGCAAGATCTCGCATGCTATTTTCAGGGTCCTCGCTGAGGGGAAGCGGATCCCGGAGTTCATTTTCACCAGCCCCATGGACATCAAGGTGGCGTTCCTGAAGGGCCTCAACGGGAATGCTGAGGAGCTGACCTTCTCGACGAAGTCTGAGCTGCTCGTCAACCAGCTCATCCTGCTCCTCAACTCCATTGGGGTGTCAGATATCAAGATTGAGCATGAGAAGGGCGTCTACAGGGTTTACATCAACAAGAAGGAGTCGTCTAATGGCGACATCGTTCTGGATTCAGTGGAGTCCATTGAGGTTGAGAAGTACGAGGGCTACGTGTACGACCTCTCTGTGGAGGATAATGAGAATTTCCTCGTGGGCTTCGGGCTGCTCTACGCTCATAAT

SEQ ID NO: 2165 - protein, 516 aa, Pyrococcus horikoshii OT3
  Intein encoding nucleic acids 107
TGCTTCGCTAGGGATACGGAGGTTTACTACGAGAATGACACAGTTCCGCACATGGAGTCAATCGAGGAGATGTACTCAAAGTACGCTTCCATGAACGGCGAGCTCCCGTTCGACAATGGGTACGCGGTCCCACTCGATAACGTGTTCGTCTACACCCTGGACATCGCTAGCGGCGAGATTAAGAAGACGCGCGCCTCGTACATCTACAGGGAGAAGGTGGAGAAGCTCATCGAGATTAAGCTGTCCAGCGGCTACTCACTCAAGGTTACACCATCCCACCCAGTGCTCCTGTTCCGGGATGGGCTGCAGTGGGTGCCAGCTGCTGAGGTCAAGCCTGGCGACGTGGTCGTTGGGGTCCGCGAGGAGGTTCTCAGGAGGCGGATCATTTCCAAGGGCGAGCTGGAGTTCCATGAGGTTTCGTCTGTGAGGATCATTGATTACAACAATTGGGTCTACGATCTCGTCATTCCAGAGACTCATAACTTCATTGCTCCAAATGGGCTCGTGCTCCACAAC

SEQ ID NO: 2166 - protein, 1230 aa, Pyrococcus horikoshii OT3
  Intein encoding nucleic acids 108
TGCGTTACCCCAGACACGCTGGTTTCGCTCTCGGACGGGCGGATTATTGAGATCAGGGAGGCGGTGGAGAACTCGGAGGAGTCGCTGCTCGGGATCAACGGCCTGAAGCCGAAGGAGGCCAAGGCGCTCAAGTTCTGGGAGATCGACTGGGATGGGCCGATCAAGGTCATCAAGCTGAAGAATGGCCACGAGATCAAGGCTACCCCAGACCATGGGCTCCTGGTTATGAGGGATGGGAAGATCGGCTGGGTGTCGGCTAAGAACATTCGGGAGGGCGACTACGTCGCCTTCATCTACAATCTCGGGCACCGCGGCGGGAAGAAGTACACGCTCCCCCAGCTCCTGAAGGAGCTGGGCATCTCCGAGTACGAGAACTCCAGCTCGCAGGAGCTCAACAATCGCGAGCAGGAGATGGACTCCAAGCAGATCAGCATTGAGCTGGATGAGAGGTTCTGGTACATCTTCGGCGTGATTCTCGGCAAGGGGACCCTGAAGGGGGACAAGGTGGTCATCTTCCAGAAGGATGTCAAGCCGGTTATTGAGGAGGCGCTGCCCTTCGTCCGGATCTTCGAGTCGGCTGACCACATCGGCTTCTCTCATCTCATTCTGGCTGAGGTCTTCCGCAGGCTCGGCGTTGGGGAGGGCAAGCTCCACTCCCTGGTGTTCGGCCTGAGGGAGGAGTACATCAACGCTATGATTGCCGGGTACTTCGACGCTAGCGGCACCTTCCTCAGGAGGGCTGTCCTGACGAGCAAGCGCGGCGATATCCTCAGGATGCTGTCGGTGTACCTCTACCAGATCGGCATTGTCAACAATCTGAGGAGGGACGAGCATGCTGGCGTGTGGGAGCTCATCATTTCTGATCTGGAGAAGTTCCGCGAGAAGATCTACCCTTACCTCAGGATTAAGAAGTCACAGTTCGACAAGGTCTACTCTATTTCAAAGAACGAGGGCGATTTCCTCCCGGTTGCGTCTATCTTCCGGAAGCTGAAGTTCCGCGACGGCTTCAAGAATCGGATCCTCGACGAGGAGATTCCACGCGATGAGGTGGCGAAGGTCCTGGAGTACGCTGAGGACTCACCTGAGAAGGAGTTCCTCAACTCCCTGGTTGAGGCCAGGGTGACATGGGTTCGGGTGGAGAAGATCGAGGAGAGGCATTACACTGGCAAGCTCTACGACTTCACAACTACTACAGAGAACTTCATTTCCAATGGCATCGTCTCACACAAC

SEQ ID NO: 2167 - protein, 1170 aa, Pyrococcus horikoshii OT3
  Intein encoding nucleic acids 109
TGCCTCGCGCCTGGGACAAGGGTCCTGACTGAGCATGGCTACTGGCTGAAGATTGAGGAGATGCCTGAGAAGTTCAAGCTGCAGCGGCTCCGCGTCTACAACATCGAGGAGGGCCACAATGACTTCAGCAAGGTGGTCTTCGTGGCTGAGAGGGAGGTCGGCTCGGAGGAGAAGGCTATCCGCATTGTCACAGAGTCCGGGAAGGTTATCGAGGGCAGCGAGGACCATCCAGTGCTCACTCCTGAGGGCTACGTGTACCTGAGGAACGTGAAGGAGGGCGATTACATCCTGGTGTACCCGTTCGAGGGGGTCCCCTACGAGGAGAAGAAGGGCGTCATTCTCGACGAGTCCGCTTTCGAGGGCGAGGATCCGCAGGTTGTGAAGTTCCTGCGCGAGAGGAACCTCATCCCACTGCAGTGGAAGGACCCTAAAGTGGGCATCCTCGCTCGGATTCTGGGGTTCGCTCTCGCGAATGGCTACATCAGCGAGAACGATAATCTCACCTTCCACGGCAAGGAGGAGGTCCTGAGGGAGGTTCGGAAGGACCTGGAGGAGCTGGGCATCGAGGCGATTGTCGCTGAGGAGGATAAGCTCAAGGTTACGTCTAGGGAGTTCGCTTTCCTCCTGGAGAAGCTGGGGATGGCCCACGACTCAATCCCGGAGTGGATCATTGAGGGCCCCCTCTGGATTAAGAGGAACTTCCTCGCTGGCCTGTTCGGGGCTAATGGCTCGATCGTTGAGTTCAAGGGCGACGTGCCGCTGCCCATTACCCTCACGCATTCGCGGGAGCTCCTGAACGATGTCTCTCGCATCCTGGAGGGCTTCAAGGTGAGGGCCAAGATTAAGATGGGGAAGAATGGCTCATACCAGCTCGTCATCGAGGACGAGGATTCCATTCGCAACTTCCTGGGGAGGATCAATTACGAGTACGACCCAGAGAAGAAGGCCAGGGGCCTCATTGCTTACGCCTACCTGAAGTTCAAGGAGCTCATGAAGGGGAACCTGATGACCTTCGAGGAGTTCGCCCGGGACAGGGGCTACGAGGGCGGGTTCGTGGCGGAGAAGGTCATCGAGGTTAAGAGCGTGAAGCCGGAGTACGATAAGTTCTACGATATTGGGGTCTACCACTCAGCTCATAATTTCATTGCTAATGGCATCGTCGTTCATAAC

SEQ ID NO: 2168 - protein, 1128 aa, Pyrococcus horikoshii OT3
  Intein encoding nucleic acids 110
TGCGTGGACGGGGACACACTGGTGCTGACAAAGGAGTTCGGGCTCATCAAGATCAAGGAGCTCTACGAGAAGCTGGACGGCAAGGGGCGCAAGATTGTGGAGGGCAACGAGGAGTGGACCGAGCTGGAGAAGCCAATCACGGTCTACGGCTACAAGGACGGGAAGATCGTTGAGATTAAGGCCACCCACGTTTACAAGGGCGTGTCCAGCGGGATGGTCGAGATCAGGACCCGGACGGGCCGGAAGATCAAGGTGACGCCGATTCACCGCCTGTTCACAGGCAGGGTCACTAAGGACGGGCTGATCCTCAAGGAGGTCATGGCTATGCATGTTAAGCCCGGCGATAGGATCGCCGTGGTCAAGAAGATTGACGGCGGGGAGTACATCAAGCTCGATTCGTCTAACGTGGGCGAGATCAAGGTCCCGGAGATTCTCAATGAGGAGCTGGCGGAGTTCCTCGGCTACCTGATGGCTAACGGCACACTGAAGTCGGGGATCATTGAGATCTACTGCGACGATGAGTCTCTCCTGGAGAGGGTGAACTCCCTGTCCCTCAAGCTGTTCGGCGTCGGCGGGCGGATTGTCCAGAAGGTTGACGGGAAGGCGCTCGTGATCCAGAGCAAGCCACTGGTCGACGTTCTCAGGAGGCTGGGCGTCCCTGAGGATAAGAAGGTTGAGAACTGGAAGGTGCCGCGGGAGCTCCTGCTCAGCCCATCGAACGTTGTGCGCGCCTTCGTTAATGCGTACATTAAGGGCAAGGAGGAGGTCGAGATCACCCTCGCTTCCGAGGAGGGGGCTTACGAGCTCAGCTACCTGTTCGCTAAGCTGGGCATCTACGTGACAATTTCTAAGTCAGGGGAGTACTACAAGGTGCGCGTCTCGCGGAGGGGCAACCTCGACACTATCCCAGTTGAAGTGAATGGGATGCCAAAGGTGCTGCCTTACGAGGATTTCAGGAAGTTCGCCAAGTCCATCGGCCTGGAGGAGGTCGCGGAGAATCACCTGCAGCATATCATTTTCGACGAGGTCATCGATGTCAGGTACATTCCGGAGCCCCAGGAGGTGTACGATGTTACTACAGAGACTCATAATTTCGTGGGGGGCAACATGCCAACTCTGCTCCACAAT

SEQ ID NO: 2169 - protein, 1122 aa, Polaromonas naphthalenivorans CJ2
  Intein encoding nucleic acids 111
TGCGTTACCGCTGACACAAGGCTCGCTACACAGCATGGGCTGGTCCCTATCGGGTGGCTGCAGGCTAATGGGGGGGCTCTGGACTGCACGGTGGACAGGAGGGCTCTGGGCGAGGATAGGAGGGGGACAGTTACTCGCGCCGCTGTGCCAGCGTTCCTCAGCGCTGGCCAGGCTGAGGTCTTCAAGGTTACCACGGCCGAGGGCTACCAGATCAAGGCCACAGCGTGGCACGAGTTCTACACTGCTAGGGGCAAGCTCAAGCTGTCGGAGCTCAAGGCTGGGGACGAGCTGTGGGTCCAGTCCGGCAAGGGGCAGTTCGGCGCTCAGGGCAGCGGGGCTCTCGGCCTCCTGATCGGGCTGATTACCGGCGACGGGCATTTCACGAACCGCGGCAAGGATGAGCAGGCTGCCGTTATCTCCCTGTGGGGCGAGGAGAGGCAGCTCGCTGACGATATCGCCGGCTCTGTCAATGCCCTCATTGCTGGGACCTCACTGGCTCCGCGCGACTACCTCGTGAAGCCAGTTGCTGTGGCCGAGCGGAACATGGTCTTCATTCGCTCAACCATGCTCGTCAGGGTTCTGGATGGCTACGGGTTCAATGGCGAGACGAAGCTGGAGGTGCCAGAGGTGGTCTGGAGGGGCTCCGAGGCTTGCATGAGGGGCTACCTCCAGGGGCTGTTCCAGACAGACGGCACTGTGAACGTCTCCAGCAATTCCCAGAGCTGCTCGGTGCGGCTGTCGTCTTCACACCGCCCTCTCCTGCAGGATGTTCAGGTGCTCCTGGCGAACTTCGGCGTCTTCTCGCGCATCCATGAGAGGAGGGAGGCTGGCCCAAGGTCTCTCCCAGACGGGCAGGGCGGGCAGAGGGATTACCTGTGCCAGACACAGCACGAGCTCATCGTGGACGGCGAGTCTCGCGAGGCGTTCATGAGGGAGATTGGGTTCCTCCTGCCCGCTAAGCGGGAGAAGTACGACGCTTGGGTCGCCGATAAGGCGCTCGTTAAGACCCAGAGGTTCGCGGCTACCATCACGGCGATTGAGCCAGCTGGCGTGGAGCCTGTCTACGATACTACTCAGCCAGACGGCAACACAGTCATCTTCAATGGGCTCGTTACGGGGCAG

SEQ ID NO: 2170 - protein, 1368 aa, Phaeosphaeria nodorum SN15
  Intein encoding nucleic acids 112
TGCCTCTCTGCGGATCATGAGGTTCTCACATCTACAGGGTGGAAGGCTCTCCCCGCTATTAAGGATGCGGATCAGGTTATGACGCTGGACCTCCAGACGGGCACACAGCAGTGGAACTCGGTGCAGGCTACCACGAGGTTCGCGCGGGAGGGCTCACTCTACAGGCTGAAGTCCGACGATATGGATGCGGTCTGCAACGAGTCTCACCGCTGGTACCTCAATACTAAGGACCAGCCAACAACTTACACCGCTTTCACCACGCAGCAGATGCTGGATAACCAGCTCGTGGCTCTGCGCAACTCCTCCGGCAAGGCTACGGACCAGTGGAACCACGAGTCCGGGACAACTACCCACACGAACCATAATATCCCTACAGTCGGCCATAACGGGAATGTTATGTTCAGCTGGCCAGACTGCCCATGGCTCCCACGCGAGTTCGTCGCTGATGAGGCGTGCAACCTCGACTGGTGCAGGTTCATCGGCCTCGTGATGGGCGACGGGTCGATTGATCATGTCACGGACGCTCAGGGCCAGGAGCACTACAGCATCCAGATTCATCAGAGGGCTGGGAACCCAGCTTCGAACGCTAATACAGAGGATGTCCTGGAGAGGCTGGCTGCTAAGCTGCCAAATTTCGTGGTCCACCCATCCTGCGTTAGCGGCGCGGAGGAGAAGCATACTTGGACCATCAACCACCGGGACATGTACCATTTCTTCCTCCCCATGATGCGCGGCCCACAGTCCTACGACCCTCTGGATAACGCCATGTGCAGGACCTACCAGGCTCCAGATTACCAGGCCCTCTCGCGGTCTGACAATGAGCCTATCATTCCAGTGCCAGCTGACTGGAAGACCGGCAACTGGTGGCACCTGCGCAGGTGGATCAATTACCCATGGCTCTTCTCGCTGGCCCAGTCTCAGGCGAGGGCTATGATTAAGGGCATGGCTGCCGCGAACGGGGATTGGTCACTCTCCCTGAAGGCTAGGCTGGACACCGGCGATTCTGGGGTTGTGAGGGTTTTCAGCAATTCGATCCCCCTCATGCACGACATGTCAGTGCTGGGCCTCCTGGCCGATACTCGCGTGAACATTGGCGTCGACCATAAGAAGGGGCAGATGCAGCTCCAGGTCCCTGTTACCATGCCGGCGCTCCTGGCTTGGTGCATCTCTTTCTCATTCGCGAACTCCGACCTGGCTGTGGCTGCTCCAAAGCCTGAGGCGTACGATAATCCGAGGCACGACGGCTTCGTTTACTGCCTCACGGTGCCCAACGGGAATTTCCTGGCCCGGCGCACAGTCGAGTACAGCGATAATGATAAGATTCAGGAGGTCATTGATGCTGCTCAGAAGCCTTTCTTCACAGGCAAC

SEQ ID NO: 2171 - protein, 1140 aa, Polaromonas species JS666
  Intein encoding nucleic acids 113
TGCGTTACTGCGGATACATGGGTTATGACTACGGCGGGGCCGGCTCAGGTTTCGGAGCTGACGGGGCGGTCTTTCTCGGCTGTCGTTGACGGCAAGGCCTACGCGGTGACATCCGATGGGTTCTTCAGGACTGGCCACAAGCCAGTCCTCGCTCTGAGGACCAGGGAGGGCCCTGCTCTCCGCCTGACGGCTGACCATAGGGTTCGCAGGGTGGCTAGGAGGACCAGGTACACGCTGGAGGCTGAGTGGACCGAGGCTGGGCAGCTGCAGCCAGGCGACGAGATCCTCCTGCACGATCATAGGGCTCTCGGCGGGTGGGAGGGGGCTGGCACACACGCTGAGGGGTACCTCCTGGGCCTCCTGATCGGGGACGGCACTCTCAAGTCCGATAAGGCTGTCATTAGCGTTTGGGCTCCAGAGCTGAAGGTGGCTGGCGGGGGCGCTGTCGCCTACGCGCAGACCGGCGCCGGGGGCATCGTTCAGGCCGCGGAGGCTGCTGCTGCTACGCTCTCCCACAGGGTCGACTTCCGGGGCTTCCAGAGGTCGATTTCTGGGAGGGGCGAGGCTAGGATGGCTTCTGGCGCCGTGCGGCACCTGGCTCATGAGATGGGGATGAGGCCAGGCCATAAGACAATCACCACGGCCATGGAGAAGGCGTCCAGCGTCTTCACTGAGGGGCTCCTGAGGGGCCTCTTCGACGCTGATGGGAGCGTTCAGGGCTCGCAGGAGAAGGGCGTGAGCCTCAGGCTGTCACAGTCCGATCTCTCGCTCCTGCAGACCGCTCAGAGGATGCTCCTGAGGCTGGGCATCGCCTCCACGATCTACCCGAACAGGCGGCTCGCTCAGGCTAGGCCACTGCCAGACGGCAGGGGGGGCCTGCGCGTCTACGAGACAGCGTCACAGCACGAGCTCGTTATCTCCGCTGATAATCTGAGGATCTACGCCGAGCGGATTGGGTTCGCCGACACGGATAAGGCTGACAGGCTCGATCAGGCTCTGGGCTCTTACAACCGGTCACTCAATCGGGAGCGCTTCACAGTGACTGTCGAGTCGCTGACCGAGGAGGGCTCTGAGGACGTGTTCGATGTTACTGTGGCGGATATTCATGCTTTCGATGCTAACGGGCTCTACGTTCATAAC

SEQ ID NO: 2172 - protein, 1098 aa, Pseudomonas aeruginosa phage phiEL
  Intein encoding nucleic acids 114
GCGGGGGTTCTCTCGTCAAAGATTAAGATTCCTGGGGGCTGGAAGACTATGGGCAATATTCGGGTCGGGGATGAGGTCGTTACGCCAGACGGCGGGACAGCTAAGGTCCTCGCTGTTCACCCACAGGGCGTGACTAAGGTGGTCAGGGTCCATTTCAAGGACGGCCGGTACACAGACGTCTCGCCCGATCACCTCTGGAAGGTTCGCAGGCACCATTGGTGCAACGATAAGGCCATGGCGAAGCTGACTCGCGAGGAGGTGGAGGAGAGGGTGTGGAGGGTCATCACCACGAACGAGCTCAAGGACTACATTGGCCTGAGCACGAAGGTTTACGTGCAGCTCATCGAGCCGGAGAGGAATGCGGATAAGCCATTCAAGATTCACCCTTACGTTCTGGGCGTGCTCCTGGGCGACGGGTGCATCTCCCAGAAGGCTGTCGATATTACCAAGCCATACCAGCAGCTCTTCGACAAGGTGCAGAGCCTCCTGCCTGAGCACCTGGAGTGCGTCTGGAGGCCAAACAGGAAGGGCGACGGGGAGCCCAAGACCTTCGGCATCCGCTTCAAGGATCGGCGCTCCGAGCAGCACATCAATTGGCATATTCGGGACGGCCTGAAGGAGCTCGGCCTGTACGGGATGCGCTCTTGGGGCAAGGTCATCCCCGAGGAGTACCTCCACGGGTCAGCTAAGCAGAGGCTGGAGCTCCTGCAGGGCCTCCTGGACACCGATGGGACGGTTGATAAGCATAAGTCAGTGTCCTTCTCCAGCTCGTCTAAGCTCCTGAGCCTCGGCGTCCAGTACCTCGTTAGGTCGCTGGGCGGGATGGCTAGGCTGCAGGAGCGCACACCACACTACACTCATAATGGCGAGAAGAGGGAGGGGCGGACCGACTACCGGGTCTACATCCGCTACCCGAGGCCCGAGGAGCTCTTCACGCTGGATCACAAGAGGGAGCGGGCGGTGTCCCACCAGCATACAGAGACTCTCCGCCTGCAGGTCACCCATATCGAGGAGAGGCCTGACGAGGAGACGCAGTGCATTACTATTGATCATCCAGATCATCTCTACATTACGGACGACTTCATCGTTACTCACAAC

SEQ ID NO: 2173 - protein, 1347 aa, Pichia stipitis CBS 6054, taxon:322104
  Intein encoding nucleic acids 115
TGCTTCGCTAAGGGGACAAAGGTTCTCATGGCTAACGGGGATGACAAGAATATTGAGGACATCGCGGTCGGGGAGGAGGTTCTCGGGAAGGACGGCCTCCCACGCGAGGTGGTCGCTCTGCCTCGGGGGAGGGAGACAATGTACGAGGTCAGCGAGAAGACTCAGCACAGGGCGGAGACCGTTTTCGGCACGGCCTCGTACACATGCAACGCGACTCACAAGCTCGTGCTGCAGACCAATCAGAGGGTTAACATCACGAATCATGTGCTCCGGGGCGAGTCTCAGACCTCAGTTACGTACTTCCAGATGAAGACCGCTGTGGCTGACGGGAGGGAGATTGAGCTCCCAAAGCTGTGCACGAAGTCCTTCCAGCACTCCAGCCATGGCCGGGAGAACGCTTGGAAGAAGGCCGAGGTCTTCGCGTCCACAATCAGCCGCGACCCCATTGATTGGACTGCGGAGGCTCGCGACATCTCTAGGCTCGGCTACCACGTGCGCAGGGCTACCAGGCAGCTCTGGAGCCCAGTTCTGGTGGAGAAGGAGGTCCTGGCTCCTATGATCGCCAAGCGGGGCTTCGATGAGTCCATTGCGCCGTACATGGCTTACCTCGTGGGGCTGTGGGTCGGCGACGGGTACTCCGATAGGGCCACATTCAGCATCGACATTCAGGATGTGGAGATCCACGAGAGGATTAAGGACTTCGCCTCACATGCTGGCCTGACTCCAAGGATCGCTTGCTACAAGAAGTCCAGGGATGCTACCATTTCACTCCACAACTCCGAGACGCGGGGCAAGAATGTCCGCCAGAACCTGAATACGGGGAACCTCCTGTGGTCGCTCCTGGCTGAGATCTGCGGCAAGAAGGAGAATGAGATGCTCTTCAAGCTGGTGCCAAGCTTCCTCCGCTCAGAGTCCATCGCGGTCCGGGAGTACTTCATTTCTGGCCTGGTCGACTCAGATGGGCACGTTAAGCGCGACGAGGCTGATAAGTGCTACAGCGCCACAGTGAAGACTATCTACCCTGCCGTCCGGGACGGCCTCGTCAGCGTTGCGCGCTCGCTGGGGATTCAGACAAGCGTGTCGGTCGAGGAGGCCAAGGAGGTCAACTCGGTTAAGCATCAGGAGTCTTACGCCATCTACATGGCCAACTCCTCCGCTCTCGACTCGGTGCTGTCTAAGTGCGCTGCTCCAAGGAAGCGGGCTGAGGAGCCCGTTTGCGTGAACAGGGAGCCGCACCCCTACACGTTCCACATGGTCGAGAAGGAGGAGGACGATTTCTACGGCATCACTCTCTCAGAGGACTCGGATCATCAGTTCCTGCTCTCTAATCTCGCTCTCGTTCATAAT

SEQ ID NO: 2174 - protein, 1284 aa, Rhodothermus marinus
  Intein encoding nucleic acids 116
TGCCTCGCGGGGGACACTCTCATTACACTGGCTGACGGGCGGCGGGTTCCTATTCGGGAGCTGGTCTCGCAGCAGAATTTCTCGGTCTGGGCGCTGAACCCGCAGACGTACAGGCTGGAGAGGGCTCGGGTCTCCCGGGCCTTCTGCACAGGCATCAAGCCCGTTTACAGGCTGACCACGAGGCTCGGGAGGAGCATTAGGGCTACTGCTAATCACCGCTTCCTGACCCCACAGGGCTGGAAGAGGGTGGACGAGCTCCAGCCTGGGGATTACCTGGCTCTCCCAAGGAGGATCCCCACGGCCAGCACACCAACTCTGACCGAGGCTGAGCTCGCTCTCCTGGGCCACCTGATCGGCGACGGGTGCACTCTCCCTCACCATGTGATTCAGTACACCTCTAGGGACGCTGATCTGGCTACGCTCGTCGCTCATCTGGCCACAAAGGTCTTCGGCTCAAAGGTTACCCCGCAGATCCGCAAGGAGCTCAGGTGGTACCAGGTGTACCTGAGGGCTGCTAGGCCACTCGCTCCTGGCAAGCGCAACCCGATCAGCGACTGGCTGAGGGATCTCGGCATTTTCGGGCTGCGGTCGTACGAGAAGAAGGTCCCCGCGCTCCTGTTCTGCCAGACGTCCGAGGCCATCGCGACATTCCTGAGGCACCTCTGGGCTACTGACGGCTGCATTCAGATGAGGAGGGGGAAGAAGCCATACCCAGCTGTGTACTACGCGACCTCCAGCTACCAGCTCGCGAGGGATGTCCAGTCGCTCCTGCTCCGCCTGGGCATCAACGCCAGGCTCAAGACCGTTGCTCAGGGCGAGAAGGGGAGGGTGCAGTACCATGTGAAGGTCTCCGGCAGGGAGGACCTGCTCAGGTTCGTGGAGAAGATTGGCGCTGTCGGGGCTAGGCAGAGGGCTGCTCTGGCCTCGGTTTACGACTACCTCTCTGTGCGGACGGGCAACCCAAATCGCGATATCATTCCTGTGGCTCTGTGGTACGAGCTCGTCCGCGAGGCCATGTACCAGAGGGGCATCTCGCACCGGCAGCTGCATGCGAACCTCGGGATGGCTTACGGCGGGATGACACTGTTCCGGCAGAATCTCTCTCGGGCTCGCGCCCTGAGGCTCGCTGAGGCTGCTGCCTGCCCAGAGCTGAGGCAGCTCGCTCAGTCAGACGTCTACTGGGATCCGATCGTTTCCATTGAGCCCGACGGCGTTGAGGAGGTGTTCGATCTCACTGTTCCAGGGCCACATAACTTCGTTGCTAATGACATCATTGCTCATAAT

SEQ ID NO: 2175 - protein, 1116 aa, Roseovarius species 217
  Intein encoding nucleic acids 117
TGCGTTACGGCGGAGACATGGGTTATGACGGATGAGGGGGCTAGGCAGGTCTCGGCTCTGCTGGATCGGCCTTTCAGGGCGGTCGTGAACGGCATCGCCTACGATTCAGGCGAGCACGGGTTCTTCTGCACCGGCCTCAAGCCAGTGAAGAGGCTGTCCACCGCTTGCGGGAGGCACCTCAGGCTGACGGCTGACCATCTGGTCCGGAAGGTGGTCGGCAAGACGAGGTGGAGGCAGGAGGTTGAGTGGGTGCCAGCTGGCGACCTCAGGCCTGGGGATGAGGTGAAGCTGCACGACCATCGCACCGCGATGATTCAGACGAGGCCTGAGGATGAGAGGGGCTACCTCCTGGGGCTCCTGATCGGCGACGGGGTTATTCGCGACGATAAGACACTCATCTCCGTGTGGCCACAGGAGGAGTGCATTGGCGCTCAGCCACTGGGGCACCCCGTCATGCATAAGGTTGAGGCTCTCCTGAGGGACCTCCCACACAGGGCTGATTTCGCTGGCTGGCAGAAGGTCGAGGGCAGGGGGGAGTACAGGATCGGCACAGCTGCTCTCACTGCTCTGGCTGCTGAGTACGGCCTCACACGCGGGAGGAAGACCATCACGCCGGAGATTGAGGGCGCTGAGACTGCTGGCTTCGGGGCTGCTGTCCTCAGGGGCCTGTTCGACGCTGATGGCAGCGTTCAGGGGGCTCAGGAGAAGGGCGTGTCCGTCAGGCTCGCTCAGAGCGACCTGGCTCTCCTGCAGGCTGCTCAGAGGATGCTCGCTAGGCTGGGCATGAACGCTGTGATCTACGAGAATCGCAGGGAGGCGGGCAGGGCTTTCCTGCCAGACGGGAAGGGCGGGCAGGCTCACTTCGAGACCAAGGCGCAGCATGAGCTCGTCATCTCGGGCGAGAACCTGGCGACATACCAGGAGCGGATTGGGTTCACTGATGTGGCTAAGGCTAGGAGGCTCGCTGTCGCTCTGTCGGGCTACAAGAGGGCCCTCAATCGGGAGCGCTTCTCTGCCGTTGTGGCGGACGTCGTTGACGATGGCATGGCGGAGGTGTTCGATGTTCAGGTTCCAGGGGTTAATGCTTTCGATGCTAATGGCTTCTACGTTCACAAC

SEQ ID NO: 2176 - protein, 1044 aa, Salmonella phage SETP3
  Intein encoding nucleic acids 118
TGCCTCAAGCGGGGGACAGAGGTCATTATGTTCGATGGGACAACTAAGAAGGTGGAGGACGTTATCGTGGGGGACGTTCTCATGGGGCCAGACAGCACCCCTAGGAACGTGCTCTCGCTGGGCAGGGGGAGGGAGATGATGTACGAGGTGAAGCCACGGAAGGGCGAGTCCTACACGGTCAATGAGTCACACATCCTCTCCCTGCGCACCACGACAGGCATTGCGAAGGGGTCCTGGCCTGACAACACAGTCTTCGATATCAGCGTTCGGGACTGGCTCAAGCTGCCAAAGTATGTGACTGGCCCTAATGGGTACCTCAAGGGCTGGAGGGTGCCAGTCGATTTCCCAAGGAAGGAGCAGGACGAGGCTCTCCTGCCACCATACCTGATGGGCCTCTGGCTGGGCGACGGGACTTCCAGCTCGGGCGCTATCACCTCGGGGGAGAATGAGAAGGAGATTAGGGCTTACCTGGAGTCTTACGCTGCTAGGAACGGCATGCAGATCAGGAAGGAGGGGCTGACTTGGTCTATTTCACACGGCAACACCGGGCACAAGAAGCATGGCTTCACGCATGCGCTCAAGAGCGCTGGGGTGCTGAACAATAAGCACATCCCGCATAACTACAAGTGCGGCGATAGGAGGCAGAGGCTGGAGCTCCTGGCTGGCCTCCTGGACTCTGATGGGTACTGCGATCTCTCAAAGGCTGGCTTCGACTGGATTTCCGTTAGCGAGAGGCTGGCCGACGATTTCTGCTACCTCTGCCGGTCGCTGGGCTTCGCTGCCTACAAGAAGAAGACCTGCAAGCGCTGCGCGAACACAGACGTCTGGGGCGATTACTTCAGGGTTTCGGTGTCTGGGGACTTCTCCGAGGTGCCATTCGTCAGGGGCAGGCATCAGAATCTCCCCAAGCGCAACATCAATAAGAACGTTCTGAACGTGGGCATCGAGTCCATTACCCCCGTCGGCGTTGACGATTACTTCGGGTTCACAATTGATGGGGATTCAAGGTTCCTCCTCGGGGATTTCACAGTTACTCATAATACC

SEQ ID NO: 2177 - protein, 1014 aa, Streptomyces avermitilis MA-4680
  Intein encoding nucleic acids 119
GCTCAGCCGCTGGATTCGCTCGTTCTCGCGCCTACGGGGTTCCGCCGCATGGGGGATCTCAGGGAGGGGGATGAGGTCGTGGTCCCTAACGGCGAGATCGCGCTGATTGACGGGGTCTTCCCACAGGGCGTCAGGGACGTTTGGCGGATCGTGCTGAGCGATGGCTCCAGCGTCGAGTGCGACGATGAGCACCTCTGGATTGTCGGCACATCGTGCGGGTGGCATAGGGGCCAGACTCCGAAGGTCATGACCACGCGCGAGATCAGGCTCGACACATTCAAGGCCAACGGCTCCTCCAAGTGGTATGTGCCAGCTGCTACCCCAGTCGACCTGGGGCCAGATGTTGGCCTGCCACTCGACCCTTACCTCTTCGGCCTCCTGCTCGGCGATGGGTCCTTCCGCCACAATCTGAGGCTCAGCACCGTCGACGATGAGATCAGGGACGCTGCTGCTGATGCTGTGGCTCCGGACTGCCGGCTGGTGCCCGTCACCGGCTCGCGCTGCGATTACACGATCCAGCTCAAGCAGCGGTCTGGCGGGGTTCGCAACCCAGTGATTCAGGCTCTGAGGAGGCTGGACCTCTGGGGGAAGACCTCCCACGGCAAGTTCATCCCTGAGGATTTCAAGAACACGTCTATTAAGAATAGGCTGTCACTGCTCCAGGGGCTGCTCGACACAGATGGCACTGTTCATGCCGACGGGATGTCAGTGTCCCTCAGGAGCGCTTCGCTGAGGCTCGCTGAGGACGTCGCTTGGCTGGTTCGCTCTCTCGGCGGGAGGGCTCGGGTCCTCCCAGAGAAGGCTGCCTTCCATGTTTCAGTGGCTCTGCCAGACGAGTACGCTCCTTTCCGGCTCTCCCGCAAGGCTGATCGCGTGAGGCCAAGGCCCAAGTACAATACGTTCCGGAGGGGCATCCGCGCTGTGGAGTATGTGGGCAGGAAGCCGGCTCAGTGCATTTCTGTTGGGCATCCTTCACATGCTTACGTTACGGATAATTTCACTGTTACTCATAAT

SEQ ID NO: 2178 - protein, 1497 aa, Saccharomyces exiguus, strain="IFO1128"
  Intein encoding nucleic acids 120
TGCTTCGCTAAGGGGACACAGGTTATGATGGCGGACGGGTCGGACAAGTCGATTGAGGATATTCAGCTCGGGGAGAATGTTATGGGCAAGGACGGCACACCAAGGACTGTGATCTCCCTCCCCCGCGGGAAGGAGACAATGTACGAGGTCTGCCACTCCAGCACCAAGGGCACCACGAAGGACACGCTGATGAACTACGTGTGCAGCGGGAATCATAAGATCGTCATGCAGACACCACAGCAGATCGGCATTACTGAGCACGGCATTGACGGGAAGACCTACACGAGCGTCTCGTACTTCGCTCTCAGGGATTCGCAGCACGGCTACCCTATCGTTAAGAAGCTGACGAAGTCTTTCGAGCATCAGCAGCACGGCGGGAAGGAGCAGACCCTCATCACGGTTAACAATTTCGTGTCGTCTCTGAAGTCGGAGCCGATTAACTGGGACGTGGAGGCCAAGCATTACGAGTCCCTCGGCCACTACGTCAAGAAGTGCAGCTACCAGCTGATCAACCCGGTTTTCCATCAGAGCGGCAAGCTCGCCCAGGAGATTGCGTCGCTGAATTACTCTAAGGACAAGGCTCCCCTCCTGGCCTGGCTCATCGGCTTCTGGGTGGGCAACGGGGCTATGCGCCACTCTCAGTTCGTGGTCGAGTCACAGGACATTGAGCTCGTCAACAGGATCCAGGATATTGCGGGCCTCCTGAATCTGTCCGCGACAACTGCTTGCTACTACTCTGGCTCAAAGGACGATGAGGCCAAGCTCGCGAAGCTGAACTCATCCAGCGCTGAGGGCTTCGAGGACGACCTGGAGGGGAATCCAAGCGTGAAGGAGCTCGCGGACATGGATAGGCTGTCCGAGAGCAAGACAGCGACTCTGCCTACCGCTTTCGGCGTCGAGAACATCGACGAGCTCATCATTTCACTGGGCGAGGGGAGGGGCAACGGGAATGTCTTCGCCCAGGTTATCGGCTCTTTCGGGATTGACCTCGCTGACAAGGATACACTGGTTACTAAGATCGCCCATGAGCTCGCTGGCGACGCCTTCGAGGTGAGGGAGCAGTTCGTGGCTGGCCTGGTCGATGCTGCTGGCTACGTGCGCAAGGACGTGTACGATCACGCGTCAGAGGCTACCATCTCCACGGAGTCGAAGTCTACCGTCCTCGGCCTGGTTAAGATTGCCAGGTCCCTGGGGATCAAGATTACCGTGACGTCAGACGATTCCGACGATAGCGACGAGCACGATCATGCGCACTGCGGCCATGACCACGGGTCGTCTTCATCCTACACAGCCGTCATGACTGGGGATGCGCTCACGAACAGCATGCGGTTCTGCGCGATCGGCCGCAATAGGGTTGCTGCCAAGGAGTTCATGCGCCAGGCTGTGCCCTTCTACTTCAGCCTGGAGAAGAAGTCGGAGGACGATTACTACGGCATCACAGTTCCAGATAATACGGATAAGCAGTACCTGCTCTCTTCTATGGCTCTCGTTCATAAT

SEQ ID NO: 2179 - protein, 1440 aa, Staphylothermus marinus F1
  Intein encoding nucleic acids 121
TCAGTCTCTTACGATACGCCAGTCCTCATCAGGGACCCTATTAACAAGATCCATCTCGTGAAGATCGGGGAGTTCATTGATAAGTTCTACGAGGAGGGCGAGGAGAGGACGGCTAAGCACGTGAATGGGTACTACGTCCTCTCCCATGACGGCTTCCAGGTGGTCTGGAAGCCGATCAAGTATGTGCTGCGGCACCGCACAAACGAGATCTACGAGATCATCTACGAGGGCGGGGGCAAGCTGGAGGCTACCGGCTCGCATTCTGTTTTCGTGCTCGACCCGGATACGCTGGATATCGTCGAGAAGCCCGTTATGCTCCTGAATAAGGGGGAGTACCTGGTTTCTTTCAACGGCGTGAAGGAGAATAAGGACCACCAGACAATCGACCTCATTGATCTGGTTTCGGACTACAACGATGTCTACGTTGATAATATCCCATCTGAGCTCAAGAAGCATACTGGGGGCAGGAACCCAATCCCTCTCAAGCAGTACATGATCCTGAGGAAGCGGGTCATTACAAAGAAGAACAATAGCCTCATCAAGCTGCGCAGGTCGAAGTACACTCTCCCGATTCGGCTCGTGCTGGACGAGAAGCTCGCCTTCCTGTTCGGGGCCTACATCGCTAACGGCTGCGTCAAGGAGAGGAGGGACAAGCTGATCTGCTTCACCTTCGGCAAGTCCGCCAAGAACATCGCGGATAAGGTCATGAATATTATGTACGAGAAGTTCAACATCAAGCCATTCATTGACGATAGGGGGACATACATCATCTACGAGTACCCTCACACTCTCCTGGCGATCATTTTCGAGAAGCTCCTGGGCCGCAAGCTGGAGGAGAAGAAGATGCCAGAGATCCTGTGGTCCAGCCCTAAGAGCGTGATTCGCGCGTTCTTCGAGGGCCTCAGGGCTTACTCCCAGCGCACCCTGAGGAGGAGGTACACGAGCTACACCACGGCTAACAAGAATCTCGCCTACCAGCTCCTGTGGCTGGCTAGGTTCGCTGGCTTCTACTCGGTCCTCAAGGAGGAGAAGGAGGCCGGGAAGAACAATGGCAAGACGTACTACCATGTGATCGTCTACCTGGACCAGTCTTACAGGAAGCCGAACGCGTCAGAGCGGGTTCCGGTGAAGCCCATCCTCAAGCTGATTAAGTACACAAAGCCAAGGACTATGCCACCAGAGCTCGCTTACATCAAGAGGCGGGAGTTCATTTCAAGGAAGACCGCGCTCAAGGCTCTGGAGTGGATCCGCAGGGACGGCTCATTCACGGATTTCTCCCGCGAGTACCTCAGGAAGATCGAGTCCCTGATTAACGGGGACATCATTGTCCTGAAGATCAAGGATGTTCGCAAGAAGCAGTACAAGGGCTACGTGTACGACATTTCAGTTCCAATTACGGAGGCTTTCTTCGGGGGCAACATTCCAATCCTGCTCCACAAC

SEQ ID NO: 2180 - protein, 1050 aa, Staphylothermus marinus F1
  Intein encoding nucleic acids 122
TCATACCATAAGGATTTCAAGATTATGCTCGCTGACGGGCGCAAGGTTCGCATCGGGGATCTCGTGGATGAGCTGATCGGCAAGAATAGGGAGAAGGTTATCAAGGGCAAGGACACAGAGATTCTGTTCGTGGACGATCTCTTCCTCCTGTCGTACAATATGCGGTCTGGGGAGCAGGTTCTGGTGAAGGCTGATCGGGTGAGCCGCCACAAGGCTCCAGACCAGTTCATCAAGCTGCGCTTCTCGAACGGCGCTGAGATCATTGTCACCCCGGAGCATCCCGTTCTCATCATTAACAATGGCAAGATCAAGACCGTTAGGGCGGATACGGTGCGGAAGGGGACCCTGACGATCGGCGTGCTCGGGCACAAGATCATTAAGGAGGTCAACGAGGACGATATCATTAACAATATCCGCAGGAAGATTGTGCTGGACAAGGAGCTCCCGTACATCCACGCTAAGAATATTTCAGAGGCCGTCGAGATGCGGGACCAGCTGATGTCCATCGATATTCCCACCTTCATCGTTAAGCATAAGAACGAGATTCGCCTGTACCCATCCGGCCCTTGCAGCCTCAGGAGGCTCCTGCTCATGCACGGGGTCGAGGAGGTGGTCTTCTCGGACGAGCTGCTCTACGAGATCATGAATTGCCATCTCTACCCGGCCACCTGGTACGAGCTGCTCTACTCCATGGGCCTGACGAAGATCGCCAAGGAGCTCAACGTGTACGACTTCGAGATTCTGGCGGGCATCATTAAGAAGGTGGAGAAGGAGGTCATCATGCTCTCTCAGGTCCTGGGGCTCCGCAACGAGACACAGACTGAGCTGCTCCATCTGAAGTCAAGGCGGGAGCTGCTCATCAGGCTCAAGGACAAGCTGGATATGCTCCGCAAGAGGCTGAAGGACCTGGAGGAGGCCCTCGGCAAGGATGCCGTGATCAGGATGATTACAGACGTCGAGGTTATCAAGAACACTGACTCCGATTGGGTCTACGACATTACTATTGAGCCTTACCACCTCTTCGTTTCGGATGGGCTCATTCTGCATAAC

SEQ ID NO: 2181 - protein, 1032 aa, Salinibacter ruber DSM 13855
  Intein encoding nucleic acids 123
TGCCTCGGGAAGGGGACACCGGTTATGATGTACGATGGGCGGACAAAGCCAGTGGAGAAGGTGGAGGTCGGGGACAGGCTCATGGGGGACGATGGCAGCCCAAGGACGGTGCAGTCGCTGGCCAGGGGGAGGGAGCAGATGTACTGGGTCCGCCAGAAGAGGGGCATGGACTACAGGGTTAACGAGAGCCACATCCTCTCGCTGAAGAAGTCTAGGAGGGAGGGCGCCCGCGACAGGGGGTCAATCGCGGATATTTCCGTCCGCGACTACCTGGATCAGTCTGACAAGTGGAAGGACGATAACAAGGGCTTCAAGGTGGCTGCTGAGTTCCCAGACCAGCCAGTCCCCCTCGATCCTTACTTCCTCGGCCTGTGGCTCGGCGATGGGAAGTCCGACAATGCTAGGATCTACACCACGGACGAGGAGGTCATCACGGGCCTGCAGGAGATTGCCGAGAAGCGGGGGGACACAATTTCAGTGTCCGATGAGCATCGGCGCTGCCCAGCCTACCTCGTCAAGTCTGGCGACAGGGGCGGGGCTATGGCTACCAGGGAGTCAGTTCAGGGCGCTCTGAGGGCTCTCGGCGTGCTGGGGGACAAGCACATCCCTCATCTGTACCTCGGCAACTCCAGGGGGAAGCGGCTCAGGCTCCTGGCTGGCCTGATTGACAGCGATGGCCACCTCAATGACGGGCATGGCGGGACGTACGAGATCACACAGTCCAGCGAGCAGCTGGCGAGGGACATTAAGTTCCTCTGCGATACTCTGGGCTACCGGACATCGCTCACTCAGAAGACCGCTCGCATCTCGTCTACCGGCTACGAGTCCGAGGTTCACAGGGTGCGGTTCAACGGGAATGTTGACGAGATTCCGGTGCGGGTCGAGCGCAAGAAGGCTTCCCCATGGACTGATGTCAGGGACTGGCGGATGACCGGCATCGATGTCGAGCCCGACGGCGTTGGGGATTACTTCGGCTTCACTCTGGATGGCAATGGGCGCTTCCTCCTCGGGGATGGCACTGTTACTCATAAT

SEQ ID NO: 2182 - protein, 1074 aa, Salinibacter ruber DSM 13855
  Intein encoding nucleic acids 124
TGCTTCGATCCTGAGACAGAGGTCGTGACAGTGGACGGCATTAGGCATGTGGAGGAGATTGAGGTCGGGGATAGGGTTTACTCGCTGAACCCAGACACGGGCGCTGTCGAGATCAAGCCCGTTACCGCGACGCAGAGCCAGCATTACGCTGGCCCGATGGTGGAGATTAAGAACCAGCATACCGACTTCCTGGTCACGCCCAATCACCGCTTCCTCACACAGAGGTTCACTTCGGGCGAGTACACAGATCTGGAGTGGGAGACTGCTGGCGACATGCTCGGGGATCGCATCCGCAGGAGGCTCCCATCACTGAGGTCCCTCCCTGCTACACAGGAGAGGCCAGGCCCTATCTCACTGTCCGCTGTGTGCGACAGGCTCGCTATCGAGCACAAGACTGGCCCACGCGGGATTAAGGAGCTGAGGAGGCAGGCTAGGTGGCAGCCTGAGGAGTACGAGCTCACAGATTGGCTGAGGATCCTCGGCTGGTTCGCCACAGAGGGGACTCTGTACAAGTCTAAGGCGAGGCAGTACGAGAACGGCAATGTGCGGGGGGTCTCATACCAGACCACGCTCTGCCAGAAGAACGACATCGGCCGCTCCGAGATTGCGACGCTCCTGAACAGGACCGGGATCACGTACTCCAGCGACCAGAATGATCATAGCTTCTGCTCGAAGGTTCTGTACGAGATTCTGGAGGCTGAGTGCGGCAGCGACTCGTTCTCTAAGCACCTGCCACCATGGATCTTCCAGCTGGGGCCAAAGGACCTCAAGATTGTCTTCGATACCCTCATGCAGGGCGACTCCGCTGCTAACGGGGATCGGTTCACAACTTCGTCTAATCAGCTGGCCGAGGACTTCATCAGGCTCGCTATGCACATTGGCAGGAGGGCTTTCCACATGCCGAACGATGGGTCTCACAGGATCCAGGTTAATACCGTGAGGGGCCAGCGGCCGACGATTAAGCCCAAGCATCGGCAGCAGGTCGACTACGATGGCATGATCCACTGCCTGACCGTGGCGGATAATCATACTGTGCTCGCTGGCAGGAATAGGAAGTTCAATTGGACTGGGCAG

SEQ ID NO: 2183 - protein, 1287 aa, Synechocystis species, strain PCC6803
  Intein encoding nucleic acids 125
TGCATTTCGGGGGATAGCCTCATTAGCCTCGCCTCAACGGGCAAGCGGGTTTCAATCAAGGATCTGCTGGATGAGAAGGATTTCGAGATCTGGGCGATTAACGAGCAGACCATGAAGCTGGAGTCTGCTAAGGTTTCACGCGTGTTCTGCACCGGCAAGAAGCTGGTGTACATCCTCAAGACGCGGCTGGGGCGCACCATTAAGGCTACGGCCAACCACAGGTTCCTCACGATCGACGGCTGGAAGCGGCTGGATGAGCTGTCACTCAAGGAGCATATCGCCCTCCCAAGGAAGCTGGAGTCCAGCTCGCTGCAGCTCATGTCCGACGAGGAGCTCGGCCTCCTGGGGCACCTGATCGGCGATGGGTGCACCCTGCCTAGGCATGCCATCCAGTACACGAGCAACAAGATTGAGCTCGCGGAGAAGGTGGTCGAGCTGGCGAAGGCTGTCTTCGGCGACCAGATCAATCCGAGGATTTCCCAGGAGCGGCAGTGGTACCAGGTTTACATCCCGGCGAGCTACCGGCTCACACACAACAAGAAGAATCCCATCACTAAGTGGCTGGAGAACCTCGACGTCTTCGGCCTGCGCAGCTACGAGAAGTTCGTGCCGAATCAGGTCTTCGAGCAGCCACAGAGGGCTATCGCGATTTTCCTGCGCCATCTCTGGTCGACAGACGGGTGCGTTAAGCTCATCGTGGAGAAGTCTTCACGCCCCGTTGCTTACTACGCCACTTCCAGCGAGAAGCTGGCTAAGGACGTGCAGTCCCTCCTGCTCAAGCTCGGCATCAACGCGCGCCTGTCAAAGATTTCCCAGAACGGCAAGGGGAGGGATAATTACCACGTGACAATCACTGGCCAGGCCGACCTCCAGATCTTCGTCGATCAGATTGGGGCTGTTGACAAGGATAAGCAGGCCTCCGTCGAGGAGATCAAGACACACATTGCGCAGCATCAGGCTAACACTAATAGGGACGTGATCCCAAAGCAGATTTGGAAGACATACGTCCTGCCTCAGATCCAGATTAAGGGCATCACCACGCGCGATCTCCAGATGAGGCTGGGCAACGCTTACTGCGGGACGGCTCTCTACAAGCACAATCTGTCGCGCGAGAGGGCTGCTAAGATCGCTACCATTACGCAGTCTCCGGAGATCGAGAAGCTCTCGCAGTCTGACATCTACTGGGATAGCATCGTGTCGATTACAGAGACTGGCGTCGAGGAGGTTTTCGATCTCACTGTTCCAGGGCCACATAACTTCGTTGCTAATGACATCATCGTGCATAAT

SEQ ID NO: 2184 - protein, 1305 aa, Synechocystis species, strain PCC6803
  Intein encoding nucleic acids 126
TGCTTCTCGGGGGATACTCTCGTCGCGCTGACAGACGGGCGGTCGGTTTCTTTCGAGCAGCTCGTGGAGGAGGAGAAGCAGGGCAAGCAGAATTTCTGCTACACAATCCGGCACGACGGCTCGATTGGGGTGGAGAAGATCATTAATGCTCGCAAGACAAAGACTAACGCCAAGGTTATCAAGGTGACACTCGACAACGGCGAGTCTATCATTTGCACTCCCGACCACAAGTTCATGCTGAGGGATGGGAGCTACAAGTGCGCCATGGATCTCACGCTGGACGATTCGCTCATGCCTCTGCATCGCAAGATCTCGACCACGGAGGACTCTGGCATCACCATTGATGGGTACGAGATGGTGTGGTCCCCGAGGTCCGACAGCTGGCTCTTCACGCACCTGGTCGCCGATTGGTACAACCGGTGGCAGGGCATCTACATTGCGGAGGAGAAGCAGCATTGCCACCATAAGGACTTCAATAAGCGCAACAATAACCCGGATAACCTCATCAGGCTGTCTCCCGAGAAGCACCTCGCCCTGCACCGGAAGCATATTTCAAAGACACTCCACCGCCCAGACGTGGTCGAGAAGTGCCGCAGGATCCATCAGTCCCCTGAGTTCCGGCGCAAGATGTCAGCGAGGATGCAGTCCCCGGAGACTCGGGCTATCCTCAGCAAGCAGGCTCAGGCCCAGTGGCAGAATGAGACCTACAAGCTGACGATGATGGAGTCGTGGAGGTCTTTCTACGACAGCAACGAGGATTACAGGCAGCAGAATGCTGAGCAGCTCAACAGGGCTCAGCAGGAGTACTGGGCTCAGGCTGAGAACAGGACCGCTCAGGCTGAGCGCGTTAGGCAGCATTTCGCTCAGAATCCGGGCCTGCGCCAGCAGTACTCGGAGAACGCGGTGAAGCAGTGGAATAACCCCGAGCTCCTGAAGTGGCGGCAGAAGAAGACAAAGGAGCAGTGGACTCCAGAGTTCCGCGAGAAGAGGAGGGAGGCTCTCGCTCAGACCTACTACAGGAAGACGCTCGCCGCGCTGAAGCAGGTCGAGATCGAGAACGGGTACCTGGACATTTCAGCCTACGATTCCTACCGCATCAGCACCAAGGACAAGTCCCTCCTGCGGTTCGATCGCTTCTGCGAGAGGTACTTCGAGAATGACGAGAACCTCGCGCGCGAGGCTGTCCTGAATTACAACCACAGGATCGTCAACATTGAGGCGGTTTCCGAGACGATCGACGTTTACGACATTGAGGTTCCACATACGCATAACTTCGCTCTCGCTTCAGGGGTTTTCGTTCATAAT

SEQ ID NO: 2185 - protein, 1260 aa, Staphylococcus phage Twort
  Intein encoding nucleic acids 127
TGCATTTCTATGGACTCTATGATTCTGACAACTGAGGGCTACAAGTCGCTGCAGGAGATTTTCGAGACACAGGGGGTTAAGGTGGACAACAAGGAGAAGGTTATCGAGCTGAAGTACCCGCTCATTAATCGGTACGGCGACGTGGAGTACACCTCCCACTTCACGAAGAACGGGGAGAAGCCAACAAAGCGCATCAAGACTAATAAGGGCATTGAGCTGGTTAACACATACAATCATCCTCTCCTGGTGAGGGAGGGGTTCAACCTGATCTGGAAGAAGAGCGAGGACATCGAAGTGGGCGATATTCTCGTGTCCCGCGTGGGCGACCACCAGTTCGGGAACAATAACACTGTGGAGAACGAGGAGGAGGCTTACGCTCTGGGCTGCATGGTCGCGGATTCTTACCTGGGGTCATACTCCCGGCTCAGCTTCTCGAACGACAAGAAGGAGATCCTCGATAAGGTCTCAAAGTTCTGGAACACCTTCTCCAATAAGGAGGTTTACTACGACACCTACAAGGAGTCCAAGGGGATCACGATTCACCTGCATGACACAAACAAGACTAAGGAGTTCCATGATAAGTACAAGATCGAGTACGGCGTCGCTAAGGACAAGAAGATCCCGAAGTGCATTATGGAGAGCCCCGAGAACATCCAGCTGGCCTTCGTCTCGGGCTACCTGGAGTGCGAGTCCAGCATCTCTGAGAAGAACCTGGAGGTTACCTCTGCTTCAAAGGACCTCCTGAAGGATCTCCAGCTGATCCTCTCGAACATCGGCATTGTGTCTACGAATAAGGAGAAGGTGGTCAAGAAGTACAAGCACAACAAGTACTACCGGCTGATCGTCAATCGCAAGGAGCTCATTAAGCTCCTGCCGCTCCTGAGGTTCGAGACGCAGCAGCGGAAGAACCAGAAGGAGAATTTCCTCAGCAATAACACAAAGATCAAGTCGTCTTACGGCAACACTATTGAGGGGTCACGCTACCTCCTGAAGAAGTACAGGGACTCCCTGAATATCGATAAGAAGGAGTTCTCCAAGTACCTCAGCCGGGACACCATCACGATTGATCGCCTGAGGGAGGTCATCTCGCTCTACCCGGACGGCGATAAGGAGATTCGCGAGCTGTTCGAGAACGTTGTGAATAACAATATCTACTACCAGAAGGTGGAGCAGGTCCTGGAGGGCGAGATCATTCCCACCTTCGACGTTTGCATGCCTAAGACTCATTCCTTCATCGCCAACACAATCGTCAACCACAAC

SEQ ID NO: 2186 - protein, 1080 aa, Thermococcus aggregans
  Intein encoding nucleic acids 128
TGCCATCCTGCGGACACTAAGGTCATCGTGAAGGGCAAGGGCATCGTTAATATCTCGGACGTGAAGGAGGGGGACTACATTCTCGGCATCGACGGCTGGCAGCGGGTCAAGAAGGTTTGGAAGTACCACTACGAGGGCAAGCTCATCAACATTAATGGGCTGAAGTGCACGCCGAACCATAAGGTTCCCGTGGTCACAGAGAATGACAGGCAGACTCGCATCAGGGATTCCCTCGCCAAGAGCTTCCTGTCGGGCAAGGTCAAGGGGAAGATCATTACCACGAAGCTCTTCGAGAAGATCGCGGAGTTCGAGAAGAACAAGCCGTCGGAGGAGGAGATCCTCAAGGGCGAGCTGTCTGGGATCATTCTGGCCGAGGGCACCCTCCTGAGGAAGGACATCGAGTACTTCGATTCCAGCCGGGGGAAGAAGCGCATTAGCCACCAGTACCGGGTGGAGATCACGATTGGCGAGAACGAGAAGGAGCTCCTGGAGCGGATCCTCTACATTTTCGACAAGCTGTTCGGCATCCGCCCATCGGTGAAGAAGAAGGGGGATACCAACGCGCTCAAGATCACAACTGCTAAGAAGGCCGTCTACCTGCAGATCGAGGAGCTCCTGAAGAATATTGAGTCACTCTACGCCCCTGCGGTTCTGCGCGGCTTCTTCGAGAGGGACGCTACCGTGAACAAGATCCGCTCTACGATTGTTGTGACCCAGGGCACGAACAATAAGTGGAAGATCGACATTGTCGCGAAGCTCCTGGATTCCCTCGGCATCCCATACAGCCGCTACGAGTACAAGTACATTGAGAATGGGAAGGAGCTCACAAAGCATATCCTGGAGATTACTGGCAGGGATGGGCTCATCCTGTTCCAGACACTCGTCGGCTTCATTTCGTCTGAGAAGAACGAGGCGCTGGAGAAGGCTATCGAGGTTAGGGAGATGAACCGGCTCAAGAACAATTCTTTCTACAATCTGTCAACCTTCGAGGTGTCATCCGAGTACTACAAGGGCGAGGTCTACGATCTCACTCTGGAGGGCAATCCTTACTACTTCGCCAATGGCATCCTCACACATAAT

SEQ ID NO: 2187 - protein, 1614 aa, Thermococcus aggregans
  Intein encoding nucleic acids 129
TCTATCCTGCCTAACGAGTGGCTGCCCATCATCGAGAACGGGGAGGTGAAGTTCGTGAAGATCGGGGAGTTCATTGATCGCTACATGGAGGAGCAGAAGGACAAGGTGCGCACAGTCGATAACACTGAGGTTCTGGAGGTGGACAATATCTTCGCCTTCTCCCTGAACAAGGAGTCTAAGAAGTCAGAGATCAAGAAGGTGAAGGCCCTCATTCGCCACAAGTACAAGGGCGAGGCGTACGAGGTCGAGCTCAACTCCGGCCGCAAGATCCACATTACAAGGGGGCATTCTCTCTTCACTATCAGGAACGGCAAGATCAAGGAGATTTGGGGCGAGGAGGTTAAGGTCGGGGACCTCATCATTGTTCCGAAGAAGGTGAAGCTGAATGAGAAGGAGGCTGTGATCAACATTCCAGAGCTGATCTCTAAGCTCCCTGACGAGGATACAGCCGACGTGGTCATGACCACGCCCGTCAAGGGCAGGAAGAATTTCTTCAAGGGGATGCTCCGGACCCTGAAGTGGATCTTCGGCGAGGAGTCAAAGCGGATTCGCACGTTCAACAGGTACCTCTTCCATCTGGAGGAGCTCGGCTTCGTGAAGCTCCTGCCGAGGGGCTACGAGGTCACCGACTGGGAGGGCCTGAAGAGGTACCGGCAGCTGTACGAGAAGCTCGTGAAGAATCTGCGCTACAACGGCAATAAGCGGGAGTACCTGGTTCGCTTCAACGACATCAAGGATTCAGTGTCCTGCTTCCCCCGCAAGGAGCTGGAGGAGTGGAAGATCGGCACANGGAAGGGGTTCCGCNGGAAGTGCATTCTCAAGGTTGACGAGGATTTCGGCAAGTTCCTGGGGTACTACGTCTCGGAGGGCTACGCTGGGGCTCAGAAGAACAAGACTGGCGGGATGAGCTACTCGGTCAAGCTCTACAACGAGAATCCAAACGTTCTGAAGGACATGAAGAATATCGCGGAGAAGTTCTTCGGCAAGGTCCGGGTTGGGAAGAACTGCGTGGATATTCCTAAGAAGATGGCTTACCTCCTGGCTAAGAGCCTGTGCGGCGTCACCGCTGAGAACAAGAGGATCCCGTCGATCATTTTCGACTCCAGCGAGCCCGTGAGGTGGGCGTTCCTCAGGGCTTACTTCGTCGGCGACGGGGATATTCACCCATCCAAGCGCCTCAGGCTGTCCACGAAGAGCGAGCTCCTGGCCAATCAGCTCGTCTTCCTCCTGAACTCACTGGGCGTTTCGTCTATCAAGATTGGCTTCGACTCCGGGGTCTACCGGGTTTACATCAACGAGGATCTGCCTTTCCTCCAGACCTCCCGCCAGAAGAATACGTACTACCCGAACCTCATCCCCAAGGAGGTGCTGGAGGAGATTTTCGGCCGCAAGTTCCAGAAGAACATCACGTTCGAGAAGTTCAAGGAGCTCGCGGACAGCGGGAAGCTGGATAAGAGGAAGGTGAAGCTCCTGGACTTCCTCCTGAATGGCGACATCGTCCTCGATCGGGTGAAGAACGTCGAGAAGCGCGAGTACGAGGGCTACGTGTACGATCTCTCAGTGGAGGATAATGAGAATTTCCTCGTGGGCTTCGGCCTGCTCTACGCTCATAAT

SEQ ID NO: 2188 - protein, 5958 aa, Trichodesmium erythraeum IMS101
  Intein encoding nucleic acids 130
TGCGCGGCCTACGATACTCTCGTGCTGCAGAAGGACGGGTCGCTGGTTACGCTGGCGGAGGTTTACAAGCGGCAGGAGATTGAGCTGCTCACACTGGGCAAGAACAGCAAGTTCTACCTCACTAAGCCATCGGCCTTCATTGACGATGGCATCAAGCCTATTTTCCGCGTCACCACGAAGCTCGGGAGGTTCGTGGAGACAACTATCACCCACCCGTTCCTGACCGTGAACGGCTGGAAGCCCCTCAGCAAGCTGCAGGTCGGGGAGAAGATTGCCGTGCCCCGCAGGCTCAACATTTTCGGGAATGAGACCATCTCGGAGTCTAAGTTCTCCAGCCTGATCAACTTCGACAATCTCTACCTGTTCCCGCTCGTGTTCCAGCTGGAGCGGTCGCAGCTCGCGCTGTTCATTCGCTACCTCTTCAGCCTGGATGGCTGGGTGAAGATCTACCAGAACAAGATCGTCTGCTTCGGGTACTCAACCGTGTCCGAGAAGCTGATCAGGCAGATTCAGCACATCCTCCTGCGGTTCGGCATTGTCTCCGGGATCGAGAAGTTCGAGGAGAAGCGGACGGAGAAGATCAAGGTGGTCAAGGAGGTGAAGAGCCAGCGGTCGCACCGCGAGGAGTTCACATTCGCTACTTACCGCAACTGCTACTGCGACGGCAAGTGGCACCTCACCATTACGGATGCCCTCTCCCAGAAGAACCTGATGGAGGACATCGGCGGGTTCGATAGCAAGAACTTCTACCTGTTCGACCTCCTGCAGCCGCACAACAGCGGCAATCAGGAGCTGGAGAACCATCTGATCTTCTGGGATGAGCTCGTTAATGTGCTGGCGAAGTTCGCCGCGTCTAAGAACCAGTCACTCAAGAATCGCACCGCTAAGGGGAAGTCCCCCAAGAACAGCGAGAATCTGACCACGACAGAGACGATTTGCAGGAAGAACATCCTCGCCAACATGGAGAATCTGCCGAGCGACAACCAGAATTTCGATTCGGAGAAGCTCGACCTGTCTCAGCCCCACAACTCAGGGAACCAGGAGCTGGAGAATCATCTGATCTTCTGGGACGAGCTCGTCAATGTTCTGGCCAAGTTCGCGACCTCGAAGAACCAGTCTCTCAAGAATAGGACTACCAAGCGGAACTCACCGAAGAACTCCGAGAATCTGACGACAACTGAGACCATCTGCAGGAAGAACATTCTGGCGAACATGGAGAATCTGCCCTCTGATAACCAGAATTTCGACTCAGAGAAGCTCGATCTGCCGCAGCCCCACAACTCCGGGAATCAAGAACTGGAGAATCATCTGATCTTCTGGGACGAACTCGTGAATGTCCTGGCTAAGTTCGCTGCCAGCAAGAACCAGTCGCTCAAGAATCGCACCACGAAGAGGAACTCTCCAAAGAACTCAGAGAATCTGACAACTACCGAGACCATTTGCCGGAAGAACATTCTGGCTAATATGGAGAATCTGCCTTCTGACAATCAGAATTTCGATAGCGAGAAGCTCGACCTGCCACAGCCTCATAATTCCGGGAATCAAGAGCTGGAGAATCATCTGATCTTCTGGGACGAATTAGTTAACGTGCTGGCTAAGTTCGCCACATCCAAGAACCAGAGCCTCAAGAACCGGACGACAAAGCGCAACTCGCCGAAGAACTCTGAGAATCTGACTACCACGGAGACTATTTGCCGCAAGAACATTCTGGCTAACATGGAGAATCTGCCATCGGACAATCAGAATTTCGACTCTGAGAAGCTCGATCTGTCCCAGCCTCACAACAGCGGCACTCAGGAACTGGAGAACCATCTGATCTTCTGGGACGAACTAGTCAACGTCCTCGCCAAGTTCGCGGCTTCAAAGAACCAGTCCCTCAAGAATCGGACAGCGAAGGGGAAGAGCCCGAAGAACTCGGAGAATCTGACCACCACCGAGACCATCTGCCGCAAGAACATCCTCGCGAACATGGAAAATCTGCCGTCAGATAATCAGAATTTCGATTCCGAGAAGCTCGACCTGTCGCAGCCCCACAACTCTGGGAATCAGGAACTGGAGAATCATCTGATCTTCTGGGACGAACTGGTGAACGTCCTGGCGAAGTTCGCTACCTCTAAGAACCAGTCCCTGAAGAATAGGACGACAAAGCGGAACTCCCCGAAGAACAGCGAAAATCTGACCACTACGGAGACCATTTGCAGGAAGAACATTCTCGCGAATATGGAGAATCTGCCCAGCGATAATCAGAACTTCGACTCGGAGAAGCTGGATCTGCCTCAGCCCCACAACTCTGGCAACCAAGAACTGGAGAACCATCTGATCTTCTGGGACGAACTTGTTAACGTGCTGGCCAAGTTCGCGACATCGAAGAACCAATCCCTGAAAAATCGCACAACTAAGAGGAACTCACCAAAGAACTCCGAAAATCTGACTACCACAGAGACTATTTGCCGGAAGAACATCCTGGCCAATATGGAGAATCTGCCGTCTGACAACCAGAACTTCGACTCCGAGAAGCTGGACCTGCCACAGCCTCACAACAGCGGGAATCAGGAGCTGGAGAATCATCTGATCTTCTGGGACGAACTAGTAAACGTTCTGGCTAAGTTCGCCACTAGCAAGAACCAATCCCTCAAGAATCGGACTACCAAGCGCAACTCTCCGAAGAACTCAGAAAATCTGACCACCACTGAGACTATCTGCAGGAAGAACATCCTGGCGAATATGGAAAATCTGCCCTCCGATAATCAGAATTTCGACTCCGAGAAGCTCGATCTGCCTCAGCCGCATAACTCTGGGAATCAGGAGCTGGAGAACCATCTGATCTTCTGGGACGAACTAGTGAATGTGCTCGCCAAGTTCGCTACCTCCAAGAACCAATCCTTAAAGAATAGGACCACGAAGCGGAACTCGCCAAAGAACTCTGAAAATCTGACCACAACCGAGACCATTTGCCGCAAGAACATCCTGGCCAACATGGAAAATCTGCCTTCGGATAATCAGAACTTCGATTCCGAAAAACTGGACCTGCCGCAGCCGCATAATTCCGGGAATCAGGAGCTGGAGAACCATCTGATCTTCTGGGACGAACTAGTTAATGTCCTGGCCAAGTTCGCGACGTCAAAGAACCAGAGCCTGAAGAATCGCACGACAAAGAGGAACAGCCCTAAGAACTCGGAAAATCTGACCACAACGGAGACAATCTGTAGGAAGAACATTCTGGCAAATATGGAGAATCTGCCATCAGACAATCAGAACTTCGACAGCGAGAAGCTCGATCTGTCACAGCCTCACAACTCCGGCACACAAGAACTGGAGAACCATCTGATCTTCTGGGACGAACTAGTAAATGTTCTCGCCAAGTTCGCGGCCTCTAAGAACCAAAGCCTGAAAAATCGGACAACTAAGCGCAACTCCCCTAAGAACAGCGAAAATCTGACAACGACAGAGACAATCTGCCGCAAGAACATTCTCGCAAACATGGAAAATCTGCCATCTGATAATCAGAACTTCGATAGCGAAAAACTGGACCTGCCACAGCCACACAACTCCGGCACGCAAGAACTGGAGAATCATCTGATCTTCTGGGACGAACTAGTAAACGTACTGGCCAAGTTCGCTGCGTCGAAGAACCAGTCCTTAAAAAACCGCACCACTAAGCGGAACTCACCTAAGAACTCCGAAAATCTGACCACGACTGAGACTATATGTAGGAAGAACATCTTAGCCAACATGGAAAATCTGCCCAGCGACAATCAAAACTTTGACTCCGAGAAGCTGGATCTGCCGCAGCCGCATAACTCCGGGAATCAGGAGCTGGAGAACCATCTGATCTTCTGGGACGAACTAGTAAACGTCCTGGCTAAGTTCGCCGCTAGCAAGAACCAGTCCCTGAAAAACAGGACTACCAAGAGGAACTCTCCTAAGAACTCAGAAAATCTGACTACCACTGAAACTATCTGTCGCAAGAACATCCTGGCTAATATGGAAAATCTGCCGTCGGATAACCAGAACTTCGATTCCGAGAAACTGGACCTGCCTCAGCCGCACAATTCTGGCAACCAAGAGCTGGAGAACCATCTGATCTTCTGGGACGAACTAGTAAACGTGCTCGCCAAGTTCGCCACCTCCAAGAACCAGTCCCTGAAAAATAGGACCACAAAGCGCAACTCGCCTAAGAACTCTGAAAATCTGACAACCACGGAGACAATCTGCAGGAAGAACATACTCGCGAACATGGAGAATCTGCCTTCGGACAACCAGAACTTCGATTCAGAGAAGCTGGATCTGCCCCAGCCGCATAATTCCGGCAACCAGGAACTGGAGAATCATCTGATCTTCTGGGACGAACTAGTAAACGTATTAGCGAAGTTCGCTACCTCAAAGAACCAAAGCCTCAAAAATAGGACGGCCAAGGGGAAGAGCCCTAAGAACTCGGAGAATCTGACTACCACTGAGACTATATGTCGGAAGAACATCCTCGCAAACATGGAGAATCTGCCCAGCGATAACCAGAATTTCGATTCTGAGAAGCTGGACCTGCCGCAGCCTCATAATTCTGGTAACCAAGAGCTGGAGAATCATCTGATCTTCTGGGACGAACTAGTAAACGTACTAGCCAAGTTCGCGACCTCTAAGAACCAGAGCCTGAAAAACCGCACCACCAAGCGGAACTCCCCAAAGAACAGCGAAAATCTGACTACTACCGAGACGATATGTCGCAAGAACATTCTCGCTAATATGGAAAATCTGCCATCGGACAACCAAAACTTCGACTCCGAAAAACTCGATCTGCCGCAGCCGCACAATTCCGGTAACCAGGAGCTGGAGAACCATCTGATCTTCTGGGACGAACTAGTAAACGTACTCGCTAAGTTCGCCACTTCGAAGAACCAGTCCCTTAAAAACAGGACCACCAAGAGGAACTCACCCAAGAACTCCGAAAATCTGACGACCACCGAAACCATCTGTAGGAAGAACATACTGGCTAATATGGAAAATCTGCCTTCTGACAACCAGAATTTCGACAGTGAAAAACTGGACCTGCCCCAGCCGCATAACTCTGGTAACCAAGAGCTGGAGAATCATCTGATCTTCTGGGACGAACTAGTAAACGTACTTGCGAAGTTCGCTACAAGCAAGAACCAGTCCCTCAAAAATCGCACTGCCAAGGGGAAGTCTCCGAAGAACTCAGAGAATCTGACCACGACCGAGACTATTTGTAGGAAGAACATCCTGGCCAACATGGAGAATCTGCCCAGTGACAATCAAAACTTTGATAGCGAAAAACTGGATCTGCCGCAGCCACACAACTCCGGGAATCAGGAGCTGGAGAACCACCTGATCTTCTGGGATGAACTGGTTAACGTTCTCGCGAAGTTCGCCACTTCCAAGAACCAGTCCCTCAAAAACAGGACCACTAAGCGCAACTCGCCAAAGAACTCTGAGAATCTGACGACCACAGAGACGATATGCCGCAAGAACATTTTAGCGAATATGGAAAATCTGCCCAGCGACAATCAGAACTTTGACTCCGAAAAGCTGGACCTGCCTCAGCCTCATAATTCTGGAAACCAAGAACTGGAGAACCACCTGATCTTCTGGGACGAACTAGTAAACGTACTAGCAAAGTTCGCCACCTCAAAGAACCAGAGCCTGAAAAATCGCACCACAAAGCGGAACAGCCCAAAGAACTCGGAAAATCTGACTACTACTGAGACGATTTGTCGCAAGAACATTTTGGCGAATATGGAGAATCTGCCAAGCGATAATCAAAACTTCGATTCTGAAAAACTCGATCTGCCTCAGCCACATAATTCCGGCACCCAGGAGCTGGAGAACTCCGACATCTTCTGGGATAAGATTGTGTCCATCGAGCCGGTCGGGGAGAAGCAGGTGTACGATCTCACTGTTCCAGAGACTCATAACTTCGTTGCTAATGATATTTGCCTCCATAAT

SEQ ID NO: 2189 - protein, 1284 aa, Trichodesmium erythraeum IMS101
  Intein encoding nucleic acids 131
TGCCTCTCGGGGTCTACAAAGGTCATTGACGCTGCTACGGGGAATCTCTTCTCGCTCAAGGAGATCGCCGCTCAGCCTGAGTACTGGCTCTCGCGCAAGGTCTTCTCTCTCGACCTGAAGTCACAGCAGGTGGTCCAGCAGCCAATCACCGAGATTCACCCTAATGGCGTGAGGGATGTCTGGCAGATCACCACGAGGACCAACAGGAAGGTGTGCGCTACGGACGATCATCTCTTCTACACAGTCCTGGGCTGGAAGCCGCTCAAGGACTTCAGCGTTGGCGATCGCCTCGGGCTGCCGAATAAGATCCCCATTAACTACAGGTCCCAGATCTCCGACAGCAAGGTGAAGTTCACGGCGTACCTCATTGGCGAGGGGTACCTGTACACAAATTCGTTCTCTTGCTCATACTTCTGCAACTCCGACGGGGAGCTCATCGCGGATTTCTACGGCTGCGCTGAGGAGCTGTTCGGGTCCAGCGCTCCAATCGAGAAGCAGCTCCACCTGGGCAATAAGTCCGTGATCTACGTGCGGATCGGCCTCATTTCCGGGCTGAAGAACTGGGTCGACTCCTACCTCCAGTGCGCGAATAGCCGCGTGCAGGAGATCCCCAACTGGATTTTCTCCCTCAGCCAGTCGCAGCTCCAGCTGTTCCTCGGCATCCTGTGGTCTACGTCAGGGATCTTCGACGAGACAATTGGCTACACTTACTACTCGTCTAACAGCGAGGTCCTGGTTAGGCAGGTCCAGCATCTGTTCCTCCGGCTGGGCATCGTTTCCCTCTTCAACGTCAATAAGGTTAAGGGCCAGGGGGAGCTGGACGTGTCCTACGTTGTGGAGGTCCGCGGGAGGGAGGATATGCTGAAGTTCTACAAGCTCATCAAGCCGTACCTGTCATCCTACAAGCAGGGCCTCTGCGAGAGCTGCTACCTGGTCATTAAGTACCAGCAGTCGTACCAGTTCAAGTACTTCCTCACTCCCGACTTCTTCGATCTGATCGTGAAGGCTAAGAAGGCCAGCTCGATGACCAGGGCTCTCGGCGTTTGCGGCGGGGAGATCTCTTCAGTGTGGAACTTCCAGAATACATCTAACCGGTCCCTGAGCTTCGACAAGTTCAACAATTTCTCGACTGTCCTCGCGGATGAGGAGCTGACCGCCATCGCGAACTCGGACGTGTTCTGGGATGAGATCATTTCTATCGAGTACATTGGCAAGGAGGAGGTGTTCGATCTCACTATTCCAGAGACTCATAACTTCATTGCTAATGACTTCATCGTGCATAAT

SEQ ID NO: 2190 - protein, 411 aa, Trichodesmium erythraeum IMS101
  Intein encoding nucleic acids 132
TGCCTGACTTACGAGACAGAGATTATGACAGTGGAGTACGGGCCGCTGCCTATCGGGAAGATCGTGGAGTACCGCATTGAGTGCACGGTGTACACAGTCGACAAGAACGGCTACATCTACACTCAGCCGATTGCCCAGTGGCACAATCGCGGCATGCAGGAGGTCTACGAGTACTCCCTGGAGGATGGGACCGTTATCAGGGCGACGCCGGAGCATAAGTTCATGACCGAGGACGGCCAGATGCTGCCCATCGATGAGATTTTCGAGCGGAACCTCGACCTGAAGTGCCTCGGGACCCTGGAGATGGTTAAGATTGTGAGCCGCAAGCTCGCTAAGACGGAGAATGTGTACGATATTGGGGTTACAAAGGATCACAACTTCGTGCTCGCTAATGGGCTCATTGCTTCCAAC

SEQ ID NO: 2191 - protein, 1290 aa, Trichodesmium erythraeum IMS101
  Intein encoding nucleic acids 133
TCGCTGACGGGGGATCAGAAGGTCCTCTACTACATCGCTAAGAAGCTCTACTACGAGACATTCGCTGAGTGCTACGACCGCATTAACGGCGACATCTCCAGCGTTAGCGTGCCATGCTTCGATGAGAACTACCAGACAGTGATTAAGCCTATCTCGGCCATTTGGAAGCACCATGTGAAGAAGAAGGGCTTCAAGATTAAGATCACTTGGGGGAAGCAGATTAAGATCACAGAGGACCACAGCCTGTTCACTAGGAACGAGAACAATAAGCCGCAGGCGGTTTTCGGCAATGAGATCAAGGTCGGCGATGAGATTGGGATCCCCTCCTACATCTCCTTCCTGGAGCAGCCGCTGGAGCCCTTCCATATTACCGACAAGATTCTCATCCAGGAGGAGATCTACGTGGAGTCAGAGGACACGATCTCCTACATTGAGAAGTACGGCGATAAGATGCGGGAGTACCTCCTGGCGAAGTCGCTGTCTCCGTCACAGTTCTACTCCATTCTCAAGACATACGAGGCTAAGAACCAGATCCCGTGGCACCTGTGGAAGTACCTGGAGCTGCCCCTCTCCGAGAAGGACAAGGTCTGCTACCTCAGCAAGAAGGCCATTAAGAACTGGATCGATAATGTCGAGGAGCTCCTGTGGTTCCTGGGCTTCTACGTTGCCAGGGGCTCACTGATCAAGAACGAGGTGGTCCTCAAGGGCGAGCCATCCCAGCTGGAGAAGGTCATCGAGCTCATTGAGAGGATCTTCGAGTACAAGAGCGAGATCAATGACTCGGGCTACATTTCGATCAAGTCTAAGATTCTCGTTGATCTGATCGGCTACGGGCTCAACTTCGGGAATCAGGAGAAGGACATTCCAAACTGGATCCTGCAGCTCCCTGAGCAGCAGCTCATCCGGTTCCTGAAGGGCTTCGTGGCTGGGAACAACCTGGAGAACCAGCTGAATTTCTACCTGGAGTTCAAGACGGACTCTCAGCTGGTGGCGGAGAAGCTGGTCCTCATCCTGTCGAAGTTCGGCCTCGTCGCTGACGTTTCTGAGATCGAGGTTAACGAGGAGGATATTGCCAAGATCTACCGCATCATTATCGAGGGCCTGGAGGACAAGAACATCCATAATCTCTCTAAGGTGGAGCAGAAGATTTCAGCTCTGACCACGGGCGATATCGCTTGGGGGAAGATTGAGTCCATCGAGGAGTTCGAGATCGACGATTACGTCTACGACTTCTCTGTTCCAAACTACGAGAACTTCATCGGGGGCTCTTACAATGTTTTCGCTCATAAC

SEQ ID NO: 2192 - protein, 969 aa, Trichodesmium erythraeum IMS101
  Intein encoding nucleic acids 134
TGCGTTTCGGGGGATACGCTGCTGATTACAAGGGACTCTATTCATAAGATTAAGGATGTCGTGGGGCAGAAGATTGAGATTTGGAATGGCAAGAACTGGTCTCAGGTCATCCCGCTGAAGACAGGGAAGGACAGGAAGCTCTACCGGGTTCGCTTCGGCGACGGGTCGTACCTGGATGTTACCGAGTACCACCGCTTCTTCGTGAAGGACAGGTTCGGCAAGAAGTACGAGGAGGTGCAGACCAAGGATCTCCTGACGCACTCCAAGTACGCCCTGGACGTCGAGCCATTCATCATTGATTACCATGACGGCGATTCGATCAACCTCTCTTACGCTTACACACTGGGGGCTGCTCTCGGCAATGGGACTATCGACCAGAACTCTAATGGCAAGATTAGGGTGTACTCACATAAGGCCGAGCTGATCTTCGCGGGCAACAAGTCCCTGGAGCGGCAGTACAATTACCTCCCGAGCTTCGTGGACGTCATTGATCTCGGCTTCTCGGGGGAGCTCCTGAGGAGGCTGCAGACCGAGCCCGACGCTCTCAACACGATCGCCTCATGGAATAAGTCCGCTATCCTGGCCTTCATTGCGGGCCTCGCTGACACAGATGGGAGCGAGACTAAGGGCAACGGGATCAAGATTTCCGTGAGCGACTACGAGAGGGCCAAGCGGCTGCAGCTCCTGCTCACGAAGTGCGGCATTAGGGCGAGCGTCAATCTGATGGCTTCGCGGGGCTGCACCACGAACCTCGGGGAGCGCAATCAGGACCTGTACTACCTCCAGATCACCGATTGCCGGGAGATTCCATGCCAGCGCCTCGACACAACTAAGGTTTGCGAGGCGAAGTTCCAGGGCAAGTACCAGACCATCCAGAACGTCGAGGAGCTGCCTGGCCTCCACGATACGTACTGCTTCGAGGAGCCAGAGTTCCACAAGGGGGTTTTCGGCAATGCTCTCACAGGCAAC

SEQ ID NO: 2193 - protein, 1143 aa, Trichodesmium erythraeum IMS101
  Intein encoding nucleic acids 135
TGCCTGGACAAGACGGCTCTGCGGATTTTCAATCAGGGGCTGCTCTACGCGGATGAGGTCGTGACACCGGGCTCGGGGGAGACAGTCGGCCTCGGGCTGACGGTCAGGAACGGCATCGGGGCGTCCACAGCCATTGCGAATCAGCCGATGGAGCTGGTTGAGATCAAGCTCGCTAACGGCCGGAAGCTGCGCATGACCCCTAATCACCGGATGTCCGTGAAGGGCAAGTGGATTCATGCCTGCAACCTCAAGCCGGGGATGCTCCTGGACTACAGCATCGGCGAGTACCAGAAGCGCGAGGACACCCTCCTGATTCCTCTCCAGCTGGAGGATTACACTGAGGTGAACAATTCGCAGACCCTGGGCCACAACGGCGGGGTCCTCACCAAGAAGATCATGACGCCGGCGTCAATGACATCCGACCTGGCTTACTTCCTCGGCTGCCTGTTCGGCAACGGGTGCATCGTCCAGAATAAGTACCAGGTTTGCTTCTACCATTCTCGGCTCGACGTGCTGTACGGCCTCCAGGAGAAGGGGAAGAAGCTGTTCGGCATCAAGGGGTCTCTCAACGATTTCGCCAATGGCAGGTTCGAGCTGTGCTTCGCGTCACGGCAGCTCTTCTACTGGCTCCACCTGAACCAGCTGGTCAAGACGCAGAAGTCAGAGGACCTGGAGCGCATCCCCCTCTCCCTGAGGAGGTCCAGCAGGGTTACTCTCCTGTCCTTCTTCTGCGGCCTGATTGACACCAACGGCTACGTGCCACAGGATGGCAAGCTCAGCATCGCTTCGGCCTCGTCTGATTTCATTCATAACCTGCAGCAGATCGGCGAGTCCATTGGGCTCTGCTTCAGCATCTACCAGAATACGAAGGGGGAGAACCTGCAGAATCAGCACAACAATACATGGGGCCTCTGCCTGTCTCCCATGCTCTCAAACGTGGACGCGCTGGATTACCTCAACCATAATAGCATCAAGTGCCAGGAGGGCCCGGTGGTCATTTCGAAGTGCGTCCTCAACTACTCGCCCTACAAGATCGAGTCTGTTAATATTGGCGCTGTGTGCGACTACAGCTACGATTTCGCCATCGAGGGCATCAATGATAATGACTCTTGGTACTGGCAGGGGGCTCTCAAGTCTCACAAC

SEQ ID NO: 2194 - protein, 1407 aa, Trichodesmium erythraeum IMS101
  Intein encoding nucleic acids 136
TGCGTGCTGCATGACACTGAGATCTACGTGAATGGCATGGTTATGGAGGCGGAGCAGATTTGGCAGGCTTACGCGGGGGAGGCGGAGTTCGACGGCGAGGGGTTCTGGACAGAGCCGAACAAGGAGCTCCTGGTTAATAGCCTCGATGAGACCACGGGCAAGATCGTGTTCGCCCGGATTCGCAGGCTGTACCGCCAGTGGGTTAGGGAGAAGCTCAGGAAGGTGCGGCTGAAGGACGGCTCCAGCATCACAATTACTTGCAGGCACAAGCTCTTCATCCGGGACTCCTGGAAGAACGATTTCCAAGTGGGCGACGATGTCTGCGTTCCCGCGAAGCTGATGTGGGACGGGAAGCCAGAGGACCCAGATGTGGTCAAGTTCGTCGCTTGGCAGGTTGCTGAGGGCTGGGAGAGGGTCAATTCCGGCATGTTCGGGGTTAGCCAGAAGGGCAAGGACGTGCTGGAGGGGCTCCTGGAGGTCTTCTCGCGGCTGGGCAAGCGCTACGATATCAAGATTAACTGCCCAAAGGTTGTGGCGCACGGGTCTAAGAAGAATTGCTACGAGTTCAGCGCTCATTCGCTGGAGTACAGGAAGTTCCTGGAGGAGAAGCGCTACGGCTGGGGGAAGAGGTCCCATGAGAAGACCATCCCTCTGTTCATTATGCAGGCCGACCTCGATTCGGTGCGGGTCTTCCTGTCTAACTACTTCGACGCGGAGGGCTGGGTGAATAAGACCGTTCGCTGCGTGGAGATCTCCACGGCCTCGTCTCAGCTCATCCAGGAGCTGAGCATTCTCCTGCGGCGCTTCGGCGTCTGGATGAAGATCTCACCGCAGCAGAAGTGCGCTACCAACGGCACGGGGGTTTTCTGCACATACTACATCGGGACTTTCGGCGGGAATAGCGCCAGGTGCTTCCTCCAGGAGATCGGCTTCAACGACAGCGGGAAGCAGGAGAATCTGAAGTCGATCTGCGAGAAGATTGCGGACTCTAACGTGGAGGGCATCCCGGCTTCAGATATTGTGGCCGAGCTCGTCGAGAAGACCCAGCTCCCAGTCGGCAGCCTGGGGATCCAGGACCCTATCTACATGGACGGCTGCCAGGATTTCTCTCCCACGTCACTGGAGAAGGTCATCAACTCAATTGAGGATATCATTTCCGGCGCTGGGGAGGAGGAGTACGGCCAGCTCAAGTCATCCAAGCTGAGGAACAAGACACTGGAGGCTTACTCGCTCCTGAATATCCTGGAGCTGGAGATCTACAAGACTCGGCTCCAGAAGCTCCTGAACCAGGAGGTGTACTACTGCCAGATCGAGTCCATTGAGGAGATGGAGTACGAGGGCTGGGTCTACGACTTCGAGGTTTCCAAGTACCACAATTTCGTTGCTAACAACATCATTTGCCACAAT

SEQ ID NO: 2195 - protein, 1167 aa, Thermococcus fumicolans
  Intein encoding nucleic acids 137
TCGGTTACGGGGGATACTGAGGTTACTATTAGGCGGAATGGGCGGATTGAGTTCGTCCCTATTGAGAAGCTGTTCGAGCGGGTGGATCACCGGGTGGGGGAGAAGGAGTACTGCGTGCTCGGCGGGGTCGAGGCTCTCACACTGGACAACAGGGGCAGGCTGGTCTGGAAGAAGGTCCCATACGTTATGAGGCACAAGACTGATAAGAGGATCTACCGGGTGTGGTTCACAAACTCCTGGTACCTCGACGTCACTGAGGATCATTCACTCATCGGCTACCTGAATACCTCCAAGGTTAAGCCAGGGAAGCCACTCAAGGAGAGGCTGGTGGAGGTCAAGCCAGAGGAGCTCGGCGGGAAGGTCAAGTCCCTGATCACCCCAAACCGCCCTATCGCCAGGACGATTAAGGCCAATCCTATCGCGGTTAAGCTCTGGGAGCTGATTGGCCTCCTGGTGGGCGACGGGAACTGGGGCGGGCAGAGCAATTGGGCGAAGTACTACGTGGGCCTCTCGTGCGGGCTGGATAAGGCTGAGATCGAGCGCAAGGTCCTCAACCCGCTGAGGGAGGCCTCGGTTATTTCTAATTACTACGACAAGTCCAAGAAGGGCGATGTCTCAATCCTCTCCAAGTGGCTGGCGGGGTTCATGGTTAAGTACTTCAAGGACGAGAACGGCAATAAGGCTATCCCGTCTTTCATGTTCAACCTCCCCCGGGAGTACATTGAGGCTTTCCTCAGGGGCCTGTTCTCCGCTGACGGGACCGTGAGCCTGAGGAGGGGCATCCCGGAGATTAGGCTCACGTCGGTTAACCGGGAGCTGTCTGATGCGGTGCGCAAGCTCCTGTGGCTCGTTGGCGTGTCCAACAGCCTGTTCACCGAGACGAAGCCCAATCGCTACCTGGAGAAGGAGAGCGGCACCCACTCGATCCATGTCAGGATTAAGAACAAGCACCGGTTCGCCGACCGCATCGGCTTCCTGATTGATAGGAAGTCTACAAAGCTCTCAGAGAACCTGGGCGGGCATACTAATAAGAAGAGGGCGTACAAGTACGACTTCGATCTGGTGTACCCGCGGAAGATCGAGGAGATTACGTACGACGGCTACGTCTACGATATTGAGGTTGAGGGCACACATAGGTTCTTCGCTAATGGCATTCTCGTTCATAAT

SEQ ID NO: 2196 - protein, 1266 aa, Thermobifida fusca YX
  Intein encoding nucleic acids 138
TGCCTGACCGCTGATACTTACGTTTGGACAGATCGGGGGCTGGAGACAGTCGCTGAGGTTTTCGGGCGGGCGGGGCTCCCTCTCTCATCCACTAGCAGGGTTACCGACGTGAGGGACCGGGATATCCGGGTGGTCAACGAGAAGGGCGAGCTGGAGCAGGTGGCTGCTCTCACGCATAATGGGAGGCAGCCAGTTGTGAGGATCACAGTCGCTTCCGGCAGGCAGGTCACGGTTACACGGAACCACCCTCTGCGCGTCATGAATGACGATGGCTTCATTGTTTGGAGGGAGGCTGGGCAGCTGAGGGAGGGCGACGTGCTCGTCTCCGCTGCCTTCGGCGCTGTCCAGGCTGCTTCGGGCGGGGGCCTCTCTGAGGACGAGGCTGTTCTCCTGGGGTACCTGACCGCTGCTGGCAGCCTCGATCCAGCTGGGCATGTGTGCTTCACCACGACAGACATCGAGACAGGCGCTGAGTTCGCTGCTCTGGCTGAGTGGCTCCTGGACACTACCGTCACTGCTGTTCCAGGGGATGGCCAGGTGGCCTACGTGCTGTCCGACCCAGCTGCTAGGCACACGCTCGCTGAGCGCTACGGCGTGGATTACGCTGCTGCTGCTCGGATCCCGCAGTGCGTCCGCACTGCTGGCGACAAGATGCAGAGGGCTTTCCTCGCTGCTCTGTACACCGCTGCTGGCTGGACTGACACCAGCGCTGCCGTTGGGCTGAGGACGGCTTCGGCTCCACTCGCGAGGGAGGTGCAGTACCTCCTGTACGGGCTGGGCATCCCAGCCGACCTCGATAGGTCTCACGGGAACGGCCAGCATCCTTGGGCTGTGACCATTTCACCAGCTGCTGCTCCAAGGTTCCACACTGAGGTCGGCTTCCGCACCGCTCAGCAGTCGCCACAGACGGGGCTGCATGAGCCAACACCACAGGTGGAGGCTATCCCAAATCTCACGGGCCTGATTCACGCTCTCAGGGACTCAATCGGGGATCGGGCCGAGTCCACAGACGATCCATTCCCTGCTGCTAGCGGGGGCGCTTACGACAGGGATCAGGTTCGCCGCGTGATCGACTGGGCTAAGAGGAGGACTGATGAGGCTCCAGCTACCGCTAACGCTATCCTCGGCTACCTGACGCAGCTCACAGATGCCAGGTACACGTACGAGCCAATTACAGCCGTCGAGGACGCGGGCCAGCAGCCTACCTTCGACCTCATGGTTCCAAGGACTCATAGCTTCCTCGCCAATGGCATTCTCTCACACAAC

SEQ ID NO: 2197 - protein, 1071 aa, Thermobifida fusca YX
  Intein encoding nucleic acids 139
TGCATGCACTACGACACACTCGTGACACTCGCTGACGGCACACAGGAGAAGATCGGGACAATCGTGGACCGCAAGCTGGACGTGGAGGTCCTGTCGTACGATCCAGAGACCGACAGGATCGTGCCAAGGAGGGTGGTCAACTGGTTCGATAATGGCGCCGCGGACCACTTCCTGCAGTTCACTGTGGGCAGGTCTGGGAAGCCAGGCGGGGCTCAGTTCACCGCTACGCCAAACCATCTCATCAGGACCCCTGGCGGGTGGAGGGAGGCTGGCGAGCTCATTGCTGGGGACAGGGTTCTGGTGCACGAGCCACATTACCTCAATGAGCAGCAGAGGCAGGTTGTGTACGGCTCGCTCATGGGCAGGGGGACGCTGGTCCCAGATAGGCACGGCGGGCCTGGCGTTCACTTCTGCATGGCTCATACAGCCGAGCAGGCTGCCTACCTGGACTGGAAGGTCTCCCTCCTGGGCAACATTGCCCACTCACGCACCGCTGAGGCTTCCGCTACGGTCGGGGTTGAGTTCACACCGATGCCCGAGCTCAGCGAGCTGCATAGGGTCGTTGATTTCGGCGACGGGCACACCCATCTCACGTGGGAGTTCCTCAAGCAGCTGACGCCACTCGCGCTGGCTGTGTGGTACCTCGATGCGGGCACACTGACTATCCCTCAGTCCGGGACTGACGATGACGCCAGGGTGCAGATTGACGTCGAGACCCTGTCGCCAGGCTCTCGGCAGAGGCTCGTCGAGTACCTGAGGGATACCCACGAGCTCGACGCTGCTGTGGTCCAGCAGGGCGCTGACGCGAGGTCTCTCCTGGAGTTCACACCAGCTGCTACCGTGCGCTTCCTGGAGCTGGTTGCGCCATACGTGCCTGAGTCAATGTCCAGCATGCTCCTGGCTCAGTTCAGGGGCAGGTGCAGCGTCACGCCAGAGTACTCGGATCCAGTCCAGAGGCTCGTTGCTGCTCCAGTGCTGGACATCCAGGTGAAGCCCGGCAGCACACGCAAGTTCGACATTGAGGTTGAGGGCAATCATAACTACTTCGTGGATGGGGTCATGGTTCATAAT

SEQ ID NO: 2198 - protein, 1611 aa, Thermococcus hydrothermalis
  Intein encoding nucleic acids 140
TCGCTGCTGCCTGAGGAGTGGATTCCGCTCGTGGAGAATGGCAAGGTTCGGCTGCATCGCATCGGGGAGTTCGTGGACAAGCTCATGGAGACCGACAGCGAGCTCGTCAAGCGCAACGGCGATACCGAGGTCCTGGAGGTGCGCGGGATCAGGGCTCTGTCTTTCGACCGGAAGTCAAAGAAGGCGCGCGTGATGCCGGTCAAGGCTGTTATTCGGCACCGCTACTCCGGCGATGTGTACGAGATCGTCCTCGGCAGCGGGAGGAGGATTACCGTCACGGAGGGGCATTCGCTCTTCGCTTACGGCGACGGGGAGCTGAGGGAGGTGACAGGCGGGGAGATCAAGGCTGGCGATCTCCTGGCTGTTCCAAGGAGGGTGAACCTGCCCGAGAAGAAGGAGCGCCTGAATCTCGTCGAGCTCCTGAGGAGGCTCCCAGAGGAGGAGACAGGCGACATCATTCTGACTATCCCCGTGAAGGGCAGGAAGAACTTCTTCAAGGGGATGCTGCGGACACTCCGCTGGATTTCCGGCGAGGAGAAGAGGCCAAGGACTGCTAGGAGGTACCTGGAGCACCTGGAGGGCCTGGGCTACGTGCGCCTCAAGAAGATCGGCTACGAGGTTACCGACAGGGAGGGGCTGGAGAGGTACAGGAAGCTCTACGAGAGGCTGGTGGAGGCGGTCCGGTACAACGGCAATAAGCGCGAGTACCTCGTGGAGTTCAACGCTGTTCGCGACGTGATCGCCCTGATGCCGGAGGAGGAGCTCAGGGATTGGCTGGTCGGCACCAGGAATGGGTTCCGGATGAGGCCCTTCGTGGAGATCGAGGAGGACTTCGCTAAGCTCCTGGGCTACTACGTCTCGGAGGGGAACGCCAGGAAGTGGCGGAACCAGAAGAATGGCTGGTCTTACACGGTGAAGCTCTACAACGAGAATCAGCGCGTCCTCGACGATATGGAGTCCCTGGCGGAGAGGTTCTTCGGCCGCGTGAAGAGGGGGAAGAACTACATCGAGATTCCAAGGAAGATGGCTTACATCATTTTCGAGAACCTCTGCGGCACCCTGGCCGAGAATAAGCGGGTTCCAGAGGCGATCTTCACGTCGCCTGAGTCTGTGCGCTGGGCCTTCATCGAGGGCTACTTCATTGGCGACGGGGATGTTCATCCTTCTAAGAGGGTGCGGCTGTCAACGAAGTCCGAGCTCCTGGTCAACGGCCTCGTTCTCCTGCTCAATAGCCTGGGGGTCTCGGCCATCAAGATTCGCCACGACTCAGGCGTTTACAGGGTTTACGTGAACGAGGAGCTCCCATTCACAGATTACCGCAAGAAGAAGAACGCGTACTACTCCCATGTCATCCCTAAGGAGATTCTGGAGGAGACTTTCGGCAAGGTGTTCCAGCGGTCCGTCAGCTACGAGAAGTTCCGCGAGCTCGTGAAGTCCGAGAAGCTGGACGGCGAGAAGGCCAAGAGGATCGAGTGGCTGCTCAACGGGGACGTGGTCCTCGATAAGGTCCTGGAGGTTAAGAAGCGGCCATACGAGGGCTACGTGTACGATCTCTCTGTGGAGGAGGATGAGAACTTCCTCGCTGGCTTCGGGCTGCTCTACGCTCACAAT

SEQ ID NO: 2199 - protein, 1005 aa, Thermococcus kodakaraensis KOD1
  Intein encoding nucleic acids 141
TCCTACCATCATGATTTCGAGCTGCTGCTGGCTGACGGGCGCAAGGTTAAGATCGGGGAGCTGGTGGACAAGCTGATTGAGAAGAATCGGGACCGCGTCATCCTGGGCAAGGATACCGAGATCCTCCCGGTTGAGGACATTGAGCTCCTGGCCTACGATCTGGAGAAGAGGGAGATCGTTAAGGTGAAGGCTGACCGCGTCTCAAGGCACAAGGCTCCAGAGCGCTTCATCAAGCTCAGGTTCTCCAATGGCCGGGAGATTACCGTGACGCCGGAGCATCCCGTCATGGTTTGGGAGAACGGGGAGATCACAGAGAAGCCAGCGGAGAAGATCACTCCTGGCGATATTGCTCTCGGGGTTCTGCGCTACCCGATTCAGGTGGACGGCAAGTTCAAGGAGAGGTACCGGGATATGAGGGAGGCGGAGGACTACCAGGATTACCTGTACTCCCGGGGCGTGGTCAGCAAGATCAAGCGCACCGGGATCTACTTCACGGTGGAGAAGGCTAGGAGGGCTCTCCCGCGGGAGCTGGTCAAGCCCCTCATCAACGCTGGCAAGATTCTCAGGGTTACACAGACTCCAAAGGAGCGGGCGAGCTTCAATCAGAAGCTGGTCCGCGAGAACATCATTGAGGGGTACCTCCAGAGGATCATTGAGCGGATGGACGAGCTGGAGAGGCTGTCGCGCGAGGATCCAGCTAAGGCTCTGGAGCTCCTGCCTAAGACCCAGCTCTACTACAAGTACGGCATCACGTACGGGAAGCTCAAGAAGCTGGCTGAGGCTCGCAACTCCTGGGCTGAGGGCATCATTCAGTCGGCGGTGGCTGAGCGCATCTCTCTGGCCAAGAGGGAGCTGGAGGAGTTCTTCAAGTGGTGGAACGCGAATGTCAACTTCCTGAAGGTGAAGTGCGTCGAGGAGATCAAGAACGACCGCTGGGAGTGGGTGTACGACGTTACTGTGGAGCCTCATCATCTCTTCGTTTCGCATGGGCTCGTTCTGCATAAT

SEQ ID NO: 2200 - protein, 1209 aa, Thermococcus kodakaraensis KOD1
  Intein encoding nucleic acids 142
TGCATGCATCCTGACACATACGTGGTTACTAAGTCGGGGGCTAAGAAGGTCTCTGAGCTGACTGAGGGGGATGAGGTCCTGACACATACCGGCACGTTCAAGAAGGTCATCCAGCCACTGAGGAGGGAGCACAAGGGGCGCCTCCTGGTTATCAAGGCCTACGGCACCGTGCCTGTCAAGATTACGCCGGAGCACATGGTTTGGGTGGTCAAGCAGATCAGGCACAAGTCCCATTACAGCGATGGGCGGCAGGTCATTTGGTGGGAGTTCGAGGGCCCAGAGTGGATGACGGCTCAGGAGCTGAAGGAGCGCCTGGAGTCCGAGACAGACCCAAAGGTGAGCTACATGCTCCTGCAGCCAATCCCTGAGCCGTCCGTGGACGCGGATAAGATTCCTCTGAGGAAGGAGGTCTACGTTGTGAACCAGCACGGCAAGACAGACAAGCTCCATCCGTCCGTGAAGCGGACTCCCGAGTACCTGCCACTCAACTTCGAGACCGCTAGGCTGATCGGCCTCTGGATTGCTGAGGGGTCAACTTCCAAGAACGGCGTCATCAAGTTCGACATTTCCAGCAATGAGGAGGATCTGACGGAGTTCATCACAGGCACTATTAGGAAGTACTTCCCGCACGCTAAGATCGTCGTTAAGGACCATGAGAGGAACAGGAGGACGGTCCGGTTCTGCAATAAGCGCTTCGCGGAGTGGCTCAGGGAGAACATCGGCCACGGGGCTGATAATAAGAGCATTCCGCCCCTCCTGCTCCTGAACAAGAATAGGGAGGTGCGCCTGGGCCTCCTGAGGGGGCTCATCGAGGGCGACGGCTACGTGCGCAGGGAGTCGCAGCGCAGGGCGAACTACATCAGCTACTCGACAGTTTCTCCCTCACTGGCTTACCAGCTCCAGCTCCTGGTGGCTTCGCTGGGCTACACCTCGTCTATCCACAGGTCTATTCGGACAGAGGGCATCGGGAAGACTAGGAAGCCCATCTACGATGTTAAGGTGTCGGGCAAGTCTTACTACTCACTCCTGGAGGAGCTCGGGTTCGAGGTCCCACAGAGGGGCAACAGGACCTACAACGTTAATCGCACGTGGAAGAATTACCTCCTGCTCAAGGTGAGGTCCATCGAGGAGGAGGAGTACGAGGGCGACGTTTACAATCTGGAGGTTGAGGGGGATGAGTCAGGCTCTGTGGGCTTCATCGTGCATAAT

SEQ ID NO: 2201 - protein, 1638 aa, Thermococcus kodakaraensis KOD1
  Intein encoding nucleic acids 143
TGCCTGCTGCCGGATGAGAAGGTTATTCTCCCTGAGCATGGGCCTATTACACTCAAGGGGCTCTTCGATCTCGCTAAGGAGACAGTCGTGGCTGACAACGAGAAGGAGATCCGCAAGCTGGGCGCCAAGCTCACCATTGTGGGCGAGGATGGGAGGCTCAGGGTCCTGGAGAGCCCATACGTTTGGAAGGTGCGGCACCGCGGCAAGATGCTGAGGGTCAAGCTCAAGAACTGGCACTCAGTGTCCGTCACGCCAGAGCATCCCTTCCTGACCACGCGGGGCTGGGTGCGCGCTGACCAGCTCAAGCCGGGGGATTACGTTGCGGTGCCCAGGGTCATCCATGGCAACGAGTCAGACGAGCGGTTCGTCTCCTTCGTTTACGAGAAGCTCAAGAATGATGAGCTGATCGCGAAGCTCCGCGGCGAGGTGCTGTCCAAGATTTCCAGCGAGTTCAAGGGGGACAGGGCTTACAAGGTTGAGAGGAACGTGTTCCGGTGGGAGGACATCGAGCGCCTCAATCTGTGGGATGAGGTGGAGAGGGTCGCCTTCACCCCAAGGATGCACAGGAGCGGCAAGCCACTGCATTACGTGAAGCTCCCAAGGTCGCCTGAGGAGTGGGAGGCTTTCTTCTACTTCGCTGGCGTCATGTTCGGCGACGGGTCCCAGGATAAGATCGCCAACAATGACGTCGAGGTTTACGAGGAGCTCAAGAAGCTGTCTGTTCTCGGCGTGGCTGTCAAGAGGGTGGAGAGGACAACTTCATACGAGATCGAGCTCACCAACGGGAAGAATGCTCTCCTGAGGCTCCTGAGGGTGCTGTTCGAGTACCCGGAGCGGCAGAAGGCGAAGTCCATTAGGGTTCCACGGATCCTGTTCATTGCTCCTCGCAAGTATGTGTCCCGCTTCCTCAGGGGCTACTTCGACGCGGATGGGCACGTCAGCCTGAAGGACGCGAGGATCGAGGTTACGAGCGCTTCGCAGGAGTTCCTGGAGGATCTCAGCCTCCTGCTCCTGCGGTTCGGCATCGTGTCCAAGATCTACCGCAGCGACTACACCACGCTCGTTATCTCGGGCCGCAGGAACCTCGATCTGTTCCGGCGCTACATTGGGTTCTCTGTCAAGAATAAGGCCGAGGCGCTGGAGAAGGCCATCAAGAAGTCAAGGCGGTCTGAGTCATACCCCATTTTCGAGGAGCTGAAGAGGCTCCGGCTCCTGTTCGGCTTCACACGCACTGAGCTCAACAGCAATGTGCCATTCTACGGGAAGTACGAGTCGGAGGAGGCCCCTTCTTACGAGACACTGATGAGGATCCTCGACGCGATTGAGAAGGGCTCGATCAACCTGGATAAGAAGATTGCTGTCCTGGAGGGGCGCATCAGGGACCATAATTACATTAAGGCCTTCGAGAAGGACGGCCTGATCAAGGATGGGAAGCTGACTGAGCTCGGCAGGGAGCTCCTGGAGGTCTGGAGGAACAGGGAGTTCGACTCGTCTGACGTCGATTACATCCGGAACCTGGCGGAGAATCTCGTCTTCATCCCGGTTGAGGACATTGAGGAGTTCGAGTACGAGGGCTACGTTTACGACGTTACTACAGAGACTCATAATTTCGTTGCTAATGGCATCCTCGTTCATAAT

SEQ ID NO: 2202 - protein, 1575 aa, Thermococcus kodakaraensis KOD1
  Intein encoding nucleic acids 144
TGCGTTTCGGGGGACTCAAAGATCCTGACAGGGAAGGGGCCAGTGGAGATCGGGCGGCTGAACTCTAACATGATCGCGGGCATTTGGCGCTTCCAGACCGAGCTGGTGCGGTTCGAGGAGCCACACCGCGTTGAGTACCGCAGGGAGGGCGTGAAGATCCGCACGAGGCTCGGGTTCGAGATTAAGGCCACCAAGGAGCATAAGTTCCTCACGGTGGACGAGAACGGCGAGCTGCGCTGGGTCGAGGCTTGGAAGCTCAAGGAGGGCAACTGGGTCGGGGTGGTCCGGCGCCTGCCATCTCCTAATGTGAAGGTCTCAATCCTCGACCTCCTGCCGCCCAACGCCTACCTCAAGCTGAAGGGCGAGTTCCTGAGGGAGCTCAAGCTGTCGATCCAGGCGAAGTTCGGCTCTATTAGGACATACGCCAAGAAGAAGCGCTGGTCAGAGTCCTACCTCGTCAAGCAGCTGAATGGCGTTTACCCGTTCAGGTGGGAGAGGCTCTCCGCTGTGCTGAAGGACCTCGATCTGCGCATGACAGAGAACGACGTCGAGAGGATCACTTCCGATAAGGGCAAGTACAGCCTCCCGATCGAGTTCACCCCCTCAATGGCTAGGCTCCTGGGCTTCTGGATGGCTGACGGGTCCTGGAAGGGCGGGACCCTCACGCTGTTCTCCAGCGATAGGAAGATGCTGGAGAAGTACAAGGAGCTGTGCAAGGAGGAGTTCGGCGTTGTGGGGCGGATCCGCATGCTCAACGAGTCTACATACTCACTGGAGATCTCTTTCAATCTCCTGCCGGCTATTTTCAAGAACCTGACAGGCAATACTGAGCGCAAGAGCAAGCTCGGGACTTTCCCATCCATCATCTACAGCCTGCCTGAGGAGCACAAGAGGGAGTTCCTCGCGGGCTACTTCGACGGCGATGGGTTCCTGGAGGTTAAGGGCGGGAGGGTGTACTCGGCTGGCTTCTCTACCTTCAACAAGAGGTTCGCGGAGGGCATCCGGGACATTCTCCTGCAGCTCGGGATCGTGTCGTCTATTAGGGCCCGGGAGTACGATGAGGTCCAGAAGTTCAAGGGCCGCGTTATCCCCAAGAAGGGGGCTTCATACACGGTTTCCGTGCTCGGCGGGGAGTACCTGAAGAGGTTCTTCGACGCCGTCCGCCCATGGAGGTCGGATTACGAGGGCTGGGAGGGGATGTACAACGAGGGCTACAGCAATTCGGACGTCGTTCCCAACCTCGGCAAGCGCCTGAGGAGCATCAGGGAGAGGCTGGGCATTAGCGCTTACCGCATGTCGAAGATGGGGTTCTACAATCCAGTCCGCGTTGAGCTGGGCGAGAGGGAGATCTCCAGGCGGAACCTCAGGCTCCTGGTGGAGTTCTACGAGCGGGTCGCGAAGGAGAAGCGCGTGGAGGACGTCCTGGAGGAGCTGAGCTACCTCAGGGAGCTGGCTGAGGGCGACGTGTTCTTCGATCGCATCACGTCGGTGGAGCCTGCCTACATTGATGTCGCGTACGGCATCATCAACTCGGAGACAGAGAACTACATCGTGGAGGGCTTCATTTCCAAGAAC

SEQ ID NO: 2203 - protein, 1608 aa, Thermococcus kodakaraensis KOD1
  Intein encoding nucleic acids 145
TCTATTCTGCCTGAGGAGTGGCTGCCTGTTCTGGAGGAGGGGGAGGTTCATTTCGTTAGGATCGGGGAGCTGATTGACCGCATGATGGAGGAGAACGCTGGCAAGGTCAAGAGGGAGGGGGAGACCGAGGTCCTGGAGGTTTCAGGCCTGGAGGTGCCGTCCTTCAACCGCAGGACGAATAAGGCGGAGCTGAAGAGGGTCAAGGCTCTCATCCGGCACGACTACTCTGGCAAGGTGTACACCATTAGGCTGAAGTCAGGCCGGCGCATCAAGATTACGTCAGGGCATTCCCTGTTCAGCGTCCGGAACGGCGAGCTCGTTGAGGTGACCGGCGACGAGCTGAAGCCAGGGGATCTCGTCGCTGTTCCAAGGAGGCTGGAGCTGCCAGAGAGGAACCACGTCCTCAATCTGGTTGAGCTCCTGCTCGGCACACCGGAGGAGGAGACTCTGGACATCGTGATGACGATTCCCGTCAAGGGCAAGAAGAACTTCTTCAAGGGGATGCTCAGGACACTGCGGTGGATCTTCGGCGAGGAGAAGAGGCCAAGGACTGCTCGCAGGTACCTCAGGCATCTGGAGGACCTCGGCTACGTGCGGCTCAAGAAGATCGGGTACGAGGTCCTGGACTGGGATAGCCTCAAGAATTACCGGCGCCTGTACGAGGCTCTCGTGGAGAACGTCCGCTACAACGGCAATAAGAGGGAGTACCTGGTTGAGTTCAATTCGATCCGCGACGCCGTGGGGATTATGCCGCTGAAGGAGCTCAAGGAGTGGAAGATCGGCACACTCAACGGGTTCCGGATGCGCAAGCTGATTGAGGTCGATGAGTCCCTCGCCAAGCTGCTCGGCTACTACGTGAGCGAGGGGTACGCGCGCAAGCAGAGGAACCCGAAGAATGGCTGGTCGTACTCTGTCAAGCTGTACAATGAGGACCCCGAGGTTCTGGACGATATGGAGCGGCTCGCGAGCCGCTTCTTCGGCAAGGTTAGGCGGGGGAGGAACTACGTGGAGATCCCCAAGAAGATTGGCTACCTGCTCTTCGAGAATATGTGCGGGGTGCTCGCTGAGAACAAGCGCATCCCAGAGTTCGTCTTCACATCACCTAAGGGCGTTAGGCTGGCCTTCCTGGAGGGGTACTCCAGCGCTATGGCTACCTCCACGGAGCAGGAGACTCAGGCGCTGAACGAGAAGCGCGCTCTGGCCAATCAGCTCGTTCTGCTCCTGAACTCGGTGGGCGTCTCTGCTGTGAAGCTCGGCCACGACTCCGGGGTTTACAGGGTGTACATCAATGAGGAGCTGCCATTCGTCAAGCTCGATAAGAAGAAGAACGCTTACTACAGCCATGTGATTCCTAAGGAGGTCCTCTCGGAGGTCTTCGGCAAGGTTTTCCAGAAGAACGTGTCCCCACAGACCTTCCGGAAGATGGTCGAGGACGGCAGGCTGGATCCTGAGAAGGCTCAGAGGCTGTCGTGGCTCATCGAGGGGGACGTGGTCCTCGATCGCGTCGAGTCTGTTGACGTGGAGGACTACGATGGCTACGTGTACGATCTCTCTGTGGAGGATAATGAGAACTTCCTCGTGGGCTTCGGGCTCGTTTACGCTCATAAT

SEQ ID NO: 2204 - protein, 1446 aa, Thermococcus kodakaraensis KOD1
  Intein encoding nucleic acids 146
TGCTTCGCTAAGGACACTAAGGTCTACTACGAGAATGACACACTGGTTCATTTCGAGTCAATTGAGGACATGTACCATAAGTACGCTTCTCTCGGGAGGGAGGTGCCATTCGACAACGGCTACGCTGTCCCACTGGAGACCGTGTCAGTCTACACGTTCGATCCGAAGACAGGCGAGGTTAAGAGGACGAAGGCTAGCTACATCTACCGGGAGAAGGTGGAGAAGCTCGCCGAGATCCGCCTGTCGAACGGCTACCTCCTGAGGATTACACTCCTGCACCCCGTTCTCGTGTTCCGGAATGGCCTGCAGTGGGTGCCAGCTGGCATGATCAAGCCTGGGGACCTCATCGTCGGCATTCGCTCGGTTCCAGCGAACGCCGCGACTATTGAGGAGTCTGAGGCCTACTTCCTCGGGCTGTTCGTGGCTGAGGGCACCTCAAATCCTCTCTCCATCACCACGGGCTCCGAGGAGCTGAAGGACTTCATCGTCAGCTTCATTGAGGACCATGATGGGTACACACCAACTGTCGAGGTTCGCAGGGGCCTCTACCGGATCCTGTTCCGCAAGAAGACGGCTGAGTGGCTCGGCGAGCTGGCTACTTCGAACGCCTCTACCAAGGTGGTCCCTGAGAGGGTCCTCAATGCGGGGGAGTCCGCTATCGCTGCCTTCCTCGCTGGCTACCTGGACGGCGATGGGTACCTCACTGAGTCTATTGTGGAGCTGGTCACCAAGTCACGGGAGCTCGCTGACGGGCTGGTGTTCCTCCTGAAGCGCCTGGGCATCACGCCGAGGATTAGCCAGAAGACAATCGAGGGGTCGGTCTACTACCGGATCTACATTACGGGCGAGGATCGCAAGACATTCGAGAAGGTCCTGGAGAAGTCCAGGATCAAGCCAGGGGAGATGAACGAGGGCGGGGTTGGCAGGTACCCACCAGCTCTGGGCAAGTTCCTCGGGAAGCTGTACAGCGAGTTCAGGCTCCCCAAGCGGGACAACGAGACTGCGTACCACATCCTGACCAGGTCACGGAATGTGTGGTTCACCGAGAAGACGCTCTCCCGGATTGAGGAGTACTTCAGGGAGGCTCTGGAGAAGCTGTCGGAGGCTAGGAAGGCTCTGGAGATGGGCGACAAGCCGGAGCTGCCATTCCCTTGGACAGCGATCACTAAGTACGGGTTCACGGATCGCCAGGTCGCTAACTACAGGACAAGGGGCCTCCCAAAGAGGCCAGAGCTGAAGGAGAAGGTTGTGTCCGCCCTCCTGAAGGAGATCGAGAGGCTGGAGGGCGTGGCTAAGCTCGCTCTGGAGACCATTGAGCTCGCTAGGCGCCTGGAGTTCCATGAGGTTTCCAGCGTGGAGGTCGTTGACTACAATGATTGGGTCTACGATCTCGTCATTCCAGAGACTCATAACTTCATTGCTCCAAATGGGCTCGTGCTCCACAAC

SEQ ID NO: 2205 - protein, 1467 aa, Thermococcus kodakaraensis KOD1
  Intein encoding nucleic acids 147
TGCGTTACCCCTGACACACTCGTTTCGCTCGCTGACGGGCGGATTATGGAGATCAAGGATGCGGTGGAGAAGTCGGAGGGCAATCTGCTCAGCGTGAACGGCCTGAAGCCGAAGGAGGCCAAGGCGCTCAAGTTCTGGGAGATCGACTGGAACGGGCCCCTCAAGGTCATCAAGCTGAAGAATGGCCACGAGATTAAGGCCACGCCAGACCATGGGCTCCTGGTCATGAGGGAGGGCAAGCTGGGGTGGGTTTCGGCGAAGAACGTGAGGGAGGGCGACTACGTCGCTTTCGCTTACAATACCGGCCACAGGGGGAGGGATGAGTACACGCTCCTGAAGCTCATGATCAAGCTGGGCATTACCGACGTGATGGTCGAGCTCGATGAGGAGTACTTCAACGAGAAGGTTGCCCCTATCGTGAGGGAGCGGATTTCCACAAGCACTAAGTACAAGTACCTGAGGAGGAGGGTCCTCCCACTGTACCTCCTGCAGGAGTGGGGCCTGGACGATTACGAGGCCCATGTTAAGTCCCTCTACAGGCAGAGGGCTGGCAGCAAGCCAATCCCCAATTTCAAGCTCGACGGCAGGTTCTGGTATGTGTTCGGGCTCGTTCTGGGCGACGGGACACTCCGCGATAGCAAGGTGCTGATCTCGCAGACTCCACTCAAGGACGTCAAGTCCGTTCTGGAGGATGTCTTCCCTTTCCTCAGGGTTTTCGAGACCACGAACCAGGTTGGCTTCTCCAACTCCATCATCGCTGAGGTGTTCCGCAGGCTCGGCGCTAGGAAGGGGAAGCTCCACCCACTGGTCTTCGGCCTGAGGGAGGAGTACATCAACGCGATGATTGCTGGCTACTTCGACACCGATGGGACGTTCTCTATCCTCAACGACAGGAAGGGCCCAAATTTCCGGGGGATCCTGACATCAAAGCGGGGCGATGTGCTCCGCATGCTGTCCGTCTACCTGTACCAGATCGGCATTATGAACTACCTCAGGAGGGACGAGAGGACCGGGGTGTGGGATCTGATCATTTCAAATCGCTCCCTGGAGAAGTTCAGGGAGAAGATCTACCCGTACCTCCGGATTAGGCGGGCTCAGTTCGACGAGGCCTACTCTGTCTACAGGGCCTCACGCAGGGCTTTCGAGGGCGATCTCCTGCCAGTGGCCCCTGTCTTCGGCAAGCTGAAGTTCAAGAACGGGACAAAGAATCGCATCCTCAAGGAGACTGGCATTGACGTGTGGAACTGGCTGAAGAGGCCAGAGGGGGAGATCCCCCGCGATAAGCTCTCCAAGGTCCTGGAGTACGCTGAGGAGTCGCCCGAGAAGGAGTTCCTCAAGTCTCTGGTGGAGGCGGGCGTCACCTGGGTTAAGGTGAAGGGGGTGGAGGAGGAGCTGTACACGGGCAAGCTCTACGACTTCACAACTACTACGGAGAATTTCCTCTCAAATGGGGCTGTTTCTCATAAT

SEQ ID NO: 2206 - protein, 1362 aa, Thermococcus kodakaraensis KOD1
  Intein encoding nucleic acids 148
TGCATCGATGGCAACGCTAAGATTATTTTCGAGAATGACGGGGAGGAGCATATTATGACAATGGCGGAGATGTACGAGCGCTACAAGGATCTGGGCGAGTTCTACGACCCGGAGTACAACCGGTGGGGGATCAATGTGGAGGAGGTTCCGGTCTACGTGAAGTCATTCGATCCCTCCACCAAGGAGATTACGAAGGGCAAGGTGAAGGTCATCTGGAAGTACGAGCTCGGGGAGGACGTTCCCAAGTACGAGATCAAGACAAACAAGGGCACTAGGGTCCTCACCTCGCCATGGCACCCTTTCTTCGTCATTACGCAGGATCTGAAGATCGTTGAGAAGCGGGCTGATGAGCTCAGGGAGGGCGACATGCTGGTCGGCGGGATGCCATCTGACGATGACTACGAGTTCCTCCTGGACTACTGGCTCGCCGGCTTCATTGCGGGCGATGGGAGCATCGACAAGTACCGCTCGCACGTTAAGGGCCATGAGTATGTGTACGATCGGCTGCGCATCTACGACTACACCACGGAGACGCTCGGCATCATTAACGACCACCTGGAGAAGACATTCGGGAAGAGGTACTCCCTCCAGAGGGATCGGAATATCCACTACATCGACATTAAGGCCAAGGGCATTACTAGCCATTACATCGAGCTCCTGCGCGGCATCACCAACGGGATTCCGCAGCCCATCCTGAAGGAGGGCAGGAATGCTGTGCTCTCTTTCATCACGGGCCTGTTCGATGCCGAGGGGCATGTCAACTCAAAGCCAGGCGTGGAGCTCGGGATGGTCAATAGGAAGCTGATCGAGGACATTACATACTACCTCAACAGCCTGGGCATCAAGGCGCGCATGAGGAAGAAGCCTCGGAAGGATGGGGTGGACTACGTCATGCACGTTGAGGAGTACTCCAGCCTCCTGCGGTTCTACGAGCTCATTGGCAAGAACCTGCAGAACTCCGAGAAGCGCATCAAGCTGGAGGAGCTCCTGTCTAAGCATAACGGCGGGTCATTCGGCCTCACCCTGTCCTTCGAGGACTTCAAGGCGTGGTCGTCTAAGTACGGCGTGGAGTTCAAGACGAACGGGTCCCAGACACTCGCTATCATTAAGAATGAGAAGGTGAGCCTGGGCCAGTGGCACAGGAGGGGGAGGGTCTCGAAGGCTGTCCTCGTTAAGATGCTCCGGAAGCTGTACGATACAACTAAGTCCGAGGACGTGAAGCGCATGCTCCATCTGATTGAGGGCCTGGAGGTGGTCAAGGAGATCAACGTCACTAATGAGCCAAAGACCTTCTACGACCTGACTGTGGAGCGCTACCAGAACTACCTCGCCGGGGAGAATGGCATGGTTTTCGTGCATAAT

SEQ ID NO: 2207 - protein, 1533 aa, Thermococcus kodakaraensis KOD1
  Intein encoding nucleic acids 149
TGCCTGCATCCGGACTCACTCATTCCTACGCCTCAGGGGGTTAAGCGCATCAAGGAGCTGCCGGAGAAGGGGGAGGTCTTCGCTCTCGACTTCGATCTCAAGCTGTCACGGGCGAGGTACAGGCTCCTGGAGAGGGACGCTGATGAGCCCATGTACAAGGTGACACTCTCCGACAGGACTGAGCTCTACCTGACCGCGGATCACCCGGTCCTCGTTTACAGGGACGATCAGCTGATCTTCGTCCCCGCTGAGGAGCTCCGGGAGAACGACCAGGTGGTCCTGTTCATTAATCGCTCAGAGTACTCCCCAAGGACCGAGTCGCCTACGCTCCTGGGCTTCCTCCTGGAGAACGCCACCTCTATGAAGGACTACATCCTCTACGATCCAGAGTTCGGCGGGGTGCTGAGGAATCGCATTAAGGACGCGGGCCTCAAGACTGAGATCCTGTGGAGGTTCCGGATTCGCGAGCCCACCTACTACAAGTACCTCCGCGGCAAGATGCCGGTTCCCATCGTGAGGTTCCTCCTGGAGGAGGGCGTTGTGAGCATTGAGGAGCTCCGGGAGGTGTTCCGCGGGTTCTCGTACTCTACATCACTGACTCCAATCAGCTTCGAGTTCTCGGAGGAGTTCTGGTACCTCTTCGGCCTGGTCGCTGGCGACGGGCACCTGGCTAAGAAGGGGGCTATCACCATTCCAGCCAAGGACCGCACCGAGGATACGGTCAAGGCGGTTAAGGAGATCGCTAACTCCCTCCAGGTGCCTTTCGCCTTCGACGAGAAGTACAAGATGATCATTCTGCGGTCCAAGAGCCTCACGAGGCTGTTCGAGCTCCTGGGCTGCCCGTACGGGAACAAGACAGAGATCTTCAGGATTCCGGGCGAGATCATGGCGAAGCCAGAGTGGATGGCTGCGTTCCTCGCTGGCTACTACGACGCGGATGGCCACATCGGGACAAAGCCAACTGGCGGGAAGAAGTCGCATTCTCCTCAGATCGTCCTGACGAGCAAGAACCGCATGGCCATCTACACAGTCAAGCAGATGTGGCAGCTCCTGGGCGTTGGGACGTACCTCTGGGAGAAGAAGGACAGGAACGGCAATTTCATGGCCTACGAGCTGAAGGTGTACTCCCGCGACGCGTGGCGGTTCTACGAGGTCATGAAGAACCACCTCCGCATCAAGAGGAAGGACCTGGAGCATGTGAAGGAGGTCGCTATTAGGAAGCGGAAGGCCTACTCTCACCATTACTCAGTTCTCAATGTGAAGTCTTGGGAGGGCAAGATCAAGTCCAGCAACGTTCTGTGGAAGAAGTTCGACATGTCCAATCAGACCGCTCACGGCAGGGGGATCAGCCTCGACAAGCTGCAGCGCATTGTCGATTACCTCACCGACACGGATCTGCGCAGGATCGCGATGGGCGATGTCTACGTGCTGGGGATCAGGTCCATTGAGAAGTTCCATTACCGGGGCAAGGTGTACGATCTCGTCGTGGATCAGTACCACAACTTCATTGCTAATGGGGTCGTCGTTCATAAT

SEQ ID NO: 2208 - protein, 1269 aa, Thermus thermophilus HB27
  Intein encoding nucleic acids 150
TGCCTGCCTGCGCGGGCTAGGGTCGTGGATTGGTGCACAGGGCGGGTCGTTCGGGTCGGGGAGATCGTTAGGGGGGAGGCTAAGGGCGTCTGGGTGGTCTCCCTGGACGAGGCTAGGCTGAGGCTCGTTCCAAGGCCTGTTGTGGCTGCTTTCCCAAGCGGCAAGGCTCAGGTGTACGCTCTGAGGACCGCTACGGGCAGGGTGCTGGAGGCGACAGCTAACCACCCAGTCTACACTCCAGAGGGCTGGAGGCCACTGGGGACCCTCGCTCCTGGCGACTACGTCGCTCTGCCAAGGCATCTCTCGTACAGGCCATCTCTGCACCTGGAGGGCCATGAGCTGGATCTCCTGGGGTTCGCTCTGGCTGAGGGCCACCTCCGCCATCCATCGGGCGTGTACCTCTACACCTCCAGCGAGGAGGAGCTGGCTGCCATGGAGGAGGCTCTCAGGGCGTTCCCTAATACGCGGATCCGCGTCGTTTGGAGGAGGGGGGTTGCTCACGTCTACGTGGGCAGGGTGGACAGGAGGCAGGAGGCTGGCGCTGTGGCGTTCCTCAGGAGGATGGGCCTCCTGGGGCTGGATGCGAAGACGAAGAGGCTCCCAGAGGCTGTCTTCGGCCTGCCACCAGAGGAGGTTGCTAGGTTCCTGGGGAGGCTCTGGACAGGCGACGGCGGGGTGGATCCAAAGGGCAGGCTGATTCACTACGCTACTGCTAGCAAGGAGCTCGCTTGGGGCGTCCAGCATCTCCTGCTCAGGCTGGGCCTCCAGAGCAGGCTGGTGGAGAAGCGGTTCTCGGGCGGGTACAAGGGCTACGCTGTCTACCTGCTCGGCGGGCTGGAGGCTGCTAGGAGGTTCGCTGAGACAGTGGGGCCATACCTGGTCGGCAAGCGGAGGCAGGACCTGGAGGCTCTGCTCGCTTCATGGGAGAAGGCTGGCAGGTCCACCGGGGATGTTCTGCCACTCGCGTTCCTGGAGGAGGTGAGGGCTGCTGTTGCTGAGGTGGCTCAGGGCCAGGTGGCTGACCTGCTCAGGGAGGCCGGCCTCGCGGAGGGGCTGCTCTGCCTGGGCAGGGGGAGGAGGGGGCTCTCTCGCGCCACCGTCGGCAGGCTGGCTGCCCTCACGGGGTCACTGGCGCTGCTCCGGCTCGCGGAGGCTGAGGTTTACTGGGATCGCGTCGAGGCGGTTGAGCCGCTCGGCGAGGAGGAGGTCTTCGATCTCACTGTGGAGGGCACTCATACTTTCGTTGCGGAGGATGTTATCGTTCATAAT

SEQ ID NO: 2209 - protein, 1314 aa, Thermus thermophilus HB27
  Intein encoding nucleic acids 151
TGCCTGCATCCGGACACTCTCGTTCATACCGATCGGGGGACTCTCAGGCTGCGGGAGCTCGTGGACCCTTTCAGGCGGGGCTGGCAGCCGCACACCCTGAGCGTTGCTACGGACGAGGGCTGGAGGCCATCGCCAGAGGGCTACAACAATGGGGTGGCTCCAACCCTCAGGGTGGTCCTGGAGAACGGCCTGGAGGTTCAGGGGACACTCAATCATAAGCTCAAGGTGCTGCGCGAGGATGGCACTAGGGAGTGGGTCGAGCTCCAGGACCTGAGGCCAGGCGATTGGGTCATCTGGGTTCTGGACGAGCACACCGGCACGCCAGTCCAGCTCGCTCCACTGGATGAGCCACTCCATCCTAACACCACGCCAATTCGCACACCTGAGGTGCTGACTGAGGACCTCGCCTTCCTCCTGGGCTTCTTCTTCGGCGAGGGGTTCGTGTCGGGCGATAGGATCGGGTTCTCTGTCCACGAGGAGGAGCCAATGCGGGAGGAGGCGAAGAGGCTGTTCCGGGAGCTCTTCGGCCTGGAGCTGAGGGAGGAGAGGAAGCCAGGGGACCGCTCAGTTACCCTGGTTGTGCGGTCCCGCCCTCTGGTGACGTGGCTCCGCAAGAACGGCCTCCTGAAGGGGAAGGCGAGGGAGCTGGAGGTCCCGCGGGCTATCAGGCAGTCCCCAAGGCCTGTTCTCGCTGCGTTCCTCAGGGGCCTGTTCGAGGCCGACGGCACAATTACTGCGGGGTACCCAATGCTGACAACTGCGAGCAAGCGCCTCGCTCAGGATGTGATGGTCCTCCTGGGCGGGCTGGGCATTCCTTCTAAGCTCCTGAGGTACAATCCACTCCCAGGCCGCTTCTCAAAGGCTGAGCATTACGGCGTCCGGGTCGTTACGGCTAAGGGGCTGGAGAGGTACCTGGAGCGGATCGGCGTGCCAAAGGGGTCGCGCCTGGAGGCGCTGCACGGCATTAAGCCAGACGTCCGCAGGGAGTCCAGCTGGCCACTGCCTCATGCTGAGGGCCTCCTGAAGCCACTCCTGACCGTGACGGAGAAGGGCAGGAAGGGGTACGCTAGCCCATACACACCACTGCGCAAGGACCTCCTGAGGTACCTGAGGGGCGAGAGGCAGCTCACAGCTACTGGGTACGCCATGGTCCTGGAGAAGGCTCAGGATCTCGGCCTGGAGGCTGAGCCATTCCCCTTCAACGAGTACTACGTTAGGGTGGCCTCCGTGGAGCCGGGCGGGGAGATCCTCACGCTGGATCTCTCTGTGGAGGGCAATCATACATACCTCGCCAATGGGCTCGTCTCTCATAAT

SEQ ID NO: 2210 - protein, 1221 aa, Thermus thermophilus HB27
  Intein encoding nucleic acids 152
TGCTTCGTGGGGTCTACTCGCATTCCGACGGAGCGGGGGCTGGTTCCTATTGAGGAGCTCGCTAGGGAGGGGGGGTCTTTCTACCTGGTGACTGACAACAGGGCTCCGTTCGGCGGGAGGGGCGCTCCACTCCCAGGCCACGGGACCGCCGTCAGGAAGGCCGTTCGGGCGTTCTTCACGGGCGTCAAGCCAGTGGTCCGGCTGAGGACAAGGGAGGGCCTGGAGGTTACCCTCACGCCAGATCATCTCCTGCTCACGCCAGAGGGCTACAGGGAGGCTGGGAAGCTGAGGCCAGGCGAGAAGATCCTCGTCCAGTCCGGCGAGGGGCTGTTCCCAAAGGAGGAGAGCCTGCCTGCTCAGGCTCTCGCTGTTGTGCACGAGAGGGTGGCGACGGCTGGCGGGAGGGGCGGGAGGGGCAGGGCTGACGTCCGCGCCCAGTACAGGAACCTCCCCACACGCTGGTCAAGGGAGCTGGGCGTTGCTCTCGGGTGGCTGCTCGGCGACGGGTACCTGAGGGAGGATGGCGTCGGGTTCTACTTCTCCCGGAAGGACTTCGCTGATCTGGCCTGGCTCCCAGACCTGCTCCGCGATTGGTTCGGCCCTGGGACACTCCAGGAGACTCGCAGCAACACCTTCCACCTGCATTTCAATAGGATCCCGGCTGAGTTCTTCCAGGCTCTCGGCGTGAAGGCTGCGCGGGCAACTGAGAAGAGGGTCCCAGAGTCGCTGTTCCGGGCTCCTCGCGAGGCTGTCGTTGGCTTCCTGCAGGGGCTCTTCTCTGCGGACGGCTCAGTTCAGATTAACGAGAATAAGCAGGATGCTACCGTGAGGCTGGCCTCCAGCTCGCTCGCTCTGCTCCAGGACGTGCAGCTGCTCCTGCTCAACCTGGGCATCCTCGGGAAGATTCACAAGAGGAGGGAGGCTGCTAGGAAGGCTCTCCCGGACGGCAAGGGCGGGCTGAGGGAGTACCCAGTCGCTCCTCAGTACGAGCTGATTCTCGGCGGGGAGAATAGGGATCGGTTCGCCGAGGTGGTCGGCTTCCTCCAGGAGGAGAAGCAGAGCAAGCTGCTCGCGTTCCTGAGGCATAGGCCGAGGGGCTCGTACAGGAAGCCCTTCCTCGCTACCGTTGCTTCTGTGGAGCCAGCTGGCGAGGCGCCCGTGTACGATCTCACAGAGCCAGTTACACACTCGCTCATTGCTAATGGGCTCGTTGCTCATAAT

SEQ ID NO: 2211 - protein, 558 aa, Thermoplasma volcanium GSS1
  Intein encoding nucleic acids 153
TGCGTTTCGGGGGAGACGCCAGTCTACCTCGCTGACGGCAAGACAATTAAGATCAAGGACCTCTACTCATCTGAGCGCAAGAAGGAGGACAACATCGTCGAGGCTGGCTCCGGGGAGGAGATCATTCACCTCAAGGACCCGATCCAGATCTACAGCTACGTTGATGGCACGATCGTGCGCTCCCGCTCCCGCCTCCTGTACAAGGGGAAGTCCAGCTACCTGGTGCGCATCGAGACAATTGGCGGGCGCTCAGTGTCCGTCACTCCCGTCCATAAGCTCTTCGTTCTGACCGAGAAGGGCATCGAGGAGGTTATGGCCTCGAATCTCAAAGTGGGGGACATGATTGCTGCTGTCGCTGAGAGCGAGTCGGAGGCCCGGGATTGCGGCATGAGCGAGGAGTGCGTGATGGAGGCGGAGGTCTACACCTCTCTGGAGGCTACGTTCGACCGCGTTAAGTCAATCGCGTACGAGAAGGGCGACTTCGATGTGTACGATCTGTCAGTTCCAGAGTACGGCAGGAACTTCATTGGGGGGGAGGGGCTGCTCGTGCTCCACAAC

SEQ ID NO: 2212 - protein, 456 aa, Thermosynechococcus vulcanus
  Intein encoding nucleic acids 154
TGCCTCTCAGGGGAGACTGCGGTTATGACGGTGGAGTACGGGGCTATTCCTATTCGGCGGCTGGTTCAGGAGCGGCTGATCTGCCAGGTTTACTCGCTCGACCCACAGGGCCACCTGTACACGCAGCCTATCGCTCAGTGGCATTTCCAGGGCTTCCGCCCGGTGTACGCGTACCAGCTGGAGGACGGGTCCACAATTTGCGCTACTCCGGATCACCGGTTCATGACCACGAGCGGCCAGATGCTGCCCATCGAGCAGATTTTCCGCGAGGGGCTGGAGCTGTGGCAGGTGGCCATCGCTCCACCAGGCGCTCTCGCTCAGGGGCTGAAGCCGGCCGTCCAGATGTCCTGCATGAAGATTGTGGGCAGGAGGCTCGTCGGGTGGCAGGCTGTTTACGATATTGGGCTCGCCGGGGATCATAACTTCCTCCTCGCTAATGGGGCTATTGCTGCTAAT

SEQ ID NO: 2213 - protein, 921 aa, uncultured archaeon GZfos9C4
  Intein encoding nucleic acids 155
TGCGTTACCGCTGACACATGGGTTACTACCGCTGAGGGGCCAAGGCAGGTGGAGGAGCTGATCGGCAAGAAGTTCACGGCTATCGTTAACGGCGAGGAGTGGGAGTCCAGCGAGGAGGGGTTCTTCGAGACAGACGTTAAGCCAGTGTACACCCTGAAGACGGCTGAGGGCTTCGAGCTGAGGCTCACGGCTGATCACCCTGTCATGAAGGTTGAGAGGATGACACGGTACAAGGTGGAGACTCAGTGGTCCAACGCTGGCGACCTCAAGCCAGGGGATAAGATCATTATCAACAATCATAGGGACTTCGGCAATTGGAGCGTCAAGGGGAAGTACACCGAGGGCGAGGGGTACCTGATTGGCCTCCTGCTCGGCGACGGGACGATCAAGAAGCTCAACCCCTGGATGAAGGCGATTTCAAAGAAGATGGAGAAGGCCTCCGCGGATTTCTGCGAGGGCATCCTGAGGGGGCTCTTCGACGCTGATGGCTCTGTGCAGGGGAATCAGTCGAAGGGCGTCTCTATTCGCCTGGCCCAGTCAGACGTCGAGATCCTCAAGGCGGTTCAGCGCATTCTGCTCAGGTTCGGCATCTTCTCGAAGGTGTACATGAACCGCAGGGGCGAGCGGAAGGTTAAGATGCCGGATGGGAAGGGCGGGGTCAAGGAGTACATCACCAAGCCCCAGCACGAGCTCGTGATCAGCAACGACAATATCCTCTACTTCGCTGAGAGGGTCGGCTTCTCGGATGCCGAGAAGATGGAGAAGCTGGAGAAGGCTATCTGGAACTACAAGCGGAAGATGAATAGGGAGAGGTTCGTGGCTAGCGTCGAGGAGGTGGTCCCAGACGGCGTTGAGAAGGTGTACGACGTTAAGATTCCAGGCATCAATGCTTTCAATGCTAATGGCTTCGTGGTTCACAAC

SEQ ID NO: 2214 - protein, 1368 aa, Zygosaccharomyces bailii, strain CBS 685
  Intein encoding nucleic acids 156
TGCTTCGCTAAGGGGACTGAGGTCATGATGCACGACGGCTCTGTGAAGGCTATTGAGACTATCGAGGCGGGGGAGGCTGTTATGGGGACCGACGGCCAGCCAAGGAAGGTGGTCGGCCTCCCTCGGGGGAGGGAGGTCATGTACAAGGTTTCCCAGAAGACGGCGCACCGGGTGCATAAGACCGACGAGACGCGCGCCGCTCCAGTCGCTCTCTTCGAGTACAACTGCAATGCCACACACAAGCTGGTTGTGAGGACTCCTCGGAGCTGCCGCTCGATCACCCGCAAGATGCAGGGCGTTGACTACAACGAGGTCATCTTCTTCGACCTCAAGAAGAAGAAGCTGGAGGACGGCCGCGAGATCGAGATTGTCAAGGAGGTTTCGAGGTCTTACCCAGCTGCTGAGGGCGCTGAGAAGGCTGCTCAGATGGTGAAGGACTACTACGATGCCGCGCGCGGGAAGGAGTTCTTCGAGTGGACAATCGAGGCGAGGGATGTTNGGGAGCTCGGCGCTCACGTGAGGAAGGCTACTCATCAGGTGTACGCCCCAGTCCTGTACGAGAGCGACTTCTTCTTCCATTACGTGAAGAACTCGAAGTTCGCTCTGAGGTCTGAGGCCTCAACAGCTCTCGCCTACCTCCTGGGCCTGTGGGTCGGCGACGGGCTCTCCGATAGGGCTGTGCTGTCCGTCGACAGCGAGGATTCCAGCCTCCTGGAGCGCATCACTGGCTACGCCGACATTCTCGATCTGAGCGCGGAGTACAAGGACCGCGAGATCCCGAAGAGGGCGAAGACCGTCTGCCTCTACCCCAAGACGATCCGCGGCAACGATATTCGCAGGAACCTGAATACGGACAACCCGGTCTGGAATGCCATCGTTGACCTCGGCTACCTGAAGGATGGGGTTAAGAATGTGCCCTCGTACCTCTTCTCAGACTCCATCTGCCACAGGGAGGTGTTCCTCGCGGGCCTGATTGACTCTGATGGGCATGTCCGGGGCGACGATGGGCTGTCAGTTACAATCAAGACTATTCACAAGACCGTCATGGAGGGCACGGTGGCTGTCGCTAGGTCGCTCGGGCTGATCGTTTCTGTGAACACCGAGGAGGCGAAGATTGACAAGAACGATGTGAATCACCGCTTCGTCTACGCTATCTACATTTCAGGCGGGGACGCTCTCCTGTCCGTGCTCGCTCATTGCGCTGCTGCGAAGAAGTTCAGGGCTCCACCATCCAATGAGGTCGTTCGGGGGCTCAAGAAGGTCTTCTTCGAGATGGAGGAGCTGAAGGAGGACGATTACTACGGCATCACGCTCGCTAAGGAGTCAGACCATCAGTTCCTGCTCGCCAATCAGCTCGTGGTTCATAAT

SEQ ID NO: 2215 - protein, 1350 aa, Zygosaccharomyces rouxii, strain CBS 688
  Intein encoding nucleic acids 157
TGCTTCGCCAAGGGCACTGAGGTTATGATGTCGGATGGGTCAATTAAGGAGGTGGAGGGCATTGAGGTCGGGCAGGAGGTCATGGGCAAGGACGGCAAGCCGCGGGAGGTGGTCGGCACCCCATCGGGGCGCGAGAAGATGTACAAGGTCTCTCACAAGACCGCTCACAGGGCCCATAAGTCCGACAGCACGTCGGAGCGGTTCGGCCTCTTCGAGTACACATGCAACGCCACTCATAAGCTGGTTGTGCGCACCTCTAGGTCATGCCGGCCGCTCGTCAGGAACATCCAGGGCACGGACTACGTCGAGGTTTGCCTCTTCAATATGACCAAGAAGACGCTGGAGGACGGCCGCGTGATCGATATTGTCGAGGAGACCAGCGATTTCTACCCAGCGGTGGAGGGGCCTGAGAAGGCTCTCAGGATCCTGAAGGAGTACGCTGAGGCCGACGGCGGGAAGGAGTACTTCGAGTGGACAATTGAGGCTCGCGATGTGGCTCTCCTGAGCGCTCAGGTCAGGAAGGCTACTTACCAGCTGTCGGCCCCCGTGCTCCTGGAGAACAATCACTTCTCTCATTACCTCAAGGACTCCAACAGCGCTGTTGGCAATGATACAGTGCGGGCCCTGTCCTACTTCCTCGGGCTGTGGATCGGCGACGGGATGCTCAACAATGCCGCGACGTTCTCAGTCGATTCCCAGAACGCGAGCCTCCTGAACAGGATTAATGAGTTCGCCGAGGTGCTCGGCCTGTCTGCGGAGTACAAGGACTCACAGGAGCCAAAGCGGGCCAAGACCGTTAACCTGTACGCGAAGGCTATCCGCGACGAGGGCGTGAGGAAGAACCTCGATACGCACAATCTCCTGTGGGACGCGATCGTCGATCTCGGCTACCTGAAGGACGATTCGAAGAACGTTCCTGGGTACATTTGCTCGGACTCTTTCCAGCATCGGGAGGTGTTCCTGGCGGGCATCATTGACAGCACAGGCTACGTGTCCGATGAGACCGCCACGGTGAAGACTATCGACCAGTCCGTCATGACAGGCACTGTGGCTGTCGCTAGGTCCCTCGGGATTAACGTTAGCGTGGACGTCGAGGTTGACGAGGATGGCGTCGATCGGTCATTCGTTTACGCCATCTACATGGACAGGTCCGATGCTCTCCTGGCTGTCCTGGCTAACTGCGCTTCCAACAATAAGCAGATCGAGGCTCCACCACACGGCGTGATTAGGGAGTTCAATAAGGCTTACTTCGAGATGGAGGAGCTGGAGGAGGACGAGTACTACGGGCTGACTCTCTCAAATGAGTCGGATCATCAGTTCCTCCTCGCTAATCAGCTCGTCGTGCATAAT

SEQ ID NO: 2216 - protein, 346 aa, Aquifex aeolicus strain VF5; identical to SEQ ID NO: 113
  Intein 1

SEQ ID NO: 2217 - protein, 153 aa, Acidothermus cellulolyticus 11B; identical to SEQ ID NO: 117
  Intein 2

SEQ ID NO: 2218 - protein, 418 aa, Alkalilimnicola ehrlichei MLHE-1; identical to SEQ ID NO: 119
  Intein 3

SEQ ID NO: 2219 - protein, 605 aa, Aspergillus nidulans FGSC A; identical to SEQ ID NO: 152
  Intein 4

SEQ ID NO: 2220 - protein, 468 aa, Aeropyrum pernix K1; identical to SEQ ID NO: 122
  Intein 5

SEQ ID NO: 2221 - protein, 378 aa, Azotobacter vinelandii
  Intein 6
CFAPETLVHTADGPRPIRDLQQGDLVLGISGRYREVTHKFVYNQTDAMLAIRVKHAVEPIEVTAGHPFYAIRGVPLEQSGERTLRQLESGKRSPEWIDAGELERGDYMAQVIPSEVVPVAGFDEDDARLYGILLGDGHLSKNGLQWGVSGHPQRDGHMDFVRAYLSARGIHFWETARDETYGQIHWASGRGVRRDATTGRITGAGAATLPFEHADLYDEQGRKRIARRFSHLPRQQSLALIRSLLESDGGVSRGKEIYFTNTSRPLIEGLRYQLLRLGVPTAGQYRERRQDHVGQRADGSPIRFEGVCKAYDLRIPAVPEVAQLVGCQPIAKRNWITWQGCVYSRIRDVQPIAVKPFVFDLKVEGDESYMTTSGLAHN

SEQ ID NO: 2222 - protein, 488 aa, Batrachochytrium dendrobatidis JEL197; identical to SEQ ID NO: 125
  Intein 7

SEQ ID NO: 2223 - protein, 419 aa, Batrachochytrium dendrobatidis JEL423
  Intein 8
CFGRDTPLLMADGTTKFVQDIKALDQLMGDDCTPRIVQERSLVHESGALYRVVPKNANGHDAFVCNKEHILVMVNVKQPWVSQTVIDGVDQFHVSEVVCIGNIPTVRSSGNFASAVEATKALPAWTLLIWEISVLEYLAVDADLRQHFMIYKPAGGIEYPTTTNLDIVQHFGAESVPNLEHAVMWCIGLWILLGDVDTAGNPVLILSGIDHLHPLIKTLHSHSQKLSISFTNQLDEGVADISKPTIIALGDKFGLLFKSLGIESAECIPDALLRSSKLHRAALLAGLVEGSNAFSIVKDTPKHWDISCKNNMIFENIKRLSSSLGLCVDTVTPATITQQVSVKTLQIRISGPRMHYVSELISNDSLKTTSVVSIDSWLNVKSNACEFEIESIGCGEYFGFTVMGPNSRFLLGDFTVTHN

SEQ ID NO: 2224 - protein, 385 aa, B.subtilis M1918 (prophage); identical to SEQ ID NO: 126
  Intein 9

SEQ ID NO: 2225 - protein, 370 aa, Chlorochromatium aggregatum; identical to SEQ ID NO: 131
  Intein 10

SEQ ID NO: 2226 - protein, 276 aa, Chloroflexus aurantiacus J-10-fl
  Intein 11
CLHGDSLIVTDHGLVPMREVVNHRQRLQVSDGERQQTVYDWNRFADYPTVTMRTRAGFTLTGSHNHRIMLADGTWRRLDELQIGDRVRIAGGTELWATEPALLRCRRPLPRVLVTAGAPAATTSSPHRRGYRRAAAVVVDEKLAAAIGRRCVTHADQQALDAIRRSPRPQVVAFLRAFCQGAGQSVASGLTLTCADADLATTVQLLLTNLGVLAHRTDTTVRIDNGDDLERAYTTLATPTGWTDEVVALEHGTADVYDISVTATHRYAAQGFINHN

SEQ ID NO: 2227 - protein, 146 aa, Coxiella burnetii; identical to SEQ ID NO: 130
  Intein 12

SEQ ID NO: 2228 - protein, 456 aa, Chlamydomonas eugametos (chloroplast); identical to SEQ ID NO: 132
  Intein 13

SEQ ID NO: 2229 - protein, 345 aa, Carboxydothermus hydrogenoformans Z-2901
  Intein 14
CVTGDTLVFTDKGLIEARKLEVGMKVWSGDGWNEIKEVINNGVKPVLKLKLKTGLEIKVTEEHKIFTGEGWKEAKDLKVGDKLYLPVSYPELDFPVKEENDFYEFLGYFLGDGSLSVSNHVSLHVGNDKELALYFKEKVEKYAGAAYLIERDGQYIIDVHRKEFAEKIKKIFGIEITDSKEKDIPSSLLAVNSEAMKALLRGLFSADGSVYDANGSITVALSSTSYPLLRKVQILLLSLGIPSTLTGEKDQDVKIIKGNEYETLPTYRLIISGERASLFFNKIGLIGEKKKKFLELMAGKTTYSTLNNHLYQEIVSIEPAGEEEVFDITAPPKYTWITNGILSLD

SEQ ID NO: 2230 - protein, 135 aa, Clostridium thermocellum
  Intein 15
CFVAGTMILTVAGLVAIENIKAGDKVIATNPETFEVAEKTVLETYVRETTELLHLTINGDVIKTTFEHLFYAKDVGFVEAKELQVGDKLLDSKGNVLVVEDKKIKITDEPVKVYNFQVDDFHTYHVGCNGVLVHN

SEQ ID NO: 2231 - protein, 333 aa, Clostridium thermocellum; identical to SEQ ID NO: 139
  Intein 16

SEQ ID NO: 2232 - protein, 336 aa, Chlorella virus NY2A infects Chlorella NC64A, which infects Paramecium bursaria; identical to SEQ ID NO: 141
  Intein 17

SEQ ID NO: 2233 - protein, 394 aa, Crocosphaera watsonii WH 8501 (Synechocystis sp. WH 8501); identical to SEQ ID NO: 142
  Intein 18

SEQ ID NO: 2234 - protein, 347 aa, Crocosphaera watsonii WH 8501 (Synechocystis sp. WH 8501); identical to SEQ ID NO: 143
  Intein 19

SEQ ID NO: 2235 - protein, 607 aa, Debaryomyces hansenii CBS767; identical to SEQ ID NO: 149
  Intein 20

SEQ ID NO: 2236 - protein, 294 aa, Frankia species CcI3
  Intein 21
CQPYDALVSTPSGLVPIGALVETDAVGMKVFDAHGLTQVIATKSNGVKDVLRIWTRAGHALDVTADHLVWRSTSAGAGAFVPAGALRAGDTLEWHRTIAPGEGEITSREIAEAALAGRLQADGFVGRYAGTNASLTIEAMTVPTRLYDAPLPVVAAYLRSLFQADGYVSRRERSTLIGLDMISEGLIRGVQGLLARFGIFARVRREADPRPDRHDLWSLGIQNAGDRRTFADEIGFLDPVKAAKLEASFDQPGQAAKPVKRLQIERIEPRGPMPVYDIQTDSGEYLSAGLRVHN

SEQ ID NO: 2237 - protein, 446 aa, Gemmata obscuriglobus UQM2246
  Intein 22
CVVAGTEVTDAETGAVVTVGELFESRRAVTVHALGADSKLRPRPVTDVVWNGRKRVYRLTTELGKSITATDNHPFRVLDGWKNLGELKPGDRIAAPRRLAVPSAGTWPQHEIVALAGLLSEGNTCHPTTLYFYGNDRVLIDDFARAIGQFPDTVAKVYARPNRRNLEVRANTGRDTRLKSRAERDAAVALLAPPTRSGAFVWAQRLGILGKTATEKFVPHDVFRLCDSDLELFLGRLWAGDGFIANDTLKVPFYATSSRRLAQDVQHLLLRLGIVGRIHEKQFKYKGGLKPGFTVHLIGDGAAEAFLDRIAPHCLGREHAVTILREHVATTARGLTSKDTVPLEVRAWVDDGRRARGLTWDELEQQSDVSTQEFYGTPAPGKKGFRRATIAKLAAFFGSQRLAAVADSDVFWDRVVSIEYAGVQDTYDLTVDEDHNFVANGLIVHN

SEQ ID NO: 2238 - protein, 287 aa, Gemmata obscuriglobus UQM2246
  Intein 23
CQPAGTQVAKVIKEGRWREDSVIEQVPIESLQPGDRVVSFGNAKIYRRGRAVTGITSRRHTGNLHRVEVGEFRTRATPEHRFTVRFDPARPKAGLLYLMRRGDRWRVGVCGMFNSRGFGVSVRLSQERGDAAWVLGAFATLTEARIAEQVVSCRYGIPTTVWETGRNPGASWAQRDQAGIDAIYQRLGVDRIRAGVDRLLRDHGLSAGLPLLAANEPGNFSCRQSRQVAACNLVPGVMQVPVPTAGERFEWRDLTATSFERVHDLEVWSMDVERDKHYVADGIVVHN

SEQ ID NO: 2239 - protein, 412 aa, Gloeobacter violaceus, PCC 7421
  Intein 24
CFAAGTLLHTEQGYVPVEQVVAGVGTRVCTHQGFRNISERFDNGEAEVFRVTTRKGYSVEVTANHKMARLDENGDLLLDELSHLQVGDNLLLLLGSNPVTEKVRLQCIPAGYRSSIEIAQPPELDEQLAYLLGYAYGDGCVGRGATYNYLSLAVSHTYPNVRDQLAAIIREKFGLTTKIYSGSGAVWNLLVHSANLLDWLKANGLLKQKAADLAMPEAILRSPSSVVGAFLSGYFDADGCVRGGKGGYGFDCTSKAFVGAVQLLLLAEGIVSNLHTTDRSRQGWRTIYRLNVCGTEFKRRFQTLCCRSAKVVHSPMVLGRDGTGGYPPALVRGASYQRVVAVGGKHLLYTALLKVIEKTRTAGKQALAESLCQHVNYFPDPIVAIESVGTQRVYDIEVEGMHLLGNGIYTSN

SEQ ID NO: 2240 - protein, 492 aa, Halorhodospira halophila SL1; identical to SEQ ID NO: 160
  Intein 25

SEQ ID NO: 2241 - protein, 477 aa, Haloarcula marismortui ATCC 43049; identical to SEQ ID NO: 161
  Intein 26

SEQ ID NO: 2242 - protein, 538 aa, Haloarcula marismortui ATCC 43049; identical to SEQ ID NO: 164
  Intein 27

SEQ ID NO: 2243 - protein, 182 aa, Halobacterium salinarum NRC-1; identical to SEQ ID NO: 165
  Intein 28

SEQ ID NO: 2244 - protein, 437 aa, Haloferax volcanii DS70; identical to SEQ ID NO: 167
  Intein 29

SEQ ID NO: 2245 - protein, 215 aa, Haloquadratum walsbyi DSM 16790; identical to SEQ ID NO: 168
  Intein 30

SEQ ID NO: 2246 - protein, 209 aa, Haloquadratum walsbyi DSM 16790; identical to SEQ ID NO: 172
  Intein 31

SEQ ID NO: 2247 - protein, 572 aa, Haloquadratum walsbyi DSM 16790; identical to SEQ ID NO: 171
  Intein 32

SEQ ID NO: 2248 - protein, 358 aa, Haloquadratum walsbyi DSM 16790
  Intein 33
CFTPDTNVLTPNGVRNIRDLTVGDSVYSLNPETMQMEIKPVTQTHEYPDYQGDLIDIQTNEIDFRVTPNHRMLVEATGTDTTSTNDYDFIEAGNLDISSRYELPHGWSVDHTDSLGAYIDLITLLREQSDTYNVLSDGGMTTAATADINHNNVTRRVDSDTFVSLIGWYVATGRVSRTQNGSDRVYLQLSQTNTKARTQLTMLLDELGVDWQADNEKIHFVSHVWTELFDTTCGRTEKNKHIPELIFDASASQKRAFFDAIINGSGVKNDDSYQYHTSSEDLRDDILRLCVHIGIVARYDYINDESWRIECTETANPDFTLTHSGRQSTAEDGVYCVTVADNQTLLAGRNGTFQWTGN

SEQ ID NO: 2249 - protein, 529 aa, Haloquadratum walsbyi DSM 16790; identical to SEQ ID NO: 173
  Intein 34

SEQ ID NO: 2250 - protein, 544 aa, Haloquadratum walsbyi DSM 16790; identical to SEQ ID NO: 174
  Intein 35

SEQ ID NO: 2251 - protein, 408 aa, Haloquadratum walsbyi DSM 16790; identical to SEQ ID NO: 177
  Intein 36

SEQ ID NO: 2252 - protein, 438 aa, Haloquadratum walsbyi DSM 16790; identical to SEQ ID NO: 178
  Intein 37

SEQ ID NO: 2253 - protein, 214 aa, Haloquadratum walsbyi DSM 16790; identical to SEQ ID NO: 179
  Intein 38

SEQ ID NO: 2254 - protein, 428 aa, Kineococcus radiotolerans SRS30216; identical to SEQ ID NO: 185
  Intein 39

SEQ ID NO: 2255 - protein, 380 aa, Methylococcus capsulatus Bath; identical to SEQ ID NO: 194
  Intein 40

SEQ ID NO: 2256 - protein, 165 aa, Methanoculleus marisnigri JR1; identical to SEQ ID NO: 197
  Intein 41

SEQ ID NO: 2257 - protein, 270 aa, Methylobacterium extorquens AM1
  Intein 42
CFAAGTLIKTPKGPVPIEQIQSGDLVFNAIGIGVVEGIVCQQKQTITLELSDGTSIVCTHDHPFFCPRGWVAAGDLEVGSGLFSHEDLRRLWSGGASLGLESGSSDGRGAVRSSEVLLRILREEAREPDAGYCGPAEDVRNASTDRAHAEGAWWQWQADPIASDEAARSAGRRVADRVRDEDRREARPEPTAVLLQDRHCEPLANDRNRSGREHSSRGTGEAEGQRQGDVPCSVRVVSISREERGGPEAVYNLRVSGHPSYFAGGVLVHN

SEQ ID NO: 2258 - protein, 165 aa, Methanospirillum hungateii JF-1; identical to SEQ ID NO: 204
  Intein 43

SEQ ID NO: 2259 - protein, 499 aa, Methanococcus jannaschii (Methanocaldococcus jannaschii DSM 2661); identical to SEQ ID NO: 205
  Intein 44

SEQ ID NO: 2260 - protein, 501 aa, Methanococcus jannaschii (Methanocaldococcus jannaschii DSM 2661); identical to SEQ ID NO: 206
  Intein 45

SEQ ID NO: 2261 - protein, 392 aa, Methanococcus jannaschii (Methanocaldococcus jannaschii DSM 2661); identical to SEQ ID NO: 207
  Intein 46

SEQ ID NO: 2262 - protein, 546 aa, Methanococcus jannaschii (Methanocaldococcus jannaschii DSM 2661); identical to SEQ ID NO: 208
  Intein 47

SEQ ID NO: 2263 - protein, 168 aa, Methanococcus jannaschii (Methanocaldococcus jannaschii DSM 2661); identical to SEQ ID NO: 209
  Intein 48

SEQ ID NO: 2264 - protein, 412 aa, Methanococcus jannaschii (Methanocaldococcus jannaschii DSM 2661); identical to SEQ ID NO: 210
  Intein 49

SEQ ID NO: 2265 - protein, 369 aa, Methanococcus jannaschii (Methanocaldococcus jannaschii DSM 2661); identical to SEQ ID NO: 211
  Intein 50

SEQ ID NO: 2266 - protein, 476 aa, Methanococcus jannaschii (Methanocaldococcus jannaschii DSM 2661); identical to SEQ ID NO: 212
  Intein 51

SEQ ID NO: 2267 - protein, 548 aa, Methanococcus jannaschii (Methanocaldococcus jannaschii DSM 2661); identical to SEQ ID NO: 214
  Intein 52

SEQ ID NO: 2268 - protein, 436 aa, Methanococcus jannaschii (Methanocaldococcus jannaschii DSM 2661); identical to SEQ ID NO: 215
  Intein 53

SEQ ID NO: 2269 - protein, 543 aa, Methanococcus jannaschii (Methanocaldococcus jannaschii DSM 2661); identical to SEQ ID NO: 216
  Intein 54

SEQ ID NO: 2270 - protein, 494 aa, Methanococcus jannaschii (Methanocaldococcus jannaschii DSM 2661); identical to SEQ ID NO: 213
  Intein 55

SEQ ID NO: 2271 - protein, 453 aa, Methanococcus jannaschii (Methanocaldococcus jannaschii DSM 2661); identical to SEQ ID NO: 217
  Intein 56

SEQ ID NO: 2272 - protein, 533 aa, Methanococcus jannaschii (Methanocaldococcus jannaschii DSM 2661); identical to SEQ ID NO: 218
  Intein 57

SEQ ID NO: 2273 - protein, 452 aa, Methanococcus jannaschii (Methanocaldococcus jannaschii DSM 2661); identical to SEQ ID NO: 219
  Intein 58

SEQ ID NO: 2274 - protein, 471 aa, Methanococcus jannaschii (Methanocaldococcus jannaschii DSM 2661)
  Intein 59
SLPYEEKIIIKEGEFIKPVEIGKLVDEMIERFGFEKIGNSEVCDLPIDIYALSLDQDEKVHWKRIISCIRHKHNGKLIKIKTKSGREITATPYHSFVIRKDNKIIPVKGSELKIGDRIPVVKHIPANCVEAINISDYVSGNYVVDNINNKIAPKINGKSIPNNIKLDYDFGYFIGIYLAEGSVTKYFVSISNVDELILNKIRAFADKLGLNYGEYDNNNGFAESHDIRIYSSTLAEFLSNFGTSSNTKKIAEFVFGANKEFVRGLIRGYFDGDGNVNADRKVIRVTSNSKELIDGIAILLARFNIFSIKTKTKNQFVLIIPHRYAKKFHEEINFSVEKKKSELERLVSSLNDDKTYDSIDMIPSIGDALTKLGEKVDYPKVILKKFERKQKIGRATLQRHLRRIEELAVKKGVNILALKEYWLLKKAVESDVIWDEIVKIEEISCDKKYVYDISVEGLETFTTFDGVLTHN

SEQ ID NO: 2275 - protein, 488 aa, Methanococcus jannaschii (Methanocaldococcus jannaschii DSM 2661); identical to SEQ ID NO: 220
  Intein 60

SEQ ID NO: 2276 - protein, 335 aa, Methanococcus jannaschii (Methanocaldococcus jannaschii DSM 2661); identical to SEQ ID NO: 221
  Intein 61

SEQ ID NO: 2277 - protein, 454 aa, Methanococcus jannaschii (Methanocaldococcus jannaschii DSM 2661); identical to SEQ ID NO: 222
  Intein 62

SEQ ID NO: 2278 - protein, 394 aa, Methanopyrus kandleri AV19; identical to SEQ ID NO: 223
  Intein 63

SEQ ID NO: 2279 - protein, 522 aa, Methanopyrus kandleri AV19
  Intein 64
CVAPETKICLADGRFVRADELFEELKERGRLVKCDESEEVYELREPVGVSSLDKDAVEIVEGKITHVWRLKADKLVEVEVKNGRSIRTTPEHKFLVLDPSGEIVEKRADELEIGDYIVCTQKLVHEGMSEEELKREVFRRLGRDFFVHLPEEEAESVLELAKERGIKALWETLEVDIEENSFYYQLRKGRIRADILVDLAEELGLDLADLYDAVEVSYRSNTKSTKPIRLPEPEDLFYLAGLMFGDGCWNQLTNGSEAIQGEVKRIASDMGLEVRVRRYEGKTARIDFPETVPRILEALFDYPRRKKAHRIRVNDFLTRAPLDCIAEFIRGYFDADGTVEEGRSAVSVTSVSREFLEDLQLLLQKFDVASYLREGDGAYTLYVSGARSLERFPGFREPEKAEKLKKLMEKASSSELEKVPISGEILREVRGDVPTTRMFNCYSNYEGGQVGLTKSSLEKVISTLEAVGVEGEALERLKALARDDVCFLEVVRVEEVEYDGYVYDFTVEEHHNFAAEGFVVHN

SEQ ID NO: 2280 - protein, 305 aa, Methanopyrus kandleri AV19; identical to SEQ ID NO: 224
  Intein 65

SEQ ID NO: 2281 - protein, 482 aa, Methanopyrus kandleri AV19; identical to SEQ ID NO: 225
  Intein 66

SEQ ID NO: 2282 - protein, 517 aa, Methanopyrus kandleri AV19; identical to SEQ ID NO: 226
  Intein 67

SEQ ID NO: 2283 - protein, 317 aa, Mycobacteriophage Bethlehem; identical to SEQ ID NO: 232
  Intein 68

SEQ ID NO: 2284 - protein, 331 aa, Mycobacteriophage Catera; identical to SEQ ID NO: 233
  Intein 69

SEQ ID NO: 2285 - protein, 436 aa, Myxococcus xanthus DK1622
  Intein 70
CVKNDSLIFTDRGLVTAAELAVGVPEEHAAFTEVGVDTSTGRATTNAVYNGGRSPTKRARLALGYELEATPEHPIRVLRDDALAWVRMDELHVGDRVALRRGSEVWGRSSLPEAFRWVKPKYAANLKLPKGLVLDEVAAEACGLLVSEGTLTKRLVTEFTNADADNVGFISRWAASIGIDLSRNGSDSIQYLLCSVVLREWLAWLGLDYTRAAGKCIPRAVRFGGRDIMRAFLRGLFDGDASVDPLKGVIEFCTASERMAREVQVALLGLGILASRHSRTVAGYEQLYWRVTVNDVATFEREVGFSSNWNRLRLREAVARAEGRCRNPNVDTVPINGLVERLYRTAQKQLSWSSQEGRIFGNYVHGEHAPSRAALERMVQRWGSECPTECLPIEAFLELPVAFLSVESIEDGEADVVDLSVPETHEFVANGVVCHN

SEQ ID NO: 2286 - protein, 425 aa, Nocardia farcinica IFM 10152; identical to SEQ ID NO: 250
  Intein 71

SEQ ID NO: 2287 - protein, 313 aa, Nocardia farcinica IFM 10152
  Intein 72
CFPAGTVVSGPSAEAATRRWFEGELVVFTTASGKQLSLTGNHPVLTRGGWVPANLLNEGDEVVRSTRPQGATPLVVPDHHQVPALIEDVWGSFAVNGLHRVPAAPEDFHGDGQRGEVDIVGPDRTLWCGHDAAIAQQREQQFFTRRTESSGLLVAESVAQLVDLWQAPHSGSSIGRSGLPFALIGGHGGGPVERGLTVAAGGYPGLHEALADYRPGDAVLPPQGVFAGSSEIGGDDCVIGKVDSTRWDAPALPFLVEGRAGYASRGKELFDRLTGQVELDRIVILRRVQWSGHVFSLTSSEGWHTGNSLIVSN

SEQ ID NO: 2288 - protein, 409 aa, Nocardia farcinica IFM 10152; identical to SEQ ID NO: 251
  Intein 73

SEQ ID NO: 2289 - protein, 339 aa, Natronomonas pharaonis DSM 2160; identical to SEQ ID NO: 255
  Intein 74

SEQ ID NO: 2290 - protein, 492 aa, Natronomonas pharaonis DSM 2160; identical to SEQ ID NO: 258
  Intein 75

SEQ ID NO: 2291 - protein, 322 aa, Natronomonas pharaonis DSM 2160; identical to SEQ ID NO: 259
  Intein 76

SEQ ID NO: 2292 - protein, 352 aa, Nocardioides species JS614; identical to SEQ ID NO: 261
  Intein 77

SEQ ID NO: 2293 - protein, 407 aa, Nostoc species PCC7120, (Anabaena sp. PCC7120); identical to SEQ ID NO: 263
  Intein 78

SEQ ID NO: 2294 - protein, 164 aa, Pyrococcus abyssi; identical to SEQ ID NO: 264
  Intein 79

SEQ ID NO: 2295 - protein, 268 aa, Pyrococcus abyssi; identical to SEQ ID NO: 265
  Intein 80

SEQ ID NO: 2296 - protein, 394 aa, Pyrococcus abyssi; identical to SEQ ID NO: 266
  Intein 81

SEQ ID NO: 2297 - protein, 196 aa, Pyrococcus abyssi; identical to SEQ ID NO: 267
  Intein 82

SEQ ID NO: 2298 - protein, 333 aa, Pyrococcus abyssi; identical to SEQ ID NO: 268
  Intein 83

SEQ ID NO: 2299 - protein, 455 aa, Pyrococcus abyssi; identical to SEQ ID NO: 269
  Intein 84

SEQ ID NO: 2300 - protein, 185 aa, Pyrococcus abyssi; identical to SEQ ID NO: 270
  Intein 85

SEQ ID NO: 2301 - protein, 499 aa, Pyrococcus abyssi; identical to SEQ ID NO: 271
  Intein 86

SEQ ID NO: 2302 - protein, 608 aa, Pyrococcus abyssi; identical to SEQ ID NO: 272
  Intein 87

SEQ ID NO: 2303 - protein, 399 aa, Pyrococcus abyssi; identical to SEQ ID NO: 273
  Intein 88

SEQ ID NO: 2304 - protein, 438 aa, Pyrococcus abyssi; identical to SEQ ID NO: 274
  Intein 89

SEQ ID NO: 2305 - protein, 382 aa, Pyrococcus abyssi; identical to SEQ ID NO: 275
  Intein 90

SEQ ID NO: 2306 - protein, 436 aa, Pyrococcus abyssi; identical to SEQ ID NO: 276
  Intein 91

SEQ ID NO: 2307 - protein, 429 aa, Pyrococcus abyssi; identical to SEQ ID NO: 277
  Intein 92

SEQ ID NO: 2308 - protein, 649 aa, Podospora anserina
  Intein 93
CLSPDTMVRTTNGDKPIRDIAVGDQLFDHEDRPVQCLAAEAIQTSRMMKVTYTGYNSVSKSSFTCTPDHIMTLVAYGVKPFRHSNSNRVTWWTRCDRTELGADAVEIKWDAAMHDLYTEYREQLGRRPTDAEVRKYLKAITSTRVVPDSEDDDSQRVEETYQSPVLIKLLAKLKAMDVDVDGEDESVVLMLLQQHMEDYLEHMIPEPEDISDEDNDDLIIDLDTNRKRKIGTISTLSSRISDKTFRQSPSIKSSPVNSQQQSQNEASQSTVPTYASVLTEDDHREMFAPVRSKLAVRDPKCKCQNLSCKGLRRVSTVFETSEQADLALELLSGDHYRVVDPCAVQDMEVFTMTLEEYQATCTAPMTQHKSKLRLYRSPLRFQPYQGSVSPVPIDPFWFGFWLGNGTKNNSEITSTDPEVEVYTQALVDRLNRDSIPPGKAPLKVSKYKIDIGTKHVYKGEEIKTTKVAHRLRVMSTVSNLDKTHWNPVHDGLRELGLLGDKSGGIPDCYMNADENTRLAVLAGLIESDGWLSHGLNCYGFGQYTYELKKLVEDARKLALSCGIQCNPIFERKNGKDRPEPGWFFYMGRGVEKFQPHLLLPRKRMTIPFTTSKNRDVRPFDVEDAGDGEFRLIEVSGELFQLADRTVVHN

SEQ ID NO: 2309 - protein, 573 aa, Paracoccidioides brasiliensis Pb18
  Intein 94
CLAKGTLLLRYDGTKVEVENVREGDLLLGPDGGPRRAFNIVGGRDRLYRIKMEGGKEDLVVTPNHILVLHREKRDGVDKVYARPFALPLLQEDATDDGEDLSEISAIEHFDTMEITAADFASLDPNERKLYRLFTSPGYELNGRPVPIDPYFLGLWLGDRSRTKSSIYTNHEEEIREFIADHAAELDLQLVSYVSNRPSLAAMKNGNQLPLRHQARQTIRKQRIAAKSITQPGGARSSSYPATNGGLSSNTVTSLHSRERHPLSESSAAATMNLLPRSTSVSTSVAAQPKSSMSTFITDAILPSESSNISVISDSGIEISKSSKMLSEEEADLDLFDIDSEDEEIEDLDEKKNVSNVDEFPKRRRIHYLRTGCRTYGELCPGEEDQILEDIVGRPDGTTSVESLLLALEALGLHTCGTNDSGSDKKRIPSVYMKNSRAVRLALLAGLIDSGGWYVDSENTFGFSQTEDSNSTLIWDVVTLARSLGFSVSTKRRMTHKPTRTQHKAQEFAQISGNVAEIPSLLARERGVERPISQAHSFKIKDIQLETEATEWAGFRVDQDQLYLRHDFLVLHN

SEQ ID NO: 2310 - protein, 161 aa, Penicillium chrysogenum
  Intein 95
CLAKGTRLLRYDGTEINVEDVREGDQLLGPDGEPRRAFNIVSGIDRLYRVKIGGEKEDLVVTPNHILVFYREGPSDGPENAERQTVEITAAEFATLSTEERSLYSAFTSPAVEKGAEGSAAQMHSFKVEDISLESEKTEWAGFRVDKDQLYLRHDYLVLHN

SEQ ID NO: 2311 - protein, 367 aa, Pyrococcus furiosus
  Intein 96
CVAPDSLVVVNDKVQEIGKLTEEWGREVGFLEYSSGIFYAPYLGRGISLDLVTGKVKPSVVSKVWKLKSPEELVTIKTITGKEITVTPETKLLTFNGTLEWKEAGKIKPGDYVLTVKKLHINGKQETLDEKLAYKRGLSLSDPLEFFSSSERTISAYLKGIFDKVGRLVGDTAVIKVDKDMAKRLQILLLRLGIVSSVDETGKVIIGREYIQKILGYNVSVVTHEVELFREFIAEISKFYGTSEEDVYSSLHEKGELDIGTVPVELPEGLREEINRERATYSELVKIAQEIKDEKLYNKLAWILSEVTEEEAKIKEKVNTLKVILSSDLIPERVESVKIIKSPYPYVYDLTVEGSHSFIANGFVVHN

SEQ ID NO: 2312 - protein, 387 aa, Pyrococcus furiosus
  Intein 97
CLLPEEKVVLPEIGLVTLRELFELANEVVVKDEEKEVRKLGKMLTGVDERGNVKLLNALYVWRVAHKGEMIRVKVNGWYSVTVTPEHPFLTNRGWVKAGELKEGDYIAIPRRVYGNEDLMKFSKIAKELGIKGDEKEFYLAGASLDIPIKVLFLAPSKLVSAFLRGYFDAKGVVRENYIEVPLFEDLPLLLLRFGIVSRIEKSTLKISGKRNLELFRKHVGFTDSEKAKALDELISKAKESERYPILEELRRLGLLFGFTRNELRIEENPTYEVLMEILERIERGSPNLAEKIAVLEGRIKEENYLRILEEEGLIENGKLTELGKELLEVWRNREFDSKDVDYVRNIVENLVFLPVEKVERIEYEGYVYDVTTETHNFVANGILVHN

SEQ ID NO: 2313 - protein, 522 aa, Pyrococcus furiosus; identical to SEQ ID NO: 278
  Intein 98

SEQ ID NO: 2314 - protein, 401 aa, Pyrococcus furiosus
  Intein 99
CFSGEEVILIEKDGEKKVFKLREFVDGLLKEASGEGMDGSIRVVYKDLQGENIKILTKDGLVKLLYVNRREGKQKLRKIVNLEKDYWLALTPEHKVYTIKGLKEAGEITKDDEIIRVPLTILDGFDVAEKSIREELERLSLLPLNSEDSRLEKIAGIMGALFGSGGIDENLNTLSFVSSEKKTIEQFVKALSELFGEFDYKIEEKENSIIFRTCDKRIVTFFATLGAPVGDKSKVKLKLPWWVKLKPSLFLAFMDGLYSSNRNDKEILEITQLTDNVETFFEEISWYLSFFGIKAEAEEDEEKDKYRARLTLSSSIDNMLNFIEFIPISFSPAKREKFFKEIEKYLEYSIPEKTEDLKKRVKRVKKGERRNFLESWEEVEVTYNVTTETGNLLANGLFVKN

SEQ ID NO: 2315 - protein, 525 aa, Pyrococcus furiosus
  Intein 100
CLTGDTKVIANGQLFELGELVEKLSGGRFGPTPVKGLKVLGIDEDGKLREFEVQYVYKDRTDRLIKIKTQLGRELKVTPYHPLLVNRENGEIKWIKAEELKPGDKLAIPSFLPLITGENPLAEWLGYFMGSGYAYPSNSVITFTNEDPLIRQRFMELTEKLFPDAKIRERIHADGTPEVYVVSRKAWSLVNSISLTLIPREGWKGIRSFLRAYSDCNGRIESDAIVLSTDNNDMAQQIAYALASFGIIAKMDGEDVIISGSDNIERFLNEIGFSTQSKLKEAQKLIRKTNVRSDGLKINYELISYVKDRLRLNVNDKRNLSYRNAKELSWELMKEIYYRLEELERLKKVLSEPILIDWNEVAKKSDEVIEKAKIRAEKLLEYIKGERKPSFKEYIEIAKVLGINVERTIEAMKIFAKRYSSYAEIGRKLGTWNFNVKTILESDTVDNVEILEKIRKIELELIEEILSDGKLKEGIAYLIFLFQNELYWDEITEVKELRGDFIIYDLHVPGYHNFIAGNMPTVVHN

SEQ ID NO: 2316 - protein, 373 aa, Pyrococcus furiosus
  Intein 101
CLHPDTLILTSQGVRKIKELSREGEVFALDFNLKLSKAKYRLLERDADEQMYKVTLLDGTELYLTADHPVLVYREGNLAFVPADKLRETDHVVLVLNKSARDNYGFLDLLLEITDSQEDYAILENGETLSLHSLKMLVERGEIKDIAVVGFSHNNFGKVMLRDELWYLIGYLAGKGGEIKGNGVVISSRTKEIVGLTKSLNIDLIETEEGIVLSNKSFVRLLHLIHYTPRVPEVYGIINNTEWLKAFLAGYYDATLLEGLTLEALYKIKVYLQLLGIRAKIEDNKLKVHLEDLQRFRELLGKFSRRKLYVETSQVPVFTDFDERSYDFPRILGGDIYIIGIKSIEKFHYKGKVYDLVVENYHNFIANGIAVHN

SEQ ID NO: 2317 - protein, 260 aa, Pyrococcus horikoshii OT3; identical to SEQ ID NO: 283
  Intein 102

SEQ ID NO: 2318 - protein, 444 aa, Pyrococcus horikoshii OT3; identical to SEQ ID NO: 284
  Intein 103

SEQ ID NO: 2319 - protein, 475 aa, Pyrococcus horikoshii OT3; identical to SEQ ID NO: 286
  Intein 104

SEQ ID NO: 2320 - protein, 474 aa, Pyrococcus horikoshii OT3; identical to SEQ ID NO: 287
  Intein 105

SEQ ID NO: 2321 - protein, 460 aa, Pyrococcus horikoshii OT3; identical to SEQ ID NO: 288
  Intein 106

SEQ ID NO: 2322 - protein, 172 aa, Pyrococcus horikoshii OT3; identical to SEQ ID NO: 291
  Intein 107

SEQ ID NO: 2323 - protein, 410 aa, Pyrococcus horikoshii OT3; identical to SEQ ID NO: 290
  Intein 108

SEQ ID NO: 2324 - protein, 390 aa, Pyrococcus horikoshii OT3
  Intein 109
CLAPGTRVLTEHGYWLKIEEMPEKFKLQRLRVYNIEEGHNDFSKVVFVAEREVGSEEKAIRIVTESGKVIEGSEDHPVLTPEGYVYLRNVKEGDYILVYPFEGVPYEEKKGVILDESAFEGEDPQVVKFLRERNLIPLQWKDPKVGILARILGFALANGYISENDNLTFHGKEEVLREVRKDLEELGIEAIVAEEDKLKVTSREFAFLLEKLGMAHDSIPEWIIEGPLWIKRNFLAGLFGANGSIVEFKGDVPLPITLTHSRELLNDVSRILEGFKVRAKIKMGKNGSYQLVIEDEDSIRNFLGRINYEYDPEKKARGLIAYAYLKFKELMKGNLMTFEEFARDRGYEGGFVAEKVIEVKSVKPEYDKFYDIGVYHSAHNFIANGIVVHN

SEQ ID NO: 2325 - protein, 376 aa, Pyrococcus horikoshii OT3; identical to SEQ ID NO: 294
  Intein 110

SEQ ID NO: 2326 - protein, 374 aa, Polaromonas naphthalenivorans CJ2; identical to SEQ ID NO: 296
  Intein 111

SEQ ID NO: 2327 - protein, 456 aa, Phaeosphaeria nodorum SN15
  Intein 112
CLSADHEVLTSTGWKALPAIKDADQVMTLDLQTGTQQWNSVQATTRFAREGSLYRLKSDDMDAVCNESHRWYLNTKDQPTTYTAFTTQQMLDNQLVALRNSSGKATDQWNHESGTTTHTNHNIPTVGHNGNVMFSWPDCPWLPREFVADEACNLDWCRFIGLVMGDGSIDHVTDAQGQEHYSIQIHQRAGNPASNANTEDVLERLAAKLPNFVVHPSCVSGAEEKHTWTINHRDMYHFFLPMMRGPQSYDPLDNAMCRTYQAPDYQALSRSDNEPIIPVPADWKTGNWWHLRRWINYPWLFSLAQSQARAMIKGMAAANGDWSLSLKARLDTGDSGVVRVFSNSIPLMHDMSVLGLLADTRVNIGVDHKKGQMQLQVPVTMPALLAWCISFSFANSDLAVAAPKPEAYDNPRHDGFVYCLTVPNGNFLARRTVEYSDNDKIQEVIDAAQKPFFTGN

SEQ ID NO: 2328 - protein, 380 aa, Polaromonas species JS666; identical to SEQ ID NO: 297
  Intein 113

SEQ ID NO: 2329 - protein, 366 aa, Pseudomonas aeruginosa phage phiEL; identical to SEQ ID NO: 300
  Intein 114

SEQ ID NO: 2330 - protein, 449 aa, Pichia stipitis CBS 6054, taxon:322104; identical to SEQ ID NO: 304
  Intein 115

SEQ ID NO: 2331 - protein, 428 aa, Rhodothermus marinus
  Intein 116
CLAGDTLITLADGRRVPIRELVSQQNFSVWALNPQTYRLERARVSRAFCTGIKPVYRLTTRLGRSIRATANHRFLTPQGWKRVDELQPGDYLALPRRIPTASTPTLTEAELALLGHLIGDGCTLPHHVIQYTSRDADLATLVAHLATKVFGSKVTPQIRKELRWYQVYLRAARPLAPGKRNPISDWLRDLGIFGLRSYEKKVPALLFCQTSEAIATFLRHLWATDGCIQMRRGKKPYPAVYYATSSYQLARDVQSLLLRLGINARLKTVAQGEKGRVQYHVKVSGREDLLRFVEKIGAVGARQRAALASVYDYLSVRTGNPNRDIIPVALWYELVREAMYQRGISHRQLHANLGMAYGGMTLFRQNLSRARALRLAEAAACPELRQLAQSDVYWDPIVSIEPDGVEEVFDLTVPGPHNFVANDIIAHN

SEQ ID NO: 2332 - protein, 372 aa, Roseovarius species 217; identical to SEQ ID NO: 308
  Intein 117

SEQ ID NO: 2333 - protein, 348 aa, Salmonella phage SETP3; identical to SEQ ID NO: 311
  Intein 118

SEQ ID NO: 2334 - protein, 338 aa, Streptomyces avermitilis MA-4680; identical to SEQ ID NO: 313
  Intein 119

SEQ ID NO: 2335 - protein, 499 aa, Saccharomyces exiguus, strain="IFO1128"; identical to SEQ ID NO: 322
  Intein 120

SEQ ID NO: 2336 - protein, 480 aa, Staphylothermus marinus F1; identical to SEQ ID NO: 325
  Intein 121

SEQ ID NO: 2337 - protein, 350 aa, Staphylothermus marinus F1; identical to SEQ ID NO: 326
  Intein 122

SEQ ID NO: 2338 - protein, 344 aa, Salinibacter ruber DSM 13855; identical to SEQ ID NO: 329
  Intein 123

SEQ ID NO: 2339 - protein, 358 aa, Salinibacter ruber DSM 13855; identical to SEQ ID NO: 330
  Intein 124

SEQ ID NO: 2340 - protein, 429 aa, Synechocystis species, strain PCC6803
  Intein 125
CISGDSLISLASTGKRVSIKDLLDEKDFEIWAINEQTMKLESAKVSRVFCTGKKLVYILKTRLGRTIKATANHRFLTIDGWKRLDELSLKEHIALPRKLESSSLQLMSDEELGLLGHLIGDGCTLPRHAIQYTSNKIELAEKVVELAKAVFGDQINPRISQERQWYQVYIPASYRLTHNKKNPITKWLENLDVFGLRSYEKFVPNQVFEQPQRAIAIFLRHLWSTDGCVKLIVEKSSRPVAYYATSSEKLAKDVQSLLLKLGINARLSKISQNGKGRDNYHVTITGQADLQIFVDQIGAVDKDKQASVEEIKTHIAQHQANTNRDVIPKQIWKTYVLPQIQIKGITTRDLQMRLGNAYCGTALYKHNLSRERAAKIATITQSPEIEKLSQSDIYWDSIVSITETGVEEVFDLTVPGPHNFVANDIIVHN

SEQ ID NO: 2341 - protein, 435 aa, Synechocystis species, strain PCC6803; identical to SEQ ID NO: 332
  Intein 126

SEQ ID NO: 2342 - protein, 420 aa, Staphylococcus phage Twort; identical to SEQ ID NO: 337
  Intein 127

SEQ ID NO: 2343 - protein, 360 aa, Thermococcus aggregans; identical to SEQ ID NO: 341
  Intein 128

SEQ ID NO: 2344 - protein, 536 aa, Thermococcus aggregans
  Intein 129
SILPNEWLPIIENGEVKFVKIGEFIDRYMEEQKDKVRTVDNTEVLEVDNIFAFSLNKESKKSEIKKVKALIRHKYKGEAYEVELNSGRKIHITRGHSLFTIRNGKIKEIWGEEVKVGDLIIVPKKVKLNEKEAVINIPELISKLPDEDTADVVMTTPVKGRKNFFKGMLRTLKWIFGEESKRIRTFNRYLFHLEELGFVKLLPRGYEVTDWEGLKRYRQLYEKLVKNLRYNGNKREYLVRFNDIKDSVSCFPRKELEEWKIGTKGFRKCILKVDEDFGKFLGYYVSEGYAGAQKNKTGGMSYSVKLYNENPNVLKDMKNIAEKFFGKVRVGKNCVDIPKKMAYLLAKSLCGVTAENKRIPSIIFDSSEPVRWAFLRAYFVGDGDIHPSKRLRLSTKSELLANQLVFLLNSLGVSSIKIGFDSGVYRVYINEDLPFLQTSRQKNTYYPNLIPKEVLEEIFGRKFQKNITFEKFKELADSGKLDKRKVKLLDFLLNGDIVLDRVKNVEKREYEGYVYDLSVEDNENFLVGFGLLYAHN

SEQ ID NO: 2345 - protein, 1986 aa, Trichodesmium erythraeum IMS101; identical to SEQ ID NO: 343
  Intein 130

SEQ ID NO: 2346 - protein, 428 aa, Trichodesmium erythraeum IMS101
  Intein 131
CLSGSTKVIDAATGNLFSLKEIAAQPEYWLSRKVFSLDLKSQQVVQQPITEIHPNGVRDVWQITTRTNRKVCATDDHLFYTVLGWKPLKDFSVGDRLGLPNKIPINYRSQISDSKVKFTAYLIGEGYLYTNSFSCSYFCNSDGELIADFYGCAEELFGSSAPIEKQLHLGNKSVIYVRIGLISGLKNWVDSYLQCANSRVQEIPNWIFSLSQSQLQLFLGILWSTSGIFDETIGYTYYSSNSEVLVRQVQHLFLRLGIVSLFNVNKVKGQGELDVSYVVEVRGREDMLKFYKLIKPYLSSYKQGLCESCYLVIKYQQSYQFKYFLTPDFFDLIVKAKKASSMTRALGVCGGEISSVWNFQNTSNRSLSFDKFNNFSTVLADEELTAIANSDVFWDEIISIEYIGKEEVFDLTIPETHNFIANDFIVHN

SEQ ID NO: 2347 - protein, 137 aa, Trichodesmium erythraeum IMS101
  Intein 132
CLTYETEIMTVEYGPLPIGKIVEYRIECTVYTVDKNGYIYTQPIAQWHNRGMQEVYEYSLEDGTVIRATPEHKFMTEDGQMLPIDEIFERNLDLKCLGTLEMVKIVSRKLAKTENVYDIGVTKDHNFVLANGLIASN

SEQ ID NO: 2348 - protein, 430 aa, Trichodesmium erythraeum IMS101; identical to SEQ ID NO: 347
  Intein 133

SEQ ID NO: 2349 - protein, 323 aa, Trichodesmium erythraeum IMS101
  Intein 134
CVSGDTLLITRDSIHKIKDVVGQKIEIWNGKNWSQVIPLKTGKDRKLYRVRFGDGSYLDVTEYHRFFVKDRFGKKYEEVQTKDLLTHSKYALDVEPFIIDYHDGDSINLSYAYTLGAALGNGTIDQNSNGKIRVYSHKAELIFAGNKSLERQYNYLPSFVDVIDLGFSGELLRRLQTEPDALNTIASWNKSAILAFIAGLADTDGSETKGNGIKISVSDYERAKRLQLLLTKCGIRASVNLMASRGCTTNLGERNQDLYYLQITDCREIPCQRLDTTKVCEAKFQGKYQTIQNVEELPGLHDTYCFEEPEFHKGVFGNALTGN

SEQ ID NO: 2350 - protein, 381 aa, Trichodesmium erythraeum IMS101
  Intein 135
CLDKTALRIFNQGLLYADEVVTPGSGETVGLGLTVRNGIGASTAIANQPMELVEIKLANGRKLRMTPNHRMSVKGKWIHACNLKPGMLLDYSIGEYQKREDTLLIPLQLEDYTEVNNSQTLGHNGGVLTKKIMTPASMTSDLAYFLGCLFGNGCIVQNKYQVCFYHSRLDVLYGLQEKGKKLFGIKGSLNDFANGRFELCFASRQLFYWLHLNQLVKTQKSEDLERIPLSLRRSSRVTLLSFFCGLIDTNGYVPQDGKLSIASASSDFIHNLQQIGESIGLCFSIYQNTKGENLQNQHNNTWGLCLSPMLSNVDALDYLNHNSIKCQEGPVVISKCVLNYSPYKIESVNIGAVCDYSYDFAIEGINDNDSWYWQGALKSHN

SEQ ID NO: 2351 - protein, 469 aa, Trichodesmium erythraeum IMS101; identical to SEQ ID NO: 348
  Intein 136

SEQ ID NO: 2352 - protein, 389 aa, Thermococcus fumicolans; identical to SEQ ID NO: 351
  Intein 137

SEQ ID NO: 2353 - protein, 422 aa, Thermobifida fusca YX; identical to SEQ ID NO: 353
  Intein 138

SEQ ID NO: 2354 - protein, 357 aa, Thermobifida fusca YX; identical to SEQ ID NO: 354
  Intein 139

SEQ ID NO: 2355 - protein, 537 aa, Thermococcus hydrothermalis; identical to SEQ ID NO: 356
  Intein 140

SEQ ID NO: 2356 - protein, 335 aa, Thermococcus kodakaraensis KOD1; identical to SEQ ID NO: 359
  Intein 141

SEQ ID NO: 2357 - protein, 403 aa, Thermococcus kodakaraensis KOD1
  Intein 142
CMHPDTYVVTKSGAKKVSELTEGDEVLTHTGTFKKVIQPLRREHKGRLLVIKAYGTVPVKITPEHMVWVVKQIRHKSHYSDGRQVIWWEFEGPEWMTAQELKERLESETDPKVSYMLLQPIPEPSVDADKIPLRKEVYVVNQHGKTDKLHPSVKRTPEYLPLNFETARLIGLWIAEGSTSKNGVIKFDISSNEEDLTEFITGTIRKYFPHAKIVVKDHERNRRTVRFCNKRFAEWLRENIGHGADNKSIPPLLLLNKNREVRLGLLRGLIEGDGYVRRESQRRANYISYSTVSPSLAYQLQLLVASLGYTSSIHRSIRTEGIGKTRKPIYDVKVSGKSYYSLLEELGFEVPQRGNRTYNVNRTWKNYLLLKVRSIEEEEYEGDVYNLEVEGDESGSVGFIVHN

SEQ ID NO: 2358 - protein, 546 aa, Thermococcus kodakaraensis KOD1; identical to SEQ ID NO: 360
  Intein 143

SEQ ID NO: 2359 - protein, 525 aa, Thermococcus kodakaraensis KOD1; identical to SEQ ID NO: 362
  Intein 144

SEQ ID NO: 2360 - protein, 536 aa, Thermococcus kodakaraensis KOD1; identical to SEQ ID NO: 364
  Intein 145

SEQ ID NO: 2361 - protein, 482 aa, Thermococcus kodakaraensis KOD1; identical to SEQ ID NO: 367
  Intein 146

SEQ ID NO: 2362 - protein, 489 aa, Thermococcus kodakaraensis KOD1; identical to SEQ ID NO: 366
  Intein 147

SEQ ID NO: 2363 - protein, 454 aa, Thermococcus kodakaraensis KOD1; identical to SEQ ID NO: 368
  Intein 148

SEQ ID NO: 2364 - protein, 511 aa, Thermococcus kodakaraensis KOD1; identical to SEQ ID NO: 370
  Intein 149

SEQ ID NO: 2365 - protein, 423 aa, Thermus thermophilus HB27; identical to SEQ ID NO: 379
  Intein 150

SEQ ID NO: 2366 - protein, 438 aa, Thermus thermophilus HB27; identical to SEQ ID NO: 380
  Intein 151

SEQ ID NO: 2367 - protein, 407 aa, Thermus thermophilus HB27; identical to SEQ ID NO: 381
  Intein 152

SEQ ID NO: 2368 - protein, 186 aa, Thermoplasma volcanium GSS1
  Intein 153
CVSGETPVYLADGKTIKIKDLYSSERKKEDNIVEAGSGEEIIHLKDPIQIYSYVDGTIVRSRSRLLYKGKSSYLVRIETIGGRSVSVTPVHKLFVLTEKGIEEVMASNLKVGDMIAAVAESESEARDCGMSEECVMEAEVYTSLEATFDRVKSIAYEKGDFDVYDLSVPEYGRNFIGGEGLLVLHN

SEQ ID NO: 2369 - protein, 152 aa, Thermosynechococcus vulcanus
  Intein 154
CLSGETAVMTVEYGAIPIRRLVQERLICQVYSLDPQGHLYTQPIAQWHFQGFRPVYAYQLEDGSTICATPDHRFMTTSGQMLPIEQIFREGLELWQVAIAPPGALAQGLKPAVQMSCMKIVGRRLVGWQAVYDIGLAGDHNFLLANGAIAAN

SEQ ID NO: 2370 - protein, 307 aa, uncultured archaeon GZfos9C4; identical to SEQ ID NO: 387
  Intein 155

SEQ ID NO: 2371 - protein, 455 aa, Zygosaccharomyces bailii, strain CBS 685
  Intein 156
CFAKGTEVMMHDGSVKAIETIEAGEAVMGTDGQPRKVVGLPRGREVMYKVSQKTAHRVHKTDETRAAPVALFEYNCNATHKLVVRTPRSCRSITRKMQGVDYNEVIFFDLKKKKLEDGREIEIVKEVSRSYPAAEGAEKAAQMVKDYYDAARGKEFFEWTIEARDVELGAHVRKATHQVYAPVLYESDFFFHYVKNSKFALRSEASTALAYLLGLWVGDGLSDRAVLSVDSEDSSLLERITGYADILDLSAEYKDREIPKRAKTVCLYPKTIRGNDIRRNLNTDNPVWNAIVDLGYLKDGVKNVPSYLFSDSICHREVFLAGLIDSDGHVRGDDGLSVTIKTIHKTVMEGTVAVARSLGLIVSVNTEEAKIDKNDVNHRFVYAIYISGGDALLSVLAHCAAAKKFRAPPSNEVVRGLKKVFFEMEELKEDDYYGITLAKESDHQFLLANQLVVHN

SEQ ID NO: 2372 - protein, 450 aa, Zygosaccharomyces rouxii, strain CBS 688; identical to SEQ ID NO: 392
  Intein 157

SEQ ID NO: 2373 - protein, 683 aa, Artificial Sequence
  Synthetic Construct, AS-1 intein modified protein
MQTSITLTSNASGTFDGYYYELWKDTGNTTMTVYTQGRFSCQWSNINNALFRTGKKYNQNWQSLGTIRITYSATYNPNGNSYLCIYGWSTNPLVEFYIVESWGNWRPPGATSLGQVTIDGGTYDIYRTTRVNQPCFIEGTEVLTKRGFVDFRELREDDLVAQYDIETGEISWTKPYAYVERDYEGSMYRLKHPKSNWEVVATEGHEFIVRNLKTGKERKEPIEKVKLHPYSAIPVAGRYTGEVEEYDLWELVSGKGITLKTRSAVKNKLTPIEKLLIVLQADGTIDSKRNGKFTGFQQLKFFFSKYRKINEFEKILNECAPYGIKWKKYERQDGIAYTVYYPNDLPIKPTKFFDEWVRLDEITEEWIREFVEELVKWDGHIPKDRNKKKVYYYSTKEKRNKDFVQALCALGGMRTVVSRERNPKAKNPVYRIWIYLEDDYINTQTMVKEEFYYKGKVYCVSVPKGNIVVRYKDSVCIAGNSIVGTATFDQYWSVRTSKRTSGTVTVTDHFRAWANRGLNLGTIDQITLCVEGYQSSGSANITQNTFSQGSSSGSSGGSSGSTTTTRIECENMSLSGPYVSRITNPFNGIALYANGDTARATVNFPASRNYNFRLRGCGNNNNLARVDLRIDGRTVGTFYYQGTYPWEAPIDNVYVSAGSHTVEITVTADNGTWDVYADYLVIQ

SEQ ID NO: 2374 - protein, 490 aa, Artificial Sequence
  Synthetic Construct, AS-2 intein modified protein
MQTSITLTSNASGTFDGYYYELWKDTGNTTMTVYTQGRFSCQWSNINNALFRTGKKYNQNWQSLGTIRITYSATYNPNGNSYLCIYGWSTNPLVEFYIVESWGNWRPPGATSLGQVTIDGGTYDIYRTTRVNQPCQPYSAPVSTPDGPIPIGKLVDANAVGEKVFDASGVTRIVATTCNGRKPVLRIRTSGGHVLDVTPDHLVWQVVDQTAGRFVPAGQLRVGDRLEWHDRANSDAMVAAFTADSAAAAQPGQIVDILAIDELGVMPVYDIQTESGEYLSDGIRVHNSIVGTATFDQYWSVRTSKRTSGTVTVTDHFRAWANRGLNLGTIDQITLCVEGYQSSGSANITQNTFSQGSSSGSSGGSSGSTTTTRIECENMSLSGPYVSRITNPFNGIALYANGDTARATVNFPASRNYNFRLRGCGNNNNLARVDLRIDGRTVGTFYYQGTYPWEAPIDNVYVSAGSHTVEITVTADNGTWDVYADYLVIQ

SEQ ID NO: 2375 - protein, 755 aa, Artificial Sequence
  Synthetic Construct, AS-3 intein modified protein
MQTSITLTSNASGTFDGYYYELWKDTGNTTMTVYTQGRFSCQWSNINNALFRTGKKYNQNWQSLGTIRITYSATYNPNGNSYLCIYGWSTNPLVEFYIVESWGNWRPPGATSLGQVTIDGGTYDIYRTTRVNQPCVTGDTRVLLADGQRVPIRDLVGQTPEVISVNAEGRLEPAKTDLVWSVGVRPLLQVRLASGRTIRCTPEHRLRGLWDWKEARDIRVGDRLGIARELPAPKVTKRWAEHELVLLAHLVGDGSYIKGQPLRYTTASEANSEAVSRAAEAMGSTVTRHPGRGQWHQLVISGNGNRWHPQGVGKWLKQLGVFGQRSREKHLPQEVFQLDNDQLALFLRHLWATDGSITQGSAGRPRIYFSTASRHLIQDVAALLLRFGIVGRTKHITHGDGEGWFTLDISGAVQQQRYLEKIGAFGHQAHNARRALQHLRGLVENTNVDTLPEEVFNYIRERMREEGITHRQMAALRGTAYGGSAHFTFSPSRETLLSYADILNDQRLRMLANQHVFWDRVVSVEPAGEEEVFDLTVPGNACWLADGIVSHNSIVGTATFDQYWSVRTSKRTSGTVTVTDHFRAWANRGLNLGTIDQITLCVEGYQSSGSANITQNTFSQGSSSGSSGGSSGSTTTTRIECENMSLSGPYVSRITNPFNGIALYANGDTARATVNFPASRNYNFRLRGCGNNNNLARVDLRIDGRTVGTFYYQGTYPWEAPIDNVYVSAGSHTVEITVTADNGTWDVYADYLVIQ

SEQ ID NO: 2376 - protein, 942 aa, Artificial Sequence
  Synthetic Construct, AS-4 intein modified protein
MQTSITLTSNASGTFDGYYYELWKDTGNTTMTVYTQGRFSCQWSNINNALFRTGKKYNQNWQSLGTIRITYSATYNPNGNSYLCIYGWSTNPLVEFYIVESWGNWRPPGATSLGQVTIDGGTYDIYRTTRVNQPCLANGTQLLRYDGTKVNVEDVKEGDLLLGPDGGPRRAFNVVSGKDRLYRIKIDGDKEDLVVTANHILVLHRAKAMNTSVCFDRSKEQQGGAGEQLDISEVSAAERYDTVEMTAAEFAALHPQERSWYRAIRCPGFELPEQDVPVNPYFLGLWLGDESRNQSAIYSNHEEALREFLVSHAAELDMHLVYHGQSAYSTVCNKDRPTNKRIGPANQTQTVRPTIRQTRRTIRQQRLAAEHAAAEYTTQRETASLTPLLESPTSDKHGLLSSVETPGRLSDSVTTELPMSRSASAMRSIRTASGLSEFNDVTNVSASMPDIQNSGIKNQGRIAKVTRQQDSKGEVDFRQQYSQAIKDDLELLETDIEDDVASSDEIEDVCVVGSENELIGSEKQDQSGRRRQIHRLRTGHRGYGDLSDDEQEQLLDSVVERYAGDSRLNTLQQELSKMGILNPETGPINDKKRIPQVFMQNSRSVRLSVLAGLLDSDGWYIYPENMFGFAQSELCHKELFWDVVTLARSLGFGVWTKKRMMPDPTGKRMSPMLVAQISGDLAEIPCVLARKKAMPRLIPQSHSFAIKDISLESEATEWAGFRVDKDQLYLRHDYVVLHNSIVGTATFDQYWSVRTSKRTSGTVTVTDHFRAWANRGLNLGTIDQITLCVEGYQSSGSANITQNTFSQGSSSGSSGGSSGSTTTTRIECENMSLSGPYVSRITNPFNGIALYANGDTARATVNFPASRNYNFRLRGCGNNNNLARVDLRIDGRTVGTFYYQGTYPWEAPIDNVYVSAGSHTVEITVTADNGTWDVYADYLVIQ

SEQ ID NO: 2377 - protein, 805 aa, Artificial Sequence
  Synthetic Construct, AS-5 intein modified protein
MQTSITLTSNASGTFDGYYYELWKDTGNTTMTVYTQGRFSCQWSNINNALFRTGKKYNQNWQSLGTIRITYSATYNPNGNSYLCIYGWSTNPLVEFYIVESWGNWRPPGATSLGQVTIDGGTYDIYRTTRVNQPSLPPWEPIVVRRGDEVRVTSIGEFVDSFLEGEGGLDIGGLGYYTLSLDTRTLKPVWRRIRGVIKHRIRGRLLRVKASKGRSIDLTGSHSIYRISRGGGLEVVGSSDLRPGDSLVTPASVELPESAPSSINAARELWSRGVEGIFVVGLPGEAAGYRGVERSRGYDGGHAIPLETLVERYGDSVWSLVSGAKLAVSRGAAGDHPVPATIPLDTGFYLLLGFIVSAGSVDVEGGHVTVTLGPGREGYVGDVVEAVNSTAPGAGVRISSGARGMEVTIRSRVLSELLARVFGAGPGPNRDIPSIVFRAPKPMKRVFLKGLYAGGGVFDRSSGSLIYATDSRSLLNGLALLLLNVGAGGYRIDSGDSGRALALIVENAGRLDAIGEVLEHLGFHGGREAVQGVGALERATAGLAGQATVAVQRPATRGGPGVDVAGVTGLEHLEASTEFVYDLSVEGDENFFAGLGWILVHNSIVGTATFDQYWSVRTSKRTSGTVTVTDHFRAWANRGLNLGTIDQITLCVEGYQSSGSANITQNTFSQGSSSGSSGGSSGSTTTTRIECENMSLSGPYVSRITNPFNGIALYANGDTARATVNFPASRNYNFRLRGCGNNNNLARVDLRIDGRTVGTFYYQGTYPWEAPIDNVYVSAGSHTVEITVTADNGTWDVYADYLVIQ

SEQ ID NO: 2378 - protein, 715 aa, Artificial Sequence
  Synthetic Construct, AS-6 intein modified protein
MQTSITLTSNASGTFDGYYYELWKDTGNTTMTVYTQGRFSCQWSNINNALFRTGKKYNQNWQSLGTIRITYSATYNPNGNSYLCIYGWSTNPLVEFYIVESWGNWRPPGATSLGQVTIDGGTYDIYRTTRVNQPCFAPETLVHTADGPRPIRDLQQGDLVLGISGRYREVTHKFVYNQTDAMLAIRVKHAVEPIEVTAGHPFYAIRGVPLEQSGERTLRQLESGKRSPEWIDAGELERGDYMAQVIPSEVVPVAGFDEDDARLYGILLGDGHLSKNGLQWGVSGHPQRDGHMDFVRAYLSARGIHFWETARDETYGQIHWASGRGVRRDATTGRITGAGAATLPFEHADLYDEQGRKRIARRFSHLPRQQSLALIRSLLESDGGVSRGKEIYFTNTSRPLIEGLRYQLLRLGVPTAGQYRERRQDHVGQRADGSPIRFEGVCKAYDLRIPAVPEVAQLVGCQPIAKRNWITWQGCVYSRIRDVQPIAVKPFVFDLKVEGDESYMTTSGLAHNSIVGTATFDQYWSVRTSKRTSGTVTVTDHFRAWANRGLNLGTIDQITLCVEGYQSSGSANITQNTFSQGSSSGSSGGSSGSTTTTRIECENMSLSGPYVSRITNPFNGIALYANGDTARATVNFPASRNYNFRLRGCGNNNNLARVDLRIDGRTVGTFYYQGTYPWEAPIDNVYVSAGSHTVEITVTADNGTWDVYADYLVIQ

SEQ ID NO: 2379 - protein, 825 aa, Artificial Sequence
  Synthetic Construct, AS-7 intein modified protein
MQTSITLTSNASGTFDGYYYELWKDTGNTTMTVYTQGRFSCQWSNINNALFRTGKKYNQNWQSLGTIRITYSATYNPNGNSYLCIYGWSTNPLVEFYIVESWGNWRPPGATSLGQVTIDGGTYDIYRTTRVNQPCLSGDTEVVLGNGMDVVLLTDLVDGACVSTIEPRTGVVSPSLIDHYFAKDATRVLKITLDDGRVIKADPEHPLFAAKVDETTRGLTGQWLRVEELTVGHHALLVSPQQAYCTSEQWTLTLSEKEVCTASTAQLAKQLSEIGLVGVPIPLSKVKSAARLFGLVLSAGDFSGKLYVEKDEDVTAVNSDLTALGFSPAHWVRYQDDQQKWFKCDDSNGKAICITLVPTANALLQTLGAHDAEKQHRYCLLPKWLLDAPTSIKREFLGALFGGNGAHITISCNEGKWEPTMSALTQHTDADHLESTVVYLKQVATLLGMLNICSSVSSEKHITAEKTGYAVHLHVDNTAENLVRFYEQVGYRYCFNKTSQSSAPVQWIKGSLFFIEQHRSKCQHAFELLHTGLGTKAAVSAEINMPHHNPSHMLNVKEIPTAPADEYITWIEFKDRYVHKESPRFVWVTIHSIEEAPAERLYDFNTVSQNHSFFANSIVSHNSIVGTATFDQYWSVRTSKRTSGTVTVTDHFRAWANRGLNLGTIDQITLCVEGYQSSGSANITQNTFSQGSSSGSSGGSSGSTTTTRIECENMSLSGPYVSRITNPFNGIALYANGDTARATVNFPASRNYNFRLRGCGNNNNLARVDLRIDGRTVGTFYYQGTYPWEAPIDNVYVSAGSHTVEITVTADNGTWDVYADYLVIQ

SEQ ID NO: 2380 - protein, 756 aa, Artificial Sequence
  Synthetic Construct, AS-8 intein modified protein
MQTSITLTSNASGTFDGYYYELWKDTGNTTMTVYTQGRFSCQWSNINNALFRTGKKYNQNWQSLGTIRITYSATYNPNGNSYLCIYGWSTNPLVEFYIVESWGNWRPPGATSLGQVTIDGGTYDIYRTTRVNQPCFGRDTPLLMADGTTKFVQDIKALDQLMGDDCTPRIVQERSLVHESGALYRVVPKNANGHDAFVCNKEHILVMVNVKQPWVSQTVIDGVDQFHVSEVVCIGNIPTVRSSGNFASAVEATKALPAWTLLIWEISVLEYLAVDADLRQHFMIYKPAGGIEYPTTTNLDIVQHFGAESVPNLEHAVMWCIGLWILLGDVDTAGNPVLILSGIDHLHPLIKTLHSHSQKLSISFTNQLDEGVADISKPTIIALGDKFGLLFKSLGIESAECIPDALLRSSKLHRAALLAGLVEGSNAFSIVKDTPKHWDISCKNNMIFENIKRLSSSLGLCVDTVTPATITQQVSVKTLQIRISGPRMHYVSELISNDSLKTTSVVSIDSWLNVKSNACEFEIESIGCGEYFGFTVMGPNSRFLLGDFTVTHNSIVGTATFDQYWSVRTSKRTSGTVTVTDHFRAWANRGLNLGTIDQITLCVEGYQSSGSANITQNTFSQGSSSGSSGGSSGSTTTTRIECENMSLSGPYVSRITNPFNGIALYANGDTARATVNFPASRNYNFRLRGCGNNNNLARVDLRIDGRTVGTFYYQGTYPWEAPIDNVYVSAGSHTVEITVTADNGTWDVYADYLVIQ

SEQ ID NO: 2381 - protein, 722 aa, Artificial Sequence
  Synthetic Construct, AS-9 intein modified protein
MQTSITLTSNASGTFDGYYYELWKDTGNTTMTVYTQGRFSCQWSNINNALFRTGKKYNQNWQSLGTIRITYSATYNPNGNSYLCIYGWSTNPLVEFYIVESWGNWRPPGATSLGQVTIDGGTYDIYRTTRVNQPCVTGETLLLTENGYEKAADLYKKQNNLKVVIDNRTKDFAVDSKGTTIVDAIPMQLTKKDAEIFKVKTKQGYEIRATEWHKFYVKRDGEIQKLQLNQLKTGDKLLVQSAEGAYGKIHEPDLAYIMGIIAGDGTITEKTAKIYLYDNKKVLEQKVTDAVHRIIHKHKVDRAYKHNTSLLPTFNMANPEKQDLLYMNSTVLFDILKKFGMNKERKTRVPEFIFQANKETQAAYLSGLFQTDGCVNANHKAKALTIELTSIHYESLQDVQKLLLNMGVYTTIYSNNKRSQELLPDGKGGSKLYNVKPTHKISIQDRNSRELFMSIVELKDYDVYKFNLLTETLQPKSRKPKHDFTAEIISIEEDGVEDVYDTTQEDYHSLIFNGIVTGNSIVGTATFDQYWSVRTSKRTSGTVTVTDHFRAWANRGLNLGTIDQITLCVEGYQSSGSANITQNTFSQGSSSGSSGGSSGSTTTTRIECENMSLSGPYVSRITNPFNGIALYANGDTARATVNFPASRNYNFRLRGCGNNNNLARVDLRIDGRTVGTFYYQGTYPWEAPIDNVYVSAGSHTVEITVTADNGTWDVYADYLVIQ

SEQ ID NO: 2382 - protein, 707 aa, Artificial Sequence
  Synthetic Construct, AS-10 intein modified protein
MQTSITLTSNASGTFDGYYYELWKDTGNTTMTVYTQGRFSCQWSNINNALFRTGKKYNQNWQSLGTIRITYSATYNPNGNSYLCIYGWSTNPLVEFYIVESWGNWRPPGATSLGQVTIDGGTYDIYRTTRVNQPCVTADTLIATDRGLERIGNIVGESRGIKSIDGKLHWVENIFPTGTKPVYQLRTKSGYQLKLTGDHVVFTENRGDVKACELRKDDMVRLVGAPFGKETTGSTDIAQLIGLLTGDGCITTANEIAASGEQRRTAFLTVSKAEQEIAEWANQFINTLRPELGEHNKSGSVTETATTARVAVGSPRILKQFEAFAVLDKGSVHKLFTDKVFQLAQSEQAALLRGLFTADGTVANYSDKSQYIALDATSLELLQQVQLLLFNFGIKSKIYENRRVGELVSLLPDGKGGIKEYPVQQMHSLRISRSSRILFEQQIGFMAESKKYEALAELNRTVSTYRDSAYDAVASLTYSGEEAVFDLTEPETDHFIANGIGVHNSIVGTATFDQYWSVRTSKRTSGTVTVTDHFRAWANRGLNLGTIDQITLCVEGYQSSGSANITQNTFSQGSSSGSSGGSSGSTTTTRIECENMSLSGPYVSRITNPFNGIALYANGDTARATVNFPASRNYNFRLRGCGNNNNLARVDLRIDGRTVGTFYYQGTYPWEAPIDNVYVSAGSHTVEITVTADNGTWDVYADYLVIQ

SEQ ID NO: 2383 - protein, 613 aa, Artificial Sequence
  Synthetic Construct, AS-11 intein modified protein
MQTSITLTSNASGTFDGYYYELWKDTGNTTMTVYTQGRFSCQWSNINNALFRTGKKYNQNWQSLGTIRITYSATYNPNGNSYLCIYGWSTNPLVEFYIVESWGNWRPPGATSLGQVTIDGGTYDIYRTTRVNQPCLHGDSLIVTDHGLVPMREVVNHRQRLQVSDGERQQTVYDWNRFADYPTVTMRTRAGFTLTGSHNHRIMLADGTWRRLDELQIGDRVRIAGGTELWATEPALLRCRRPLPRVLVTAGAPAATTSSPHRRGYRRAAAVVVDEKLAAAIGRRCVTHADQQALDAIRRSPRPQVVAFLRAFCQGAGQSVASGLTLTCADADLATTVQLLLTNLGVLAHRTDTTVRIDNGDDLERAYTTLATPTGWTDEVVALEHGTADVYDISVTATHRYAAQGFINHNSIVGTATFDQYWSVRTSKRTSGTVTVTDHFRAWANRGLNLGTIDQITLCVEGYQSSGSANITQNTFSQGSSSGSSGGSSGSTTTTRIECENMSLSGPYVSRITNPFNGIALYANGDTARATVNFPASRNYNFRLRGCGNNNNLARVDLRIDGRTVGTFYYQGTYPWEAPIDNVYVSAGSHTVEITVTADNGTWDVYADYLVIQ

SEQ ID NO: 2384 - protein, 483 aa, Artificial Sequence
  Synthetic Construct, AS-12 intein modified protein
MQTSITLTSNASGTFDGYYYELWKDTGNTTMTVYTQGRFSCQWSNINNALFRTGKKYNQNWQSLGTIRITYSATYNPNGNSYLCIYGWSTNPLVEFYIVESWGNWRPPGATSLGQVTIDGGTYDIYRTTRVNQPCVTGDTLICLADGRRVPIQDLVGHSPEVIAVDDKGRLVCAKSEVIWKVGERSVFEIKLASGRSIKATAEHRLLAFKGWRHVKDFKVGDRLAIAHQVPEPDRLLQHCQSDLFWDRIVSIEEKGSEEVYDLTVPKYASWLADGVVSHNSIVGTATFDQYWSVRTSKRTSGTVTVTDHFRAWANRGLNLGTIDQITLCVEGYQSSGSANITQNTFSQGSSSGSSGGSSGSTTTTRIECENMSLSGPYVSRITNPFNGIALYANGDTARATVNFPASRNYNFRLRGCGNNNNLARVDLRIDGRTVGTFYYQGTYPWEAPIDNVYVSAGSHTVEITVTADNGTWDVYADYLVIQ

SEQ ID NO: 2385 - protein, 793 aa, Artificial Sequence
  Synthetic Construct, AS-13 intein modified protein
MQTSITLTSNASGTFDGYYYELWKDTGNTTMTVYTQGRFSCQWSNINNALFRTGKKYNQNWQSLGTIRITYSATYNPNGNSYLCIYGWSTNPLVEFYIVESWGNWRPPGATSLGQVTIDGGTYDIYRTTRVNQPCLTSDHTVLTTRGWIPIADVTLDDKVAVLDNNTGEMSYQNPQKVHKYDYEGPMYEVKTAGVDLFVTPNHRMYVNTTNNTTNQNYNLVEASSIFGKKVRYKNDAIWNKTDYQFILPETATLTGHTNKISSTPAIQPEMNAWLTFFGLWIANGHTTKIAEKTAENNQQKQRYKVILTQVKEDVCDIIEQTLNKLGFNFIRSGKDYTIENKQLWSYLNPFDNGALNKYLPDWVWELSSQQCKILLNSLCLGNCLFTKNDDTLHYFSTSERFANDVSRLALHAGTTSTIQLEAAPSNLYDTIIGLPVEVNTTLWRVIINQSSFYSYSTDKSSALNLSNNVACYVNAQSALTLEQNSQKINKNTLVLTKNNVKSQTMHSQRAERVDTALLTQKELDNSLNHEILINKNPGTSQLECVVNPEVNNTSTNDRFVYYKGPVYCLTGPNNVFYVQRNGKAVWTGNSIVGTATFDQYWSVRTSKRTSGTVTVTDHFRAWANRGLNLGTIDQITLCVEGYQSSGSANITQNTFSQGSSSGSSGGSSGSTTTTRIECENMSLSGPYVSRITNPFNGIALYANGDTARATVNFPASRNYNFRLRGCGNNNNLARVDLRIDGRTVGTFYYQGTYPWEAPIDNVYVSAGSHTVEITVTADNGTWDVYADYLVIQ

SEQ ID NO: 2386 - protein, 682 aa, Artificial Sequence
  Synthetic Construct, AS-14 intein modified protein
MQTSITLTSNASGTFDGYYYELWKDTGNTTMTVYTQGRFSCQWSNINNALFRTGKKYNQNWQSLGTIRITYSATYNPNGNSYLCIYGWSTNPLVEFYIVESWGNWRPPGATSLGQVTIDGGTYDIYRTTRVNQPCVTGDTLVFTDKGLIEARKLEVGMKVWSGDGWNEIKEVINNGVKPVLKLKLKTGLEIKVTEEHKIFTGEGWKEAKDLKVGDKLYLPVSYPELDFPVKEENDFYEFLGYFLGDGSLSVSNHVSLHVGNDKELALYFKEKVEKYAGAAYLIERDGQYIIDVHRKEFAEKIKKIFGIEITDSKEKDIPSSLLAVNSEAMKALLRGLFSADGSVYDANGSITVALSSTSYPLLRKVQILLLSLGIPSTLTGEKDQDVKIIKGNEYETLPTYRLIISGERASLFFNKIGLIGEKKKKFLELMAGKTTYSTLNNHLYQEIVSIEPAGEEEVFDITAPPKYTWITNGILSLDSIVGTATFDQYWSVRTSKRTSGTVTVTDHFRAWANRGLNLGTIDQITLCVEGYQSSGSANITQNTFSQGSSSGSSGGSSGSTTTTRIECENMSLSGPYVSRITNPFNGIALYANGDTARATVNFPASRNYNFRLRGCGNNNNLARVDLRIDGRTVGTFYYQGTYPWEAPIDNVYVSAGSHTVEITVTADNGTWDVYADYLVIQ

SEQ ID NO: 2387 - protein, 472 aa, Artificial Sequence
  Synthetic Construct, AS-15 intein modified protein
MQTSITLTSNASGTFDGYYYELWKDTGNTTMTVYTQGRFSCQWSNINNALFRTGKKYNQNWQSLGTIRITYSATYNPNGNSYLCIYGWSTNPLVEFYIVESWGNWRPPGATSLGQVTIDGGTYDIYRTTRVNQPCFVAGTMILTVAGLVAIENIKAGDKVIATNPETFEVAEKTVLETYVRETTELLHLTINGDVIKTTFEHLFYAKDVGFVEAKELQVGDKLLDSKGNVLVVEDKKIKITDEPVKVYNFQVDDFHTYHVGCNGVLVHNSIVGTATFDQYWSVRTSKRTSGTVTVTDHFRAWANRGLNLGTIDQITLCVEGYQSSGSANITQNTFSQGSSSGSSGGSSGSTTTTRIECENMSLSGPYVSRITNPFNGIALYANGDTARATVNFPASRNYNFRLRGCGNNNNLARVDLRIDGRTVGTFYYQGTYPWEAPIDNVYVSAGSHTVEITVTADNGTWDVYADYLVIQ

SEQ ID NO: 2388 - protein, 670 aa, Artificial Sequence
  Synthetic Construct, AS-16 intein modified protein
MQTSITLTSNASGTFDGYYYELWKDTGNTTMTVYTQGRFSCQWSNINNALFRTGKKYNQNWQSLGTIRITYSATYNPNGNSYLCIYGWSTNPLVEFYIVESWGNWRPPGATSLGQVTIDGGTYDIYRTTRVNQPQLALDTPIPTPDGWTTMGEIKAGDKVIDEKGRPCNVVAISEIDDTEQAYKINFRDGTSIVAGERHLWKVQVTNNGRREKLLTTGEMYQKQFKTKSKENRALFRIPIADAFILPENKLPIDPYLFGYWIGNGNAVKPEITVMRDDVDEVIKNIPYKLHNRYKQEGNSDILVYKELKSILVKNFREKRIPIEYLRASAQQRKRLLQGLIDSDGCVSTAKSQAIYVTILFELAKDVQDLLWSLGIKNTLKTAPSARYGIETGEICYLIKFTAFNDLEVSGLDRKLKRGRERNIKTRSHFHYIKSIEKTGKTKMRCIQVDSPSRLYLAGKSMIPTHNSIVGTATFDQYWSVRTSKRTSGTVTVTDHFRAWANRGLNLGTIDQITLCVEGYQSSGSANITQNTFSQGSSSGSSGGSSGSTTTTRIECENMSLSGPYVSRITNPFNGIALYANGDTARATVNFPASRNYNFRLRGCGNNNNLARVDLRIDGRTVGTFYYQGTYPWEAPIDNVYVSAGSHTVEITVTADNGTWDVYADYLVIQ

SEQ ID NO: 2389 - protein, 673 aa, Artificial Sequence
  Synthetic Construct, AS-17 intein modified protein
MQTSITLTSNASGTFDGYYYELWKDTGNTTMTVYTQGRFSCQWSNINNALFRTGKKYNQNWQSLGTIRITYSATYNPNGNSYLCIYGWSTNPLVEFYIVESWGNWRPPGATSLGQVTIDGGTYDIYRTTRVNQPCVAGDTKILTSSGYHPIKDMEGKQVRVWNGYEFSETIVHKTGVNQKLIMVSLDDGTELRCTPYHKFYIETGSRPADKSRVMEVRAGDLEKGDRIIRFELPTITVGETTMSDKEAYTKGFFSADGCVIKSKYGEDEYRISVKREDKIEALTKYVDVIKSHTNRFRTHFYVPDYVQNKFEVPINSMVNEKISWLAGFMDGDGCVIRYKDIENMQAVSINKSFLQDIRLMLQTIGIHSTINKFMPNRVMKMPDGRGGTDMYNGAESWRLQIDSEGVRKLFALGFTPRRLKMNGSRKRHHKTNKFTRVVSVTDHGDVEDTYCFNEPKRHMGVFNGVITGQSIVGTATFDQYWSVRTSKRTSGTVTVTDHFRAWANRGLNLGTIDQITLCVEGYQSSGSANITQNTFSQGSSSGSSGGSSGSTTTTRIECENMSLSGPYVSRITNPFNGIALYANGDTARATVNFPASRNYNFRLRGCGNNNNLARVDLRIDGRTVGTFYYQGTYPWEAPIDNVYVSAGSHTVEITVTADNGTWDVYADYLVIQ

SEQ ID NO: 2390 - protein, 731 aa, Artificial Sequence
  Synthetic Construct, AS-18 intein modified protein
MQTSITLTSNASGTFDGYYYELWKDTGNTTMTVYTQGRFSCQWSNINNALFRTGKKYNQNWQSLGTIRITYSATYNPNGNSYLCIYGWSTNPLVEFYIVESWGNWRPPGATSLGQVTIDGGTYDIYRTTRVNQPCFDGKTKILTNQGFMTLRQVYEQGYEGLSTLSLNTKTHKIEWKPILDTMKRQSEMIDISVSQTGRITDNTLRLTPDHKMVNLRGGKYTKTEIQDLLKQQEMLTVAQTIPSLGNNKHQEADLAYFLGGIITDGSIYTSSTRGEVQFIQKDVPEKQAFISKMNDLANSLYGKSFTAHIKPVSSSYIRGQKVTGQATAYRLHSKAIAYDVKERENNITQLLLENEAELSYHFLGGVIDGDGCYHKNRLHIYISEENLLQAVIIACLKMNTVPQVTKNRNIYHLQIVEKLEVILRYTQRVKGEVTPRTIQTRFFATRQLFENQETGQIKLRQDNNCLISDKQLREMGEFEELIDGDTRMQRVIQVGEKSDGDVYNITVAEHHNYVVFTAKYTPVVVCNSIVGTATFDQYWSVRTSKRTSGTVTVTDHFRAWANRGLNLGTIDQITLCVEGYQSSGSANITQNTFSQGSSSGSSGGSSGSTTTTRIECENMSLSGPYVSRITNPFNGIALYANGDTARATVNFPASRNYNFRLRGCGNNNNLARVDLRIDGRTVGTFYYQGTYPWEAPIDNVYVSAGSHTVEITVTADNGTWDVYADYLVIQ

SEQ ID NO: 2391 - protein, 684 aa, Artificial Sequence
  Synthetic Construct, AS-19 intein modified protein
MQTSITLTSNASGTFDGYYYELWKDTGNTTMTVYTQGRFSCQWSNINNALFRTGKKYNQNWQSLGTIRITYSATYNPNGNSYLCIYGWSTNPLVEFYIVESWGNWRPPGATSLGQVTIDGGTYDIYRTTRVNQPCVAPETKILTDRGQIAIADVAGEKVNIWNGSEWSEVLVKKTGENQPLLKVHFSNGESLDCTYYHKFHVQENYKGKVKIVEAKDLQEGDKLIKYRLPLVESENDIDFPYAYTSGFFSGDGSHDGMGKPEIDLYGEKKELLPFVTVRNKYYGGSYGDKSWRIERDEVAVYDDVNQDRIVCKLPLDIPAKFTVPVNGYTIQSRLEWLAGLLDADGTVARNGDNESLQVASTHQQFLLDIRLMLQTLGVDSKVVKMDEMGYRSLPDGKGGYQDYFCQAKYRLLISSNGLFQLGELGLKTNRLQWNLREPQREASQFIRVEKVELTCRYDDTYCFSEPKRHLGMFNGILTGQSIVGTATFDQYWSVRTSKRTSGTVTVTDHFRAWANRGLNLGTIDQITLCVEGYQSSGSANITQNTFSQGSSSGSSGGSSGSTTTTRIECENMSLSGPYVSRITNPFNGIALYANGDTARATVNFPASRNYNFRLRGCGNNNNLARVDLRIDGRTVGTFYYQGTYPWEAPIDNVYVSAGSHTVEITVTADNGTWDVYADYLVIQ

SEQ ID NO: 2392 - protein, 944 aa, Artificial Sequence
  Synthetic Construct, AS-20 intein modified protein
MQTSITLTSNASGTFDGYYYELWKDTGNTTMTVYTQGRFSCQWSNINNALFRTGKKYNQNWQSLGTIRITYSATYNPNGNSYLCIYGWSTNPLVEFYIVESWGNWRPPGATSLGQVTIDGGTYDIYRTTRVNQPCLASDTLVRTSEGDKPVAEVAIGDYLLDAEDKPVLCMGANPSQTGRMKEIAYQDFDSKKRVSFKCTPDHHLELTLTDSTPSLSGKSVTWFSRCTGAHLSEEVSEVYLDNMVSIFYNDLVDSTDSAVDKDSIHEAVDLALEDHYHRGNSDQYSIHLNEYISRIADKELQNEPEFIRECIHDAANRFVITSSGNRNIKSESFDDKLLLSRSRSSTADSDSDYVITDASVHSHSNNSSVYLASPDSMIPDGAANRFENIASKLKEPVCNCGGIRKIFRSFGTTEDAELAYSLLLSEHYYRLDPRFVTDGYTFQASVEQYENMCSQEVQNMHLKLYRSPLKFVEREHNSAELPVDPYFLGLWLGDGDSSGTTIMTTDREIVVWLNSYVERLNQNKPEGCFPLKLTEQLIYGAGHTSKSGHTTKVDVRNYKISSGDAFVRSGTYWNPIFDGLKKLGLLNNKSAGIPQEYMNSDEQNRLSVIAGLMDSDGCYVKSHNTYRFTQLTEDHKKIVYDLKELALSCGINTTGVELSVKPLGFNKHKHSTEYVVYLGNGSQKFQELLLLPRKKMEISKKHVSLDARPFTVSDVEDGEFRAIEVSGGVFQLANRLVVANSIVGTATFDQYWSVRTSKRTSGTVTVTDHFRAWANRGLNLGTIDQITLCVEGYQSSGSANITQNTFSQGSSSGSSGGSSGSTTTTRIECENMSLSGPYVSRITNPFNGIALYANGDTARATVNFPASRNYNFRLRGCGNNNNLARVDLRIDGRTVGTFYYQGTYPWEAPIDNVYVSAGSHTVEITVTADNGTWDVYADYLVIQ

SEQ ID NO: 2393 - protein, 631 aa, Artificial Sequence
  Synthetic Construct, AS-21 intein modified protein
MQTSITLTSNASGTFDGYYYELWKDTGNTTMTVYTQGRFSCQWSNINNALFRTGKKYNQNWQSLGTIRITYSATYNPNGNSYLCIYGWSTNPLVEFYIVESWGNWRPPGATSLGQVTIDGGTYDIYRTTRVNQPCQPYDALVSTPSGLVPIGALVETDAVGMKVFDAHGLTQVIATKSNGVKDVLRIWTRAGHALDVTADHLVWRSTSAGAGAFVPAGALRAGDTLEWHRTIAPGEGEITSREIAEAALAGRLQADGFVGRYAGTNASLTIEAMTVPTRLYDAPLPVVAAYLRSLFQADGYVSRRERSTLIGLDMISEGLIRGVQGLLARFGIFARVRREADPRPDRHDLWSLGIQNAGDRRTFADEIGFLDPVKAAKLEASFDQPGQAAKPVKRLQIERIEPRGPMPVYDIQTDSGEYLSAGLRVHNSIVGTATFDQYWSVRTSKRTSGTVTVTDHFRAWANRGLNLGTIDQITLCVEGYQSSGSANITQNTFSQGSSSGSSGGSSGSTTTTRIECENMSLSGPYVSRITNPFNGIALYANGDTARATVNFPASRNYNFRLRGCGNNNNLARVDLRIDGRTVGTFYYQGTYPWEAPIDNVYVSAGSHTVEITVTADNGTWDVYADYLVIQ

SEQ ID NO: 2394 - protein, 783 aa, Artificial Sequence
  Synthetic Construct, AS-22 intein modified protein
MQTSITLTSNASGTFDGYYYELWKDTGNTTMTVYTQGRFSCQWSNINNALFRTGKKYNQNWQSLGTIRITYSATYNPNGNSYLCIYGWSTNPLVEFYIVESWGNWRPPGATSLGQVTIDGGTYDIYRTTRVNQPCVVAGTEVTDAETGAVVTVGELFESRRAVTVHALGADSKLRPRPVTDVVWNGRKRVYRLTTELGKSITATDNHPFRVLDGWKNLGELKPGDRIAAPRRLAVPSAGTWPQHEIVALAGLLSEGNTCHPTTLYFYGNDRVLIDDFARAIGQFPDTVAKVYARPNRRNLEVRANTGRDTRLKSRAERDAAVALLAPPTRSGAFVWAQRLGILGKTATEKFVPHDVFRLCDSDLELFLGRLWAGDGFIANDTLKVPFYATSSRRLAQDVQHLLLRLGIVGRIHEKQFKYKGGLKPGFTVHLIGDGAAEAFLDRIAPHCLGREHAVTILREHVATTARGLTSKDTVPLEVRAWVDDGRRARGLTWDELEQQSDVSTQEFYGTPAPGKKGFRRATIAKLAAFFGSQRLAAVADSDVFWDRVVSIEYAGVQDTYDLTVDEDHNFVANGLIVHNSIVGTATFDQYWSVRTSKRTSGTVTVTDHFRAWANRGLNLGTIDQITLCVEGYQSSGSANITQNTFSQGSSSGSSGGSSGSTTTTRIECENMSLSGPYVSRITNPFNGIALYANGDTARATVNFPASRNYNFRLRGCGNNNNLARVDLRIDGRTVGTFYYQGTYPWEAPIDNVYVSAGSHTVEITVTADNGTWDVYADYLVIQ

SEQ ID NO: 2395 - protein, 624 aa, Artificial Sequence
  Synthetic Construct, AS-23 intein modified protein
MQTSITLTSNASGTFDGYYYELWKDTGNTTMTVYTQGRFSCQWSNINNALFRTGKKYNQNWQSLGTIRITYSATYNPNGNSYLCIYGWSTNPLVEFYIVESWGNWRPPGATSLGQVTIDGGTYDIYRTTRVNQPCQPAGTQVAKVIKEGRWREDSVIEQVPIESLQPGDRVVSFGNAKIYRRGRAVTGITSRRHTGNLHRVEVGEFRTRATPEHRFTVRFDPARPKAGLLYLMRRGDRWRVGVCGMFNSRGFGVSVRLSQERGDAAWVLGAFATLTEARIAEQVVSCRYGIPTTVWETGRNPGASWAQRDQAGIDAIYQRLGVDRIRAGVDRLLRDHGLSAGLPLLAANEPGNFSCRQSRQVAACNLVPGVMQVPVPTAGERFEWRDLTATSFERVHDLEVWSMDVERDKHYVADGIVVHNSIVGTATFDQYWSVRTSKRTSGTVTVTDHFRAWANRGLNLGTIDQITLCVEGYQSSGSANITQNTFSQGSSSGSSGGSSGSTTTTRIECENMSLSGPYVSRITNPFNGIALYANGDTARATVNFPASRNYNFRLRGCGNNNNLARVDLRIDGRTVGTFYYQGTYPWEAPIDNVYVSAGSHTVEITVTADNGTWDVYADYLVIQ

SEQ ID NO: 2396 - protein, 749 aa, Artificial Sequence
  Synthetic Construct, AS-24 intein modified protein
MQTSITLTSNASGTFDGYYYELWKDTGNTTMTVYTQGRFSCQWSNINNALFRTGKKYNQNWQSLGTIRITYSATYNPNGNSYLCIYGWSTNPLVEFYIVESWGNWRPPGATSLGQVTIDGGTYDIYRTTRVNQPCFAAGTLLHTEQGYVPVEQVVAGVGTRVCTHQGFRNISERFDNGEAEVFRVTTRKGYSVEVTANHKMARLDENGDLLLDELSHLQVGDNLLLLLGSNPVTEKVRLQCIPAGYRSSIEIAQPPELDEQLAYLLGYAYGDGCVGRGATYNYLSLAVSHTYPNVRDQLAAIIREKFGLTTKIYSGSGAVWNLLVHSANLLDWLKANGLLKQKAADLAMPEAILRSPSSVVGAFLSGYFDADGCVRGGKGGYGFDCTSKAFVGAVQLLLLAEGIVSNLHTTDRSRQGWRTIYRLNVCGTEFKRRFQTLCCRSAKVVHSPMVLGRDGTGGYPPALVRGASYQRVVAVGGKHLLYTALLKVIEKTRTAGKQALAESLCQHVNYFPDPIVAIESVGTQRVYDIEVEGMHLLGNGIYTSNSIVGTATFDQYWSVRTSKRTSGTVTVTDHFRAWANRGLNLGTIDQITLCVEGYQSSGSANITQNTFSQGSSSGSSGGSSGSTTTTRIECENMSLSGPYVSRITNPFNGIALYANGDTARATVNFPASRNYNFRLRGCGNNNNLARVDLRIDGRTVGTFYYQGTYPWEAPIDNVYVSAGSHTVEITVTADNGTWDVYADYLVIQ

SEQ ID NO: 2397 - protein, 829 aa, Artificial Sequence
  Synthetic Construct, AS-25 intein modified protein
MQTSITLTSNASGTFDGYYYELWKDTGNTTMTVYTQGRFSCQWSNINNALFRTGKKYNQNWQSLGTIRITYSATYNPNGNSYLCIYGWSTNPLVEFYIVESWGNWRPPGATSLGQVTIDGGTYDIYRTTRVNQPCLAYDAEIVQADGGVKTIEQIVRERRAHLATVGADWRLTWTEPCDYVDDGHKPVFEVTTRLGRRIETTLTHPFLTVHGWQRLEDLAEGDAIGVPRQLPVFGQEPIRDCEVRLLGHLIGDGGLTGSPPRLTSGQEAMTADFLEAVDAFGGVEAKPIRASRRTQSWVVVGAAQARAAARSSFASLVDALIRRSPLTGRAIARNLGVAPATLTYWRQGVNVPDAAMVGLLAGELGVDVGELRPEPVARRNDRNPLQAWLDRLGLAGKSAHEKTVPDCVFRLPREQLARFLNRLFSSDGWVTHLASGQGQIGYTTVSEALARQIQHLLLRFGVLAKLRHRSVRYQDGRRPAWQLDITHAESILTFAEQIGILGKEQRLASVAASVRGRRRQSHTDHIPCEIWQFIDRARGEWTWAELARRAGVASSNIHAYRRGMSRQRLAAFADALGSRELRQLASSDLYWDRIASIRPLGHKQVYDLTIPETHNFIANDVCVHNSIVGTATFDQYWSVRTSKRTSGTVTVTDHFRAWANRGLNLGTIDQITLCVEGYQSSGSANITQNTFSQGSSSGSSGGSSGSTTTTRIECENMSLSGPYVSRITNPFNGIALYANGDTARATVNFPASRNYNFRLRGCGNNNNLARVDLRIDGRTVGTFYYQGTYPWEAPIDNVYVSAGSHTVEITVTADNGTWDVYADYLVIQ

SEQ ID NO: 2398 - protein, 814 aa, Artificial Sequence
  Synthetic Construct, AS-26 intein modified protein
MQTSITLTSNASGTFDGYYYELWKDTGNTTMTVYTQGRFSCQWSNINNALFRTGKKYNQNWQSLGTIRITYSATYNPNGNSYLCIYGWSTNPLVEFYIVESWGNWRPPGATSLGQVTIDGGTYDIYRTTRVNQPCVHGDTRVTLADGHERPIREVVESNLDDPKPVDDGVWDTVDFDVPSLQSDGTVATQNATKVWKRKAPETLYRIRTATGRELDVTPSHPLFVQSDGRFQARKAEELESGTHVAVPRKVSTNACNELDVTFRQSQAHNRIDLDLPPQWTPELARLIGYIVAEGYVEQRPDNTGYVSITNNDREVLDDAKSVLETLNLNVTERSSHEGKTARELLCSAGEFVSFLASLDETLLQSSAERRVPQDIMRASDNVVTGFIRGYIEGEGHVSTSQREITVASMSKPLLEDVRTLLVTQGITAQLQPRNNGSYRLRISGQSFHDYAEQIGFITARKTEACRQFEGTHGNTNLDIVPNLGPELRRIREALGLTQSECGLPRSTYQHYERGRRNPSRDSLESVLDAFETRLAEMNNDTPISDTARSDGGGTGSLRQDLNGLAALVEGDIAWDRIESIEPIEHDEKWVYDLEIEGTHNYLTNGVVSHNSIVGTATFDQYWSVRTSKRTSGTVTVTDHFRAWANRGLNLGTIDQITLCVEGYQSSGSANITQNTFSQGSSSGSSGGSSGSTTTTRIECENMSLSGPYVSRITNPFNGIALYANGDTARATVNFPASRNYNFRLRGCGNNNNLARVDLRIDGRTVGTFYYQGTYPWEAPIDNVYVSAGSHTVEITVTADNGTWDVYADYLVIQ

SEQ ID NO: 2399 - protein, 875 aa, Artificial Sequence
  Synthetic Construct, AS-27 intein modified protein
MQTSITLTSNASGTFDGYYYELWKDTGNTTMTVYTQGRFSCQWSNINNALFRTGKKYNQNWQSLGTIRITYSATYNPNGNSYLCIYGWSTNPLVEFYIVESWGNWRPPGATSLGQVTIDGGTYDIYRTTRVNQPCLTADSDVLVRSENGDIERQTVDSLFSDGQVVLADGDTDIAVSKETPTVLSLDEATERVSEQESTLVSERPLRDDESVRTIETSRGAVTVTDDHPMYIRQDGEVTVRPASDIEAGTDLVAARRPPDTMVEPSDETVLSWETFAADCDKHSKLYGVDCGTELAAQRAARDESQTAFAERYGSYGSAVGKYERGEKDVPVWLLGELDIRPDRIHGLNYETSFENPFPLEWSPELAQVIGCLLGDGSIHRNDDENVVDVRYHNTDEALIERFARDIERLFDIEPTVTDRPGRESHHKRKYQVDVPSAVGRVLVCVLEAVTENGTPGLPDAVRPAFVGALFDDEGHISREGKAFISNTDHTLLTGVGEMLAEMGIETKLAPDQHKLHIRGRRNLEQFLDRIPIASDEKFYRGLDALDAYDVTTRKAELLEAIRQEPKTSAALAQTLGVTRGSVNKYLRELRESGHIEKQIEGSNRSLDENRTVQYVAADFEGSVYATLRGEPSSVTVEDVERREYDGPVYDLTVSENAPNFAVNGGAVVHNSSIVGTATFDQYWSVRTSKRTSGTVTVTDHFRAWANRGLNLGTIDQITLCVEGYQSSGSANITQNTFSQGSSSGSSGGSSGSTTTTRIECENMSLSGPYVSRITNPFNGIALYANGDTARATVNFPASRNYNFRLRGCGNNNNLARVDLRIDGRTVGTFYYQGTYPWEAPIDNVYVSAGSHTVEITVTADNGTWDVYADYLVIQ

SEQ ID NO: 2400 - protein, 519 aa, Artificial Sequence
  Synthetic Construct, AS-28 intein modified protein
MQTSITLTSNASGTFDGYYYELWKDTGNTTMTVYTQGRFSCQWSNINNALFRTGKKYNQNWQSLGTIRITYSATYNPNGNSYLCIYGWSTNPLVEFYIVESWGNWRPPGATSLGQVTIDGGTYDIYRTTRVNQPCVRGDTTVALADGSEREIRDLVEANLDDPRPVDDGVWDGVDVAVPSLAADGRLVQRRATKVWKREAPETMYRVRTAAGHRLTVTPSHPLFVAGSHGPDAVRTEDLEVGQLVGVAPDGDGSGQVAPDGGVIRDAQPAPVGDAETVAWSAIESITEVEPDEEWVYDLEVEGTHSYLTDGVVSHNSIVGTATFDQYWSVRTSKRTSGTVTVTDHFRAWANRGLNLGTIDQITLCVEGYQSSGSANITQNTFSQGSSSGSSGGSSGSTTTTRIECENMSLSGPYVSRITNPFNGIALYANGDTARATVNFPASRNYNFRLRGCGNNNNLARVDLRIDGRTVGTFYYQGTYPWEAPIDNVYVSAGSHTVEITVTADNGTWDVYADYLVIQ

SEQ ID NO: 2401 - protein, 774 aa, Artificial Sequence
  Synthetic Construct, AS-29 intein modified protein
MQTSITLTSNASGTFDGYYYELWKDTGNTTMTVYTQGRFSCQWSNINNALFRTGKKYNQNWQSLGTIRITYSATYNPNGNSYLCIYGWSTNPLVEFYIVESWGNWRPPGATSLGQVTIDGGTYDIYRTTRVNQPSVTGDRPVVVRDPGGTVRILPIEDLFARGTTESEVLIAADGDVVASATPGKTRRALDGWDALSVNEDGEAEWQPIAQAIRHNTDKPVVNLQHKFGESTTTRDHSYVVPGEDGLTTVSPDDVAEPYRVSGVPDVEPVEQVDVYEVLRGYEREYEDGRSVGSDNSITKRKQIHADDEYVWFGHEHHRDVDSTVKVKRFVDIDSEDGAALIRLLGAYVPEGSASTGETATSKFGASLAESDREWLAQLQRDYSRLFENTTAGIITSDRRAERTVEYQTDTGGASVTYNDETLKLQMMNELAAVFFREFAGQTSRGKRIPSFVFHLPEEKQDLFLTLLVEGDGSREFPRYTEAYAQRNFDFETTSRELAAGLSMLLTQRGQKHSLKYRDSKDSYTIRTCSTYREGRDPVLTEADHDGYVYDLSVEENENFVDGVGGIVLHNSIVGTATFDQYWSVRTSKRTSGTVTVTDHFRAWANRGLNLGTIDQITLCVEGYQSSGSANITQNTFSQGSSSGSSGGSSGSTTTTRIECENMSLSGPYVSRITNPFNGIALYANGDTARATVNFPASRNYNFRLRGCGNNNNLARVDLRIDGRTVGTFYYQGTYPWEAPIDNVYVSAGSHTVEITVTADNGTWDVYADYLVIQ

SEQ ID NO: 2402 - protein, 552 aa, Artificial Sequence
  Synthetic Construct, AS-30 intein modified protein
MQTSITLTSNASGTFDGYYYELWKDTGNTTMTVYTQGRFSCQWSNINNALFRTGKKYNQNWQSLGTIRITYSATYNPNGNSYLCIYGWSTNPLVEFYIVESWGNWRPPGATSLGQVTIDGGTYDIYRTTRVNQPCFSGDTEIALASGDSITFESLVDAYERGETHYCYTIGDDGRIRIEEIMNPRVTQEDAALLAVTLDNGEVIRCTPDHEFMLRDGNYCEAQNLTDGQSLMPLYRTTTEMTETTETTETTGTAEMVKQPFAQNNWESVSQLANRYNRRHTTTDHIVETQQIQSQQQSQIETVQISERADVHNHTVISVESLTETADVYDLEVPVTHNFALASGVFVHNSIVGTATFDQYWSVRTSKRTSGTVTVTDHFRAWANRGLNLGTIDQITLCVEGYQSSGSANITQNTFSQGSSSGSSGGSSGSTTTTRIECENMSLSGPYVSRITNPFNGIALYANGDTARATVNFPASRNYNFRLRGCGNNNNLARVDLRIDGRTVGTFYYQGTYPWEAPIDNVYVSAGSHTVEITVTADNGTWDVYADYLVIQ

SEQ ID NO: 2403 - protein, 546 aa, Artificial Sequence
  Synthetic Construct, AS-31 intein modified protein
MQTSITLTSNASGTFDGYYYELWKDTGNTTMTVYTQGRFSCQWSNINNALFRTGKKYNQNWQSLGTIRITYSATYNPNGNSYLCIYGWSTNPLVEFYIVESWGNWRPPGATSLGQVTIDGGTYDIYRTTRVNQPCVSGETDIALVEGKTATIGELVESALTDPKPVDDGVWDTADFTVTSAIETGELIERDVTRVWKRQSPETMRQIQIAGGRSVTVTPSHPVFVEHNGSYTARRADSLSAGESVAIADDVADSHPISVDNTANTLNPRSMSTPGITTDGGLYRTGSDGGIVHAEVGKEDVTDCLTTDRITAVKTVTPTAEWVYDLEVEGTHAYLTNGVLSHNSIVGTATFDQYWSVRTSKRTSGTVTVTDHFRAWANRGLNLGTIDQITLCVEGYQSSGSANITQNTFSQGSSSGSSGGSSGSTTTTRIECENMSLSGPYVSRITNPFNGIALYANGDTARATVNFPASRNYNFRLRGCGNNNNLARVDLRIDGRTVGTFYYQGTYPWEAPIDNVYVSAGSHTVEITVTADNGTWDVYADYLVIQ

SEQ ID NO: 2404 - protein, 909 aa, Artificial Sequence
  Synthetic Construct, AS-32 intein modified protein
MQTSITLTSNASGTFDGYYYELWKDTGNTTMTVYTQGRFSCQWSNINNALFRTGKKYNQNWQSLGTIRITYSATYNPNGNSYLCIYGWSTNPLVEFYIVESWGNWRPPGATSLGQVTIDGGTYDIYRTTRVNQPSYHPRSEVLLADGQRIDIGTFVDSRIEKNNANVIDGINCEILPVDDIDVYTVDTDTGSASTVSIDRVSRHPAPSEFIRVKFSNGRSVLVTPEHPMFIDDGSETKTVQANALSGGEFVPAPHHLPGVNTDASSVSDDINDVSTIRTHVRSRARAKAEVEVRATDGEFKLIDAAQTLGIITAVGKVSVDAPERGIIVDMDRTVDSSKDSINNVLGSVIPSNDNDSITRVQDTGSTGNQWRWSVNTFIERMIEIAPAVTADRPNRRVPDAVLGGSEAVVQQFLTGVIIAAGRILDETIRIYASSNELACDYADAFLRLGITASVEDGPAEIAAQTVIKCDSDYERACGMFDISSSRTTPSDTSSQNNQSSVTAQNEDTHQTTSHEILPSGIADELQSIRQLLNIPASEQLASITAGDDGIALSIARAEINLLRDHIETLRMDTENVSIGRDDCVTPTISSSSKYKYAKNSITSDENLQLFGQSQAQLSERTKTTESSSISASTDLVSIPANISENRLVAATQRLDEVETRCNRRYHRVIAVDTVSNAGPHACEWVYDITVEPTNTFISSGVVLHNSIVGTATFDQYWSVRTSKRTSGTVTVTDHFRAWANRGLNLGTIDQITLCVEGYQSSGSANITQNTFSQGSSSGSSGGSSGSTTTTRIECENMSLSGPYVSRITNPFNGIALYANGDTARATVNFPASRNYNFRLRGCGNNNNLARVDLRIDGRTVGTFYYQGTYPWEAPIDNVYVSAGSHTVEITVTADNGTWDVYADYLVIQ

SEQ ID NO: 2405 - protein, 695 aa, Artificial Sequence
  Synthetic Construct, AS-33 intein modified protein
MQTSITLTSNASGTFDGYYYELWKDTGNTTMTVYTQGRFSCQWSNINNALFRTGKKYNQNWQSLGTIRITYSATYNPNGNSYLCIYGWSTNPLVEFYIVESWGNWRPPGATSLGQVTIDGGTYDIYRTTRVNQPCFTPDTNVLTPNGVRNIRDLTVGDSVYSLNPETMQMEIKPVTQTHEYPDYQGDLIDIQTNEIDFRVTPNHRMLVEATGTDTTSTNDYDFIEAGNLDISSRYELPHGWSVDHTDSLGAYIDLITLLREQSDTYNVLSDGGMTTAATADINHNNVTRRVDSDTFVSLIGWYVATGRVSRTQNGSDRVYLQLSQTNTKARTQLTMLLDELGVDWQADNEKIHFVSHVWTELFDTTCGRTEKNKHIPELIFDASASQKRAFFDAIINGSGVKNDDSYQYHTSSEDLRDDILRLCVHIGIVARYDYINDESWRIECTETANPDFTLTHSGRQSTAEDGVYCVTVADNQTLLAGRNGTFQWTGNSIVGTATFDQYWSVRTSKRTSGTVTVTDHFRAWANRGLNLGTIDQITLCVEGYQSSGSANITQNTFSQGSSSGSSGGSSGSTTTTRIECENMSLSGPYVSRITNPFNGIALYANGDTARATVNFPASRNYNFRLRGCGNNNNLARVDLRIDGRTVGTFYYQGTYPWEAPIDNVYVSAGSHTVEITVTADNGTWDVYADYLVIQ

SEQ ID NO: 2406 - protein, 866 aa, Artificial Sequence
  Synthetic Construct, AS-34 intein modified protein
MQTSITLTSNASGTFDGYYYELWKDTGNTTMTVYTQGRFSCQWSNINNALFRTGKKYNQNWQSLGTIRITYSATYNPNGNSYLCIYGWSTNPLVEFYIVESWGNWRPPGATSLGQVTIDGGTYDIYRTTRVNQPCFHPETKIWFRDTDNEWHHETIQTFVEDRLDDPEIDAVGTLVQEVDDNTDREISVPSIDDNGNERLQSVTAVSKHRAPNHLVQIETISGREITITPDHEMHIFEQGNLVSKQASKITSGEYAVIPKRLQTISPSSHTPQHDLLREFLTRDELTADRLIIHTSDPVRLCNRVFPEEVTSCKDAVEIMQNTACHLDKNKETLIGWLGEGRIPVALLRGFVETDEALLMSIPDDVQIGLRGEKVRIDRHIGFTEELTSLLGYYAAAGIVHTQTNPISYESAQQEQSRITFYNIDTQTQTDLLNALNSVFEIEPIQYNLDGEILGVPGELIRRVFDTVFDVGTQPSHKRIPQALFDASESHITSYLRCFFSTHDSLTTDTRDISATTVSREFKEDIIAALRRLGITAEVTTQQSRSVPEVLPDWYAIDDITHHDADNSLNLTRSYVISIASSDAVTLQRDRQAQEQIKYDAQGLIANNNAIHQSRQVTDGGRKDYITEPITDIEYVDADIDYTYCLTVSETHSLIVNDLSQKQSIVGTATFDQYWSVRTSKRTSGTVTVTDHFRAWANRGLNLGTIDQITLCVEGYQSSGSANITQNTFSQGSSSGSSGGSSGSTTTTRIECENMSLSGPYVSRITNPFNGIALYANGDTARATVNFPASRNYNFRLRGCGNNNNLARVDLRIDGRTVGTFYYQGTYPWEAPIDNVYVSAGSHTVEITVTADNGTWDVYADYLVIQ

SEQ ID NO: 2407 - protein, 881 aa, Artificial Sequence
  Synthetic Construct, AS-35 intein modified protein
MQTSITLTSNASGTFDGYYYELWKDTGNTTMTVYTQGRFSCQWSNINNALFRTGKKYNQNWQSLGTIRITYSATYNPNGNSYLCIYGWSTNPLVEFYIVESWGNWRPPGATSLGQVTIDGGTYDIYRTTRVNQPSVAADSRLVAVSPDDKIVFTTIEDFWKKLNTPIERNGKFRKRTCVSEGWQTYAFDENHEASLRPIEKAIRYTADESEQLRRITTQLGRSLDITDEHSLFRYDDGIEEVAGDDLTAGDIIVAPRTLDVEVTQTTLDLSEYIHDNERCPSEQTGSGELNLASKSAISDSRNKETPGVTHNILPQRSKFTDEMTTLSPTAVGGLESEQNETLRVGESTGAIERYINVDDSFGWLLGQFIAQRSISTDALTMTVHTAAEKHAERIVATSDSVFGIKPTVNSIERGYEIVFPSVFDTIVSGLTAKEQSEPEQDVDHTHTDEIGIPECILHAPDDIVLSFLQGFILAENAQRKGNAASEASEMVSESETTVTLETPSVGVKDGLVFLCHRLGVITDISEKSGEEYSVHFEESRYTVSIATEGKTNPLDQILNGERPTMPEGVSVPVPDALLTIHESIANSPHIDQVIPDTVVQQETVSLETLQSLLTGLSTVDLPAQLEAKRDELTLLTEGDLSYLRVESVECVDYDGYLYDLQVGGEPVFTANWLYAHNSIVGTATFDQYWSVRTSKRTSGTVTVTDHFRAWANRGLNLGTIDQITLCVEGYQSSGSANITQNTFSQGSSSGSSGGSSGSTTTTRIECENMSLSGPYVSRITNPFNGIALYANGDTARATVNFPASRNYNFRLRGCGNNNNLARVDLRIDGRTVGTFYYQGTYPWEAPIDNVYVSAGSHTVEITVTADNGTWDVYADYLVIQ

SEQ ID NO: 2408 - protein, 745 aa, Artificial Sequence
  Synthetic Construct, AS-36 intein modified protein
MQTSITLTSNASGTFDGYYYELWKDTGNTTMTVYTQGRFSCQWSNINNALFRTGKKYNQNWQSLGTIRITYSATYNPNGNSYLCIYGWSTNPLVEFYIVESWGNWRPPGATSLGQVTIDGGTYDIYRTTRVNQPCLTADSTVMLKEKGMVSVSEVETGDQIAQRSDTGFQYKPVEETHAYENAETLTVTLTNGCSIRGTPNHRLMVDDEWTRIDEIQPDQEVHYTLGWLRETNQSPPKLHSQSHTTVNQTADSISPDSSEPIELSESENADTGNRHNSAVAVKQSRTQTQLISDEVVSRPEHTRRPDQLSEELAELLGLWIDTGLWHQSGVQFNVERENIAEYIDQLSQQLFDTPAAISDTDGTYTVDITDHKLKEWWKANFGGKPDGTQSSYVPQMIKEAPTNVIEAFLRGCFTAEGGLRKDMRPRLCTSSEDSIDDIAVLMMGLGYPVEKSVIRNADGEPYYSVMPATDDGLSAFLHDVGFIDERREIGLSNIESSDSRALNNTHKIEVESIVESPPATVYDITVADNHEYVTDGIISHNSIVGTATFDQYWSVRTSKRTSGTVTVTDHFRAWANRGLNLGTIDQITLCVEGYQSSGSANITQNTFSQGSSSGSSGGSSGSTTTTRIECENMSLSGPYVSRITNPFNGIALYANGDTARATVNFPASRNYNFRLRGCGNNNNLARVDLRIDGRTVGTFYYQGTYPWEAPIDNVYVSAGSHTVEITVTADNGTWDVYADYLVIQ

SEQ ID NO: 2409 - protein, 775 aa, Artificial Sequence
  Synthetic Construct, AS-37 intein modified protein
MQTSITLTSNASGTFDGYYYELWKDTGNTTMTVYTQGRFSCQWSNINNALFRTGKKYNQNWQSLGTIRITYSATYNPNGNSYLCIYGWSTNPLVEFYIVESWGNWRPPGATSLGQVTIDGGTYDIYRTTRVNQPCVEENSLVSTDEGLRPIKDLDNTTAEFEQWDEIDVGVTTDGGTKTATAVYDNGFANVRQIQTESGFNIAATPNHRFRTLSSDGTYTWKEAGKFESGDRVILQRNTFDAGSRVSLEANERADDAQDTTEGPELPGRMTSELAEFLGYFMGSGYISDETHASVDLVVDSDATELNSYLSNLGEQLFRITPAVESQEMSQVLSFRDCHLSRYFEDNGWKKTDTGHNGDASAAFVPEQILEGDEQVVNGFLRGVFEAIGTVSEKIEILTTSTTLADQLQSLLLSLGHVFTRDSTKLVETNNYHDDQLRQRLCGATRREDERFMNEIGSLIEPDELNLSTRADKNDTYPSSVIDHVQTLDGYDSVSESLKSRINQSQVDGTVSRKLIKDIEAETAETVSIADHELTGFYAATVESVTEDTAYTKDISVPSNNTYIADGFVTHNSIVGTATFDQYWSVRTSKRTSGTVTVTDHFRAWANRGLNLGTIDQITLCVEGYQSSGSANITQNTFSQGSSSGSSGGSSGSTTTTRIECENMSLSGPYVSRITNPFNGIALYANGDTARATVNFPASRNYNFRLRGCGNNNNLARVDLRIDGRTVGTFYYQGTYPWEAPIDNVYVSAGSHTVEITVTADNGTWDVYADYLVIQ

SEQ ID NO: 2410 - protein, 551 aa, Artificial Sequence
  Synthetic Construct, AS-38 intein modified protein
MQTSITLTSNASGTFDGYYYELWKDTGNTTMTVYTQGRFSCQWSNINNALFRTGKKYNQNWQSLGTIRITYSATYNPNGNSYLCIYGWSTNPLVEFYIVESWGNWRPPGATSLGQVTIDGGTYDIYRTTRVNQPSIEADESIVIRRDGETELTEIGSFVDTILAADNQETRITDGHEIALAPNGLEVPSLDTDEQIRWKHIEAVSRHASPDEILLIELESGRSIRATKAHSFVTRRDGDVLPVAGETLVVGDVLPTVGSYDHASGSISVPLQSQSVAADGGTVEPNTNITANAERDSASITSAGIIGSATWERISSIETVAPEYEYVYDLSVSGLETFTTGEGVVTHNSIVGTATFDQYWSVRTSKRTSGTVTVTDHFRAWANRGLNLGTIDQITLCVEGYQSSGSANITQNTFSQGSSSGSSGGSSGSTTTTRIECENMSLSGPYVSRITNPFNGIALYANGDTARATVNFPASRNYNFRLRGCGNNNNLARVDLRIDGRTVGTFYYQGTYPWEAPIDNVYVSAGSHTVEITVTADNGTWDVYADYLVIQ

SEQ ID NO: 2411 - protein, 765 aa, Artificial Sequence
  Synthetic Construct, AS-39 intein modified protein
MQTSITLTSNASGTFDGYYYELWKDTGNTTMTVYTQGRFSCQWSNINNALFRTGKKYNQNWQSLGTIRITYSATYNPNGNSYLCIYGWSTNPLVEFYIVESWGNWRPPGATSLGQVTIDGGTYDIYRTTRVNQPCLTAGTRVLRADTGAETTMGELFALQARDVPVWSLDESLRYVRRHLTRVFPTGVKPVFRLRTASGKTVRATANHPFLTYDGWKPLGELSVADRLAVPRHVPAPERVASWTDDQVLLLGHLIGDGSFVKRQPLRYASVDEANLSAVTEAAANAFSIVAVRDEYAAARCTTLRLPAPYRLTHGRRNPLAAWLDELGLFGLRSYEKFVPQEVFHLPKRQIALFLRHLWATDGSVTLTRQSRGGRIYYASTSLQLIQDVSRLLLRFGISTRVRTTTPKGDHRPGYTLDVSGVDDQRRFLQEIGVHGARGATADRLLEVIRDVSANTNVDTVPRQVWDDVRRLLVEKEMTHREFAAAMGTSFGGSSLWKHAPSRERLGRVAQVLDSAELDVLAVNDVLWDEVVAIEPDGEEQVYDATVLGGHNFVADGIAVHNSIVGTATFDQYWSVRTSKRTSGTVTVTDHFRAWANRGLNLGTIDQITLCVEGYQSSGSANITQNTFSQGSSSGSSGGSSGSTTTTRIECENMSLSGPYVSRITNPFNGIALYANGDTARATVNFPASRNYNFRLRGCGNNNNLARVDLRIDGRTVGTFYYQGTYPWEAPIDNVYVSAGSHTVEITVTADNGTWDVYADYLVIQ

SEQ ID NO: 2412 - protein, 717 aa, Artificial Sequence
  Synthetic Construct, AS-40 intein modified protein
MQTSITLTSNASGTFDGYYYELWKDTGNTTMTVYTQGRFSCQWSNINNALFRTGKKYNQNWQSLGTIRITYSATYNPNGNSYLCIYGWSTNPLVEFYIVESWGNWRPPGATSLGQVTIDGGTYDIYRTTRVNQPCVTADTWVMTASGARQVRDLIDRPFEAVVDGECHPTESRGFFFTGDKPVLRLSTAEGHTLRLTANHPVLRVSKMTRQLRETEWVKAGELRPHDKIVLHDHRALPSWDGAHTEAEGYLIGLLIGGGTLTRDKAILSIWDAAAPKVANGGGSVPAAGVAGVMRAAELAARTLPHRTDFNGWQTTMEGRGEYHMATGALHTLALELGLTPGDKRLTAPLETTSSAFHRGLLRGMFDADGSVQGSQRKGVSIRLPQTDLGNLQTVQRMLLRLGVASTIHQNRRPGGTKVLPDGEGGAKGHSCQAAHELIISGENVVRYAERIGFADSDKMDRLTALLQRYRHTRHAERFIATVQSLEDDGMEAVYDVTVADVHAFDANGLYVHNSIVGTATFDQYWSVRTSKRTSGTVTVTDHFRAWANRGLNLGTIDQITLCVEGYQSSGSANITQNTFSQGSSSGSSGGSSGSTTTTRIECENMSLSGPYVSRITNPFNGIALYANGDTARATVNFPASRNYNFRLRGCGNNNNLARVDLRIDGRTVGTFYYQGTYPWEAPIDNVYVSAGSHTVEITVTADNGTWDVYADYLVIQ

SEQ ID NO: 2413 - protein, 502 aa, Artificial Sequence
  Synthetic Construct, AS-41 intein modified protein
MQTSITLTSNASGTFDGYYYELWKDTGNTTMTVYTQGRFSCQWSNINNALFRTGKKYNQNWQSLGTIRITYSATYNPNGNSYLCIYGWSTNPLVEFYIVESWGNWRPPGATSLGQVTIDGGTYDIYRTTRVNQPCFAGDTEITVSDGRRWMSLPIRQFVTENFDISKPGLDHVGTFYSDPRQPFYVRSIDSQGKTSLKRVTSVSVHRAPAHLVRFATRRGRVLTVTPDHAMLVWDTDYLRKIKALEVAVGDRVPVEEGGLVVADEVVSRETVQALDDRVYCLTVAENHTLVANGIFCGQSIVGTATFDQYWSVRTSKRTSGTVTVTDHFRAWANRGLNLGTIDQITLCVEGYQSSGSANITQNTFSQGSSSGSSGGSSGSTTTTRIECENMSLSGPYVSRITNPFNGIALYANGDTARATVNFPASRNYNFRLRGCGNNNNLARVDLRIDGRTVGTFYYQGTYPWEAPIDNVYVSAGSHTVEITVTADNGTWDVYADYLVIQ

SEQ ID NO: 2414 - protein, 607 aa, Artificial Sequence
  Synthetic Construct, AS-42 intein modified protein
MQTSITLTSNASGTFDGYYYELWKDTGNTTMTVYTQGRFSCQWSNINNALFRTGKKYNQNWQSLGTIRITYSATYNPNGNSYLCIYGWSTNPLVEFYIVESWGNWRPPGATSLGQVTIDGGTYDIYRTTRVNQPCFAAGTLIKTPKGPVPIEQIQSGDLVFNAIGIGVVEGIVCQQKQTITLELSDGTSIVCTHDHPFFCPRGWVAAGDLEVGSGLFSHEDLRRLWSGGASLGLESGSSDGRGAVRSSEVLLRILREEAREPDAGYCGPAEDVRNASTDRAHAEGAWWQWQADPIASDEAARSAGRRVADRVRDEDRREARPEPTAVLLQDRHCEPLANDRNRSGREHSSRGTGEAEGQRQGDVPCSVRVVSISREERGGPEAVYNLRVSGHPSYFAGGVLVHNSIVGTATFDQYWSVRTSKRTSGTVTVTDHFRAWANRGLNLGTIDQITLCVEGYQSSGSANITQNTFSQGSSSGSSGGSSGSTTTTRIECENMSLSGPYVSRITNPFNGIALYANGDTARATVNFPASRNYNFRLRGCGNNNNLARVDLRIDGRTVGTFYYQGTYPWEAPIDNVYVSAGSHTVEITVTADNGTWDVYADYLVIQ

SEQ ID NO: 2415 - protein, 502 aa, Artificial Sequence
  Synthetic Construct, AS-43 intein modified protein
MQTSITLTSNASGTFDGYYYELWKDTGNTTMTVYTQGRFSCQWSNINNALFRTGKKYNQNWQSLGTIRITYSATYNPNGNSYLCIYGWSTNPLVEFYIVESWGNWRPPGATSLGQVTIDGGTYDIYRTTRVNQPCFHGDTLIEIYADGILEEIPIRRFVLEHLDLSQAGVDALGTFYADPVRPAHVRSVDTGGIPHLRKITSVSVHKAPANLIQFSTSRGKNLLVTPDHAMLVWDVSYLRKIRALEVKIGDAVPVWESGVVISDRIVSIDYVPCEDERVYCLTVDRDHNVVGNGIFTGQSIVGTATFDQYWSVRTSKRTSGTVTVTDHFRAWANRGLNLGTIDQITLCVEGYQSSGSANITQNTFSQGSSSGSSGGSSGSTTTTRIECENMSLSGPYVSRITNPFNGIALYANGDTARATVNFPASRNYNFRLRGCGNNNNLARVDLRIDGRTVGTFYYQGTYPWEAPIDNVYVSAGSHTVEITVTADNGTWDVYADYLVIQ

SEQ ID NO: 2416 - protein, 836 aa, Artificial Sequence
  Synthetic Construct, AS-44 intein modified protein
MQTSITLTSNASGTFDGYYYELWKDTGNTTMTVYTQGRFSCQWSNINNALFRTGKKYNQNWQSLGTIRITYSATYNPNGNSYLCIYGWSTNPLVEFYIVESWGNWRPPGATSLGQVTIDGGTYDIYRTTRVNQPCLHPDTYVILPDGRMKKISEIDEDEVLSVNFEDLKLYNKKIKKFKHKAPKILYKIKTAFSELITTGEHKLFVVENGKIVEKCVKDLNGSELIGVVRKLNYSFNDNVEFKDVYVERHYKLDETIRNKLRKVREKLGLTRKDVEKLCGVKEIYIVKIETGKLESIEEERLKKLCSLYGINFEEIIYRDNLHYTNPVKFPKTPTPELMQIIGYIIGDGHFPSNRMLRLKDERKEVLEEYNQLFKTVFNLEGNIKKGDGNYYILEINSKYLIDWFRENIPELFNKTGNERTPEFVFRLNNDLVASYLRGIFDAEGYIRAEAKQIGIGMTSKCFIKEIQFLLLRFGILASYSKIKRKEENWNNTHKLLISDKKSFELFKKYIGFTAKDKMEKLEAILNKMKGLNFRYISIPLTKKEIREFVGVPLKTIKNGDNYCTDYTIEKIIEELNSKGLYDKAEYLKRFLDADIVWTKFKIEEVESDVEYVYDLEVEDYHNFIGNLIINHNSIVGTATFDQYWSVRTSKRTSGTVTVTDHFRAWANRGLNLGTIDQITLCVEGYQSSGSANITQNTFSQGSSSGSSGGSSGSTTTTRIECENMSLSGPYVSRITNPFNGIALYANGDTARATVNFPASRNYNFRLRGCGNNNNLARVDLRIDGRTVGTFYYQGTYPWEAPIDNVYVSAGSHTVEITVTADNGTWDVYADYLVIQ

SEQ ID NO: 2417 - protein, 838 aa, Artificial Sequence
  Synthetic Construct, AS-45 intein modified protein
MQTSITLTSNASGTFDGYYYELWKDTGNTTMTVYTQGRFSCQWSNINNALFRTGKKYNQNWQSLGTIRITYSATYNPNGNSYLCIYGWSTNPLVEFYIVESWGNWRPPGATSLGQVTIDGGTYDIYRTTRVNQPCLNANTEILQESGFRKITELNKDEKVFALCGKEIKPVDGWKVHKTPQHEYNIVVKTVNGLEITTTPNHIFLVKENGSLKEKEAKDLKVGDYVATVDRIRVKEKDIDLSNGDLYFIGYFIGDGYTGVIEKNTLKATPDLAFNPKYPPNFDDSELHKKYFLKCRISKGVAHYIYSKKLRKIFNKLNMLTKDNKNIDAFCNLPLDKLAYLIAGLFDSDGYIYLNRKNIEFYSISEKLVEQLQFVLLRFGIHSSIRKKKTKTMVSPTNGKEYKCKDIYVLTIRDFMSIKRFYENIPLRHEEKRRKLEEIIKNKEIGQIPSEFVALRFTPIAKIWCDCGFSVDLTMFKPRTKRQRELNKKRVKLLFELLDGKKLITNYKEYYSKRKNPYFDFIVREKINGNNYYSLNEKGRVLMSLLNKHIKDKENLEEMYNFLVNLEKCPICGKPIHKEMRYSWKKECYDGDIYWDRIKEIKKIKVNDKYAYDIELPDDGSNSHYIVANGFIVHNSIVGTATFDQYWSVRTSKRTSGTVTVTDHFRAWANRGLNLGTIDQITLCVEGYQSSGSANITQNTFSQGSSSGSSGGSSGSTTTTRIECENMSLSGPYVSRITNPFNGIALYANGDTARATVNFPASRNYNFRLRGCGNNNNLARVDLRIDGRTVGTFYYQGTYPWEAPIDNVYVSAGSHTVEITVTADNGTWDVYADYLVIQ

SEQ ID NO: 2418 - protein, 729 aa, Artificial Sequence
  Synthetic Construct, AS-46 intein modified protein
MQTSITLTSNASGTFDGYYYELWKDTGNTTMTVYTQGRFSCQWSNINNALFRTGKKYNQNWQSLGTIRITYSATYNPNGNSYLCIYGWSTNPLVEFYIVESWGNWRPPGATSLGQVTIDGGTYDIYRTTRVNQPCVPPDTLLILENGFKRIVDIKVGDKVLTHENRFKKVEKVYKRRYIGDIIKIKVRYFPEEIILTPEHPVYAIKTEKRCDGSHGICKFNCLTQYTNPSCKKRYRKYKREWIIAKDLKVGDVIVYPIPNRVRDIKYLSLDKYLSNIKREFCRSRIPEKIEVSEEFCRLVGYFLSEGYCFRDGIGFALGENEKKIIDDIEYLMKKIFNLKPKIRDDGRSEGIELKYYSRVLRDFFGDMFYCGDEKRAWNKALPNEFLYLPKNKQLQIFIGWWRGDKGVTTSEILMNQLRLISLRLGFIITFSKHVPKNPKIGDREVIKYHARWQGRVSILDEKIVDELKNEDIKLPKKDVRYGWIKGNYLYAPIIRIGREYYDGFVYNLEVEDDSSYVTVSGTLHNSIVGTATFDQYWSVRTSKRTSGTVTVTDHFRAWANRGLNLGTIDQITLCVEGYQSSGSANITQNTFSQGSSSGSSGGSSGSTTTTRIECENMSLSGPYVSRITNPFNGIALYANGDTARATVNFPASRNYNFRLRGCGNNNNLARVDLRIDGRTVGTFYYQGTYPWEAPIDNVYVSAGSHTVEITVTADNGTWDVYADYLVIQ

SEQ ID NO: 2419 - protein, 883 aa, Artificial Sequence
  Synthetic Construct, AS-47 intein modified protein
MQTSITLTSNASGTFDGYYYELWKDTGNTTMTVYTQGRFSCQWSNINNALFRTGKKYNQNWQSLGTIRITYSATYNPNGNSYLCIYGWSTNPLVEFYIVESWGNWRPPGATSLGQVTIDGGTYDIYRTTRVNQPCLMPHEKVLTEYGEIKIEDLFKIGKEIVEKDELKEIRKLNIKVHTLNENGEIKIINAPYVWKLKHKGKMIKVKLKNWHSITTTPEHPFLTNNGWIKAENIKKGMYVAIPRKIYGNEDFEKFIEFINSKILTNELIVKVNEKDLKNVELPSTKIYKKQKNVFRSEDIIEHNLNIEKISFSPRIHRCGKPQHYIKLPKSLNEWKAIFYFAGVMFGDGCVDRIANNDEEVFNKLKSLNNLGIEVERIKRKSSYEIIFKNGKNALINLLKILFDYPSEKKSHNIKIPQILYIAPKELVAEFIKGYFDADGYVNLRQNRIEVISASKEFIEGLSILLLRFEITSKIYEIKKSYKETKKKYYQLNIVGKRNLKNFKNIGFSIKYKEENLNKIIEKSRKSEKYPINKDMKRLRILFGMTRNEVNVSYYAKYENGKEIPSYEIVKKFLNSLKPKNLDKKIKVLEGKERDVNYLKAFESDGLIENGRLTKLGREALNIWKNHEFGKENIDYMKSLIENIAFVEVEDVEIIDYDGYVYDLTTETHNFIANGIVVHNSIVGTATFDQYWSVRTSKRTSGTVTVTDHFRAWANRGLNLGTIDQITLCVEGYQSSGSANITQNTFSQGSSSGSSGGSSGSTTTTRIECENMSLSGPYVSRITNPFNGIALYANGDTARATVNFPASRNYNFRLRGCGNNNNLARVDLRIDGRTVGTFYYQGTYPWEAPIDNVYVSAGSHTVEITVTADNGTWDVYADYLVIQ

SEQ ID NO: 2420 - protein, 505 aa, Artificial Sequence
  Synthetic Construct, AS-48 intein modified protein
MQTSITLTSNASGTFDGYYYELWKDTGNTTMTVYTQGRFSCQWSNINNALFRTGKKYNQNWQSLGTIRITYSATYNPNGNSYLCIYGWSTNPLVEFYIVESWGNWRPPGATSLGQVTIDGGTYDIYRTTRVNQPALAYDEPIYLSDGNIINIGEFVDKFFKKYKNSIKKEDNGFGWIDIGNENIYIKSFNKLSLIIEDKRILRVWRKKYSGKLIKITTKNRREITLTHDHPVYISKTGEVLEINAEMVKVGDYIYIPKNNTINLDEVIKVETVDYNGHIYDLTVEDNHTYIAGKNEGFAVSNSIVGTATFDQYWSVRTSKRTSGTVTVTDHFRAWANRGLNLGTIDQITLCVEGYQSSGSANITQNTFSQGSSSGSSGGSSGSTTTTRIECENMSLSGPYVSRITNPFNGIALYANGDTARATVNFPASRNYNFRLRGCGNNNNLARVDLRIDGRTVGTFYYQGTYPWEAPIDNVYVSAGSHTVEITVTADNGTWDVYADYLVIQ

SEQ ID NO: 2421 - protein, 749 aa, Artificial Sequence
  Synthetic Construct, AS-49 intein modified protein
MQTSITLTSNASGTFDGYYYELWKDTGNTTMTVYTQGRFSCQWSNINNALFRTGKKYNQNWQSLGTIRITYSATYNPNGNSYLCIYGWSTNPLVEFYIVESWGNWRPPGATSLGQVTIDGGTYDIYRTTRVNQPCIEGDAKILTDRGFLKMKEVYKLVKNGEKLKVLGLNAETLKTEWKEIIDAQKREARRYEIGVYRKNKNTKDTIKITPDHKFPVFVNGELSKVQLCDIIDNNLSVLSIDYIPMIEEKYESLAEVMYLGGAVLSDGHIVRRNGKPIRVRFTQKDTEEKKDFIEKVKGDVKLIGGNFIEISNRNNVIEYQTSRKIPSEILGFIEVNINTIPLYATKDEIADLIAGFVDGDGCLSGKRRVEIYQNSSHIKKIEGLIVGLYRLGIIPRLRYKRSSTATIYFNNNLETILQRTRRIKLDKLKEFKKPVEDKKLIDISQILPELKEFDYKGYLYKTYKEKLFIGINKLEEYLSKIDKDGIERIKQKIKLLKESDIYSIRIKKVGEDYGEVYNITVKAENEFNHNYVVWTKHYTPIVVFNSIVGTATFDQYWSVRTSKRTSGTVTVTDHFRAWANRGLNLGTIDQITLCVEGYQSSGSANITQNTFSQGSSSGSSGGSSGSTTTTRIECENMSLSGPYVSRITNPFNGIALYANGDTARATVNFPASRNYNFRLRGCGNNNNLARVDLRIDGRTVGTFYYQGTYPWEAPIDNVYVSAGSHTVEITVTADNGTWDVYADYLVIQ

SEQ ID NO: 2422 - protein, 706 aa, Artificial Sequence
  Synthetic Construct, AS-50 intein modified protein
MQTSITLTSNASGTFDGYYYELWKDTGNTTMTVYTQGRFSCQWSNINNALFRTGKKYNQNWQSLGTIRITYSATYNPNGNSYLCIYGWSTNPLVEFYIVESWGNWRPPGATSLGQVTIDGGTYDIYRTTRVNQPCHPKGTKVVVKGKGIVNIEDVKEGNYVLGIDGWQKVKKVWKYEYEGELINVNGLKCTPNHKIPLRYKIKHKKINKNDYLVRDIYAKSLLTKFKGEGKLILCKDFETIGNYEKYINDMDEDFILKSELIGILLAEGHLLRRDIEYFDSSRGKKRISHQYRVEITVNEDEKDFIEKIKYIFKKLFNYELYVRRKKGTKAITLGCAKKDIYLKIEEILKNKEKYLPNAILRGFFEGDGYVNTVRRAVVVNQGTNNYDKIKFIASLLDRLGIKYSFYTYSYEERGKKLKRYVIEIFSKGDLIKFSILISFISRRKNNLLNEIIRQKTLYKIGDYGFYDLDDVCVSLESYKGEVYDLTLEGRPYYFANGILTHNSIVGTATFDQYWSVRTSKRTSGTVTVTDHFRAWANRGLNLGTIDQITLCVEGYQSSGSANITQNTFSQGSSSGSSGGSSGSTTTTRIECENMSLSGPYVSRITNPFNGIALYANGDTARATVNFPASRNYNFRLRGCGNNNNLARVDLRIDGRTVGTFYYQGTYPWEAPIDNVYVSAGSHTVEITVTADNGTWDVYADYLVIQ

SEQ ID NO: 2423 - protein, 813 aa, Artificial Sequence
  Synthetic Construct, AS-51 intein modified protein
MQTSITLTSNASGTFDGYYYELWKDTGNTTMTVYTQGRFSCQWSNINNALFRTGKKYNQNWQSLGTIRITYSATYNPNGNSYLCIYGWSTNPLVEFYIVESWGNWRPPGATSLGQVTIDGGTYDIYRTTRVNQPSILPDEYLTIIEEDGIKVVKIGEYIDDLMRKHKDKIKFSGISEILETKNLKTFSFDKITKKCEIKKVKALIRHPYFGKAYKIKLRSGRTIKVTRGHSLFKYENGKIVEVKGDDVRFGDLIVVPKKLTCVDKEVVINIPKRLINADEEEIKDLVITKHKDKAFFVKLKKTLEDIENNKLKVIFDDCILYLKELGLIDYNIIKKINKVDIKILDEEKFKAYKKYFDTVIEHGNFKKGRCNIQYIKIKDYIANIPDKEFEDCEIGAYSGKINALLKLDEKLAKFLGFFVTRGRLKKQKLKGETVYEISVYKSLPEYQKEIAETFKEVFGAGSMVKDKVTMDNKIVYLVLKYIFKCGDKDKKHIPEELFLASESVIKSFLDGFLKAKKNSHKGTSTFMAKDEKYLNQLMILFNLVGIPTRFTPVKNKGYKLTLNPKYGTVKDLMLDEVKEIEAFEYSGYVYDLSVEDNENFLVNNIYAHNSIVGTATFDQYWSVRTSKRTSGTVTVTDHFRAWANRGLNLGTIDQITLCVEGYQSSGSANITQNTFSQGSSSGSSGGSSGSTTTTRIECENMSLSGPYVSRITNPFNGIALYANGDTARATVNFPASRNYNFRLRGCGNNNNLARVDLRIDGRTVGTFYYQGTYPWEAPIDNVYVSAGSHTVEITVTADNGTWDVYADYLVIQ

SEQ ID NO: 2424 - protein, 885 aa, Artificial Sequence
  Synthetic Construct, AS-52 intein modified protein
MQTSITLTSNASGTFDGYYYELWKDTGNTTMTVYTQGRFSCQWSNINNALFRTGKKYNQNWQSLGTIRITYSATYNPNGNSYLCIYGWSTNPLVEFYIVESWGNWRPPGATSLGQVTIDGGTYDIYRTTRVNQPCLTGDTKVIVNGEIREIGEVIEEISNGKFGVTLTNNLKVLGIDEDGKIREFDVQYVYKDKTNTLIKIKTKMGRELKVTTYHPLLINHKNGEIKWEKAENLKVGDKLATPRYILFNESDYNEELAEWLGYFIGDGHADKESNKITFTNGDEKLRKRFAELTEKLFKDAKIKERIHKDRTPDIYVNSKEAVEFIDKLGLRGKKADKVRIPKEIMRSDALRAFLRAYFDCDGGIEKHSIVLSTASKEMAEDLVYALLRFGIIAKLREKVNKNNNKVYYHIVISNSSNLRTFLDNIGFSQERKLKKLLEIIKDENPNLDVITIDKEKIRYIRDRLKVKLTRDIEKDNWSYNKCRKITQELLKEIYYRLEELKEIEKALEENILIDWDEVAERRKEIAEKTGIRSDRILEYIRGKRKPSLKNYIKIANTLGKNIEKIIDAMRIFAKKYSSYAEIGKMLNMWNSSIKIYLESNTQEIEKLEEIRKTELKLVKEILNDEKLIDSIGYVLFLASNEIYWDEIVEIEQLNGEFTIYDLHVPRYHNFIGGNLPTILHNSIVGTATFDQYWSVRTSKRTSGTVTVTDHFRAWANRGLNLGTIDQITLCVEGYQSSGSANITQNTFSQGSSSGSSGGSSGSTTTTRIECENMSLSGPYVSRITNPFNGIALYANGDTARATVNFPASRNYNFRLRGCGNNNNLARVDLRIDGRTVGTFYYQGTYPWEAPIDNVYVSAGSHTVEITVTADNGTWDVYADYLVIQ

SEQ ID NO: 2425 - protein, 773 aa, Artificial Sequence
  Synthetic Construct, AS-53 intein modified protein
MQTSITLTSNASGTFDGYYYELWKDTGNTTMTVYTQGRFSCQWSNINNALFRTGKKYNQNWQSLGTIRITYSATYNPNGNSYLCIYGWSTNPLVEFYIVESWGNWRPPGATSLGQVTIDGGTYDIYRTTRVNQPSVSKDTPILVKIDGKVKRTTFEELDKIYFETNDENEMYKKVDNLEVLTVDENFRVRWRKVSTIIRHKVDKILRIKFEGGYIELTGNHSIMMLDENGLVAKKASDIKVGDCFLSFVANIEGEKDRLDLKEFEPKDITSRVKIINDFDIDEDTAWMLGLYVAEGAVGFKGKTSGQVIYTLGSHEHDLINKLNDIVDKKGFSKYENFTGSGFDRKRLSAKQIRILNTQLARFVEENFYDGNGRRARNKRIPDIIFELKENLRVEFLKGLADGDSSGNWREVVRISSKSDNLLIDTVWLARISGIESSIFENEARLIWKGGMKWKKSNLLPAEPIIKMIKKLENKINGNWRYILRHQLYEGKKRVSKDKIKQILEMVNVEKLSDKEKEVYDLLKKLSKTELYALVVKEIEIIDYNDFVYDVSVPNNEMFFAGNVPILLHNSIVGTATFDQYWSVRTSKRTSGTVTVTDHFRAWANRGLNLGTIDQITLCVEGYQSSGSANITQNTFSQGSSSGSSGGSSGSTTTTRIECENMSLSGPYVSRITNPFNGIALYANGDTARATVNFPASRNYNFRLRGCGNNNNLARVDLRIDGRTVGTFYYQGTYPWEAPIDNVYVSAGSHTVEITVTADNGTWDVYADYLVIQ

SEQ ID NO: 2426 - protein, 880 aa, Artificial Sequence
  Synthetic Construct, AS-54 intein modified protein
MQTSITLTSNASGTFDGYYYELWKDTGNTTMTVYTQGRFSCQWSNINNALFRTGKKYNQNWQSLGTIRITYSATYNPNGNSYLCIYGWSTNPLVEFYIVESWGNWRPPGATSLGQVTIDGGTYDIYRTTRVNQPCLTGDAKITLPDEREIKIEDFIKMFEERKLKHVLNRNGEDLVLAGVKFNSKIVNHKVYRLVLESGREIEATGDHKFLTRDGWKEVYELKEDDEVLVYPALEGVGFEVDERRIIGLNEFYEFLTNYEIKLGYKPLGKAKSYKELITRDKEKILSRVLELSDKYSKSEIRRKIEEEFGIKISLTTIKNLINGKIDGFALKYVRKIKELGWDEITYDDEKAGIFARLLGFIIGDGHLSKSKEGRILITATINELEGIKKDLEKLGIKASNIIEKDIEHKLDGREIKGKTSFIYINNKAFYLLLNFWGVEIGNKTINGYNIPKWIKYGNKFVKREFLRGLFGADGTKPYIKKYNINGIKLGIRVENISKDKTLEFFEEVKKMLEEFEVESYIKVSKIDNKNLTELIVKANNKNYLKYLSRISYAYEKDNFARLVGEYLRIKEAYKDIILKEIAENALKEADGEKSLRELARKYNVPVDFIINQLKGKDIGLPRNFMTFEEFLKEKVVDGKYVSERIIKKECIGYRDVYDITCHKDPSFIANGFVSHNSIVGTATFDQYWSVRTSKRTSGTVTVTDHFRAWANRGLNLGTIDQITLCVEGYQSSGSANITQNTFSQGSSSGSSGGSSGSTTTTRIECENMSLSGPYVSRITNPFNGIALYANGDTARATVNFPASRNYNFRLRGCGNNNNLARVDLRIDGRTVGTFYYQGTYPWEAPIDNVYVSAGSHTVEITVTADNGTWDVYADYLVIQ

SEQ ID NO: 2427 - protein, 831 aa, Artificial Sequence
  Synthetic Construct, AS-55 intein modified protein
MQTSITLTSNASGTFDGYYYELWKDTGNTTMTVYTQGRFSCQWSNINNALFRTGKKYNQNWQSLGTIRITYSATYNPNGNSYLCIYGWSTNPLVEFYIVESWGNWRPPGATSLGQVTIDGGTYDIYRTTRVNQPCLTPDTYVVLGDGRIETIEDIVNAKERNVLSLDLDNLSIKIDTAIKFWKLRYNGNLSKITLSNNYELKATPDHCLLVLRDNQLKWIPAKDIKENDYIAMPFNYKVERKPISLLNLLKYLDITDVLIEFDENSTIFEKIAEYIRNNIKTSTKYKYLRNRRVPLKYLIEWNFDLDEIEKEAKYIYKSVAGTKKIPLFKLDERFWYFAGLVLGDGSIQDSKIRIAQTPLKDVKSILDETFPFLHNWISGNQVIISNPIIAEILEKLGMRNGKLNGIIFSLPESYINALIAGYFDTDGCFSLLYDKKAKKHNLRMVLTSKRRDVLEKIGIYLNSIGILNTLHKSREVYSLIISNKSLETFKEKIAKYLKIRKEAFINGYKTYKKEHEERFECDLLPVKEVFKKLTFEKGRKEILKDSKIHIENWYKEKTNNIPREKLKTVLRYANNSEHKEFLEKIVNGDISFVRVKKVENIPYDGYVYDLSIKHNQNFISNGVISHNSIVGTATFDQYWSVRTSKRTSGTVTVTDHFRAWANRGLNLGTIDQITLCVEGYQSSGSANITQNTFSQGSSSGSSGGSSGSTTTTRIECENMSLSGPYVSRITNPFNGIALYANGDTARATVNFPASRNYNFRLRGCGNNNNLARVDLRIDGRTVGTFYYQGTYPWEAPIDNVYVSAGSHTVEITVTADNGTWDVYADYLVIQ

SEQ ID NO: 2428 - protein, 790 aa, Artificial Sequence
  Synthetic Construct, AS-56 intein modified protein
MQTSITLTSNASGTFDGYYYELWKDTGNTTMTVYTQGRFSCQWSNINNALFRTGKKYNQNWQSLGTIRITYSATYNPNGNSYLCIYGWSTNPLVEFYIVESWGNWRPPGATSLGQVTIDGGTYDIYRTTRVNQPSLGRDELIFIKEGDKLKVCKIGEAIDEFMEKYKDKIIVDGDTEILYLDGIAEVYTISVNVKTGKAEFKRVYAISRHKPRGKVYKVIGKDGTSIIVTEDHSLFNYDENGNLVCVKPRQMKHIIRNFNNPYDVEYRIGDYIETNYQRTDSKYNSRQNDIPEKLKITKELCQFLGLFVAEGSYITNGISITTKDDDIAKFIERFVKEQINENIAVKRYEDSVRFVNKGFYRFLKEHINGKAINKNSPEFILKGDKEMKLAFLGGLISGDGYVSKDGRVQIYTTSEQLLGQLHLLLSDLGMIYSITKIKEEGEKIEIKRNEIVRNYKLYVIEIAKNCTEDLKPYVIPKYKKERIKPANYDQLPYDYRIIKEHLRKITDKKPYNDYAWKSNNRKLKLNTLEKIEQLNPHLREEINKFKLNIPFEIKEIKEIDYNGYVYDLSVEDNENFITATGILCHNSIVGTATFDQYWSVRTSKRTSGTVTVTDHFRAWANRGLNLGTIDQITLCVEGYQSSGSANITQNTFSQGSSSGSSGGSSGSTTTTRIECENMSLSGPYVSRITNPFNGIALYANGDTARATVNFPASRNYNFRLRGCGNNNNLARVDLRIDGRTVGTFYYQGTYPWEAPIDNVYVSAGSHTVEITVTADNGTWDVYADYLVIQ

SEQ ID NO: 2429 - protein, 870 aa, Artificial Sequence
  Synthetic Construct, AS-57 intein modified protein
MQTSITLTSNASGTFDGYYYELWKDTGNTTMTVYTQGRFSCQWSNINNALFRTGKKYNQNWQSLGTIRITYSATYNPNGNSYLCIYGWSTNPLVEFYIVESWGNWRPPGATSLGQVTIDGGTYDIYRTTRVNQPSLPYDEKILIFENNEYKLVKIGEFVEKYLNRYKDRAITYGDNNIEVYIKDENIYAPSFDKDGKIVLKPITHAIRHRGKEIYEIELESGKKVRVTGDHSVFTINDNLDVVEVKASDLKVGDFIITPKIIPSISKDKIYLSEIVKNKDKYYVKIKDHIKFIEEHEEILKESYKEYKTKWKDLKPVLKKKNAFRLDLIEDLVDKEKIEKISYGHANYINNKIKLDEKFGYLIGAFLSEGHWNDKCVEISSTNKEFIENLVEIIEEILGKDAYYITVKGDKRRYKDLYVIGLNKTVAMIFESLGLNKLSSNKEIPSILLSNETFLKGLIKGYIDGDGSIYVDESKRDYSIRLYTTSETLRDTLCLALKILGINYRLSIDKKSKVNENWRDCYVIKITGKENIEKLLDVEIKNNGGKDVIPKIAEKFKEIINQYSQREWKERFGIDVNNLHIWEDLKKGYMSRYRAKKVLNIMKNVKEIEEKYGRLLDKIGQLIDNDLLFERIKSIRVLDEIPEYVYDISVEGTENFIGGEGFICLHNSIVGTATFDQYWSVRTSKRTSGTVTVTDHFRAWANRGLNLGTIDQITLCVEGYQSSGSANITQNTFSQGSSSGSSGGSSGSTTTTRIECENMSLSGPYVSRITNPFNGIALYANGDTARATVNFPASRNYNFRLRGCGNNNNLARVDLRIDGRTVGTFYYQGTYPWEAPIDNVYVSAGSHTVEITVTADNGTWDVYADYLVIQ

SEQ ID NO: 2430 - protein, 789 aa, Artificial Sequence
  Synthetic Construct, AS-58 intein modified protein
MQTSITLTSNASGTFDGYYYELWKDTGNTTMTVYTQGRFSCQWSNINNALFRTGKKYNQNWQSLGTIRITYSATYNPNGNSYLCIYGWSTNPLVEFYIVESWGNWRPPGATSLGQVTIDGGTYDIYRTTRVNQPCVDGDTTVLLDGKLIKIKDLEDKWKDVKVLTSDDLNPKLTSLSKYWKLNADEYGKKIYKIKTELGREIIATEDHPFYTTNGRKRCGELKVGDEVIIYPNDFPMFEDDNRVIVDEEKIKKVINNIGGTYKNKIINELKDRKLIPLTYNDQKASILARIVGHVMGDGSLIINNKNSRVVFRGDIEDLKTIKEDLKELGYDGEEIKLHEGETEITDYNGKKRIIKGKGYSFEVRKKSLCILLKALGCVGGDKTKKMYGIPNWIKTAPKYIKKEFLSAYFGSELTTPKIRNHGTSFKELSFKIAKIEEIFDEDRFIKDIKEMLKEFGIELKVRVEEGNLRKDGYKTKVYVASIYNHKEFFGRIGYTYANKKETLARYAYEYLLTKEKYLKDRNIKKLENNTKFITFDKFIKEKCLKNGFVKEKIVSIEETKVDYVYDITTISETHNFIANGFLTGNSIVGTATFDQYWSVRTSKRTSGTVTVTDHFRAWANRGLNLGTIDQITLCVEGYQSSGSANITQNTFSQGSSSGSSGGSSGSTTTTRIECENMSLSGPYVSRITNPFNGIALYANGDTARATVNFPASRNYNFRLRGCGNNNNLARVDLRIDGRTVGTFYYQGTYPWEAPIDNVYVSAGSHTVEITVTADNGTWDVYADYLVIQ

SEQ ID NO: 2431 - protein, 808 aa, Artificial Sequence
  Synthetic Construct, AS-59 intein modified protein
MQTSITLTSNASGTFDGYYYELWKDTGNTTMTVYTQGRFSCQWSNINNALFRTGKKYNQNWQSLGTIRITYSATYNPNGNSYLCIYGWSTNPLVEFYIVESWGNWRPPGATSLGQVTIDGGTYDIYRTTRVNQPSLPYEEKIIIKEGEFIKPVEIGKLVDEMIERFGFEKIGNSEVCDLPIDIYALSLDQDEKVHWKRIISCIRHKHNGKLIKIKTKSGREITATPYHSFVIRKDNKIIPVKGSELKIGDRIPVVKHIPANCVEAINISDYVSGNYVVDNINNKIAPKINGKSIPNNIKLDYDFGYFIGIYLAEGSVTKYFVSISNVDELILNKIRAFADKLGLNYGEYDNNNGFAESHDIRIYSSTLAEFLSNFGTSSNTKKIAEFVFGANKEFVRGLIRGYFDGDGNVNADRKVIRVTSNSKELIDGIAILLARFNIFSIKTKTKNQFVLIIPHRYAKKFHEEINFSVEKKKSELERLVSSLNDDKTYDSIDMIPSIGDALTKLGEKVDYPKVILKKFERKQKIGRATLQRHLRRIEELAVKKGVNILALKEYWLLKKAVESDVIWDEIVKIEEISCDKKYVYDISVEGLETFTTFDGVLTHNSIVGTATFDQYWSVRTSKRTSGTVTVTDHFRAWANRGLNLGTIDQITLCVEGYQSSGSANITQNTFSQGSSSGSSGGSSGSTTTTRIECENMSLSGPYVSRITNPFNGIALYANGDTARATVNFPASRNYNFRLRGCGNNNNLARVDLRIDGRTVGTFYYQGTYPWEAPIDNVYVSAGSHTVEITVTADNGTWDVYADYLVIQ

SEQ ID NO: 2432 - protein, 825 aa, Artificial Sequence
  Synthetic Construct, AS-60 intein modified protein
MQTSITLTSNASGTFDGYYYELWKDTGNTTMTVYTQGRFSCQWSNINNALFRTGKKYNQNWQSLGTIRITYSATYNPNGNSYLCIYGWSTNPLVEFYIVESWGNWRPPGATSLGQVTIDGGTYDIYRTTRVNQPCLTSNSKILTDDGYYIKLEKLKEKLDLHIKIYNTEEGEKSSNILFVSERYADEKIIRIKTESGRVLEGSKDHPVLTLNGYVPMGMLKEGDDVIVYPYEGVEYEEPSDEIILDEDDFAEYDKQIIKYLKDRGLLPLRMDNKNIGIIARLLGFAFGDGSIVKENGDRERLYVAFYGKRETLIKIREDLEKLGIKASRIYSRKREVEIRNAYGDEYTSLCEDNSIKITSKAFALFMHKLGMPIGKKTEQIYKIPEWIKKAPKWVKRNFLAGLFGADGSRAVFKNYTPLPINLTMSKSEELKENILEFLNEIKLLLAEFDIESMIYEIKSLDGRVSYRLAIVGEESIKNFLGRINYEYSGEKKVIGLLAYEYLRRKDIAKEIRKKCIKRAKELYKKGVTVSEMLKMDEFRNEFISKRLIERAVYENLDEDDVRISTKFPKFEEFIEKYGVIGGFVIDKIKEIEEISYDSKLYDVGIVSKEHNFIANSIVVHNSIVGTATFDQYWSVRTSKRTSGTVTVTDHFRAWANRGLNLGTIDQITLCVEGYQSSGSANITQNTFSQGSSSGSSGGSSGSTTTTRIECENMSLSGPYVSRITNPFNGIALYANGDTARATVNFPASRNYNFRLRGCGNNNNLARVDLRIDGRTVGTFYYQGTYPWEAPIDNVYVSAGSHTVEITVTADNGTWDVYADYLVIQ

SEQ ID NO: 2433 - protein, 672 aa, Artificial Sequence
  Synthetic Construct, AS-61 intein modified protein
MQTSITLTSNASGTFDGYYYELWKDTGNTTMTVYTQGRFSCQWSNINNALFRTGKKYNQNWQSLGTIRITYSATYNPNGNSYLCIYGWSTNPLVEFYIVESWGNWRPPGATSLGQVTIDGGTYDIYRTTRVNQPSVDYNEPIIIKENGEIKVVKIGELIDKIIENSENIRREGILEIAKCKGIEVIAFNSNYKFKFMPVSEVSRHPVSEMFEIVVEGNKKVRVTRSHSVFTIRDNEVVPIRVDELKVGDILVLAKELPNIEEDIEIDKKFSKILGYIIAEGYYDDKKIVLSYDYNEKEFINETIDYFKSLNSDITIYSKDLNIQIEVKNKKIINLLKKLRVKNKRIPSIIFKSPYEIKKSFIDGIFNGKDAKVFVSKELAEDVIFLLLQIKENATINKKSINDIEVYEVRRITNIYTNRKLEKLINSDFIFLKIKEINKVEPTSGYAYDLTVPNAENFVAGFGGFVLHNSIVGTATFDQYWSVRTSKRTSGTVTVTDHFRAWANRGLNLGTIDQITLCVEGYQSSGSANITQNTFSQGSSSGSSGGSSGSTTTTRIECENMSLSGPYVSRITNPFNGIALYANGDTARATVNFPASRNYNFRLRGCGNNNNLARVDLRIDGRTVGTFYYQGTYPWEAPIDNVYVSAGSHTVEITVTADNGTWDVYADYLVIQ

SEQ ID NO: 2434 - protein, 791 aa, Artificial Sequence
  Synthetic Construct, AS-62 intein modified protein
MQTSITLTSNASGTFDGYYYELWKDTGNTTMTVYTQGRFSCQWSNINNALFRTGKKYNQNWQSLGTIRITYSATYNPNGNSYLCIYGWSTNPLVEFYIVESWGNWRPPGATSLGQVTIDGGTYDIYRTTRVNQPCFHPDEVLFIDRGRGLECITFKELFELEDKDNVKILSFDGEKLSLKKLKLASKRYYNDDLITLRFNLGREIKITKDHPVVILEDGELKIKLTSDVKEGDKVILPYGNFGEEREIEIDILEELSKTDLIEKVWIHNKDLATNEFNIIKPYLSNKYPHDVKRNGTIRAKDILPIKEILDKYGSKNRLFTAKSKSTTIPYKIKIDKDFARLIGYYLSEGWISKDYGRNGVVRKRIGLCFGIHEEEYINDVKNILNKLGIKYIEKIKDGSHSILISSKILAYVFENILNCGINCYNKNIPPQMFNAKEEIKWEFLKGLFRGDGGIVRLNNNKNLNIEFATVSKKMAHSLLILLQLLGIVASVKKCYNNKSTTMAYIIRINGLEQVKKIGELFGKKWENYKDIAESYKRNIEPLGYKKSDNFAILEVKEIIKEHYSGYVYSVETENSLLITSYGILIHNSIVGTATFDQYWSVRTSKRTSGTVTVTDHFRAWANRGLNLGTIDQITLCVEGYQSSGSANITQNTFSQGSSSGSSGGSSGSTTTTRIECENMSLSGPYVSRITNPFNGIALYANGDTARATVNFPASRNYNFRLRGCGNNNNLARVDLRIDGRTVGTFYYQGTYPWEAPIDNVYVSAGSHTVEITVTADNGTWDVYADYLVIQ

SEQ ID NO: 2435 - protein, 731 aa, Artificial Sequence
  Synthetic Construct, AS-63 intein modified protein
MQTSITLTSNASGTFDGYYYELWKDTGNTTMTVYTQGRFSCQWSNINNALFRTGKKYNQNWQSLGTIRITYSATYNPNGNSYLCIYGWSTNPLVEFYIVESWGNWRPPGATSLGQVTIDGGTYDIYRTTRVNQPSIPGDEVVWAKVDGEAKLIPIEDLYELWKEGRDVEVAALTEEGVVWSSVDRVARHRRRTGLVKIITRTGREVIVTEDHSVFTVRDGKIVDVPTSELSEGDWIVLPARLPAGDSDEIDGIKIDEDLAFLLGLYVAEGSLTNQKDAVRIHNKDPEVIEEIDRIVREKGWEGRYYESDHSYWIKSRKLRQLCEKLGTKAREKRLGPLLSLKPELLAAALRGYYTGDGSFSVKPHGRSAIIEATTVSKRLADELLVALQILDIVARRYECDDTKGSTRYRVMITKSEYIRTFVEKVGFAQSEKNERIRKFLAERKWTRGRSDIPTELIGSPYTYVEVEYISDRVAADGGLMKAELEHLYFDKIKEIVPLDRDDEYVYDVVEVKLGHNFVGGQGVLLHNSIVGTATFDQYWSVRTSKRTSGTVTVTDHFRAWANRGLNLGTIDQITLCVEGYQSSGSANITQNTFSQGSSSGSSGGSSGSTTTTRIECENMSLSGPYVSRITNPFNGIALYANGDTARATVNFPASRNYNFRLRGCGNNNNLARVDLRIDGRTVGTFYYQGTYPWEAPIDNVYVSAGSHTVEITVTADNGTWDVYADYLVIQ

SEQ ID NO: 2436 - protein, 859 aa, Artificial Sequence
  Synthetic Construct, AS-64 intein modified protein
MQTSITLTSNASGTFDGYYYELWKDTGNTTMTVYTQGRFSCQWSNINNALFRTGKKYNQNWQSLGTIRITYSATYNPNGNSYLCIYGWSTNPLVEFYIVESWGNWRPPGATSLGQVTIDGGTYDIYRTTRVNQPCVAPETKICLADGRFVRADELFEELKERGRLVKCDESEEVYELREPVGVSSLDKDAVEIVEGKITHVWRLKADKLVEVEVKNGRSIRTTPEHKFLVLDPSGEIVEKRADELEIGDYIVCTQKLVHEGMSEEELKREVFRRLGRDFFVHLPEEEAESVLELAKERGIKALWETLEVDIEENSFYYQLRKGRIRADILVDLAEELGLDLADLYDAVEVSYRSNTKSTKPIRLPEPEDLFYLAGLMFGDGCWNQLTNGSEAIQGEVKRIASDMGLEVRVRRYEGKTARIDFPETVPRILEALFDYPRRKKAHRIRVNDFLTRAPLDCIAEFIRGYFDADGTVEEGRSAVSVTSVSREFLEDLQLLLQKFDVASYLREGDGAYTLYVSGARSLERFPGFREPEKAEKLKKLMEKASSSELEKVPISGEILREVRGDVPTTRMFNCYSNYEGGQVGLTKSSLEKVISTLEAVGVEGEALERLKALARDDVCFLEVVRVEEVEYDGYVYDFTVEEHHNFAAEGFVVHNSIVGTATFDQYWSVRTSKRTSGTVTVTDHFRAWANRGLNLGTIDQITLCVEGYQSSGSANITQNTFSQGSSSGSSGGSSGSTTTTRIECENMSLSGPYVSRITNPFNGIALYANGDTARATVNFPASRNYNFRLRGCGNNNNLARVDLRIDGRTVGTFYYQGTYPWEAPIDNVYVSAGSHTVEITVTADNGTWDVYADYLVIQ

SEQ ID NO: 2437 - protein, 642 aa, Artificial Sequence
  Synthetic Construct, AS-65 intein modified protein
MQTSITLTSNASGTFDGYYYELWKDTGNTTMTVYTQGRFSCQWSNINNALFRTGKKYNQNWQSLGTIRITYSATYNPNGNSYLCIYGWSTNPLVEFYIVESWGNWRPPGATSLGQVTIDGGTYDIYRTTRVNQPSVSADTPILVRRGGEVLRVTFEDLDSWYFGDRGGEYVDVSDLEVLTVDRNFRVTWARVSKLIRHRARKILRVHLEDGTIELTGNHAVMVLDEGGLRAVKASEIEEGSFLLSFVAELDEQPTDGGTVVTSVGSGSRVSDTTYELPVEVRVELLRELADDGVIEASEDVSVDLAWLARISGVESRVTDDGVELVWETRTGDLLPADPVLKLVERLESDLVDDLESWVFDGRVSKEAVRKVLSSVDAKNLRGDARRAYRMLRTLVRSDVHAVKVEDLDVMDYDGYVYDVSVPGNEMFFAGEVPVLLHNSIVGTATFDQYWSVRTSKRTSGTVTVTDHFRAWANRGLNLGTIDQITLCVEGYQSSGSANITQNTFSQGSSSGSSGGSSGSTTTTRIECENMSLSGPYVSRITNPFNGIALYANGDTARATVNFPASRNYNFRLRGCGNNNNLARVDLRIDGRTVGTFYYQGTYPWEAPIDNVYVSAGSHTVEITVTADNGTWDVYADYLVIQ

SEQ ID NO: 2438 - protein, 819 aa, Artificial Sequence
  Synthetic Construct, AS-66 intein modified protein
MQTSITLTSNASGTFDGYYYELWKDTGNTTMTVYTQGRFSCQWSNINNALFRTGKKYNQNWQSLGTIRITYSATYNPNGNSYLCIYGWSTNPLVEFYIVESWGNWRPPGATSLGQVTIDGGTYDIYRTTRVNQPCLAPGTKILTEHGCWVKVEDLPKMLTDQKLKVYDVDEGREDDSEIKFVMERGIEEDERAVVLVTESGLTIEGSEDHPVLTPEGYVELGEIEEGDLVVVYPFEGVEYEEKEGTILDESDFEDVDPQVLRYLEERDLIPLRWSDPKVGTLARILGFAMGDGHLGEQAGRLTLSFYGDERTLRELKRDLESLGVKANLHVRKRRYEIETASGRYEGEATSVELRVASRSFALLMEKLGMPRGRKVETPYKVPDWIKEAPLWVKRNFLAGLFAADGSVVKFKRYTPLPINLTQAKVEELEENLREFMNDVAKLLREFGIETTLYEVKSKKNVVYKLAIVGEENIKRFLGKVGYEYDPEKKVEGLAAYAYLKLKERVKKDRKEAAETAAEVYEETGSITKAHEAVADVVNRRFVERVVYDGGISSVRVPEDFPTFERFKEERVLAGGFVIEEVVEVKGVEPEYDRFYDIGVCHGAHNFIADGVVVHNSIVGTATFDQYWSVRTSKRTSGTVTVTDHFRAWANRGLNLGTIDQITLCVEGYQSSGSANITQNTFSQGSSSGSSGGSSGSTTTTRIECENMSLSGPYVSRITNPFNGIALYANGDTARATVNFPASRNYNFRLRGCGNNNNLARVDLRIDGRTVGTFYYQGTYPWEAPIDNVYVSAGSHTVEITVTADNGTWDVYADYLVIQ

SEQ ID NO: 2439 - protein, 854 aa, Artificial Sequence
  Synthetic Construct, AS-67 intein modified protein
MQTSITLTSNASGTFDGYYYELWKDTGNTTMTVYTQGRFSCQWSNINNALFRTGKKYNQNWQSLGTIRITYSATYNPNGNSYLCIYGWSTNPLVEFYIVESWGNWRPPGATSLGQVTIDGGTYDIYRTTRVNQPCFAPGTRVITASGDVVEIDEIVERAAETAVDGGLREGSTEVTVGVTNVRTLAAWDGDLTSNDVVAVEKIEAPSRAVRVRTRSGAELVVSEDHKFLVDTEDGPRMVEASELKSGDELYSVRELRVSEKVPTYLELLLEAEDKFYVHPTEEFEEAVAERYGSLAEACREKELPYRAREAKERRYYELSEFARLATAVIESVDEATEYIDYVTAGGRKRVKFSSPRPGKEVMYVAGLIASDGSVDTERGFVMFSNTERELLSAFEEIVTEEFGVDASKTENQNGVTMLRVNSRVLARVFERLADPKTVLKMPRELVAAYLAGYVDGDGHLKDGKIVITTADRERAGDLQLLLKRLGVPSVLRERDGAYDVVVTGHDAAELAEELPLRHPKKAEAAASMSSGRRSSRFDRVSRRFGRLLREVRRKYGVRASDLGSSSTISQIESGERRATRRLALEIVERLEEVVGDVEEVRELRELAEGNYVLDEVVEVETVEYEHEYLYDVTVVPDHTLVVENGIITSNSIVGTATFDQYWSVRTSKRTSGTVTVTDHFRAWANRGLNLGTIDQITLCVEGYQSSGSANITQNTFSQGSSSGSSGGSSGSTTTTRIECENMSLSGPYVSRITNPFNGIALYANGDTARATVNFPASRNYNFRLRGCGNNNNLARVDLRIDGRTVGTFYYQGTYPWEAPIDNVYVSAGSHTVEITVTADNGTWDVYADYLVIQ

SEQ ID NO: 2440 - protein, 654 aa, Artificial Sequence
  Synthetic Construct, AS-68 intein modified protein
MQTSITLTSNASGTFDGYYYELWKDTGNTTMTVYTQGRFSCQWSNINNALFRTGKKYNQNWQSLGTIRITYSATYNPNGNSYLCIYGWSTNPLVEFYIVESWGNWRPPGATSLGQVTIDGGTYDIYRTTRVNQPCSWTNARAVTRRGFVHVDDLTTDDEVMSVDDQGRTIWQQIDEVVRFPFSGTLYSLGGREINATITANHRVVGLNREKTKWVEHTPTSLPGNKMWVYTAGEGSNEDYPLTDTEIRLAVWGLTDSHRSPDGRWTFYQSGEKAEQVRKLLADAGIEYRERARNRGITEIDGKVLKAPPKTQYEFSLGKVQELDDLLDRGRSELPTWTLSLSQRQARLFLEEYRFTDGTDTTSAGDSYVLYVCKDRMREQLQMLAAANGLRASTTEYRPGHWRLNISNRALSGLYKNTVEEVAYEGEVWCLRVPNGRFFIEDGGKIHLTGNSIVGTATFDQYWSVRTSKRTSGTVTVTDHFRAWANRGLNLGTIDQITLCVEGYQSSGSANITQNTFSQGSSSGSSGGSSGSTTTTRIECENMSLSGPYVSRITNPFNGIALYANGDTARATVNFPASRNYNFRLRGCGNNNNLARVDLRIDGRTVGTFYYQGTYPWEAPIDNVYVSAGSHTVEITVTADNGTWDVYADYLVIQ

SEQ ID NO: 2441 - protein, 668 aa, Artificial Sequence
  Synthetic Construct, AS-69 intein modified protein
MQTSITLTSNASGTFDGYYYELWKDTGNTTMTVYTQGRFSCQWSNINNALFRTGKKYNQNWQSLGTIRITYSATYNPNGNSYLCIYGWSTNPLVEFYIVESWGNWRPPGATSLGQVTIDGGTYDIYRTTRVNQPSLACSTPILTTNGWSTMGALQDGDEVYAPDGQPTKVIKAHPINLNRPCFKVRFRDGQEVVTDAEHLWQVNDRNNGGRDRVMTTQEIADAPWGGRYRFRVPVTEPLQTPEADLPVDPWLLGAWLGDGDASMVSICSGSQDLDYLISRVEGLGLSHRVNRYGSRAASVYVHGMRAVFSELGLLKNKHIPDRYLTASVAQRRQLLAGLMDSDGTVSDRQVTISMKNERLMRQVLQLVRSLGYRAGFGSRMARLNGRDCGLVYVVRFHTGWGESPFDMPRKRDGWEQATKTSVQNLRLNAIVAVEPVETVPVRCITVAHESSLYVAGEGFVPTHNSIVGTATFDQYWSVRTSKRTSGTVTVTDHFRAWANRGLNLGTIDQITLCVEGYQSSGSANITQNTFSQGSSSGSSGGSSGSTTTTRIECENMSLSGPYVSRITNPFNGIALYANGDTARATVNFPASRNYNFRLRGCGNNNNLARVDLRIDGRTVGTFYYQGTYPWEAPIDNVYVSAGSHTVEITVTADNGTWDVYADYLVIQ

SEQ ID NO: 2442 - protein, 773 aa, Artificial Sequence
  Synthetic Construct, AS-70 intein modified protein
MQTSITLTSNASGTFDGYYYELWKDTGNTTMTVYTQGRFSCQWSNINNALFRTGKKYNQNWQSLGTIRITYSATYNPNGNSYLCIYGWSTNPLVEFYIVESWGNWRPPGATSLGQVTIDGGTYDIYRTTRVNQPCVKNDSLIFTDRGLVTAAELAVGVPEEHAAFTEVGVDTSTGRATTNAVYNGGRSPTKRARLALGYELEATPEHPIRVLRDDALAWVRMDELHVGDRVALRRGSEVWGRSSLPEAFRWVKPKYAANLKLPKGLVLDEVAAEACGLLVSEGTLTKRLVTEFTNADADNVGFISRWAASIGIDLSRNGSDSIQYLLCSVVLREWLAWLGLDYTRAAGKCIPRAVRFGGRDIMRAFLRGLFDGDASVDPLKGVIEFCTASERMAREVQVALLGLGILASRHSRTVAGYEQLYWRVTVNDVATFEREVGFSSNWNRLRLREAVARAEGRCRNPNVDTVPINGLVERLYRTAQKQLSWSSQEGRIFGNYVHGEHAPSRAALERMVQRWGSECPTECLPIEAFLELPVAFLSVESIEDGEADVVDLSVPETHEFVANGVVCHNSIVGTATFDQYWSVRTSKRTSGTVTVTDHFRAWANRGLNLGTIDQITLCVEGYQSSGSANITQNTFSQGSSSGSSGGSSGSTTTTRIECENMSLSGPYVSRITNPFNGIALYANGDTARATVNFPASRNYNFRLRGCGNNNNLARVDLRIDGRTVGTFYYQGTYPWEAPIDNVYVSAGSHTVEITVTADNGTWDVYADYLVIQ

SEQ ID NO: 2443 - protein, 762 aa, Artificial Sequence
  Synthetic Construct, AS-71 intein modified protein
MQTSITLTSNASGTFDGYYYELWKDTGNTTMTVYTQGRFSCQWSNINNALFRTGKKYNQNWQSLGTIRITYSATYNPNGNSYLCIYGWSTNPLVEFYIVESWGNWRPPGATSLGQVTIDGGTYDIYRTTRVNQPCLPASTRILRADTGAESTLGELLASGEQPLVWSLDERMRMVARPMVKVFPSGRKEVFRLRLASGREVEATGNHPFLTVDGWIPLDRLTVGDRLATPRSVPEPVHTERMADAEVVLLAHMIGDGSCVRRQPVRYASIDEQNLAAVSEAAEHFGVTAVRDDYAAARVTTLRLPAPYRLSRGKRNPIAAWLDELGLFGLRSHEKFIPRRVFALPNDQVALFLRHLWATDGSVRWDSTYRQARVYYTSTSRRLIDDVAQLLLRLGVHGRIRRVTKPGYRDAWHLTIDGADNQTVFLRDVGVHGARGDAAQVALAELEPLVRNTNVDTVPNEVWNQVRHLLATKNITHREFSAAMGSRFCGSTMWKRSPSRSRLARVAAVLDDADIEMYATNDVFWDKIVEITSLGEQDVYDGTVPGTHNFVAQSISVHNSIVGTATFDQYWSVRTSKRTSGTVTVTDHFRAWANRGLNLGTIDQITLCVEGYQSSGSANITQNTFSQGSSSGSSGGSSGSTTTTRIECENMSLSGPYVSRITNPFNGIALYANGDTARATVNFPASRNYNFRLRGCGNNNNLARVDLRIDGRTVGTFYYQGTYPWEAPIDNVYVSAGSHTVEITVTADNGTWDVYADYLVIQ

SEQ ID NO: 2444 - protein, 650 aa, Artificial Sequence
  Synthetic Construct, AS-72 intein modified protein
MQTSITLTSNASGTFDGYYYELWKDTGNTTMTVYTQGRFSCQWSNINNALFRTGKKYNQNWQSLGTIRITYSATYNPNGNSYLCIYGWSTNPLVEFYIVESWGNWRPPGATSLGQVTIDGGTYDIYRTTRVNQPCFPAGTVVSGPSAEAATRRWFEGELVVFTTASGKQLSLTGNHPVLTRGGWVPANLLNEGDEVVRSTRPQGATPLVVPDHHQVPALIEDVWGSFAVNGLHRVPAAPEDFHGDGQRGEVDIVGPDRTLWCGHDAAIAQQREQQFFTRRTESSGLLVAESVAQLVDLWQAPHSGSSIGRSGLPFALIGGHGGGPVERGLTVAAGGYPGLHEALADYRPGDAVLPPQGVFAGSSEIGGDDCVIGKVDSTRWDAPALPFLVEGRAGYASRGKELFDRLTGQVELDRIVILRRVQWSGHVFSLTSSEGWHTGNSLIVSNSIVGTATFDQYWSVRTSKRTSGTVTVTDHFRAWANRGLNLGTIDQITLCVEGYQSSGSANITQNTFSQGSSSGSSGGSSGSTTTTRIECENMSLSGPYVSRITNPFNGIALYANGDTARATVNFPASRNYNFRLRGCGNNNNLARVDLRIDGRTVGTFYYQGTYPWEAPIDNVYVSAGSHTVEITVTADNGTWDVYADYLVIQ

SEQ ID NO: 2445 - protein, 746 aa, Artificial Sequence
  Synthetic Construct, AS-73 intein modified protein
MQTSITLTSNASGTFDGYYYELWKDTGNTTMTVYTQGRFSCQWSNINNALFRTGKKYNQNWQSLGTIRITYSATYNPNGNSYLCIYGWSTNPLVEFYIVESWGNWRPPGATSLGQVTIDGGTYDIYRTTRVNQPCFPAGTPVDTIDGPKPIESLRAGDRVLSHDGSYATVEKLIENTNDQPLVSISHFGHKEPIRCTPEHPILVWTDRDVETLIDGDGADPFNGFVWLAAQDVHPSDFIVATAPLETRERRVFDLMNHVGEGTYEEVDGLIRKVNTDARHRNKQRHRQGFVAVTRYVEESYDLGLILGWYLAEGHVSKRSGVEDVRPTGVHFTLGANEIERHVELGMAFKQVFGVDLVLHTNHSDHSTRMVCNSKIVASLLLSLAGTGYSTKRLAHEVMTADEDFQRGLLVGLFRGDGCTTTGGMVLDLVNQELIDQVQLLLRRLGIVSVVRTYTNQAGNPTGQVFVPGLPGTNEEFIFDVDKNLQNYTGRKGTKRTTYQVVHGRHVYGIRAVERTGETPRQVYNLHVEGTHTYTIRGAVVHNSIVGTATFDQYWSVRTSKRTSGTVTVTDHFRAWANRGLNLGTIDQITLCVEGYQSSGSANITQNTFSQGSSSGSSGGSSGSTTTTRIECENMSLSGPYVSRITNPFNGIALYANGDTARATVNFPASRNYNFRLRGCGNNNNLARVDLRIDGRTVGTFYYQGTYPWEAPIDNVYVSAGSHTVEITVTADNGTWDVYADYLVIQ

SEQ ID NO: 2446 - protein, 676 aa, Artificial Sequence
  Synthetic Construct, AS-74 intein modified protein
MQTSITLTSNASGTFDGYYYELWKDTGNTTMTVYTQGRFSCQWSNINNALFRTGKKYNQNWQSLGTIRITYSATYNPNGNSYLCIYGWSTNPLVEFYIVESWGNWRPPGATSLGQVTIDGGTYDIYRTTRVNQPCVDGDTSVTLASGDEKPIRDIVESTLEDPTEISDGFYQESDIDVLTTDGGAVAPGRATKVWKRQAPEKMYRIRTESGRELEVTPSHPLFVQSEGGLSPLVADDLSENDFVAVPRALPADDGDDFGQHVDDLGSVTARKTADAEAVRSEDAATTPDVIPNVGDQLRRIRTSLRLSQHDCGLPRSTYQQYERGDRNPSRSRLQTVLTAFERRIEQLSSLSDRVDDGDSDAIAAARDELNPSQASLASGMDATRTAIGDDERTEARPDGGAVADAERAVADALCRALAVADDVERLRSLADGDIGWDRIDSIEPVEPEDEWVYDLEVESTHSYLSNDVVSHNSIVGTATFDQYWSVRTSKRTSGTVTVTDHFRAWANRGLNLGTIDQITLCVEGYQSSGSANITQNTFSQGSSSGSSGGSSGSTTTTRIECENMSLSGPYVSRITNPFNGIALYANGDTARATVNFPASRNYNFRLRGCGNNNNLARVDLRIDGRTVGTFYYQGTYPWEAPIDNVYVSAGSHTVEITVTADNGTWDVYADYLVIQ

SEQ ID NO: 2447 - protein, 829 aa, Artificial Sequence
  Synthetic Construct, AS-75 intein modified protein
MQTSITLTSNASGTFDGYYYELWKDTGNTTMTVYTQGRFSCQWSNINNALFRTGKKYNQNWQSLGTIRITYSATYNPNGNSYLCIYGWSTNPLVEFYIVESWGNWRPPGATSLGQVTIDGGTYDIYRTTRVNQPSIPADEQVVVRRNGETELTEIGPLVDSLMDSRETRSFDDHEVTLAPDGIEVPSLSSEETVEWKPIEEVSRHETPDELLRFELESGRSIRATKAHSFVTRQENEVVPVAGEELEAGDWLPVVASLDATDTQETVDLRKYLPAGDYWYTSVLADGGAEAVPGGPDQLRNKRAALEAGELAEHTAYPVQGTVGLPEQFPLDEETGFFVGAWLAEGSLADHYVSISNVDAAFQSRIRSFAERFDLTVNEYENDSGFAAGYDIRLNGTILSDFLRAACTDDGEKSIPGFAIGANEAFLKGLLQGYFSGDGNVGTNAIRSSSTSDRLTAGVGLLLARFDVYATLGQQEDSRTLRVPKKHVSRFDNRIGMVGERGAELEALAESADSDGPDATDQIPNFGDALEAVAEAADIPQRQVNSATKRQRIDRSRLARLVAAAEAELDGEQSELDALRQAVTGDVVWDRIESIETVESDHEYVYDVSVEGLETFTTADGVVTHNSIVGTATFDQYWSVRTSKRTSGTVTVTDHFRAWANRGLNLGTIDQITLCVEGYQSSGSANITQNTFSQGSSSGSSGGSSGSTTTTRIECENMSLSGPYVSRITNPFNGIALYANGDTARATVNFPASRNYNFRLRGCGNNNNLARVDLRIDGRTVGTFYYQGTYPWEAPIDNVYVSAGSHTVEITVTADNGTWDVYADYLVIQ

SEQ ID NO: 2448 - protein, 659 aa, Artificial Sequence
  Synthetic Construct, AS-76 intein modified protein
MQTSITLTSNASGTFDGYYYELWKDTGNTTMTVYTQGRFSCQWSNINNALFRTGKKYNQNWQSLGTIRITYSATYNPNGNSYLCIYGWSTNPLVEFYIVESWGNWRPPGATSLGQVTIDGGTYDIYRTTRVNQPCFIGDTLIPLADGKSYRIKDLMDWGTEFIVYACTPTGKIVAAQATAKLTRRNAPLVKVILDNGEEIICTPDHQFMLRDGTYKEAQLLQAETSLMPFYSKTDKDGYTLITQPYSSRWQKAHWIIARSGLLGKVPRFEGQKTFIHHQNFDESDNRPENLEFMGNRDHSAYHRSLVERNQHWHSAEFEEKRVASLAQKAKTSEGYQYYAERGTRNIFQYMEQQPEHFKNAVAGNGNRGKQYLVEYNKTEKGRGKSQEIANRYYTCEICGVDVKTPIGLHNHRRKEHQCNHKVVAVNLLNYTEDVYCLTVPEYHNFALKAGVFVHNSIVGTATFDQYWSVRTSKRTSGTVTVTDHFRAWANRGLNLGTIDQITLCVEGYQSSGSANITQNTFSQGSSSGSSGGSSGSTTTTRIECENMSLSGPYVSRITNPFNGIALYANGDTARATVNFPASRNYNFRLRGCGNNNNLARVDLRIDGRTVGTFYYQGTYPWEAPIDNVYVSAGSHTVEITVTADNGTWDVYADYLVIQ

SEQ ID NO: 2449 - protein, 689 aa, Artificial Sequence
  Synthetic Construct, AS-77 intein modified protein
MQTSITLTSNASGTFDGYYYELWKDTGNTTMTVYTQGRFSCQWSNINNALFRTGKKYNQNWQSLGTIRITYSATYNPNGNSYLCIYGWSTNPLVEFYIVESWGNWRPPGATSLGQVTIDGGTYDIYRTTRVNQPALALDTALPTPSGWTTMGDVQVGDQLYDAHGRPTTVVAATEVLTGRPCYEVEFSDGSRIVADAQHQWLTESRAARKSRWAADKQYNRARNQNIVASVVTTEAIAGTLRVGADQRANHAVLTADPLSGSDVDLPIPPYVLGAWLGDGHSASARITCETPEIPMYLEACGLRVDHQGAMLYSLKFPDGDPRGSVQGVLRTIGVLNDKHIPADYLRASEGQRRDLLAGLMDTDGTVVRGVGSCQFAVTNKRLADDVYELVVSLGYKCGRTTRRVQGRSPETSTCHILNFSTVDDVFRLERKHLLHKEERPVTRARIARRYITAVRPIESVPVRCVEVDNTEHLYLAGESMIPTHNSIVGTATFDQYWSVRTSKRTSGTVTVTDHFRAWANRGLNLGTIDQITLCVEGYQSSGSANITQNTFSQGSSSGSSGGSSGSTTTTRIECENMSLSGPYVSRITNPFNGIALYANGDTARATVNFPASRNYNFRLRGCGNNNNLARVDLRIDGRTVGTFYYQGTYPWEAPIDNVYVSAGSHTVEITVTADNGTWDVYADYLVIQ

SEQ ID NO: 2450 - protein, 744 aa, Artificial Sequence
  Synthetic Construct, AS-78 intein modified protein
MQTSITLTSNASGTFDGYYYELWKDTGNTTMTVYTQGRFSCQWSNINNALFRTGKKYNQNWQSLGTIRITYSATYNPNGNSYLCIYGWSTNPLVEFYIVESWGNWRPPGATSLGQVTIDGGTYDIYRTTRVNQPCLPEDALVHTAKGLVPIRDVQVGDLVQTPLGFRRVVDKFDQGFQDVYEIETNATYPRATLNHRQAVLEDAKGGIVWKHIASLEAGDRLLHNKQVLPGTVTHLPADFTESRPSHSRTAKSFVVPELTAEVAWLIGFTHGDGYVALGRNKYDKPYGRVEWSMNSLDAEVTSRIQAKIDAALALFGLSAVHSITKGENTAKSICSSIRLAEYFHRHIKQPNIPLTVPSFILQGSVDIRAAYLAGLMDSDGAVNNRPPHLITSVYRSFIRQVSVVLSSLGIAGRLTTTYPQNSNWQVKYNLTIPALKERYNALISPHSAKGELRQGLKMYGFTVPGAVMRETYTYSEMREMGFQGSRTVDANYERYVAEADISLDIPVTVKGLGSYDHVQTYDIEVDEAHCFYCDGYLTHNSIVGTATFDQYWSVRTSKRTSGTVTVTDHFRAWANRGLNLGTIDQITLCVEGYQSSGSANITQNTFSQGSSSGSSGGSSGSTTTTRIECENMSLSGPYVSRITNPFNGIALYANGDTARATVNFPASRNYNFRLRGCGNNNNLARVDLRIDGRTVGTFYYQGTYPWEAPIDNVYVSAGSHTVEITVTADNGTWDVYADYLVIQ

SEQ ID NO: 2451 - protein, 501 aa, Artificial Sequence
  Synthetic Construct, AS-79 intein modified protein
MQTSITLTSNASGTFDGYYYELWKDTGNTTMTVYTQGRFSCQWSNINNALFRTGKKYNQNWQSLGTIRITYSATYNPNGNSYLCIYGWSTNPLVEFYIVESWGNWRPPGATSLGQVTIDGGTYDIYRTTRVNQPCVDYETEVVLGNGERKKIGEIVERAIEEAEKNGKLGRVDDGFYAPIDIEVYSLDLETLKVRKARANIAWKRTAPKKMMLVKTRGGKRIRVTPTHPFFVLEEGKVAMRKARDLEEGNKIATIEGLSVSWDEVAEILEYEPKDPWVYDLQVPGYHNFLANGIFVHNSIVGTATFDQYWSVRTSKRTSGTVTVTDHFRAWANRGLNLGTIDQITLCVEGYQSSGSANITQNTFSQGSSSGSSGGSSGSTTTTRIECENMSLSGPYVSRITNPFNGIALYANGDTARATVNFPASRNYNFRLRGCGNNNNLARVDLRIDGRTVGTFYYQGTYPWEAPIDNVYVSAGSHTVEITVTADNGTWDVYADYLVIQ

SEQ ID NO: 2452 - protein, 605 aa, Artificial Sequence
  Synthetic Construct, AS-80 intein modified protein
MQTSITLTSNASGTFDGYYYELWKDTGNTTMTVYTQGRFSCQWSNINNALFRTGKKYNQNWQSLGTIRITYSATYNPNGNSYLCIYGWSTNPLVEFYIVESWGNWRPPGATSLGQVTIDGGTYDIYRTTRVNQPCVAPETLIITENGTKEIGEVVERWMKELGEIEYDDGISYSPAFEKVASLNGGKVKMLPVRRVWKLRSPGKMIKIRSESGKQITVTPETKLLTIIDGSLEWVEARKLKKGNYVAVVNKERSIVPIGDFLAKLLKFYGVELNLNEAVERDQARKLLETLKSKGLSDVTIEIPEKLRRFIKCDRVRYVDLVEMLSSMEGELKEEVMLLLSDVGDIHEVIQERLKEIGKILESDASWERIAEVEEVVRDGHVYDLTVEGSHSFIANGFVVHNSIVGTATFDQYWSVRTSKRTSGTVTVTDHFRAWANRGLNLGTIDQITLCVEGYQSSGSANITQNTFSQGSSSGSSGGSSGSTTTTRIECENMSLSGPYVSRITNPFNGIALYANGDTARATVNFPASRNYNFRLRGCGNNNNLARVDLRIDGRTVGTFYYQGTYPWEAPIDNVYVSAGSHTVEITVTADNGTWDVYADYLVIQ

SEQ ID NO: 2453 - protein, 731 aa, Artificial Sequence
  Synthetic Construct, AS-81 intein modified protein
MQTSITLTSNASGTFDGYYYELWKDTGNTTMTVYTQGRFSCQWSNINNALFRTGKKYNQNWQSLGTIRITYSATYNPNGNSYLCIYGWSTNPLVEFYIVESWGNWRPPGATSLGQVTIDGGTYDIYRTTRVNQPCLLPDEKVVVPSVGFVTLKELFETASKVVERDDEKEIRELDERITSVNGDGKTGLVKASYVWKVRHKGKVIRVKLKNWHGVTVTPEHPFLTTKGWKRADQLRPGDYVAVPRFIHGNEDEKIFLSYVKVKKSGEEWKEYFYLAGRKGNIDVNLLFVAPKRYVVEFLRGYFEERSEVKGESVIVEARELVEPLSLALLRFGIFSKIQGSKLIVTGKRNLEAFKDYIGFKDEREKALEEAIEKVKGSEVYPIFEEIRRLRLLFGFTREELGSYAKYENSEAPTYEELMEILDFIERGSPSLSKKIAILEGKLKAELRVLEEEGLIKDGKLTPLGRELLEVWRNREFDSKDVDYIRNIAETLVFIPVENVEEEEYDGYVYDLTTETHNFIANGILVHNSIVGTATFDQYWSVRTSKRTSGTVTVTDHFRAWANRGLNLGTIDQITLCVEGYQSSGSANITQNTFSQGSSSGSSGGSSGSTTTTRIECENMSLSGPYVSRITNPFNGIALYANGDTARATVNFPASRNYNFRLRGCGNNNNLARVDLRIDGRTVGTFYYQGTYPWEAPIDNVYVSAGSHTVEITVTADNGTWDVYADYLVIQ

SEQ ID NO: 2454 - protein, 533 aa, Artificial Sequence
  Synthetic Construct, AS-82 intein modified protein
MQTSITLTSNASGTFDGYYYELWKDTGNTTMTVYTQGRFSCQWSNINNALFRTGKKYNQNWQSLGTIRITYSATYNPNGNSYLCIYGWSTNPLVEFYIVESWGNWRPPGATSLGQVTIDGGTYDIYRTTRVNQPALYYFSEIQLPNGKEFIGKLVDELFEKYHDKIGKYKDMEYVELNEEDTFEVISIGPDLSARRHKVTHVWRRKVKDGEKLVKIRTASGKELVLTQDHPVFVLLGRDVARRDAGNVKVGDEIAVLNTRPDFSVLSPPAMPELLSEPFNYELSSIGDVAWDEVVEVDEIDAKGLGVEYLYDLTVDINHNYVANGIVVSNSIVGTATFDQYWSVRTSKRTSGTVTVTDHFRAWANRGLNLGTIDQITLCVEGYQSSGSANITQNTFSQGSSSGSSGGSSGSTTTTRIECENMSLSGPYVSRITNPFNGIALYANGDTARATVNFPASRNYNFRLRGCGNNNNLARVDLRIDGRTVGTFYYQGTYPWEAPIDNVYVSAGSHTVEITVTADNGTWDVYADYLVIQ

SEQ ID NO: 2455 - protein, 670 aa, Artificial Sequence
  Synthetic Construct, AS-83 intein modified protein
MQTSITLTSNASGTFDGYYYELWKDTGNTTMTVYTQGRFSCQWSNINNALFRTGKKYNQNWQSLGTIRITYSATYNPNGNSYLCIYGWSTNPLVEFYIVESWGNWRPPGATSLGQVTIDGGTYDIYRTTRVNQPCFSGEETVVIRENGEVKVLRLKDFVEKALEKPSGEGLDGDVKVVYHDFRNENVEVLTKDGFTKLLYANKRIGKQKLRRVVNLEKDYWFALTPDHKVYTTDGLKEAGEITEKDELISVPITVFDCEDEDLKKIGLLPLTSDDERLRKIATLMGILFNGGSIDEGLGVLTLKSERSVIEKFVITLKELFGKFEYEIIKEENTILKTRDPRIIKFLVGLGAPIEGKDLKMPWWVKLKPSLFLAFLEGFRAHIVEQLVDDPNKNLPFFQELSWYLGLFGIKADIKVEEVGDKHKIIFDAGRLDVDKQFIETWEDVEVTYNLTTEKGNLLANGLFVKNSIVGTATFDQYWSVRTSKRTSGTVTVTDHFRAWANRGLNLGTIDQITLCVEGYQSSGSANITQNTFSQGSSSGSSGGSSGSTTTTRIECENMSLSGPYVSRITNPFNGIALYANGDTARATVNFPASRNYNFRLRGCGNNNNLARVDLRIDGRTVGTFYYQGTYPWEAPIDNVYVSAGSHTVEITVTADNGTWDVYADYLVIQ

SEQ ID NO: 2456 - protein, 792 aa, Artificial Sequence
  Synthetic Construct, AS-84 intein modified protein
MQTSITLTSNASGTFDGYYYELWKDTGNTTMTVYTQGRFSCQWSNINNALFRTGKKYNQNWQSLGTIRITYSATYNPNGNSYLCIYGWSTNPLVEFYIVESWGNWRPPGATSLGQVTIDGGTYDIYRTTRVNQPCFPPTEEAVFKFGDKVKIATFEEVAKNFKFEHKVEIDGFKGEYSIPNDLYVLTFNDGKAEWTRVTKFLRRKHEGKIRVIKTKTGRTIRTTPEHKFFVYKDGELVKKRADELEPGDELVLLWRFESEETLTEINLLEAFKDLPQEEKEKVYVRGIKDLDLTPLKEKYGDKVYYWARQDSMPLSVFYELNVDLDKEFRLGRDATTYELPSKLKITPSLAKLIGYFVSDGNYSDKDLRITVGHEDVEKEIVNILEELGLPYSFLEWEGKTKQIVIGSRLLRLVFKHVFKIPEGAPNKRLPEGFLSFPFEAKVALLSGLFNGDGYVVRGEHHLSIGYASTSKGLIRDILYLLASLGIFARVYRVPKEKMKGANHDLYKLYIAGTDLVRLVELLELREGHREKLGEIGNRKPARVKKIADFYIDVVDEVSEEEYSGYVYDLEVENEGHSFVAADGILVSNSIVGTATFDQYWSVRTSKRTSGTVTVTDHFRAWANRGLNLGTIDQITLCVEGYQSSGSANITQNTFSQGSSSGSSGGSSGSTTTTRIECENMSLSGPYVSRITNPFNGIALYANGDTARATVNFPASRNYNFRLRGCGNNNNLARVDLRIDGRTVGTFYYQGTYPWEAPIDNVYVSAGSHTVEITVTADNGTWDVYADYLVIQ

SEQ ID NO: 2457 - protein, 522 aa, Artificial Sequence
  Synthetic Construct, AS-85 intein modified protein
MQTSITLTSNASGTFDGYYYELWKDTGNTTMTVYTQGRFSCQWSNINNALFRTGKKYNQNWQSLGTIRITYSATYNPNGNSYLCIYGWSTNPLVEFYIVESWGNWRPPGATSLGQVTIDGGTYDIYRTTRVNQPCFPGDTRILVQIDGVPQKITLRELYELFEDERYENMVYVRKKPKREIKVYSIDLETGKVVLTDIEDVIKAPATDHLIRFELEDGRSFETTVDHPVLVYENGRFIEKRAFEVKEGDKVLVSELELVEQSSSSQDNPKNENLGSPEHDQLLEIKNIKYVRANDDFVFSLNAKKYHNVIINENIVTHQSIVGTATFDQYWSVRTSKRTSGTVTVTDHFRAWANRGLNLGTIDQITLCVEGYQSSGSANITQNTFSQGSSSGSSGGSSGSTTTTRIECENMSLSGPYVSRITNPFNGIALYANGDTARATVNFPASRNYNFRLRGCGNNNNLARVDLRIDGRTVGTFYYQGTYPWEAPIDNVYVSAGSHTVEITVTADNGTWDVYADYLVIQ

SEQ ID NO: 2458 - protein, 836 aa, Artificial Sequence
  Synthetic Construct, AS-86 intein modified protein
MQTSITLTSNASGTFDGYYYELWKDTGNTTMTVYTQGRFSCQWSNINNALFRTGKKYNQNWQSLGTIRITYSATYNPNGNSYLCIYGWSTNPLVEFYIVESWGNWRPPGATSLGQVTIDGGTYDIYRTTRVNQPCLTGDAKVIANGELTTIGELVERISNGKLGPTPVRGLTVLGIDEDGKLVELPVEYVYKDKTSELVKIRTRLGRELKVTPYHPLLVNRRNGKIEWVKAEELKPGDRLAIPSFLPAMLNDNPLAEWLGYFFGNGYTDSEERVVFESKSKELRKRFMELTRKLFQDAEIKEDSGKVYVSSSEVKRLVKSLNKDSIPEQAWKGLRSFLRAYFDCNAEIKDKIIVSTAGKEIAEQISYALAGLGIVAEVDDKGSVIISDPENVSRFLDEIGFSVEEKKEEAKALIKKSTLNLGIYVDKELISYVREKLKLSFYENETMWSPEKAREIAWKLMKEIYYRLDELERFKKALSKSVIIDWSEVEKKKEEISEKTGISVNEILEYAKGKRKPSLEEYVKIAKALGVELKETLEAIFTFGKKYLGYVISDEIETLEEVRKEELKRLKELLNDEKLKKGVAYLIFLAQNELLWDEIIEVEKLKGDFVIYDLHVPKYHNFIGGNLPTVLHNSIVGTATFDQYWSVRTSKRTSGTVTVTDHFRAWANRGLNLGTIDQITLCVEGYQSSGSANITQNTFSQGSSSGSSGGSSGSTTTTRIECENMSLSGPYVSRITNPFNGIALYANGDTARATVNFPASRNYNFRLRGCGNNNNLARVDLRIDGRTVGTFYYQGTYPWEAPIDNVYVSAGSHTVEITVTADNGTWDVYADYLVIQ

SEQ ID NO: 2459 - protein, 945 aa, Artificial Sequence
  Synthetic Construct, AS-87 intein modified protein
MQTSITLTSNASGTFDGYYYELWKDTGNTTMTVYTQGRFSCQWSNINNALFRTGKKYNQNWQSLGTIRITYSATYNPNGNSYLCIYGWSTNPLVEFYIVESWGNWRPPGATSLGQVTIDGGTYDIYRTTRVNQPCVTGDTKVYTPDEREVKIRDFMNYFENGLIKEVSNRIGRDTVIAAVSFNSRIVGHPVYRLTLESGRIIEATGDHMFLTPEGWKQTYDIKEGSEVLVKPTLEGTPYEPDPRVIIDIKEFYNFLEKIEREHNLKPLKEAKTFRELITKDKEKILRRALELRAEIENGLTKREAEILELISADTWIPRAELEKKARISRTRLNQILQRLEKKGYIERRIEGRKQFVRKIRNGKILRNAMDIKRILEEEFGIKISYTTVKKLLSGNVDGMAYRILKEVKEKWLVRYDDEKAGILARVVGFILGDGHLARNGRIWFNSSKEELEMLANDLRKLGLKPSEIIERDSSSEIQGRKVKGRIYMLYVDNAAFHALLRFWKVEVGNKTKKGYTVPEWIKKGNLFVKREFLRGLFGADGTKPCGKRYNFNGIKLEIRAKKESLERTVEFLNDVADLLREFDVDSKITVSPTKEGFIIRLIVTPNDANYLNFLTRVGYAYAKDTYARLVGEYIRIKLAYKNIILPGIAEKAIELATVTNSTYAAKVLGVSRDFVVNRLKGTQIGITRDFMTFEEFMKERVLNGYVIEKVIKKEKLGYLDVYDVTCARDHSFISNGLVSHNSIVGTATFDQYWSVRTSKRTSGTVTVTDHFRAWANRGLNLGTIDQITLCVEGYQSSGSANITQNTFSQGSSSGSSGGSSGSTTTTRIECENMSLSGPYVSRITNPFNGIALYANGDTARATVNFPASRNYNFRLRGCGNNNNLARVDLRIDGRTVGTFYYQGTYPWEAPIDNVYVSAGSHTVEITVTADNGTWDVYADYLVIQ

SEQ ID NO: 2460 - protein, 736 aa, Artificial Sequence
  Synthetic Construct, AS-88 intein modified protein
MQTSITLTSNASGTFDGYYYELWKDTGNTTMTVYTQGRFSCQWSNINNALFRTGKKYNQNWQSLGTIRITYSATYNPNGNSYLCIYGWSTNPLVEFYIVESWGNWRPPGATSLGQVTIDGGTYDIYRTTRVNQPCIDGNAKIIFENEGEEHLTTMAEMYERYRHLGEFYDENYNRWGIDVSSVPIYVKSFDPETRRVVKGRVRAIWKYELGEEIPKYEIRTHKGTKILTSPWHPFFVLTPDFEVIEKRADELKVGDILIGGMPDGEDHELIFDYWLAGFIAGNGNLDDSEREYKARELLDGIENGIPPKILRKGKNAVLSFITGLFDAEGHVNDKSGIELGMVNKKLIEAVTHYLNSLGIKARMREKRRKNGIDYIMHVEEYSSLLRFYELIGKHLQNNEKKEKLEILLHKHNGGAFDLSLNFNAFKEWASRYGVEFKTNGNQILAIIGNEKVSLGQWHARGHVSKAVLVKMLRKLYEVTKNDEVKEMLHLIESLEVVKEITITNEPKTFYDLTVDKYQNYLAGENGMIFVHNSIVGTATFDQYWSVRTSKRTSGTVTVTDHFRAWANRGLNLGTIDQITLCVEGYQSSGSANITQNTFSQGSSSGSSGGSSGSTTTTRIECENMSLSGPYVSRITNPFNGIALYANGDTARATVNFPASRNYNFRLRGCGNNNNLARVDLRIDGRTVGTFYYQGTYPWEAPIDNVYVSAGSHTVEITVTADNGTWDVYADYLVIQ

SEQ ID NO: 2461 - protein, 775 aa, Artificial Sequence
  Synthetic Construct, AS-89 intein modified protein
MQTSITLTSNASGTFDGYYYELWKDTGNTTMTVYTQGRFSCQWSNINNALFRTGKKYNQNWQSLGTIRITYSATYNPNGNSYLCIYGWSTNPLVEFYIVESWGNWRPPGATSLGQVTIDGGTYDIYRTTRVNQPCFTGDTRILTEKGLIPIEEIVHETGKKPKVVTHAGLKDIIETYDNGEMEVFRVTTEDGYELKVTGDHKFLVFDENGNPTLKPLKELKVGDYVYILAPEWKGGEYVELDTNIELKGKGYNVNLPSKLDEKLAYLLGIIYADGHIRHYFENGKRKNSKIEIYLHQDETEIKEKVKRYFKEIFGIEPKEFLKEEQHKVILVIPSTKIVKFLEINGLLKDKSENIRVPEAIFRSRPSVIAAFLAGFFDGDGSIDQNYRIAFKSISREFIKEAQLLFLALGIVTSIQEYNPPNPNNKTVYTLRVQTRDMKIKAFNVLKESVKLSKIMKEAISKLEENGKNKKFSFPFNAIYHIKDPKIRAKIQRDYKILSYNSKVTHRAFINNILKLKEELGLDDEEVKYFEMLSKLYPTKITKIEPLGKAHVYDLQVEDVHLLTGNGIYTSNSIVGTATFDQYWSVRTSKRTSGTVTVTDHFRAWANRGLNLGTIDQITLCVEGYQSSGSANITQNTFSQGSSSGSSGGSSGSTTTTRIECENMSLSGPYVSRITNPFNGIALYANGDTARATVNFPASRNYNFRLRGCGNNNNLARVDLRIDGRTVGTFYYQGTYPWEAPIDNVYVSAGSHTVEITVTADNGTWDVYADYLVIQ

SEQ ID NO: 2462 - protein, 719 aa, Artificial Sequence
  Synthetic Construct, AS-90 intein modified protein
MQTSITLTSNASGTFDGYYYELWKDTGNTTMTVYTQGRFSCQWSNINNALFRTGKKYNQNWQSLGTIRITYSATYNPNGNSYLCIYGWSTNPLVEFYIVESWGNWRPPGATSLGQVTIDGGTYDIYRTTRVNQPCVVGETRILTPEGYIKAEELFKLAKERGKMEAIAVEGIAEGGEPYAYSLEILLPGDKQVKYETVHGNAVEVADPVSVPAYVWKVGMKEVARVRTKEGYEITATLDHKLMTPEGWKEIKDLKPGDKILLPRFEVEEDFGSESIGEDLAFVLGWFIGDGYLNVKDKRAWFYFNAEKEEEIAWKIREILAKRFEIKAEPHRYGNQIKLGVRGKAYEWLESIVKTNEKRIPEIVYRLKPNEIASFLRGLFSADGYVDNDMAIRLTSKSRELLREVQDLLLLFGILSKIYERPYKREFKYTTKDGEERTYTTEGYYELVIANYSRKIFAERIGLEGYKMEKLSLEKIKVDEPIVTVESVEILGKKLVYDFTVPEHHMYISNGFMSHNSIVGTATFDQYWSVRTSKRTSGTVTVTDHFRAWANRGLNLGTIDQITLCVEGYQSSGSANITQNTFSQGSSSGSSGGSSGSTTTTRIECENMSLSGPYVSRITNPFNGIALYANGDTARATVNFPASRNYNFRLRGCGNNNNLARVDLRIDGRTVGTFYYQGTYPWEAPIDNVYVSAGSHTVEITVTADNGTWDVYADYLVIQ

SEQ ID NO: 2463 - protein, 773 aa, Artificial Sequence
  Synthetic Construct, AS-91 intein modified protein
MQTSITLTSNASGTFDGYYYELWKDTGNTTMTVYTQGRFSCQWSNINNALFRTGKKYNQNWQSLGTIRITYSATYNPNGNSYLCIYGWSTNPLVEFYIVESWGNWRPPGATSLGQVTIDGGTYDIYRTTRVNQPCLAPGSKVLTEHGYWLKVEELPEKFKLQGVKVYNLDEGHNDTSNVAFVAEREVETGEMAVRVTTESGRIIEGSEDHPVLTPEGYVYLGNLKEGNLVIVYPFEGVEYEERKGVILDEDAFKDEDPQVLSFLREKGLVPLRWDDPRIGTIARILGFAFGDGYLGEMGGRLTLTFYGKEETLRELKKDLERLGISANLYVRESIETTSGHSEGKSLSIELRVTSRSFALFLEKLGMPRGKKTEKAYRVPGWILEAPLWVKRNFLAGLFAADGSIVEFKGNTPLPINLTQSKSDELAENLVEFLGDVAKLLAEFGIETTLYEVKSKKGVTYRLSIVGEDSIRTFVERINYEYDPEKKVKGLIAAAYLKLKERIVKEAHEAVKDDFPTFEEFAKERGYEGGFVAEKVVKVERVKPEYTKFYDIGVYHEAHNFIANGIVVHNSIVGTATFDQYWSVRTSKRTSGTVTVTDHFRAWANRGLNLGTIDQITLCVEGYQSSGSANITQNTFSQGSSSGSSGGSSGSTTTTRIECENMSLSGPYVSRITNPFNGIALYANGDTARATVNFPASRNYNFRLRGCGNNNNLARVDLRIDGRTVGTFYYQGTYPWEAPIDNVYVSAGSHTVEITVTADNGTWDVYADYLVIQ

SEQ ID NO: 2464 - protein, 766 aa, Artificial Sequence
  Synthetic Construct, AS-92 intein modified protein
MQTSITLTSNASGTFDGYYYELWKDTGNTTMTVYTQGRFSCQWSNINNALFRTGKKYNQNWQSLGTIRITYSATYNPNGNSYLCIYGWSTNPLVEFYIVESWGNWRPPGATSLGQVTIDGGTYDIYRTTRVNQPCVDGDTLVLTKEFGLIKIKDLYKILDGKGKKTVNGNEEWTELERPITLYGYKDGKIVEIKATHVYKGFSAGMIEIRTRTGRKIKVTPIHKLFTGRVTKNGLEIREVMAKDLKKGDRIIVAKKIDGGERVKLNIRVEQKRGKKIRIPDVLDEKLAEFLGYLIADGTLKPRTVAIYNNDESLLRRANELANELFNIEGKIVKGRTVKALLIHSKALVEFFSKLGVPRNKKARTWKVPKELLISEPEVVKAFIKAYIMCDGYYDENKGEIEIVTASEEAAYGFSYLLAKLGIYAIIREKIIGDKVYYRVVISGESNLEKLGIERVGRGYTSYDIVPVEVEELYNALGRPYAELKRAGIEIHNYLSGENMSYEMFRKFAKFVGMEEIAENHLTHVLFDEIVEIRYISEGQEVYDVTTETHNFIGGNMPTLLHNSIVGTATFDQYWSVRTSKRTSGTVTVTDHFRAWANRGLNLGTIDQITLCVEGYQSSGSANITQNTFSQGSSSGSSGGSSGSTTTTRIECENMSLSGPYVSRITNPFNGIALYANGDTARATVNFPASRNYNFRLRGCGNNNNLARVDLRIDGRTVGTFYYQGTYPWEAPIDNVYVSAGSHTVEITVTADNGTWDVYADYLVIQ

SEQ ID NO: 2465 - protein, 986 aa, Artificial Sequence
  Synthetic Construct, AS-93 intein modified protein
MQTSITLTSNASGTFDGYYYELWKDTGNTTMTVYTQGRFSCQWSNINNALFRTGKKYNQNWQSLGTIRITYSATYNPNGNSYLCIYGWSTNPLVEFYIVESWGNWRPPGATSLGQVTIDGGTYDIYRTTRVNQPCLSPDTMVRTTNGDKPIRDIAVGDQLFDHEDRPVQCLAAEAIQTSRMMKVTYTGYNSVSKSSFTCTPDHIMTLVAYGVKPFRHSNSNRVTWWTRCDRTELGADAVEIKWDAAMHDLYTEYREQLGRRPTDAEVRKYLKAITSTRVVPDSEDDDSQRVEETYQSPVLIKLLAKLKAMDVDVDGEDESVVLMLLQQHMEDYLEHMIPEPEDISDEDNDDLIIDLDTNRKRKIGTISTLSSRISDKTFRQSPSIKSSPVNSQQQSQNEASQSTVPTYASVLTEDDHREMFAPVRSKLAVRDPKCKCQNLSCKGLRRVSTVFETSEQADLALELLSGDHYRVVDPCAVQDMEVFTMTLEEYQATCTAPMTQHKSKLRLYRSPLRFQPYQGSVSPVPIDPFWFGFWLGNGTKNNSEITSTDPEVEVYTQALVDRLNRDSIPPGKAPLKVSKYKIDIGTKHVYKGEEIKTTKVAHRLRVMSTVSNLDKTHWNPVHDGLRELGLLGDKSGGIPDCYMNADENTRLAVLAGLIESDGWLSHGLNCYGFGQYTYELKKLVEDARKLALSCGIQCNPIFERKNGKDRPEPGWFFYMGRGVEKFQPHLLLPRKRMTIPFTTSKNRDVRPFDVEDAGDGEFRLIEVSGELFQLADRTVVHNSIVGTATFDQYWSVRTSKRTSGTVTVTDHFRAWANRGLNLGTIDQITLCVEGYQSSGSANITQNTFSQGSSSGSSGGSSGSTTTTRIECENMSLSGPYVSRITNPFNGIALYANGDTARATVNFPASRNYNFRLRGCGNNNNLARVDLRIDGRTVGTFYYQGTYPWEAPIDNVYVSAGSHTVEITVTADNGTWDVYADYLVIQ

SEQ ID NO: 2466 - protein, 910 aa, Artificial Sequence
  Synthetic Construct, AS-94 intein modified protein
MQTSITLTSNASGTFDGYYYELWKDTGNTTMTVYTQGRFSCQWSNINNALFRTGKKYNQNWQSLGTIRITYSATYNPNGNSYLCIYGWSTNPLVEFYIVESWGNWRPPGATSLGQVTIDGGTYDIYRTTRVNQPCLAKGTLLLRYDGTKVEVENVREGDLLLGPDGGPRRAFNIVGGRDRLYRIKMEGGKEDLVVTPNHILVLHREKRDGVDKVYARPFALPLLQEDATDDGEDLSEISAIEHFDTMEITAADFASLDPNERKLYRLFTSPGYELNGRPVPIDPYFLGLWLGDRSRTKSSIYTNHEEEIREFIADHAAELDLQLVSYVSNRPSLAAMKNGNQLPLRHQARQTIRKQRIAAKSITQPGGARSSSYPATNGGLSSNTVTSLHSRERHPLSESSAAATMNLLPRSTSVSTSVAAQPKSSMSTFITDAILPSESSNISVISDSGIEISKSSKMLSEEEADLDLFDIDSEDEEIEDLDEKKNVSNVDEFPKRRRIHYLRTGCRTYGELCPGEEDQILEDIVGRPDGTTSVESLLLALEALGLHTCGTNDSGSDKKRIPSVYMKNSRAVRLALLAGLIDSGGWYVDSENTFGFSQTEDSNSTLIWDVVTLARSLGFSVSTKRRMTHKPTRTQHKAQEFAQISGNVAEIPSLLARERGVERPISQAHSFKIKDIQLETEATEWAGFRVDQDQLYLRHDFLVLHNSIVGTATFDQYWSVRTSKRTSGTVTVTDHFRAWANRGLNLGTIDQITLCVEGYQSSGSANITQNTFSQGSSSGSSGGSSGSTTTTRIECENMSLSGPYVSRITNPFNGIALYANGDTARATVNFPASRNYNFRLRGCGNNNNLARVDLRIDGRTVGTFYYQGTYPWEAPIDNVYVSAGSHTVEITVTADNGTWDVYADYLVIQ

SEQ ID NO: 2467 - protein, 498 aa, Artificial Sequence
  Synthetic Construct, AS-95 intein modified protein
MQTSITLTSNASGTFDGYYYELWKDTGNTTMTVYTQGRFSCQWSNINNALFRTGKKYNQNWQSLGTIRITYSATYNPNGNSYLCIYGWSTNPLVEFYIVESWGNWRPPGATSLGQVTIDGGTYDIYRTTRVNQPCLAKGTRLLRYDGTEINVEDVREGDQLLGPDGEPRRAFNIVSGIDRLYRVKIGGEKEDLVVTPNHILVFYREGPSDGPENAERQTVEITAAEFATLSTEERSLYSAFTSPAVEKGAEGSAAQMHSFKVEDISLESEKTEWAGFRVDKDQLYLRHDYLVLHNSIVGTATFDQYWSVRTSKRTSGTVTVTDHFRAWANRGLNLGTIDQITLCVEGYQSSGSANITQNTFSQGSSSGSSGGSSGSTTTTRIECENMSLSGPYVSRITNPFNGIALYANGDTARATVNFPASRNYNFRLRGCGNNNNLARVDLRIDGRTVGTFYYQGTYPWEAPIDNVYVSAGSHTVEITVTADNGTWDVYADYLVIQ

SEQ ID NO: 2468 - protein, 704 aa, Artificial Sequence
  Synthetic Construct, AS-96 intein modified protein
MQTSITLTSNASGTFDGYYYELWKDTGNTTMTVYTQGRFSCQWSNINNALFRTGKKYNQNWQSLGTIRITYSATYNPNGNSYLCIYGWSTNPLVEFYIVESWGNWRPPGATSLGQVTIDGGTYDIYRTTRVNQPCVAPDSLVVVNDKVQEIGKLTEEWGREVGFLEYSSGIFYAPYLGRGISLDLVTGKVKPSVVSKVWKLKSPEELVTIKTITGKEITVTPETKLLTFNGTLEWKEAGKIKPGDYVLTVKKLHINGKQETLDEKLAYKRGLSLSDPLEFFSSSERTISAYLKGIFDKVGRLVGDTAVIKVDKDMAKRLQILLLRLGIVSSVDETGKVIIGREYIQKILGYNVSVVTHEVELFREFIAEISKFYGTSEEDVYSSLHEKGELDIGTVPVELPEGLREEINRERATYSELVKIAQEIKDEKLYNKLAWILSEVTEEEAKIKEKVNTLKVILSSDLIPERVESVKIIKSPYPYVYDLTVEGSHSFIANGFVVHNSIVGTATFDQYWSVRTSKRTSGTVTVTDHFRAWANRGLNLGTIDQITLCVEGYQSSGSANITQNTFSQGSSSGSSGGSSGSTTTTRIECENMSLSGPYVSRITNPFNGIALYANGDTARATVNFPASRNYNFRLRGCGNNNNLARVDLRIDGRTVGTFYYQGTYPWEAPIDNVYVSAGSHTVEITVTADNGTWDVYADYLVIQ

SEQ ID NO: 2469 - protein, 724 aa, Artificial Sequence
  Synthetic Construct, AS-97 intein modified protein
MQTSITLTSNASGTFDGYYYELWKDTGNTTMTVYTQGRFSCQWSNINNALFRTGKKYNQNWQSLGTIRITYSATYNPNGNSYLCIYGWSTNPLVEFYIVESWGNWRPPGATSLGQVTIDGGTYDIYRTTRVNQPCLLPEEKVVLPEIGLVTLRELFELANEVVVKDEEKEVRKLGKMLTGVDERGNVKLLNALYVWRVAHKGEMIRVKVNGWYSVTVTPEHPFLTNRGWVKAGELKEGDYIAIPRRVYGNEDLMKFSKIAKELGIKGDEKEFYLAGASLDIPIKVLFLAPSKLVSAFLRGYFDAKGVVRENYIEVPLFEDLPLLLLRFGIVSRIEKSTLKISGKRNLELFRKHVGFTDSEKAKALDELISKAKESERYPILEELRRLGLLFGFTRNELRIEENPTYEVLMEILERIERGSPNLAEKIAVLEGRIKEENYLRILEEEGLIENGKLTELGKELLEVWRNREFDSKDVDYVRNIVENLVFLPVEKVERIEYEGYVYDVTTETHNFVANGILVHNSIVGTATFDQYWSVRTSKRTSGTVTVTDHFRAWANRGLNLGTIDQITLCVEGYQSSGSANITQNTFSQGSSSGSSGGSSGSTTTTRIECENMSLSGPYVSRITNPFNGIALYANGDTARATVNFPASRNYNFRLRGCGNNNNLARVDLRIDGRTVGTFYYQGTYPWEAPIDNVYVSAGSHTVEITVTADNGTWDVYADYLVIQ

SEQ ID NO: 2470 - protein, 859 aa, Artificial Sequence
  Synthetic Construct, AS-98 intein modified protein
MQTSITLTSNASGTFDGYYYELWKDTGNTTMTVYTQGRFSCQWSNINNALFRTGKKYNQNWQSLGTIRITYSATYNPNGNSYLCIYGWSTNPLVEFYIVESWGNWRPPGATSLGQVTIDGGTYDIYRTTRVNQPALYDFSVIQLSNGRFVLIGDLVEELFKKYAEKIKTYKDLEYIELNEEDRFEVVSVSPDLKANKHVVSRVWRRKVREGEKLIRIKTRTGNEIILTRNHPLFAFSNGDVVRKEAEKLKVGDRVAVMMRPPSPPQTKAVVDPAIYVKISDYYLVPNGKGMIKVPNDGIPPEKAQYLLSVNSYPVKLVREVDEKLSYLAGVILGDGYISSNGYYISATFDDEAYMDAFVSVVSDFIPNYVPSIRKNGDYTIVTVGSKIFAEMLSRIFGIPRGRKSMWDIPDVVLSNDDLMRYFIAGLFDADGYVDENGPSIVLVTKSETVARKIWYVLQRLGIISTVSRVKSRGFKEGELFRVIISGVEDLAKFAKFIPLRHSRKRAKLMEILRTKKPYRGRRTYRVPISSDMIAPLRQMLGLTVAELSKLASYYAGEKVSESLIRHIEKGRVKEIRRSTLKGIALALQQIAKDVGNEEAWVRAKRLQLIAEGDVYWDEVVSVEEVDPKELGIEYVYDLTVEDDHNYVANGILVSNSIVGTATFDQYWSVRTSKRTSGTVTVTDHFRAWANRGLNLGTIDQITLCVEGYQSSGSANITQNTFSQGSSSGSSGGSSGSTTTTRIECENMSLSGPYVSRITNPFNGIALYANGDTARATVNFPASRNYNFRLRGCGNNNNLARVDLRIDGRTVGTFYYQGTYPWEAPIDNVYVSAGSHTVEITVTADNGTWDVYADYLVIQ

SEQ ID NO: 2471 - protein, 738 aa, Artificial Sequence
  Synthetic Construct, AS-99 intein modified protein
MQTSITLTSNASGTFDGYYYELWKDTGNTTMTVYTQGRFSCQWSNINNALFRTGKKYNQNWQSLGTIRITYSATYNPNGNSYLCIYGWSTNPLVEFYIVESWGNWRPPGATSLGQVTIDGGTYDIYRTTRVNQPCFSGEEVILIEKDGEKKVFKLREFVDGLLKEASGEGMDGSIRVVYKDLQGENIKILTKDGLVKLLYVNRREGKQKLRKIVNLEKDYWLALTPEHKVYTIKGLKEAGEITKDDEIIRVPLTILDGFDVAEKSIREELERLSLLPLNSEDSRLEKIAGIMGALFGSGGIDENLNTLSFVSSEKKTIEQFVKALSELFGEFDYKIEEKENSIIFRTCDKRIVTFFATLGAPVGDKSKVKLKLPWWVKLKPSLFLAFMDGLYSSNRNDKEILEITQLTDNVETFFEEISWYLSFFGIKAEAEEDEEKDKYRARLTLSSSIDNMLNFIEFIPISFSPAKREKFFKEIEKYLEYSIPEKTEDLKKRVKRVKKGERRNFLESWEEVEVTYNVTTETGNLLANGLFVKNSIVGTATFDQYWSVRTSKRTSGTVTVTDHFRAWANRGLNLGTIDQITLCVEGYQSSGSANITQNTFSQGSSSGSSGGSSGSTTTTRIECENMSLSGPYVSRITNPFNGIALYANGDTARATVNFPASRNYNFRLRGCGNNNNLARVDLRIDGRTVGTFYYQGTYPWEAPIDNVYVSAGSHTVEITVTADNGTWDVYADYLVIQ

SEQ ID NO: 2472 - protein, 862 aa, Artificial Sequence
  Synthetic Construct, AS-100 intein modified protein
MQTSITLTSNASGTFDGYYYELWKDTGNTTMTVYTQGRFSCQWSNINNALFRTGKKYNQNWQSLGTIRITYSATYNPNGNSYLCIYGWSTNPLVEFYIVESWGNWRPPGATSLGQVTIDGGTYDIYRTTRVNQPCLTGDTKVIANGQLFELGELVEKLSGGRFGPTPVKGLKVLGIDEDGKLREFEVQYVYKDRTDRLIKIKTQLGRELKVTPYHPLLVNRENGEIKWIKAEELKPGDKLAIPSFLPLITGENPLAEWLGYFMGSGYAYPSNSVITFTNEDPLIRQRFMELTEKLFPDAKIRERIHADGTPEVYVVSRKAWSLVNSISLTLIPREGWKGIRSFLRAYSDCNGRIESDAIVLSTDNNDMAQQIAYALASFGIIAKMDGEDVIISGSDNIERFLNEIGFSTQSKLKEAQKLIRKTNVRSDGLKINYELISYVKDRLRLNVNDKRNLSYRNAKELSWELMKEIYYRLEELERLKKVLSEPILIDWNEVAKKSDEVIEKAKIRAEKLLEYIKGERKPSFKEYIEIAKVLGINVERTIEAMKIFAKRYSSYAEIGRKLGTWNFNVKTILESDTVDNVEILEKIRKIELELIEEILSDGKLKEGIAYLIFLFQNELYWDEITEVKELRGDFIIYDLHVPGYHNFIAGNMPTVVHNSIVGTATFDQYWSVRTSKRTSGTVTVTDHFRAWANRGLNLGTIDQITLCVEGYQSSGSANITQNTFSQGSSSGSSGGSSGSTTTTRIECENMSLSGPYVSRITNPFNGIALYANGDTARATVNFPASRNYNFRLRGCGNNNNLARVDLRIDGRTVGTFYYQGTYPWEAPIDNVYVSAGSHTVEITVTADNGTWDVYADYLVIQ

SEQ ID NO: 2473 - protein, 710 aa, Artificial Sequence
  Synthetic Construct, AS-101 intein modified protein
MQTSITLTSNASGTFDGYYYELWKDTGNTTMTVYTQGRFSCQWSNINNALFRTGKKYNQNWQSLGTIRITYSATYNPNGNSYLCIYGWSTNPLVEFYIVESWGNWRPPGATSLGQVTIDGGTYDIYRTTRVNQPCLHPDTLILTSQGVRKIKELSREGEVFALDFNLKLSKAKYRLLERDADEQMYKVTLLDGTELYLTADHPVLVYREGNLAFVPADKLRETDHVVLVLNKSARDNYGFLDLLLEITDSQEDYAILENGETLSLHSLKMLVERGEIKDIAVVGFSHNNFGKVMLRDELWYLIGYLAGKGGEIKGNGVVISSRTKEIVGLTKSLNIDLIETEEGIVLSNKSFVRLLHLIHYTPRVPEVYGIINNTEWLKAFLAGYYDATLLEGLTLEALYKIKVYLQLLGIRAKIEDNKLKVHLEDLQRFRELLGKFSRRKLYVETSQVPVFTDFDERSYDFPRILGGDIYIIGIKSIEKFHYKGKVYDLVVENYHNFIANGIAVHNSIVGTATFDQYWSVRTSKRTSGTVTVTDHFRAWANRGLNLGTIDQITLCVEGYQSSGSANITQNTFSQGSSSGSSGGSSGSTTTTRIECENMSLSGPYVSRITNPFNGIALYANGDTARATVNFPASRNYNFRLRGCGNNNNLARVDLRIDGRTVGTFYYQGTYPWEAPIDNVYVSAGSHTVEITVTADNGTWDVYADYLVIQ

SEQ ID NO: 2474 - protein, 597 aa, Artificial Sequence
  Synthetic Construct, AS-102 intein modified protein
MQTSITLTSNASGTFDGYYYELWKDTGNTTMTVYTQGRFSCQWSNINNALFRTGKKYNQNWQSLGTIRITYSATYNPNGNSYLCIYGWSTNPLVEFYIVESWGNWRPPGATSLGQVTIDGGTYDIYRTTRVNQPCVAPDTLINTDNGRVEIGKFVEEWMKEVGEISEEGISYAPCFRKVETFKDGKIVESPIRRVWKLRAPKKLVRIKTENGRSIALTRETKLLTINDGELSWVEAGEVKVGTYVGTVKSEKDVIPGAGKTIRDVSKLYNMEMEVKDYLTREEVRKAIEKLEEIMNPMNIKIPGVQESYEELLRKLETTNDERVRNETLILLSDVSDAHELAKEKIEKIKEIVNSEVHWEKVTEVGEVDGVEYVYDLTVEGSHNFVANGFIVHNSIVGTATFDQYWSVRTSKRTSGTVTVTDHFRAWANRGLNLGTIDQITLCVEGYQSSGSANITQNTFSQGSSSGSSGGSSGSTTTTRIECENMSLSGPYVSRITNPFNGIALYANGDTARATVNFPASRNYNFRLRGCGNNNNLARVDLRIDGRTVGTFYYQGTYPWEAPIDNVYVSAGSHTVEITVTADNGTWDVYADYLVIQ

SEQ ID NO: 2475 - protein, 781 aa, Artificial Sequence
  Synthetic Construct, AS-103 intein modified protein
MQTSITLTSNASGTFDGYYYELWKDTGNTTMTVYTQGRFSCQWSNINNALFRTGKKYNQNWQSLGTIRITYSATYNPNGNSYLCIYGWSTNPLVEFYIVESWGNWRPPGATSLGQVTIDGGTYDIYRTTRVNQPCLLPEERVILPDYGPITLEELFNMTKETVFKDEEKEVRKLGIRMPVAGVDGRVRLLEGPYVWKVRYKGKMLRVKLKDWHSVAVTPEHPFLTTRGWVRADQLKPGDYVAVPKILPGKDDKEKFLQYVHEKLKGKVHIKLPSSDEEWETFFYFAGTIFGRENSVNPEGLTHEVKALLELFKVLFEYPREVLRVLFMAPVRYVANFLRGFFDINGYVNGEELRVEVRGAPHEVLEELSLILLRLGIVSKIYPTSLAISGRRNLELFRRYIGFSEKQKAKELEGIIRRSENSESYPIFEELRRIRLLFGFTRAELSSTIPLYSKYESKEAPSYEILMKILNTIEKGSKDLNKKITILEGRVRDHEYIEEFKREGLIKDGKLTELGKELLEVWRNREFDSRDVNYLRNIIENFVFLPVEKIEEFEYDGYVYDVTTETHNFIANGILVHNSIVGTATFDQYWSVRTSKRTSGTVTVTDHFRAWANRGLNLGTIDQITLCVEGYQSSGSANITQNTFSQGSSSGSSGGSSGSTTTTRIECENMSLSGPYVSRITNPFNGIALYANGDTARATVNFPASRNYNFRLRGCGNNNNLARVDLRIDGRTVGTFYYQGTYPWEAPIDNVYVSAGSHTVEITVTADNGTWDVYADYLVIQ

SEQ ID NO: 2476 - protein, 812 aa, Artificial Sequence
  Synthetic Construct, AS-104 intein modified protein
MQTSITLTSNASGTFDGYYYELWKDTGNTTMTVYTQGRFSCQWSNINNALFRTGKKYNQNWQSLGTIRITYSATYNPNGNSYLCIYGWSTNPLVEFYIVESWGNWRPPGATSLGQVTIDGGTYDIYRTTRVNQPCVSGDSKVLTEKGPVEIRHLNSGMIVGINGFKSRFVKFQELHQVKYQEYGVKIRTQLGFEVKCTREHRFLTIDKNGELRWVEAWRLKEGDYVGIIRKLPSPNSKVLILDFLPESTYLWLNKEFLKKLKVSIKEKFGSIKNYAKERGFNSSYLVKQLNGLSPFRWGRLRVILNDVSIEISRDDIERITSRRGKYSLPPELTPGIARLLGFWMASGSLNRNTLIFYSQDKKILERYEDLCKREFRVKGRIKAQDKGTYILEIPSSLLSFVFKNLARPKLEVPPIIYILPEKHKEEFLAGYFDGNGFIKIENGRIHSLGFFAFNRKFAEGIRDILLQLGILSSINEQTFEVSIIEGEKFLKIVNSWRSNYYKEWEDVIPNLEKRLKEIEEKLGYPGTYNRREIRRSELKAIIKLYEKVARERGLNDVLKELSYLKELSEGDIFFDRITSIEPVYLDVAYGIINSETGNYVVNGFVSKNSIVGTATFDQYWSVRTSKRTSGTVTVTDHFRAWANRGLNLGTIDQITLCVEGYQSSGSANITQNTFSQGSSSGSSGGSSGSTTTTRIECENMSLSGPYVSRITNPFNGIALYANGDTARATVNFPASRNYNFRLRGCGNNNNLARVDLRIDGRTVGTFYYQGTYPWEAPIDNVYVSAGSHTVEITVTADNGTWDVYADYLVIQ

SEQ ID NO: 2477 - protein, 811 aa, Artificial Sequence
  Synthetic Construct, AS-105 intein modified protein
MQTSITLTSNASGTFDGYYYELWKDTGNTTMTVYTQGRFSCQWSNINNALFRTGKKYNQNWQSLGTIRITYSATYNPNGNSYLCIYGWSTNPLVEFYIVESWGNWRPPGATSLGQVTIDGGTYDIYRTTRVNQPCFSGEEVIIVEKGKDRKVVKLREFVEDALKEPSGEGMDGDIKVTYKDLRGEDVRILTKDGFVKLLYVNKREGKQKLRKIVNLDKDYWLAVTPDHKVFTSEGLKEAGEITEKDEIIRVPLVILDGPKIASTYGEDGKFDDYIRWKKYYEKTGNGYKRAAKELNIKESTLRWWTQGAKPNSLKMIEELEKLNLLPLTSEDSRLEKVAIILGALFSDGNIDRNFNTLSFISSERKAIERFVETLKELFGEFNYEIRDNHESLGKSILFRTWDRRIIRFFVALGAPVGNKTKVKLELPWWIKLKPSLFLAFMDGLYSGDGSVPRFARYEEGIKFNGTFEIAQLTDDVEKKLPFFEEIAWYLSFFGIKAKVRVDKTGDKYKVRLIFSQSIDNVLNFLEFIPISLSPAKREKFLREVESYLAAVPESSLAGRIEELREHFNRIKKGERRSFIETWEVVNVTYNVTTETGNLLANGLFVKNSIVGTATFDQYWSVRTSKRTSGTVTVTDHFRAWANRGLNLGTIDQITLCVEGYQSSGSANITQNTFSQGSSSGSSGGSSGSTTTTRIECENMSLSGPYVSRITNPFNGIALYANGDTARATVNFPASRNYNFRLRGCGNNNNLARVDLRIDGRTVGTFYYQGTYPWEAPIDNVYVSAGSHTVEITVTADNGTWDVYADYLVIQ

SEQ ID NO: 2478 - protein, 797 aa, Artificial Sequence
  Synthetic Construct, AS-106 intein modified protein
MQTSITLTSNASGTFDGYYYELWKDTGNTTMTVYTQGRFSCQWSNINNALFRTGKKYNQNWQSLGTIRITYSATYNPNGNSYLCIYGWSTNPLVEFYIVESWGNWRPPGATSLGQVTIDGGTYDIYRTTRVNQPSILPDEWLPIVENEKVRFVKIGDFIDREIEENAERVKRDGETEILEVKDLKALSFNRETKKSELKKVKALIRHRYSGKVYSIKLKSGRRIKITSGHSLFSVKNGKLVKVRGDELKPGDLVVVPGRLKLPESKQVLNLVELLLKLPEEETSNIVMMIPVKGRKNFFKGMLKTLYWIFGEGERPRTAGRYLKHLERLGYVKLKRRGCEVLDWESLKRYRKLYETLIKNLKYNGNSRAYMVEFNSLRDVVSLMPIEELKEWIIGEPRGPKIGTFIDVDDSFAKLLGYYISSGDVEKDRVKFHSKDQNVLEDIAKLAEKLFGKVRRGRGYIEVSGKISHAIFRVLAEGKRIPEFIFTSPMDIKVAFLKGLNGNAEELTFSTKSELLVNQLILLLNSIGVSDIKIEHEKGVYRVYINKKESSNGDIVLDSVESIEVEKYEGYVYDLSVEDNENFLVGFGLLYAHNSIVGTATFDQYWSVRTSKRTSGTVTVTDHFRAWANRGLNLGTIDQITLCVEGYQSSGSANITQNTFSQGSSSGSSGGSSGSTTTTRIECENMSLSGPYVSRITNPFNGIALYANGDTARATVNFPASRNYNFRLRGCGNNNNLARVDLRIDGRTVGTFYYQGTYPWEAPIDNVYVSAGSHTVEITVTADNGTWDVYADYLVIQ

SEQ ID NO: 2479 - protein, 509 aa, Artificial Sequence
  Synthetic Construct, AS-107 intein modified protein
MQTSITLTSNASGTFDGYYYELWKDTGNTTMTVYTQGRFSCQWSNINNALFRTGKKYNQNWQSLGTIRITYSATYNPNGNSYLCIYGWSTNPLVEFYIVESWGNWRPPGATSLGQVTIDGGTYDIYRTTRVNQPCFARDTEVYYENDTVPHMESIEEMYSKYASMNGELPFDNGYAVPLDNVFVYTLDIASGEIKKTRASYIYREKVEKLIEIKLSSGYSLKVTPSHPVLLFRDGLQWVPAAEVKPGDVVVGVREEVLRRRIISKGELEFHEVSSVRIIDYNNWVYDLVIPETHNFIAPNGLVLHNSIVGTATFDQYWSVRTSKRTSGTVTVTDHFRAWANRGLNLGTIDQITLCVEGYQSSGSANITQNTFSQGSSSGSSGGSSGSTTTTRIECENMSLSGPYVSRITNPFNGIALYANGDTARATVNFPASRNYNFRLRGCGNNNNLARVDLRIDGRTVGTFYYQGTYPWEAPIDNVYVSAGSHTVEITVTADNGTWDVYADYLVIQ

SEQ ID NO: 2480 - protein, 747 aa, Artificial Sequence
  Synthetic Construct, AS-108 intein modified protein
MQTSITLTSNASGTFDGYYYELWKDTGNTTMTVYTQGRFSCQWSNINNALFRTGKKYNQNWQSLGTIRITYSATYNPNGNSYLCIYGWSTNPLVEFYIVESWGNWRPPGATSLGQVTIDGGTYDIYRTTRVNQPCVTPDTLVSLSDGRIIEIREAVENSEESLLGINGLKPKEAKALKFWEIDWDGPIKVIKLKNGHEIKATPDHGLLVMRDGKIGWVSAKNIREGDYVAFIYNLGHRGGKKYTLPQLLKELGISEYENSSSQELNNREQEMDSKQISIELDERFWYIFGVILGKGTLKGDKVVIFQKDVKPVIEEALPFVRIFESADHIGFSHLILAEVFRRLGVGEGKLHSLVFGLREEYINAMIAGYFDASGTFLRRAVLTSKRGDILRMLSVYLYQIGIVNNLRRDEHAGVWELIISDLEKFREKIYPYLRIKKSQFDKVYSISKNEGDFLPVASIFRKLKFRDGFKNRILDEEIPRDEVAKVLEYAEDSPEKEFLNSLVEARVTWVRVEKIEERHYTGKLYDFTTTTENFISNGIVSHNSIVGTATFDQYWSVRTSKRTSGTVTVTDHFRAWANRGLNLGTIDQITLCVEGYQSSGSANITQNTFSQGSSSGSSGGSSGSTTTTRIECENMSLSGPYVSRITNPFNGIALYANGDTARATVNFPASRNYNFRLRGCGNNNNLARVDLRIDGRTVGTFYYQGTYPWEAPIDNVYVSAGSHTVEITVTADNGTWDVYADYLVIQ

SEQ ID NO: 2481 - protein, 727 aa, Artificial Sequence
  Synthetic Construct, AS-109 intein modified protein
MQTSITLTSNASGTFDGYYYELWKDTGNTTMTVYTQGRFSCQWSNINNALFRTGKKYNQNWQSLGTIRITYSATYNPNGNSYLCIYGWSTNPLVEFYIVESWGNWRPPGATSLGQVTIDGGTYDIYRTTRVNQPCLAPGTRVLTEHGYWLKIEEMPEKFKLQRLRVYNIEEGHNDFSKVVFVAEREVGSEEKAIRIVTESGKVIEGSEDHPVLTPEGYVYLRNVKEGDYILVYPFEGVPYEEKKGVILDESAFEGEDPQVVKFLRERNLIPLQWKDPKVGILARILGFALANGYISENDNLTFHGKEEVLREVRKDLEELGIEAIVAEEDKLKVTSREFAFLLEKLGMAHDSIPEWIIEGPLWIKRNFLAGLFGANGSIVEFKGDVPLPITLTHSRELLNDVSRILEGFKVRAKIKMGKNGSYQLVIEDEDSIRNFLGRINYEYDPEKKARGLIAYAYLKFKELMKGNLMTFEEFARDRGYEGGFVAEKVIEVKSVKPEYDKFYDIGVYHSAHNFIANGIVVHNSIVGTATFDQYWSVRTSKRTSGTVTVTDHFRAWANRGLNLGTIDQITLCVEGYQSSGSANITQNTFSQGSSSGSSGGSSGSTTTTRIECENMSLSGPYVSRITNPFNGIALYANGDTARATVNFPASRNYNFRLRGCGNNNNLARVDLRIDGRTVGTFYYQGTYPWEAPIDNVYVSAGSHTVEITVTADNGTWDVYADYLVIQ

SEQ ID NO: 2482 - protein, 713 aa, Artificial Sequence
  Synthetic Construct, AS-110 intein modified protein
MQTSITLTSNASGTFDGYYYELWKDTGNTTMTVYTQGRFSCQWSNINNALFRTGKKYNQNWQSLGTIRITYSATYNPNGNSYLCIYGWSTNPLVEFYIVESWGNWRPPGATSLGQVTIDGGTYDIYRTTRVNQPCVDGDTLVLTKEFGLIKIKELYEKLDGKGRKIVEGNEEWTELEKPITVYGYKDGKIVEIKATHVYKGVSSGMVEIRTRTGRKIKVTPIHRLFTGRVTKDGLILKEVMAMHVKPGDRIAVVKKIDGGEYIKLDSSNVGEIKVPEILNEELAEFLGYLMANGTLKSGIIEIYCDDESLLERVNSLSLKLFGVGGRIVQKVDGKALVIQSKPLVDVLRRLGVPEDKKVENWKVPRELLLSPSNVVRAFVNAYIKGKEEVEITLASEEGAYELSYLFAKLGIYVTISKSGEYYKVRVSRRGNLDTIPVEVNGMPKVLPYEDFRKFAKSIGLEEVAENHLQHIIFDEVIDVRYIPEPQEVYDVTTETHNFVGGNMPTLLHNSIVGTATFDQYWSVRTSKRTSGTVTVTDHFRAWANRGLNLGTIDQITLCVEGYQSSGSANITQNTFSQGSSSGSSGGSSGSTTTTRIECENMSLSGPYVSRITNPFNGIALYANGDTARATVNFPASRNYNFRLRGCGNNNNLARVDLRIDGRTVGTFYYQGTYPWEAPIDNVYVSAGSHTVEITVTADNGTWDVYADYLVIQ

SEQ ID NO: 2483 - protein, 711 aa, Artificial Sequence
  Synthetic Construct, AS-111 intein modified protein
MQTSITLTSNASGTFDGYYYELWKDTGNTTMTVYTQGRFSCQWSNINNALFRTGKKYNQNWQSLGTIRITYSATYNPNGNSYLCIYGWSTNPLVEFYIVESWGNWRPPGATSLGQVTIDGGTYDIYRTTRVNQPCVTADTRLATQHGLVPIGWLQANGGALDCTVDRRALGEDRRGTVTRAAVPAFLSAGQAEVFKVTTAEGYQIKATAWHEFYTARGKLKLSELKAGDELWVQSGKGQFGAQGSGALGLLIGLITGDGHFTNRGKDEQAAVISLWGEERQLADDIAGSVNALIAGTSLAPRDYLVKPVAVAERNMVFIRSTMLVRVLDGYGFNGETKLEVPEVVWRGSEACMRGYLQGLFQTDGTVNVSSNSQSCSVRLSSSHRPLLQDVQVLLANFGVFSRIHERREAGPRSLPDGQGGQRDYLCQTQHELIVDGESREAFMREIGFLLPAKREKYDAWVADKALVKTQRFAATITAIEPAGVEPVYDTTQPDGNTVIFNGLVTGQSIVGTATFDQYWSVRTSKRTSGTVTVTDHFRAWANRGLNLGTIDQITLCVEGYQSSGSANITQNTFSQGSSSGSSGGSSGSTTTTRIECENMSLSGPYVSRITNPFNGIALYANGDTARATVNFPASRNYNFRLRGCGNNNNLARVDLRIDGRTVGTFYYQGTYPWEAPIDNVYVSAGSHTVEITVTADNGTWDVYADYLVIQ

SEQ ID NO: 2484 - protein, 793 aa, Artificial Sequence
  Synthetic Construct, AS-112 intein modified protein
MQTSITLTSNASGTFDGYYYELWKDTGNTTMTVYTQGRFSCQWSNINNALFRTGKKYNQNWQSLGTIRITYSATYNPNGNSYLCIYGWSTNPLVEFYIVESWGNWRPPGATSLGQVTIDGGTYDIYRTTRVNQPCLSADHEVLTSTGWKALPAIKDADQVMTLDLQTGTQQWNSVQATTRFAREGSLYRLKSDDMDAVCNESHRWYLNTKDQPTTYTAFTTQQMLDNQLVALRNSSGKATDQWNHESGTTTHTNHNIPTVGHNGNVMFSWPDCPWLPREFVADEACNLDWCRFIGLVMGDGSIDHVTDAQGQEHYSIQIHQRAGNPASNANTEDVLERLAAKLPNFVVHPSCVSGAEEKHTWTINHRDMYHFFLPMMRGPQSYDPLDNAMCRTYQAPDYQALSRSDNEPIIPVPADWKTGNWWHLRRWINYPWLFSLAQSQARAMIKGMAAANGDWSLSLKARLDTGDSGVVRVFSNSIPLMHDMSVLGLLADTRVNIGVDHKKGQMQLQVPVTMPALLAWCISFSFANSDLAVAAPKPEAYDNPRHDGFVYCLTVPNGNFLARRTVEYSDNDKIQEVIDAAQKPFFTGNSIVGTATFDQYWSVRTSKRTSGTVTVTDHFRAWANRGLNLGTIDQITLCVEGYQSSGSANITQNTFSQGSSSGSSGGSSGSTTTTRIECENMSLSGPYVSRITNPFNGIALYANGDTARATVNFPASRNYNFRLRGCGNNNNLARVDLRIDGRTVGTFYYQGTYPWEAPIDNVYVSAGSHTVEITVTADNGTWDVYADYLVIQ

SEQ ID NO: 2485 - protein, 717 aa, Artificial Sequence
  Synthetic Construct, AS-113 intein modified protein
MQTSITLTSNASGTFDGYYYELWKDTGNTTMTVYTQGRFSCQWSNINNALFRTGKKYNQNWQSLGTIRITYSATYNPNGNSYLCIYGWSTNPLVEFYIVESWGNWRPPGATSLGQVTIDGGTYDIYRTTRVNQPCVTADTWVMTTAGPAQVSELTGRSFSAVVDGKAYAVTSDGFFRTGHKPVLALRTREGPALRLTADHRVRRVARRTRYTLEAEWTEAGQLQPGDEILLHDHRALGGWEGAGTHAEGYLLGLLIGDGTLKSDKAVISVWAPELKVAGGGAVAYAQTGAGGIVQAAEAAAATLSHRVDFRGFQRSISGRGEARMASGAVRHLAHEMGMRPGHKTITTAMEKASSVFTEGLLRGLFDADGSVQGSQEKGVSLRLSQSDLSLLQTAQRMLLRLGIASTIYPNRRLAQARPLPDGRGGLRVYETASQHELVISADNLRIYAERIGFADTDKADRLDQALGSYNRSLNRERFTVTVESLTEEGSEDVFDVTVADIHAFDANGLYVHNSIVGTATFDQYWSVRTSKRTSGTVTVTDHFRAWANRGLNLGTIDQITLCVEGYQSSGSANITQNTFSQGSSSGSSGGSSGSTTTTRIECENMSLSGPYVSRITNPFNGIALYANGDTARATVNFPASRNYNFRLRGCGNNNNLARVDLRIDGRTVGTFYYQGTYPWEAPIDNVYVSAGSHTVEITVTADNGTWDVYADYLVIQ

SEQ ID NO: 2486 - protein, 703 aa, Artificial Sequence
  Synthetic Construct, AS-114 intein modified protein
MQTSITLTSNASGTFDGYYYELWKDTGNTTMTVYTQGRFSCQWSNINNALFRTGKKYNQNWQSLGTIRITYSATYNPNGNSYLCIYGWSTNPLVEFYIVESWGNWRPPGATSLGQVTIDGGTYDIYRTTRVNQPAGVLSSKIKIPGGWKTMGNIRVGDEVVTPDGGTAKVLAVHPQGVTKVVRVHFKDGRYTDVSPDHLWKVRRHHWCNDKAMAKLTREEVEERVWRVITTNELKDYIGLSTKVYVQLIEPERNADKPFKIHPYVLGVLLGDGCISQKAVDITKPYQQLFDKVQSLLPEHLECVWRPNRKGDGEPKTFGIRFKDRRSEQHINWHIRDGLKELGLYGMRSWGKVIPEEYLHGSAKQRLELLQGLLDTDGTVDKHKSVSFSSSSKLLSLGVQYLVRSLGGMARLQERTPHYTHNGEKREGRTDYRVYIRYPRPEELFTLDHKRERAVSHQHTETLRLQVTHIEERPDEETQCITIDHPDHLYITDDFIVTHNSIVGTATFDQYWSVRTSKRTSGTVTVTDHFRAWANRGLNLGTIDQITLCVEGYQSSGSANITQNTFSQGSSSGSSGGSSGSTTTTRIECENMSLSGPYVSRITNPFNGIALYANGDTARATVNFPASRNYNFRLRGCGNNNNLARVDLRIDGRTVGTFYYQGTYPWEAPIDNVYVSAGSHTVEITVTADNGTWDVYADYLVIQ

SEQ ID NO: 2487 - protein, 786 aa, Artificial Sequence
  Synthetic Construct, AS-115 intein modified protein
MQTSITLTSNASGTFDGYYYELWKDTGNTTMTVYTQGRFSCQWSNINNALFRTGKKYNQNWQSLGTIRITYSATYNPNGNSYLCIYGWSTNPLVEFYIVESWGNWRPPGATSLGQVTIDGGTYDIYRTTRVNQPCFAKGTKVLMANGDDKNIEDIAVGEEVLGKDGLPREVVALPRGRETMYEVSEKTQHRAETVFGTASYTCNATHKLVLQTNQRVNITNHVLRGESQTSVTYFQMKTAVADGREIELPKLCTKSFQHSSHGRENAWKKAEVFASTISRDPIDWTAEARDISRLGYHVRRATRQLWSPVLVEKEVLAPMIAKRGFDESIAPYMAYLVGLWVGDGYSDRATFSIDIQDVEIHERIKDFASHAGLTPRIACYKKSRDATISLHNSETRGKNVRQNLNTGNLLWSLLAEICGKKENEMLFKLVPSFLRSESIAVREYFISGLVDSDGHVKRDEADKCYSATVKTIYPAVRDGLVSVARSLGIQTSVSVEEAKEVNSVKHQESYAIYMANSSALDSVLSKCAAPRKRAEEPVCVNREPHPYTFHMVEKEEDDFYGITLSEDSDHQFLLSNLALVHNSIVGTATFDQYWSVRTSKRTSGTVTVTDHFRAWANRGLNLGTIDQITLCVEGYQSSGSANITQNTFSQGSSSGSSGGSSGSTTTTRIECENMSLSGPYVSRITNPFNGIALYANGDTARATVNFPASRNYNFRLRGCGNNNNLARVDLRIDGRTVGTFYYQGTYPWEAPIDNVYVSAGSHTVEITVTADNGTWDVYADYLVIQ

SEQ ID NO: 2488 - protein, 765 aa, Artificial Sequence
  Synthetic Construct, AS-116 intein modified protein
MQTSITLTSNASGTFDGYYYELWKDTGNTTMTVYTQGRFSCQWSNINNALFRTGKKYNQNWQSLGTIRITYSATYNPNGNSYLCIYGWSTNPLVEFYIVESWGNWRPPGATSLGQVTIDGGTYDIYRTTRVNQPCLAGDTLITLADGRRVPIRELVSQQNFSVWALNPQTYRLERARVSRAFCTGIKPVYRLTTRLGRSIRATANHRFLTPQGWKRVDELQPGDYLALPRRIPTASTPTLTEAELALLGHLIGDGCTLPHHVIQYTSRDADLATLVAHLATKVFGSKVTPQIRKELRWYQVYLRAARPLAPGKRNPISDWLRDLGIFGLRSYEKKVPALLFCQTSEAIATFLRHLWATDGCIQMRRGKKPYPAVYYATSSYQLARDVQSLLLRLGINARLKTVAQGEKGRVQYHVKVSGREDLLRFVEKIGAVGARQRAALASVYDYLSVRTGNPNRDIIPVALWYELVREAMYQRGISHRQLHANLGMAYGGMTLFRQNLSRARALRLAEAAACPELRQLAQSDVYWDPIVSIEPDGVEEVFDLTVPGPHNFVANDIIAHNSIVGTATFDQYWSVRTSKRTSGTVTVTDHFRAWANRGLNLGTIDQITLCVEGYQSSGSANITQNTFSQGSSSGSSGGSSGSTTTTRIECENMSLSGPYVSRITNPFNGIALYANGDTARATVNFPASRNYNFRLRGCGNNNNLARVDLRIDGRTVGTFYYQGTYPWEAPIDNVYVSAGSHTVEITVTADNGTWDVYADYLVIQ

SEQ ID NO: 2489 - protein, 709 aa, Artificial Sequence
  Synthetic Construct, AS-117 intein modified protein
MQTSITLTSNASGTFDGYYYELWKDTGNTTMTVYTQGRFSCQWSNINNALFRTGKKYNQNWQSLGTIRITYSATYNPNGNSYLCIYGWSTNPLVEFYIVESWGNWRPPGATSLGQVTIDGGTYDIYRTTRVNQPCVTAETWVMTDEGARQVSALLDRPFRAVVNGIAYDSGEHGFFCTGLKPVKRLSTACGRHLRLTADHLVRKVVGKTRWRQEVEWVPAGDLRPGDEVKLHDHRTAMIQTRPEDERGYLLGLLIGDGVIRDDKTLISVWPQEECIGAQPLGHPVMHKVEALLRDLPHRADFAGWQKVEGRGEYRIGTAALTALAAEYGLTRGRKTITPEIEGAETAGFGAAVLRGLFDADGSVQGAQEKGVSVRLAQSDLALLQAAQRMLARLGMNAVIYENRREAGRAFLPDGKGGQAHFETKAQHELVISGENLATYQERIGFTDVAKARRLAVALSGYKRALNRERFSAVVADVVDDGMAEVFDVQVPGVNAFDANGFYVHNSIVGTATFDQYWSVRTSKRTSGTVTVTDHFRAWANRGLNLGTIDQITLCVEGYQSSGSANITQNTFSQGSSSGSSGGSSGSTTTTRIECENMSLSGPYVSRITNPFNGIALYANGDTARATVNFPASRNYNFRLRGCGNNNNLARVDLRIDGRTVGTFYYQGTYPWEAPIDNVYVSAGSHTVEITVTADNGTWDVYADYLVIQ

SEQ ID NO: 2490 - protein, 685 aa, Artificial Sequence
  Synthetic Construct, AS-118 intein modified protein
MQTSITLTSNASGTFDGYYYELWKDTGNTTMTVYTQGRFSCQWSNINNALFRTGKKYNQNWQSLGTIRITYSATYNPNGNSYLCIYGWSTNPLVEFYIVESWGNWRPPGATSLGQVTIDGGTYDIYRTTRVNQPCLKRGTEVIMFDGTTKKVEDVIVGDVLMGPDSTPRNVLSLGRGREMMYEVKPRKGESYTVNESHILSLRTTTGIAKGSWPDNTVFDISVRDWLKLPKYVTGPNGYLKGWRVPVDFPRKEQDEALLPPYLMGLWLGDGTSSSGAITSGENEKEIRAYLESYAARNGMQIRKEGLTWSISHGNTGHKKHGFTHALKSAGVLNNKHIPHNYKCGDRRQRLELLAGLLDSDGYCDLSKAGFDWISVSERLADDFCYLCRSLGFAAYKKKTCKRCANTDVWGDYFRVSVSGDFSEVPFVRGRHQNLPKRNINKNVLNVGIESITPVGVDDYFGFTIDGDSRFLLGDFTVTHNTSIVGTATFDQYWSVRTSKRTSGTVTVTDHFRAWANRGLNLGTIDQITLCVEGYQSSGSANITQNTFSQGSSSGSSGGSSGSTTTTRIECENMSLSGPYVSRITNPFNGIALYANGDTARATVNFPASRNYNFRLRGCGNNNNLARVDLRIDGRTVGTFYYQGTYPWEAPIDNVYVSAGSHTVEITVTADNGTWDVYADYLVIQ

SEQ ID NO: 2491 - protein, 675 aa, Artificial Sequence
  Synthetic Construct, AS-119 intein modified protein
MQTSITLTSNASGTFDGYYYELWKDTGNTTMTVYTQGRFSCQWSNINNALFRTGKKYNQNWQSLGTIRITYSATYNPNGNSYLCIYGWSTNPLVEFYIVESWGNWRPPGATSLGQVTIDGGTYDIYRTTRVNQPAQPLDSLVLAPTGFRRMGDLREGDEVVVPNGEIALIDGVFPQGVRDVWRIVLSDGSSVECDDEHLWIVGTSCGWHRGQTPKVMTTREIRLDTFKANGSSKWYVPAATPVDLGPDVGLPLDPYLFGLLLGDGSFRHNLRLSTVDDEIRDAAADAVAPDCRLVPVTGSRCDYTIQLKQRSGGVRNPVIQALRRLDLWGKTSHGKFIPEDFKNTSIKNRLSLLQGLLDTDGTVHADGMSVSLRSASLRLAEDVAWLVRSLGGRARVLPEKAAFHVSVALPDEYAPFRLSRKADRVRPRPKYNTFRRGIRAVEYVGRKPAQCISVGHPSHAYVTDNFTVTHNSIVGTATFDQYWSVRTSKRTSGTVTVTDHFRAWANRGLNLGTIDQITLCVEGYQSSGSANITQNTFSQGSSSGSSGGSSGSTTTTRIECENMSLSGPYVSRITNPFNGIALYANGDTARATVNFPASRNYNFRLRGCGNNNNLARVDLRIDGRTVGTFYYQGTYPWEAPIDNVYVSAGSHTVEITVTADNGTWDVYADYLVIQ

SEQ ID NO: 2492 - protein, 836 aa, Artificial Sequence
  Synthetic Construct, AS-120 intein modified protein
MQTSITLTSNASGTFDGYYYELWKDTGNTTMTVYTQGRFSCQWSNINNALFRTGKKYNQNWQSLGTIRITYSATYNPNGNSYLCIYGWSTNPLVEFYIVESWGNWRPPGATSLGQVTIDGGTYDIYRTTRVNQPCFAKGTQVMMADGSDKSIEDIQLGENVMGKDGTPRTVISLPRGKETMYEVCHSSTKGTTKDTLMNYVCSGNHKIVMQTPQQIGITEHGIDGKTYTSVSYFALRDSQHGYPIVKKLTKSFEHQQHGGKEQTLITVNNFVSSLKSEPINWDVEAKHYESLGHYVKKCSYQLINPVFHQSGKLAQEIASLNYSKDKAPLLAWLIGFWVGNGAMRHSQFVVESQDIELVNRIQDIAGLLNLSATTACYYSGSKDDEAKLAKLNSSSAEGFEDDLEGNPSVKELADMDRLSESKTATLPTAFGVENIDELIISLGEGRGNGNVFAQVIGSFGIDLADKDTLVTKIAHELAGDAFEVREQFVAGLVDAAGYVRKDVYDHASEATISTESKSTVLGLVKIARSLGIKITVTSDDSDDSDEHDHAHCGHDHGSSSSYTAVMTGDALTNSMRFCAIGRNRVAAKEFMRQAVPFYFSLEKKSEDDYYGITVPDNTDKQYLLSSMALVHNSIVGTATFDQYWSVRTSKRTSGTVTVTDHFRAWANRGLNLGTIDQITLCVEGYQSSGSANITQNTFSQGSSSGSSGGSSGSTTTTRIECENMSLSGPYVSRITNPFNGIALYANGDTARATVNFPASRNYNFRLRGCGNNNNLARVDLRIDGRTVGTFYYQGTYPWEAPIDNVYVSAGSHTVEITVTADNGTWDVYADYLVIQ

SEQ ID NO: 2493 - protein, 817 aa, Artificial Sequence
  Synthetic Construct, AS-121 intein modified protein
MQTSITLTSNASGTFDGYYYELWKDTGNTTMTVYTQGRFSCQWSNINNALFRTGKKYNQNWQSLGTIRITYSATYNPNGNSYLCIYGWSTNPLVEFYIVESWGNWRPPGATSLGQVTIDGGTYDIYRTTRVNQPSVSYDTPVLIRDPINKIHLVKIGEFIDKFYEEGEERTAKHVNGYYVLSHDGFQVVWKPIKYVLRHRTNEIYEIIYEGGGKLEATGSHSVFVLDPDTLDIVEKPVMLLNKGEYLVSFNGVKENKDHQTIDLIDLVSDYNDVYVDNIPSELKKHTGGRNPIPLKQYMILRKRVITKKNNSLIKLRRSKYTLPIRLVLDEKLAFLFGAYIANGCVKERRDKLICFTFGKSAKNIADKVMNIMYEKFNIKPFIDDRGTYIIYEYPHTLLAIIFEKLLGRKLEEKKMPEILWSSPKSVIRAFFEGLRAYSQRTLRRRYTSYTTANKNLAYQLLWLARFAGFYSVLKEEKEAGKNNGKTYYHVIVYLDQSYRKPNASERVPVKPILKLIKYTKPRTMPPELAYIKRREFISRKTALKALEWIRRDGSFTDFSREYLRKIESLINGDIIVLKIKDVRKKQYKGYVYDISVPITEAFFGGNIPILLHNSIVGTATFDQYWSVRTSKRTSGTVTVTDHFRAWANRGLNLGTIDQITLCVEGYQSSGSANITQNTFSQGSSSGSSGGSSGSTTTTRIECENMSLSGPYVSRITNPFNGIALYANGDTARATVNFPASRNYNFRLRGCGNNNNLARVDLRIDGRTVGTFYYQGTYPWEAPIDNVYVSAGSHTVEITVTADNGTWDVYADYLVIQ

SEQ ID NO: 2494 - protein, 687 aa, Artificial Sequence
  Synthetic Construct, AS-122 intein modified protein
MQTSITLTSNASGTFDGYYYELWKDTGNTTMTVYTQGRFSCQWSNINNALFRTGKKYNQNWQSLGTIRITYSATYNPNGNSYLCIYGWSTNPLVEFYIVESWGNWRPPGATSLGQVTIDGGTYDIYRTTRVNQPSYHKDFKIMLADGRKVRIGDLVDELIGKNREKVIKGKDTEILFVDDLFLLSYNMRSGEQVLVKADRVSRHKAPDQFIKLRFSNGAEIIVTPEHPVLIINNGKIKTVRADTVRKGTLTIGVLGHKIIKEVNEDDIINNIRRKIVLDKELPYIHAKNISEAVEMRDQLMSIDIPTFIVKHKNEIRLYPSGPCSLRRLLLMHGVEEVVFSDELLYEIMNCHLYPATWYELLYSMGLTKIAKELNVYDFEILAGIIKKVEKEVIMLSQVLGLRNETQTELLHLKSRRELLIRLKDKLDMLRKRLKDLEEALGKDAVIRMITDVEVIKNTDSDWVYDITIEPYHLFVSDGLILHNSIVGTATFDQYWSVRTSKRTSGTVTVTDHFRAWANRGLNLGTIDQITLCVEGYQSSGSANITQNTFSQGSSSGSSGGSSGSTTTTRIECENMSLSGPYVSRITNPFNGIALYANGDTARATVNFPASRNYNFRLRGCGNNNNLARVDLRIDGRTVGTFYYQGTYPWEAPIDNVYVSAGSHTVEITVTADNGTWDVYADYLVIQ

SEQ ID NO: 2495 - protein, 681 aa, Artificial Sequence
  Synthetic Construct, AS-123 intein modified protein
MQTSITLTSNASGTFDGYYYELWKDTGNTTMTVYTQGRFSCQWSNINNALFRTGKKYNQNWQSLGTIRITYSATYNPNGNSYLCIYGWSTNPLVEFYIVESWGNWRPPGATSLGQVTIDGGTYDIYRTTRVNQPCLGKGTPVMMYDGRTKPVEKVEVGDRLMGDDGSPRTVQSLARGREQMYWVRQKRGMDYRVNESHILSLKKSRREGARDRGSIADISVRDYLDQSDKWKDDNKGFKVAAEFPDQPVPLDPYFLGLWLGDGKSDNARIYTTDEEVITGLQEIAEKRGDTISVSDEHRRCPAYLVKSGDRGGAMATRESVQGALRALGVLGDKHIPHLYLGNSRGKRLRLLAGLIDSDGHLNDGHGGTYEITQSSEQLARDIKFLCDTLGYRTSLTQKTARISSTGYESEVHRVRFNGNVDEIPVRVERKKASPWTDVRDWRMTGIDVEPDGVGDYFGFTLDGNGRFLLGDGTVTHNSIVGTATFDQYWSVRTSKRTSGTVTVTDHFRAWANRGLNLGTIDQITLCVEGYQSSGSANITQNTFSQGSSSGSSGGSSGSTTTTRIECENMSLSGPYVSRITNPFNGIALYANGDTARATVNFPASRNYNFRLRGCGNNNNLARVDLRIDGRTVGTFYYQGTYPWEAPIDNVYVSAGSHTVEITVTADNGTWDVYADYLVIQ

SEQ ID NO: 2496 - protein, 695 aa, Artificial Sequence
  Synthetic Construct, AS-124 intein modified protein
MQTSITLTSNASGTFDGYYYELWKDTGNTTMTVYTQGRFSCQWSNINNALFRTGKKYNQNWQSLGTIRITYSATYNPNGNSYLCIYGWSTNPLVEFYIVESWGNWRPPGATSLGQVTIDGGTYDIYRTTRVNQPCFDPETEVVTVDGIRHVEEIEVGDRVYSLNPDTGAVEIKPVTATQSQHYAGPMVEIKNQHTDFLVTPNHRFLTQRFTSGEYTDLEWETAGDMLGDRIRRRLPSLRSLPATQERPGPISLSAVCDRLAIEHKTGPRGIKELRRQARWQPEEYELTDWLRILGWFATEGTLYKSKARQYENGNVRGVSYQTTLCQKNDIGRSEIATLLNRTGITYSSDQNDHSFCSKVLYEILEAECGSDSFSKHLPPWIFQLGPKDLKIVFDTLMQGDSAANGDRFTTSSNQLAEDFIRLAMHIGRRAFHMPNDGSHRIQVNTVRGQRPTIKPKHRQQVDYDGMIHCLTVADNHTVLAGRNRKFNWTGQSIVGTATFDQYWSVRTSKRTSGTVTVTDHFRAWANRGLNLGTIDQITLCVEGYQSSGSANITQNTFSQGSSSGSSGGSSGSTTTTRIECENMSLSGPYVSRITNPFNGIALYANGDTARATVNFPASRNYNFRLRGCGNNNNLARVDLRIDGRTVGTFYYQGTYPWEAPIDNVYVSAGSHTVEITVTADNGTWDVYADYLVIQ

SEQ ID NO: 2497 - protein, 766 aa, Artificial Sequence
  Synthetic Construct, AS-125 intein modified protein
MQTSITLTSNASGTFDGYYYELWKDTGNTTMTVYTQGRFSCQWSNINNALFRTGKKYNQNWQSLGTIRITYSATYNPNGNSYLCIYGWSTNPLVEFYIVESWGNWRPPGATSLGQVTIDGGTYDIYRTTRVNQPCISGDSLISLASTGKRVSIKDLLDEKDFEIWAINEQTMKLESAKVSRVFCTGKKLVYILKTRLGRTIKATANHRFLTIDGWKRLDELSLKEHIALPRKLESSSLQLMSDEELGLLGHLIGDGCTLPRHAIQYTSNKIELAEKVVELAKAVFGDQINPRISQERQWYQVYIPASYRLTHNKKNPITKWLENLDVFGLRSYEKFVPNQVFEQPQRAIAIFLRHLWSTDGCVKLIVEKSSRPVAYYATSSEKLAKDVQSLLLKLGINARLSKISQNGKGRDNYHVTITGQADLQIFVDQIGAVDKDKQASVEEIKTHIAQHQANTNRDVIPKQIWKTYVLPQIQIKGITTRDLQMRLGNAYCGTALYKHNLSRERAAKIATITQSPEIEKLSQSDIYWDSIVSITETGVEEVFDLTVPGPHNFVANDIIVHNSIVGTATFDQYWSVRTSKRTSGTVTVTDHFRAWANRGLNLGTIDQITLCVEGYQSSGSANITQNTFSQGSSSGSSGGSSGSTTTTRIECENMSLSGPYVSRITNPFNGIALYANGDTARATVNFPASRNYNFRLRGCGNNNNLARVDLRIDGRTVGTFYYQGTYPWEAPIDNVYVSAGSHTVEITVTADNGTWDVYADYLVIQ

SEQ ID NO: 2498 - protein, 772 aa, Artificial Sequence
  Synthetic Construct, AS-126 intein modified protein
MQTSITLTSNASGTFDGYYYELWKDTGNTTMTVYTQGRFSCQWSNINNALFRTGKKYNQNWQSLGTIRITYSATYNPNGNSYLCIYGWSTNPLVEFYIVESWGNWRPPGATSLGQVTIDGGTYDIYRTTRVNQPCFSGDTLVALTDGRSVSFEQLVEEEKQGKQNFCYTIRHDGSIGVEKIINARKTKTNAKVIKVTLDNGESIICTPDHKFMLRDGSYKCAMDLTLDDSLMPLHRKISTTEDSGITIDGYEMVWSPRSDSWLFTHLVADWYNRWQGIYIAEEKQHCHHKDFNKRNNNPDNLIRLSPEKHLALHRKHISKTLHRPDVVEKCRRIHQSPEFRRKMSARMQSPETRAILSKQAQAQWQNETYKLTMMESWRSFYDSNEDYRQQNAEQLNRAQQEYWAQAENRTAQAERVRQHFAQNPGLRQQYSENAVKQWNNPELLKWRQKKTKEQWTPEFREKRREALAQTYYRKTLAALKQVEIENGYLDISAYDSYRISTKDKSLLRFDRFCERYFENDENLAREAVLNYNHRIVNIEAVSETIDVYDIEVPHTHNFALASGVFVHNSIVGTATFDQYWSVRTSKRTSGTVTVTDHFRAWANRGLNLGTIDQITLCVEGYQSSGSANITQNTFSQGSSSGSSGGSSGSTTTTRIECENMSLSGPYVSRITNPFNGIALYANGDTARATVNFPASRNYNFRLRGCGNNNNLARVDLRIDGRTVGTFYYQGTYPWEAPIDNVYVSAGSHTVEITVTADNGTWDVYADYLVIQ

SEQ ID NO: 2499 - protein, 757 aa, Artificial Sequence
  Synthetic Construct, AS-127 intein modified protein
MQTSITLTSNASGTFDGYYYELWKDTGNTTMTVYTQGRFSCQWSNINNALFRTGKKYNQNWQSLGTIRITYSATYNPNGNSYLCIYGWSTNPLVEFYIVESWGNWRPPGATSLGQVTIDGGTYDIYRTTRVNQPCISMDSMILTTEGYKSLQEIFETQGVKVDNKEKVIELKYPLINRYGDVEYTSHFTKNGEKPTKRIKTNKGIELVNTYNHPLLVREGFNLIWKKSEDIEVGDILVSRVGDHQFGNNNTVENEEEAYALGCMVADSYLGSYSRLSFSNDKKEILDKVSKFWNTFSNKEVYYDTYKESKGITIHLHDTNKTKEFHDKYKIEYGVAKDKKIPKCIMESPENIQLAFVSGYLECESSISEKNLEVTSASKDLLKDLQLILSNIGIVSTNKEKVVKKYKHNKYYRLIVNRKELIKLLPLLRFETQQRKNQKENFLSNNTKIKSSYGNTIEGSRYLLKKYRDSLNIDKKEFSKYLSRDTITIDRLREVISLYPDGDKEIRELFENVVNNNIYYQKVEQVLEGEIIPTFDVCMPKTHSFIANTIVNHNSIVGTATFDQYWSVRTSKRTSGTVTVTDHFRAWANRGLNLGTIDQITLCVEGYQSSGSANITQNTFSQGSSSGSSGGSSGSTTTTRIECENMSLSGPYVSRITNPFNGIALYANGDTARATVNFPASRNYNFRLRGCGNNNNLARVDLRIDGRTVGTFYYQGTYPWEAPIDNVYVSAGSHTVEITVTADNGTWDVYADYLVIQ

SEQ ID NO: 2500 - protein, 697 aa, Artificial Sequence
  Synthetic Construct, AS-128 intein modified protein
MQTSITLTSNASGTFDGYYYELWKDTGNTTMTVYTQGRFSCQWSNINNALFRTGKKYNQNWQSLGTIRITYSATYNPNGNSYLCIYGWSTNPLVEFYIVESWGNWRPPGATSLGQVTIDGGTYDIYRTTRVNQPCHPADTKVIVKGKGIVNISDVKEGDYILGIDGWQRVKKVWKYHYEGKLININGLKCTPNHKVPVVTENDRQTRIRDSLAKSFLSGKVKGKIITTKLFEKIAEFEKNKPSEEEILKGELSGIILAEGTLLRKDIEYFDSSRGKKRISHQYRVEITIGENEKELLERILYIFDKLFGIRPSVKKKGDTNALKITTAKKAVYLQIEELLKNIESLYAPAVLRGFFERDATVNKIRSTIVVTQGTNNKWKIDIVAKLLDSLGIPYSRYEYKYIENGKELTKHILEITGRDGLILFQTLVGFISSEKNEALEKAIEVREMNRLKNNSFYNLSTFEVSSEYYKGEVYDLTLEGNPYYFANGILTHNSIVGTATFDQYWSVRTSKRTSGTVTVTDHFRAWANRGLNLGTIDQITLCVEGYQSSGSANITQNTFSQGSSSGSSGGSSGSTTTTRIECENMSLSGPYVSRITNPFNGIALYANGDTARATVNFPASRNYNFRLRGCGNNNNLARVDLRIDGRTVGTFYYQGTYPWEAPIDNVYVSAGSHTVEITVTADNGTWDVYADYLVIQ

SEQ ID NO: 2501 - protein, 873 aa, Artificial Sequence
  Synthetic Construct, AS-129 intein modified protein
MQTSITLTSNASGTFDGYYYELWKDTGNTTMTVYTQGRFSCQWSNINNALFRTGKKYNQNWQSLGTIRITYSATYNPNGNSYLCIYGWSTNPLVEFYIVESWGNWRPPGATSLGQVTIDGGTYDIYRTTRVNQPSILPNEWLPIIENGEVKFVKIGEFIDRYMEEQKDKVRTVDNTEVLEVDNIFAFSLNKESKKSEIKKVKALIRHKYKGEAYEVELNSGRKIHITRGHSLFTIRNGKIKEIWGEEVKVGDLIIVPKKVKLNEKEAVINIPELISKLPDEDTADVVMTTPVKGRKNFFKGMLRTLKWIFGEESKRIRTFNRYLFHLEELGFVKLLPRGYEVTDWEGLKRYRQLYEKLVKNLRYNGNKREYLVRFNDIKDSVSCFPRKELEEWKIGTKGFRKCILKVDEDFGKFLGYYVSEGYAGAQKNKTGGMSYSVKLYNENPNVLKDMKNIAEKFFGKVRVGKNCVDIPKKMAYLLAKSLCGVTAENKRIPSIIFDSSEPVRWAFLRAYFVGDGDIHPSKRLRLSTKSELLANQLVFLLNSLGVSSIKIGFDSGVYRVYINEDLPFLQTSRQKNTYYPNLIPKEVLEEIFGRKFQKNITFEKFKELADSGKLDKRKVKLLDFLLNGDIVLDRVKNVEKREYEGYVYDLSVEDNENFLVGFGLLYAHNSIVGTATFDQYWSVRTSKRTSGTVTVTDHFRAWANRGLNLGTIDQITLCVEGYQSSGSANITQNTFSQGSSSGSSGGSSGSTTTTRIECENMSLSGPYVSRITNPFNGIALYANGDTARATVNFPASRNYNFRLRGCGNNNNLARVDLRIDGRTVGTFYYQGTYPWEAPIDNVYVSAGSHTVEITVTADNGTWDVYADYLVIQ

SEQ ID NO: 2502 - protein, 2323 aa, Artificial Sequence
  Synthetic Construct, AS-130 intein modified protein
MQTSITLTSNASGTFDGYYYELWKDTGNTTMTVYTQGRFSCQWSNINNALFRTGKKYNQNWQSLGTIRITYSATYNPNGNSYLCIYGWSTNPLVEFYIVESWGNWRPPGATSLGQVTIDGGTYDIYRTTRVNQPCAAYDTLVLQKDGSLVTLAEVYKRQEIELLTLGKNSKFYLTKPSAFIDDGIKPIFRVTTKLGRFVETTITHPFLTVNGWKPLSKLQVGEKIAVPRRLNIFGNETISESKFSSLINFDNLYLFPLVFQLERSQLALFIRYLFSLDGWVKIYQNKIVCFGYSTVSEKLIRQIQHILLRFGIVSGIEKFEEKRTEKIKVVKEVKSQRSHREEFTFATYRNCYCDGKWHLTITDALSQKNLMEDIGGFDSKNFYLFDLLQPHNSGNQELENHLIFWDELVNVLAKFAASKNQSLKNRTAKGKSPKNSENLTTTETICRKNILANMENLPSDNQNFDSEKLDLSQPHNSGNQELENHLIFWDELVNVLAKFATSKNQSLKNRTTKRNSPKNSENLTTTETICRKNILANMENLPSDNQNFDSEKLDLPQPHNSGNQELENHLIFWDELVNVLAKFAASKNQSLKNRTTKRNSPKNSENLTTTETICRKNILANMENLPSDNQNFDSEKLDLPQPHNSGNQELENHLIFWDELVNVLAKFATSKNQSLKNRTTKRNSPKNSENLTTTETICRKNILANMENLPSDNQNFDSEKLDLSQPHNSGTQELENHLIFWDELVNVLAKFAASKNQSLKNRTAKGKSPKNSENLTTTETICRKNILANMENLPSDNQNFDSEKLDLSQPHNSGNQELENHLIFWDELVNVLAKFATSKNQSLKNRTTKRNSPKNSENLTTTETICRKNILANMENLPSDNQNFDSEKLDLPQPHNSGNQELENHLIFWDELVNVLAKFATSKNQSLKNRTTKRNSPKNSENLTTTETICRKNILANMENLPSDNQNFDSEKLDLPQPHNSGNQELENHLIFWDELVNVLAKFATSKNQSLKNRTTKRNSPKNSENLTTTETICRKNILANMENLPSDNQNFDSEKLDLPQPHNSGNQELENHLIFWDELVNVLAKFATSKNQSLKNRTTKRNSPKNSENLTTTETICRKNILANMENLPSDNQNFDSEKLDLPQPHNSGNQELENHLIFWDELVNVLAKFATSKNQSLKNRTTKRNSPKNSENLTTTETICRKNILANMENLPSDNQNFDSEKLDLSQPHNSGTQELENHLIFWDELVNVLAKFAASKNQSLKNRTTKRNSPKNSENLTTTETICRKNILANMENLPSDNQNFDSEKLDLPQPHNSGTQELENHLIFWDELVNVLAKFAASKNQSLKNRTTKRNSPKNSENLTTTETICRKNILANMENLPSDNQNFDSEKLDLPQPHNSGNQELENHLIFWDELVNVLAKFAASKNQSLKNRTTKRNSPKNSENLTTTETICRKNILANMENLPSDNQNFDSEKLDLPQPHNSGNQELENHLIFWDELVNVLAKFATSKNQSLKNRTTKRNSPKNSENLTTTETICRKNILANMENLPSDNQNFDSEKLDLPQPHNSGNQELENHLIFWDELVNVLAKFATSKNQSLKNRTAKGKSPKNSENLTTTETICRKNILANMENLPSDNQNFDSEKLDLPQPHNSGNQELENHLIFWDELVNVLAKFATSKNQSLKNRTTKRNSPKNSENLTTTETICRKNILANMENLPSDNQNFDSEKLDLPQPHNSGNQELENHLIFWDELVNVLAKFATSKNQSLKNRTTKRNSPKNSENLTTTETICRKNILANMENLPSDNQNFDSEKLDLPQPHNSGNQELENHLIFWDELVNVLAKFATSKNQSLKNRTAKGKSPKNSENLTTTETICRKNILANMENLPSDNQNFDSEKLDLPQPHNSGNQELENHLIFWDELVNVLAKFATSKNQSLKNRTTKRNSPKNSENLTTTETICRKNILANMENLPSDNQNFDSEKLDLPQPHNSGNQELENHLIFWDELVNVLAKFATSKNQSLKNRTTKRNSPKNSENLTTTETICRKNILANMENLPSDNQNFDSEKLDLPQPHNSGTQELENSDIFWDKIVSIEPVGEKQVYDLTVPETHNFVANDICLHNSIVGTATFDQYWSVRTSKRTSGTVTVTDHFRAWANRGLNLGTIDQITLCVEGYQSSGSANITQNTFSQGSSSGSSGGSSGSTTTTRIECENMSLSGPYVSRITNPFNGIALYANGDTARATVNFPASRNYNFRLRGCGNNNNLARVDLRIDGRTVGTFYYQGTYPWEAPIDNVYVSAGSHTVEITVTADNGTWDVYADYLVIQ

SEQ ID NO: 2503 - protein, 765 aa, Artificial Sequence
  Synthetic Construct, AS-131 intein modified protein
MQTSITLTSNASGTFDGYYYELWKDTGNTTMTVYTQGRFSCQWSNINNALFRTGKKYNQNWQSLGTIRITYSATYNPNGNSYLCIYGWSTNPLVEFYIVESWGNWRPPGATSLGQVTIDGGTYDIYRTTRVNQPCLSGSTKVIDAATGNLFSLKEIAAQPEYWLSRKVFSLDLKSQQVVQQPITEIHPNGVRDVWQITTRTNRKVCATDDHLFYTVLGWKPLKDFSVGDRLGLPNKIPINYRSQISDSKVKFTAYLIGEGYLYTNSFSCSYFCNSDGELIADFYGCAEELFGSSAPIEKQLHLGNKSVIYVRIGLISGLKNWVDSYLQCANSRVQEIPNWIFSLSQSQLQLFLGILWSTSGIFDETIGYTYYSSNSEVLVRQVQHLFLRLGIVSLFNVNKVKGQGELDVSYVVEVRGREDMLKFYKLIKPYLSSYKQGLCESCYLVIKYQQSYQFKYFLTPDFFDLIVKAKKASSMTRALGVCGGEISSVWNFQNTSNRSLSFDKFNNFSTVLADEELTAIANSDVFWDEIISIEYIGKEEVFDLTIPETHNFIANDFIVHNSIVGTATFDQYWSVRTSKRTSGTVTVTDHFRAWANRGLNLGTIDQITLCVEGYQSSGSANITQNTFSQGSSSGSSGGSSGSTTTTRIECENMSLSGPYVSRITNPFNGIALYANGDTARATVNFPASRNYNFRLRGCGNNNNLARVDLRIDGRTVGTFYYQGTYPWEAPIDNVYVSAGSHTVEITVTADNGTWDVYADYLVIQ

SEQ ID NO: 2504 - protein, 474 aa, Artificial Sequence
  Synthetic Construct, AS-132 intein modified protein
MQTSITLTSNASGTFDGYYYELWKDTGNTTMTVYTQGRFSCQWSNINNALFRTGKKYNQNWQSLGTIRITYSATYNPNGNSYLCIYGWSTNPLVEFYIVESWGNWRPPGATSLGQVTIDGGTYDIYRTTRVNQPCLTYETEIMTVEYGPLPIGKIVEYRIECTVYTVDKNGYIYTQPIAQWHNRGMQEVYEYSLEDGTVIRATPEHKFMTEDGQMLPIDEIFERNLDLKCLGTLEMVKIVSRKLAKTENVYDIGVTKDHNFVLANGLIASNSIVGTATFDQYWSVRTSKRTSGTVTVTDHFRAWANRGLNLGTIDQITLCVEGYQSSGSANITQNTFSQGSSSGSSGGSSGSTTTTRIECENMSLSGPYVSRITNPFNGIALYANGDTARATVNFPASRNYNFRLRGCGNNNNLARVDLRIDGRTVGTFYYQGTYPWEAPIDNVYVSAGSHTVEITVTADNGTWDVYADYLVIQ

SEQ ID NO: 2505 - protein, 767 aa, Artificial Sequence
  Synthetic Construct, AS-133 intein modified protein
MQTSITLTSNASGTFDGYYYELWKDTGNTTMTVYTQGRFSCQWSNINNALFRTGKKYNQNWQSLGTIRITYSATYNPNGNSYLCIYGWSTNPLVEFYIVESWGNWRPPGATSLGQVTIDGGTYDIYRTTRVNQPSLTGDQKVLYYIAKKLYYETFAECYDRINGDISSVSVPCFDENYQTVIKPISAIWKHHVKKKGFKIKITWGKQIKITEDHSLFTRNENNKPQAVFGNEIKVGDEIGIPSYISFLEQPLEPFHITDKILIQEEIYVESEDTISYIEKYGDKMREYLLAKSLSPSQFYSILKTYEAKNQIPWHLWKYLELPLSEKDKVCYLSKKAIKNWIDNVEELLWFLGFYVARGSLIKNEVVLKGEPSQLEKVIELIERIFEYKSEINDSGYISIKSKILVDLIGYGLNFGNQEKDIPNWILQLPEQQLIRFLKGFVAGNNLENQLNFYLEFKTDSQLVAEKLVLILSKFGLVADVSEIEVNEEDIAKIYRIIIEGLEDKNIHNLSKVEQKISALTTGDIAWGKIESIEEFEIDDYVYDFSVPNYENFIGGSYNVFAHNSIVGTATFDQYWSVRTSKRTSGTVTVTDHFRAWANRGLNLGTIDQITLCVEGYQSSGSANITQNTFSQGSSSGSSGGSSGSTTTTRIECENMSLSGPYVSRITNPFNGIALYANGDTARATVNFPASRNYNFRLRGCGNNNNLARVDLRIDGRTVGTFYYQGTYPWEAPIDNVYVSAGSHTVEITVTADNGTWDVYADYLVIQ

SEQ ID NO: 2506 - protein, 660 aa, Artificial Sequence
  Synthetic Construct, AS-134 intein modified protein
MQTSITLTSNASGTFDGYYYELWKDTGNTTMTVYTQGRFSCQWSNINNALFRTGKKYNQNWQSLGTIRITYSATYNPNGNSYLCIYGWSTNPLVEFYIVESWGNWRPPGATSLGQVTIDGGTYDIYRTTRVNQPCVSGDTLLITRDSIHKIKDVVGQKIEIWNGKNWSQVIPLKTGKDRKLYRVRFGDGSYLDVTEYHRFFVKDRFGKKYEEVQTKDLLTHSKYALDVEPFIIDYHDGDSINLSYAYTLGAALGNGTIDQNSNGKIRVYSHKAELIFAGNKSLERQYNYLPSFVDVIDLGFSGELLRRLQTEPDALNTIASWNKSAILAFIAGLADTDGSETKGNGIKISVSDYERAKRLQLLLTKCGIRASVNLMASRGCTTNLGERNQDLYYLQITDCREIPCQRLDTTKVCEAKFQGKYQTIQNVEELPGLHDTYCFEEPEFHKGVFGNALTGNSIVGTATFDQYWSVRTSKRTSGTVTVTDHFRAWANRGLNLGTIDQITLCVEGYQSSGSANITQNTFSQGSSSGSSGGSSGSTTTTRIECENMSLSGPYVSRITNPFNGIALYANGDTARATVNFPASRNYNFRLRGCGNNNNLARVDLRIDGRTVGTFYYQGTYPWEAPIDNVYVSAGSHTVEITVTADNGTWDVYADYLVIQ

SEQ ID NO: 2507 - protein, 718 aa, Artificial Sequence
  Synthetic Construct, AS-135 intein modified protein
MQTSITLTSNASGTFDGYYYELWKDTGNTTMTVYTQGRFSCQWSNINNALFRTGKKYNQNWQSLGTIRITYSATYNPNGNSYLCIYGWSTNPLVEFYIVESWGNWRPPGATSLGQVTIDGGTYDIYRTTRVNQPCLDKTALRIFNQGLLYADEVVTPGSGETVGLGLTVRNGIGASTAIANQPMELVEIKLANGRKLRMTPNHRMSVKGKWIHACNLKPGMLLDYSIGEYQKREDTLLIPLQLEDYTEVNNSQTLGHNGGVLTKKIMTPASMTSDLAYFLGCLFGNGCIVQNKYQVCFYHSRLDVLYGLQEKGKKLFGIKGSLNDFANGRFELCFASRQLFYWLHLNQLVKTQKSEDLERIPLSLRRSSRVTLLSFFCGLIDTNGYVPQDGKLSIASASSDFIHNLQQIGESIGLCFSIYQNTKGENLQNQHNNTWGLCLSPMLSNVDALDYLNHNSIKCQEGPVVISKCVLNYSPYKIESVNIGAVCDYSYDFAIEGINDNDSWYWQGALKSHNSIVGTATFDQYWSVRTSKRTSGTVTVTDHFRAWANRGLNLGTIDQITLCVEGYQSSGSANITQNTFSQGSSSGSSGGSSGSTTTTRIECENMSLSGPYVSRITNPFNGIALYANGDTARATVNFPASRNYNFRLRGCGNNNNLARVDLRIDGRTVGTFYYQGTYPWEAPIDNVYVSAGSHTVEITVTADNGTWDVYADYLVIQ

SEQ ID NO: 2508 - protein, 806 aa, Artificial Sequence
  Synthetic Construct, AS-136 intein modified protein
MQTSITLTSNASGTFDGYYYELWKDTGNTTMTVYTQGRFSCQWSNINNALFRTGKKYNQNWQSLGTIRITYSATYNPNGNSYLCIYGWSTNPLVEFYIVESWGNWRPPGATSLGQVTIDGGTYDIYRTTRVNQPCVLHDTEIYVNGMVMEAEQIWQAYAGEAEFDGEGFWTEPNKELLVNSLDETTGKIVFARIRRLYRQWVREKLRKVRLKDGSSITITCRHKLFIRDSWKNDFQVGDDVCVPAKLMWDGKPEDPDVVKFVAWQVAEGWERVNSGMFGVSQKGKDVLEGLLEVFSRLGKRYDIKINCPKVVAHGSKKNCYEFSAHSLEYRKFLEEKRYGWGKRSHEKTIPLFIMQADLDSVRVFLSNYFDAEGWVNKTVRCVEISTASSQLIQELSILLRRFGVWMKISPQQKCATNGTGVFCTYYIGTFGGNSARCFLQEIGFNDSGKQENLKSICEKIADSNVEGIPASDIVAELVEKTQLPVGSLGIQDPIYMDGCQDFSPTSLEKVINSIEDIISGAGEEEYGQLKSSKLRNKTLEAYSLLNILELEIYKTRLQKLLNQEVYYCQIESIEEMEYEGWVYDFEVSKYHNFVANNIICHNSIVGTATFDQYWSVRTSKRTSGTVTVTDHFRAWANRGLNLGTIDQITLCVEGYQSSGSANITQNTFSQGSSSGSSGGSSGSTTTTRIECENMSLSGPYVSRITNPFNGIALYANGDTARATVNFPASRNYNFRLRGCGNNNNLARVDLRIDGRTVGTFYYQGTYPWEAPIDNVYVSAGSHTVEITVTADNGTWDVYADYLVIQ

SEQ ID NO: 2509 - protein, 726 aa, Artificial Sequence
  Synthetic Construct, AS-137 intein modified protein
MQTSITLTSNASGTFDGYYYELWKDTGNTTMTVYTQGRFSCQWSNINNALFRTGKKYNQNWQSLGTIRITYSATYNPNGNSYLCIYGWSTNPLVEFYIVESWGNWRPPGATSLGQVTIDGGTYDIYRTTRVNQPSVTGDTEVTIRRNGRIEFVPIEKLFERVDHRVGEKEYCVLGGVEALTLDNRGRLVWKKVPYVMRHKTDKRIYRVWFTNSWYLDVTEDHSLIGYLNTSKVKPGKPLKERLVEVKPEELGGKVKSLITPNRPIARTIKANPIAVKLWELIGLLVGDGNWGGQSNWAKYYVGLSCGLDKAEIERKVLNPLREASVISNYYDKSKKGDVSILSKWLAGFMVKYFKDENGNKAIPSFMFNLPREYIEAFLRGLFSADGTVSLRRGIPEIRLTSVNRELSDAVRKLLWLVGVSNSLFTETKPNRYLEKESGTHSIHVRIKNKHRFADRIGFLIDRKSTKLSENLGGHTNKKRAYKYDFDLVYPRKIEEITYDGYVYDIEVEGTHRFFANGILVHNSIVGTATFDQYWSVRTSKRTSGTVTVTDHFRAWANRGLNLGTIDQITLCVEGYQSSGSANITQNTFSQGSSSGSSGGSSGSTTTTRIECENMSLSGPYVSRITNPFNGIALYANGDTARATVNFPASRNYNFRLRGCGNNNNLARVDLRIDGRTVGTFYYQGTYPWEAPIDNVYVSAGSHTVEITVTADNGTWDVYADYLVIQ

SEQ ID NO: 2510 - protein, 759 aa, Artificial Sequence
  Synthetic Construct, AS-138 intein modified protein
MQTSITLTSNASGTFDGYYYELWKDTGNTTMTVYTQGRFSCQWSNINNALFRTGKKYNQNWQSLGTIRITYSATYNPNGNSYLCIYGWSTNPLVEFYIVESWGNWRPPGATSLGQVTIDGGTYDIYRTTRVNQPCLTADTYVWTDRGLETVAEVFGRAGLPLSSTSRVTDVRDRDIRVVNEKGELEQVAALTHNGRQPVVRITVASGRQVTVTRNHPLRVMNDDGFIVWREAGQLREGDVLVSAAFGAVQAASGGGLSEDEAVLLGYLTAAGSLDPAGHVCFTTTDIETGAEFAALAEWLLDTTVTAVPGDGQVAYVLSDPAARHTLAERYGVDYAAAARIPQCVRTAGDKMQRAFLAALYTAAGWTDTSAAVGLRTASAPLAREVQYLLYGLGIPADLDRSHGNGQHPWAVTISPAAAPRFHTEVGFRTAQQSPQTGLHEPTPQVEAIPNLTGLIHALRDSIGDRAESTDDPFPAASGGAYDRDQVRRVIDWAKRRTDEAPATANAILGYLTQLTDARYTYEPITAVEDAGQQPTFDLMVPRTHSFLANGILSHNSIVGTATFDQYWSVRTSKRTSGTVTVTDHFRAWANRGLNLGTIDQITLCVEGYQSSGSANITQNTFSQGSSSGSSGGSSGSTTTTRIECENMSLSGPYVSRITNPFNGIALYANGDTARATVNFPASRNYNFRLRGCGNNNNLARVDLRIDGRTVGTFYYQGTYPWEAPIDNVYVSAGSHTVEITVTADNGTWDVYADYLVIQ

SEQ ID NO: 2511 - protein, 694 aa, Artificial Sequence
  Synthetic Construct, AS-139 intein modified protein
MQTSITLTSNASGTFDGYYYELWKDTGNTTMTVYTQGRFSCQWSNINNALFRTGKKYNQNWQSLGTIRITYSATYNPNGNSYLCIYGWSTNPLVEFYIVESWGNWRPPGATSLGQVTIDGGTYDIYRTTRVNQPCMHYDTLVTLADGTQEKIGTIVDRKLDVEVLSYDPETDRIVPRRVVNWFDNGAADHFLQFTVGRSGKPGGAQFTATPNHLIRTPGGWREAGELIAGDRVLVHEPHYLNEQQRQVVYGSLMGRGTLVPDRHGGPGVHFCMAHTAEQAAYLDWKVSLLGNIAHSRTAEASATVGVEFTPMPELSELHRVVDFGDGHTHLTWEFLKQLTPLALAVWYLDAGTLTIPQSGTDDDARVQIDVETLSPGSRQRLVEYLRDTHELDAAVVQQGADARSLLEFTPAATVRFLELVAPYVPESMSSMLLAQFRGRCSVTPEYSDPVQRLVAAPVLDIQVKPGSTRKFDIEVEGNHNYFVDGVMVHNSIVGTATFDQYWSVRTSKRTSGTVTVTDHFRAWANRGLNLGTIDQITLCVEGYQSSGSANITQNTFSQGSSSGSSGGSSGSTTTTRIECENMSLSGPYVSRITNPFNGIALYANGDTARATVNFPASRNYNFRLRGCGNNNNLARVDLRIDGRTVGTFYYQGTYPWEAPIDNVYVSAGSHTVEITVTADNGTWDVYADYLVIQ

SEQ ID NO: 2512 - protein, 874 aa, Artificial Sequence
  Synthetic Construct, AS-140 intein modified protein
MQTSITLTSNASGTFDGYYYELWKDTGNTTMTVYTQGRFSCQWSNINNALFRTGKKYNQNWQSLGTIRITYSATYNPNGNSYLCIYGWSTNPLVEFYIVESWGNWRPPGATSLGQVTIDGGTYDIYRTTRVNQPSLLPEEWIPLVENGKVRLHRIGEFVDKLMETDSELVKRNGDTEVLEVRGIRALSFDRKSKKARVMPVKAVIRHRYSGDVYEIVLGSGRRITVTEGHSLFAYGDGELREVTGGEIKAGDLLAVPRRVNLPEKKERLNLVELLRRLPEEETGDIILTIPVKGRKNFFKGMLRTLRWISGEEKRPRTARRYLEHLEGLGYVRLKKIGYEVTDREGLERYRKLYERLVEAVRYNGNKREYLVEFNAVRDVIALMPEEELRDWLVGTRNGFRMRPFVEIEEDFAKLLGYYVSEGNARKWRNQKNGWSYTVKLYNENQRVLDDMESLAERFFGRVKRGKNYIEIPRKMAYIIFENLCGTLAENKRVPEAIFTSPESVRWAFIEGYFIGDGDVHPSKRVRLSTKSELLVNGLVLLLNSLGVSAIKIRHDSGVYRVYVNEELPFTDYRKKKNAYYSHVIPKEILEETFGKVFQRSVSYEKFRELVKSEKLDGEKAKRIEWLLNGDVVLDKVLEVKKRPYEGYVYDLSVEEDENFLAGFGLLYAHNSIVGTATFDQYWSVRTSKRTSGTVTVTDHFRAWANRGLNLGTIDQITLCVEGYQSSGSANITQNTFSQGSSSGSSGGSSGSTTTTRIECENMSLSGPYVSRITNPFNGIALYANGDTARATVNFPASRNYNFRLRGCGNNNNLARVDLRIDGRTVGTFYYQGTYPWEAPIDNVYVSAGSHTVEITVTADNGTWDVYADYLVIQ

SEQ ID NO: 2513 - protein, 672 aa, Artificial Sequence
  Synthetic Construct, AS-141 intein modified protein
MQTSITLTSNASGTFDGYYYELWKDTGNTTMTVYTQGRFSCQWSNINNALFRTGKKYNQNWQSLGTIRITYSATYNPNGNSYLCIYGWSTNPLVEFYIVESWGNWRPPGATSLGQVTIDGGTYDIYRTTRVNQPSYHHDFELLLADGRKVKIGELVDKLIEKNRDRVILGKDTEILPVEDIELLAYDLEKREIVKVKADRVSRHKAPERFIKLRFSNGREITVTPEHPVMVWENGEITEKPAEKITPGDIALGVLRYPIQVDGKFKERYRDMREAEDYQDYLYSRGVVSKIKRTGIYFTVEKARRALPRELVKPLINAGKILRVTQTPKERASFNQKLVRENIIEGYLQRIIERMDELERLSREDPAKALELLPKTQLYYKYGITYGKLKKLAEARNSWAEGIIQSAVAERISLAKRELEEFFKWWNANVNFLKVKCVEEIKNDRWEWVYDVTVEPHHLFVSHGLVLHNSIVGTATFDQYWSVRTSKRTSGTVTVTDHFRAWANRGLNLGTIDQITLCVEGYQSSGSANITQNTFSQGSSSGSSGGSSGSTTTTRIECENMSLSGPYVSRITNPFNGIALYANGDTARATVNFPASRNYNFRLRGCGNNNNLARVDLRIDGRTVGTFYYQGTYPWEAPIDNVYVSAGSHTVEITVTADNGTWDVYADYLVIQ

SEQ ID NO: 2514 - protein, 740 aa, Artificial Sequence
  Synthetic Construct, AS-142 intein modified protein
MQTSITLTSNASGTFDGYYYELWKDTGNTTMTVYTQGRFSCQWSNINNALFRTGKKYNQNWQSLGTIRITYSATYNPNGNSYLCIYGWSTNPLVEFYIVESWGNWRPPGATSLGQVTIDGGTYDIYRTTRVNQPCMHPDTYVVTKSGAKKVSELTEGDEVLTHTGTFKKVIQPLRREHKGRLLVIKAYGTVPVKITPEHMVWVVKQIRHKSHYSDGRQVIWWEFEGPEWMTAQELKERLESETDPKVSYMLLQPIPEPSVDADKIPLRKEVYVVNQHGKTDKLHPSVKRTPEYLPLNFETARLIGLWIAEGSTSKNGVIKFDISSNEEDLTEFITGTIRKYFPHAKIVVKDHERNRRTVRFCNKRFAEWLRENIGHGADNKSIPPLLLLNKNREVRLGLLRGLIEGDGYVRRESQRRANYISYSTVSPSLAYQLQLLVASLGYTSSIHRSIRTEGIGKTRKPIYDVKVSGKSYYSLLEELGFEVPQRGNRTYNVNRTWKNYLLLKVRSIEEEEYEGDVYNLEVEGDESGSVGFIVHNSIVGTATFDQYWSVRTSKRTSGTVTVTDHFRAWANRGLNLGTIDQITLCVEGYQSSGSANITQNTFSQGSSSGSSGGSSGSTTTTRIECENMSLSGPYVSRITNPFNGIALYANGDTARATVNFPASRNYNFRLRGCGNNNNLARVDLRIDGRTVGTFYYQGTYPWEAPIDNVYVSAGSHTVEITVTADNGTWDVYADYLVIQ

SEQ ID NO: 2515 - protein, 883 aa, Artificial Sequence
  Synthetic Construct, AS-143 intein modified protein
MQTSITLTSNASGTFDGYYYELWKDTGNTTMTVYTQGRFSCQWSNINNALFRTGKKYNQNWQSLGTIRITYSATYNPNGNSYLCIYGWSTNPLVEFYIVESWGNWRPPGATSLGQVTIDGGTYDIYRTTRVNQPCLLPDEKVILPEHGPITLKGLFDLAKETVVADNEKEIRKLGAKLTIVGEDGRLRVLESPYVWKVRHRGKMLRVKLKNWHSVSVTPEHPFLTTRGWVRADQLKPGDYVAVPRVIHGNESDERFVSFVYEKLKNDELIAKLRGEVLSKISSEFKGDRAYKVERNVFRWEDIERLNLWDEVERVAFTPRMHRSGKPLHYVKLPRSPEEWEAFFYFAGVMFGDGSQDKIANNDVEVYEELKKLSVLGVAVKRVERTTSYEIELTNGKNALLRLLRVLFEYPERQKAKSIRVPRILFIAPRKYVSRFLRGYFDADGHVSLKDARIEVTSASQEFLEDLSLLLLRFGIVSKIYRSDYTTLVISGRRNLDLFRRYIGFSVKNKAEALEKAIKKSRRSESYPIFEELKRLRLLFGFTRTELNSNVPFYGKYESEEAPSYETLMRILDAIEKGSINLDKKIAVLEGRIRDHNYIKAFEKDGLIKDGKLTELGRELLEVWRNREFDSSDVDYIRNLAENLVFIPVEDIEEFEYEGYVYDVTTETHNFVANGILVHNSIVGTATFDQYWSVRTSKRTSGTVTVTDHFRAWANRGLNLGTIDQITLCVEGYQSSGSANITQNTFSQGSSSGSSGGSSGSTTTTRIECENMSLSGPYVSRITNPFNGIALYANGDTARATVNFPASRNYNFRLRGCGNNNNLARVDLRIDGRTVGTFYYQGTYPWEAPIDNVYVSAGSHTVEITVTADNGTWDVYADYLVIQ

SEQ ID NO: 2516 - protein, 862 aa, Artificial Sequence
  Synthetic Construct, AS-144 intein modified protein
MQTSITLTSNASGTFDGYYYELWKDTGNTTMTVYTQGRFSCQWSNINNALFRTGKKYNQNWQSLGTIRITYSATYNPNGNSYLCIYGWSTNPLVEFYIVESWGNWRPPGATSLGQVTIDGGTYDIYRTTRVNQPCVSGDSKILTGKGPVEIGRLNSNMIAGIWRFQTELVRFEEPHRVEYRREGVKIRTRLGFEIKATKEHKFLTVDENGELRWVEAWKLKEGNWVGVVRRLPSPNVKVSILDLLPPNAYLKLKGEFLRELKLSIQAKFGSIRTYAKKKRWSESYLVKQLNGVYPFRWERLSAVLKDLDLRMTENDVERITSDKGKYSLPIEFTPSMARLLGFWMADGSWKGGTLTLFSSDRKMLEKYKELCKEEFGVVGRIRMLNESTYSLEISFNLLPAIFKNLTGNTERKSKLGTFPSIIYSLPEEHKREFLAGYFDGDGFLEVKGGRVYSAGFSTFNKRFAEGIRDILLQLGIVSSIRAREYDEVQKFKGRVIPKKGASYTVSVLGGEYLKRFFDAVRPWRSDYEGWEGMYNEGYSNSDVVPNLGKRLRSIRERLGISAYRMSKMGFYNPVRVELGEREISRRNLRLLVEFYERVAKEKRVEDVLEELSYLRELAEGDVFFDRITSVEPAYIDVAYGIINSETENYIVEGFISKNSIVGTATFDQYWSVRTSKRTSGTVTVTDHFRAWANRGLNLGTIDQITLCVEGYQSSGSANITQNTFSQGSSSGSSGGSSGSTTTTRIECENMSLSGPYVSRITNPFNGIALYANGDTARATVNFPASRNYNFRLRGCGNNNNLARVDLRIDGRTVGTFYYQGTYPWEAPIDNVYVSAGSHTVEITVTADNGTWDVYADYLVIQ

SEQ ID NO: 2517 - protein, 873 aa, Artificial Sequence
  Synthetic Construct, AS-145 intein modified protein
MQTSITLTSNASGTFDGYYYELWKDTGNTTMTVYTQGRFSCQWSNINNALFRTGKKYNQNWQSLGTIRITYSATYNPNGNSYLCIYGWSTNPLVEFYIVESWGNWRPPGATSLGQVTIDGGTYDIYRTTRVNQPSILPEEWLPVLEEGEVHFVRIGELIDRMMEENAGKVKREGETEVLEVSGLEVPSFNRRTNKAELKRVKALIRHDYSGKVYTIRLKSGRRIKITSGHSLFSVRNGELVEVTGDELKPGDLVAVPRRLELPERNHVLNLVELLLGTPEEETLDIVMTIPVKGKKNFFKGMLRTLRWIFGEEKRPRTARRYLRHLEDLGYVRLKKIGYEVLDWDSLKNYRRLYEALVENVRYNGNKREYLVEFNSIRDAVGIMPLKELKEWKIGTLNGFRMRKLIEVDESLAKLLGYYVSEGYARKQRNPKNGWSYSVKLYNEDPEVLDDMERLASRFFGKVRRGRNYVEIPKKIGYLLFENMCGVLAENKRIPEFVFTSPKGVRLAFLEGYSSAMATSTEQETQALNEKRALANQLVLLLNSVGVSAVKLGHDSGVYRVYINEELPFVKLDKKKNAYYSHVIPKEVLSEVFGKVFQKNVSPQTFRKMVEDGRLDPEKAQRLSWLIEGDVVLDRVESVDVEDYDGYVYDLSVEDNENFLVGFGLVYAHNSIVGTATFDQYWSVRTSKRTSGTVTVTDHFRAWANRGLNLGTIDQITLCVEGYQSSGSANITQNTFSQGSSSGSSGGSSGSTTTTRIECENMSLSGPYVSRITNPFNGIALYANGDTARATVNFPASRNYNFRLRGCGNNNNLARVDLRIDGRTVGTFYYQGTYPWEAPIDNVYVSAGSHTVEITVTADNGTWDVYADYLVIQ

SEQ ID NO: 2518 - protein, 819 aa, Artificial Sequence
  Synthetic Construct, AS-146 intein modified protein
MQTSITLTSNASGTFDGYYYELWKDTGNTTMTVYTQGRFSCQWSNINNALFRTGKKYNQNWQSLGTIRITYSATYNPNGNSYLCIYGWSTNPLVEFYIVESWGNWRPPGATSLGQVTIDGGTYDIYRTTRVNQPCFAKDTKVYYENDTLVHFESIEDMYHKYASLGREVPFDNGYAVPLETVSVYTFDPKTGEVKRTKASYIYREKVEKLAEIRLSNGYLLRITLLHPVLVFRNGLQWVPAGMIKPGDLIVGIRSVPANAATIEESEAYFLGLFVAEGTSNPLSITTGSEELKDFIVSFIEDHDGYTPTVEVRRGLYRILFRKKTAEWLGELATSNASTKVVPERVLNAGESAIAAFLAGYLDGDGYLTESIVELVTKSRELADGLVFLLKRLGITPRISQKTIEGSVYYRIYITGEDRKTFEKVLEKSRIKPGEMNEGGVGRYPPALGKFLGKLYSEFRLPKRDNETAYHILTRSRNVWFTEKTLSRIEEYFREALEKLSEARKALEMGDKPELPFPWTAITKYGFTDRQVANYRTRGLPKRPELKEKVVSALLKEIERLEGVAKLALETIELARRLEFHEVSSVEVVDYNDWVYDLVIPETHNFIAPNGLVLHNSIVGTATFDQYWSVRTSKRTSGTVTVTDHFRAWANRGLNLGTIDQITLCVEGYQSSGSANITQNTFSQGSSSGSSGGSSGSTTTTRIECENMSLSGPYVSRITNPFNGIALYANGDTARATVNFPASRNYNFRLRGCGNNNNLARVDLRIDGRTVGTFYYQGTYPWEAPIDNVYVSAGSHTVEITVTADNGTWDVYADYLVIQ

SEQ ID NO: 2519 - protein, 826 aa, Artificial Sequence
  Synthetic Construct, AS-147 intein modified protein
MQTSITLTSNASGTFDGYYYELWKDTGNTTMTVYTQGRFSCQWSNINNALFRTGKKYNQNWQSLGTIRITYSATYNPNGNSYLCIYGWSTNPLVEFYIVESWGNWRPPGATSLGQVTIDGGTYDIYRTTRVNQPCVTPDTLVSLADGRIMEIKDAVEKSEGNLLSVNGLKPKEAKALKFWEIDWNGPLKVIKLKNGHEIKATPDHGLLVMREGKLGWVSAKNVREGDYVAFAYNTGHRGRDEYTLLKLMIKLGITDVMVELDEEYFNEKVAPIVRERISTSTKYKYLRRRVLPLYLLQEWGLDDYEAHVKSLYRQRAGSKPIPNFKLDGRFWYVFGLVLGDGTLRDSKVLISQTPLKDVKSVLEDVFPFLRVFETTNQVGFSNSIIAEVFRRLGARKGKLHPLVFGLREEYINAMIAGYFDTDGTFSILNDRKGPNFRGILTSKRGDVLRMLSVYLYQIGIMNYLRRDERTGVWDLIISNRSLEKFREKIYPYLRIRRAQFDEAYSVYRASRRAFEGDLLPVAPVFGKLKFKNGTKNRILKETGIDVWNWLKRPEGEIPRDKLSKVLEYAEESPEKEFLKSLVEAGVTWVKVKGVEEELYTGKLYDFTTTTENFLSNGAVSHNSIVGTATFDQYWSVRTSKRTSGTVTVTDHFRAWANRGLNLGTIDQITLCVEGYQSSGSANITQNTFSQGSSSGSSGGSSGSTTTTRIECENMSLSGPYVSRITNPFNGIALYANGDTARATVNFPASRNYNFRLRGCGNNNNLARVDLRIDGRTVGTFYYQGTYPWEAPIDNVYVSAGSHTVEITVTADNGTWDVYADYLVIQ

SEQ ID NO: 2520 - protein, 791 aa, Artificial Sequence
  Synthetic Construct, AS-148 intein modified protein
MQTSITLTSNASGTFDGYYYELWKDTGNTTMTVYTQGRFSCQWSNINNALFRTGKKYNQNWQSLGTIRITYSATYNPNGNSYLCIYGWSTNPLVEFYIVESWGNWRPPGATSLGQVTIDGGTYDIYRTTRVNQPCIDGNAKIIFENDGEEHIMTMAEMYERYKDLGEFYDPEYNRWGINVEEVPVYVKSFDPSTKEITKGKVKVIWKYELGEDVPKYEIKTNKGTRVLTSPWHPFFVITQDLKIVEKRADELREGDMLVGGMPSDDDYEFLLDYWLAGFIAGDGSIDKYRSHVKGHEYVYDRLRIYDYTTETLGIINDHLEKTFGKRYSLQRDRNIHYIDIKAKGITSHYIELLRGITNGIPQPILKEGRNAVLSFITGLFDAEGHVNSKPGVELGMVNRKLIEDITYYLNSLGIKARMRKKPRKDGVDYVMHVEEYSSLLRFYELIGKNLQNSEKRIKLEELLSKHNGGSFGLTLSFEDFKAWSSKYGVEFKTNGSQTLAIIKNEKVSLGQWHRRGRVSKAVLVKMLRKLYDTTKSEDVKRMLHLIEGLEVVKEINVTNEPKTFYDLTVERYQNYLAGENGMVFVHNSIVGTATFDQYWSVRTSKRTSGTVTVTDHFRAWANRGLNLGTIDQITLCVEGYQSSGSANITQNTFSQGSSSGSSGGSSGSTTTTRIECENMSLSGPYVSRITNPFNGIALYANGDTARATVNFPASRNYNFRLRGCGNNNNLARVDLRIDGRTVGTFYYQGTYPWEAPIDNVYVSAGSHTVEITVTADNGTWDVYADYLVIQ

SEQ ID NO: 2521 - protein, 848 aa, Artificial Sequence
  Synthetic Construct, AS-149 intein modified protein
MQTSITLTSNASGTFDGYYYELWKDTGNTTMTVYTQGRFSCQWSNINNALFRTGKKYNQNWQSLGTIRITYSATYNPNGNSYLCIYGWSTNPLVEFYIVESWGNWRPPGATSLGQVTIDGGTYDIYRTTRVNQPCLHPDSLIPTPQGVKRIKELPEKGEVFALDFDLKLSRARYRLLERDADEPMYKVTLSDRTELYLTADHPVLVYRDDQLIFVPAEELRENDQVVLFINRSEYSPRTESPTLLGFLLENATSMKDYILYDPEFGGVLRNRIKDAGLKTEILWRFRIREPTYYKYLRGKMPVPIVRFLLEEGVVSIEELREVFRGFSYSTSLTPISFEFSEEFWYLFGLVAGDGHLAKKGAITIPAKDRTEDTVKAVKEIANSLQVPFAFDEKYKMIILRSKSLTRLFELLGCPYGNKTEIFRIPGEIMAKPEWMAAFLAGYYDADGHIGTKPTGGKKSHSPQIVLTSKNRMAIYTVKQMWQLLGVGTYLWEKKDRNGNFMAYELKVYSRDAWRFYEVMKNHLRIKRKDLEHVKEVAIRKRKAYSHHYSVLNVKSWEGKIKSSNVLWKKFDMSNQTAHGRGISLDKLQRIVDYLTDTDLRRIAMGDVYVLGIRSIEKFHYRGKVYDLVVDQYHNFIANGVVVHNSIVGTATFDQYWSVRTSKRTSGTVTVTDHFRAWANRGLNLGTIDQITLCVEGYQSSGSANITQNTFSQGSSSGSSGGSSGSTTTTRIECENMSLSGPYVSRITNPFNGIALYANGDTARATVNFPASRNYNFRLRGCGNNNNLARVDLRIDGRTVGTFYYQGTYPWEAPIDNVYVSAGSHTVEITVTADNGTWDVYADYLVIQ

SEQ ID NO: 2522 - protein, 760 aa, Artificial Sequence
  Synthetic Construct, AS-150 intein modified protein
MQTSITLTSNASGTFDGYYYELWKDTGNTTMTVYTQGRFSCQWSNINNALFRTGKKYNQNWQSLGTIRITYSATYNPNGNSYLCIYGWSTNPLVEFYIVESWGNWRPPGATSLGQVTIDGGTYDIYRTTRVNQPCLPARARVVDWCTGRVVRVGEIVRGEAKGVWVVSLDEARLRLVPRPVVAAFPSGKAQVYALRTATGRVLEATANHPVYTPEGWRPLGTLAPGDYVALPRHLSYRPSLHLEGHELDLLGFALAEGHLRHPSGVYLYTSSEEELAAMEEALRAFPNTRIRVVWRRGVAHVYVGRVDRRQEAGAVAFLRRMGLLGLDAKTKRLPEAVFGLPPEEVARFLGRLWTGDGGVDPKGRLIHYATASKELAWGVQHLLLRLGLQSRLVEKRFSGGYKGYAVYLLGGLEAARRFAETVGPYLVGKRRQDLEALLASWEKAGRSTGDVLPLAFLEEVRAAVAEVAQGQVADLLREAGLAEGLLCLGRGRRGLSRATVGRLAALTGSLALLRLAEAEVYWDRVEAVEPLGEEEVFDLTVEGTHTFVAEDVIVHNSIVGTATFDQYWSVRTSKRTSGTVTVTDHFRAWANRGLNLGTIDQITLCVEGYQSSGSANITQNTFSQGSSSGSSGGSSGSTTTTRIECENMSLSGPYVSRITNPFNGIALYANGDTARATVNFPASRNYNFRLRGCGNNNNLARVDLRIDGRTVGTFYYQGTYPWEAPIDNVYVSAGSHTVEITVTADNGTWDVYADYLVIQ

SEQ ID NO: 2523 - protein, 775 aa, Artificial Sequence
  Synthetic Construct, AS-151 intein modified protein
MQTSITLTSNASGTFDGYYYELWKDTGNTTMTVYTQGRFSCQWSNINNALFRTGKKYNQNWQSLGTIRITYSATYNPNGNSYLCIYGWSTNPLVEFYIVESWGNWRPPGATSLGQVTIDGGTYDIYRTTRVNQPCLHPDTLVHTDRGTLRLRELVDPFRRGWQPHTLSVATDEGWRPSPEGYNNGVAPTLRVVLENGLEVQGTLNHKLKVLREDGTREWVELQDLRPGDWVIWVLDEHTGTPVQLAPLDEPLHPNTTPIRTPEVLTEDLAFLLGFFFGEGFVSGDRIGFSVHEEEPMREEAKRLFRELFGLELREERKPGDRSVTLVVRSRPLVTWLRKNGLLKGKARELEVPRAIRQSPRPVLAAFLRGLFEADGTITAGYPMLTTASKRLAQDVMVLLGGLGIPSKLLRYNPLPGRFSKAEHYGVRVVTAKGLERYLERIGVPKGSRLEALHGIKPDVRRESSWPLPHAEGLLKPLLTVTEKGRKGYASPYTPLRKDLLRYLRGERQLTATGYAMVLEKAQDLGLEAEPFPFNEYYVRVASVEPGGEILTLDLSVEGNHTYLANGLVSHNSIVGTATFDQYWSVRTSKRTSGTVTVTDHFRAWANRGLNLGTIDQITLCVEGYQSSGSANITQNTFSQGSSSGSSGGSSGSTTTTRIECENMSLSGPYVSRITNPFNGIALYANGDTARATVNFPASRNYNFRLRGCGNNNNLARVDLRIDGRTVGTFYYQGTYPWEAPIDNVYVSAGSHTVEITVTADNGTWDVYADYLVIQ

SEQ ID NO: 2524 - protein, 744 aa, Artificial Sequence
  Synthetic Construct, AS-152 intein modified protein
MQTSITLTSNASGTFDGYYYELWKDTGNTTMTVYTQGRFSCQWSNINNALFRTGKKYNQNWQSLGTIRITYSATYNPNGNSYLCIYGWSTNPLVEFYIVESWGNWRPPGATSLGQVTIDGGTYDIYRTTRVNQPCFVGSTRIPTERGLVPIEELAREGGSFYLVTDNRAPFGGRGAPLPGHGTAVRKAVRAFFTGVKPVVRLRTREGLEVTLTPDHLLLTPEGYREAGKLRPGEKILVQSGEGLFPKEESLPAQALAVVHERVATAGGRGGRGRADVRAQYRNLPTRWSRELGVALGWLLGDGYLREDGVGFYFSRKDFADLAWLPDLLRDWFGPGTLQETRSNTFHLHFNRIPAEFFQALGVKAARATEKRVPESLFRAPREAVVGFLQGLFSADGSVQINENKQDATVRLASSSLALLQDVQLLLLNLGILGKIHKRREAARKALPDGKGGLREYPVAPQYELILGGENRDRFAEVVGFLQEEKQSKLLAFLRHRPRGSYRKPFLATVASVEPAGEAPVYDLTEPVTHSLIANGLVAHNSIVGTATFDQYWSVRTSKRTSGTVTVTDHFRAWANRGLNLGTIDQITLCVEGYQSSGSANITQNTFSQGSSSGSSGGSSGSTTTTRIECENMSLSGPYVSRITNPFNGIALYANGDTARATVNFPASRNYNFRLRGCGNNNNLARVDLRIDGRTVGTFYYQGTYPWEAPIDNVYVSAGSHTVEITVTADNGTWDVYADYLVIQ

SEQ ID NO: 2525 - protein, 523 aa, Artificial Sequence
  Synthetic Construct, AS-153 intein modified protein
MQTSITLTSNASGTFDGYYYELWKDTGNTTMTVYTQGRFSCQWSNINNALFRTGKKYNQNWQSLGTIRITYSATYNPNGNSYLCIYGWSTNPLVEFYIVESWGNWRPPGATSLGQVTIDGGTYDIYRTTRVNQPCVSGETPVYLADGKTIKIKDLYSSERKKEDNIVEAGSGEEIIHLKDPIQIYSYVDGTIVRSRSRLLYKGKSSYLVRIETIGGRSVSVTPVHKLFVLTEKGIEEVMASNLKVGDMIAAVAESESEARDCGMSEECVMEAEVYTSLEATFDRVKSIAYEKGDFDVYDLSVPEYGRNFIGGEGLLVLHNSIVGTATFDQYWSVRTSKRTSGTVTVTDHFRAWANRGLNLGTIDQITLCVEGYQSSGSANITQNTFSQGSSSGSSGGSSGSTTTTRIECENMSLSGPYVSRITNPFNGIALYANGDTARATVNFPASRNYNFRLRGCGNNNNLARVDLRIDGRTVGTFYYQGTYPWEAPIDNVYVSAGSHTVEITVTADNGTWDVYADYLVIQ

SEQ ID NO: 2526 - protein, 489 aa, Artificial Sequence
  Synthetic Construct, AS-154 intein modified protein
MQTSITLTSNASGTFDGYYYELWKDTGNTTMTVYTQGRFSCQWSNINNALFRTGKKYNQNWQSLGTIRITYSATYNPNGNSYLCIYGWSTNPLVEFYIVESWGNWRPPGATSLGQVTIDGGTYDIYRTTRVNQPCLSGETAVMTVEYGAIPIRRLVQERLICQVYSLDPQGHLYTQPIAQWHFQGFRPVYAYQLEDGSTICATPDHRFMTTSGQMLPIEQIFREGLELWQVAIAPPGALAQGLKPAVQMSCMKIVGRRLVGWQAVYDIGLAGDHNFLLANGAIAANSIVGTATFDQYWSVRTSKRTSGTVTVTDHFRAWANRGLNLGTIDQITLCVEGYQSSGSANITQNTFSQGSSSGSSGGSSGSTTTTRIECENMSLSGPYVSRITNPFNGIALYANGDTARATVNFPASRNYNFRLRGCGNNNNLARVDLRIDGRTVGTFYYQGTYPWEAPIDNVYVSAGSHTVEITVTADNGTWDVYADYLVIQ

SEQ ID NO: 2527 - protein, 644 aa, Artificial Sequence
  Synthetic Construct, AS-155 intein modified protein
MQTSITLTSNASGTFDGYYYELWKDTGNTTMTVYTQGRFSCQWSNINNALFRTGKKYNQNWQSLGTIRITYSATYNPNGNSYLCIYGWSTNPLVEFYIVESWGNWRPPGATSLGQVTIDGGTYDIYRTTRVNQPCVTADTWVTTAEGPRQVEELIGKKFTAIVNGEEWESSEEGFFETDVKPVYTLKTAEGFELRLTADHPVMKVERMTRYKVETQWSNAGDLKPGDKIIINNHRDFGNWSVKGKYTEGEGYLIGLLLGDGTIKKLNPWMKAISKKMEKASADFCEGILRGLFDADGSVQGNQSKGVSIRLAQSDVEILKAVQRILLRFGIFSKVYMNRRGERKVKMPDGKGGVKEYITKPQHELVISNDNILYFAERVGFSDAEKMEKLEKAIWNYKRKMNRERFVASVEEVVPDGVEKVYDVKIPGINAFNANGFVVHNSIVGTATFDQYWSVRTSKRTSGTVTVTDHFRAWANRGLNLGTIDQITLCVEGYQSSGSANITQNTFSQGSSSGSSGGSSGSTTTTRIECENMSLSGPYVSRITNPFNGIALYANGDTARATVNFPASRNYNFRLRGCGNNNNLARVDLRIDGRTVGTFYYQGTYPWEAPIDNVYVSAGSHTVEITVTADNGTWDVYADYLVIQ

SEQ ID NO: 2528 - protein, 792 aa, Artificial Sequence
  Synthetic Construct, AS-156 intein modified protein
MQTSITLTSNASGTFDGYYYELWKDTGNTTMTVYTQGRFSCQWSNINNALFRTGKKYNQNWQSLGTIRITYSATYNPNGNSYLCIYGWSTNPLVEFYIVESWGNWRPPGATSLGQVTIDGGTYDIYRTTRVNQPCFAKGTEVMMHDGSVKAIETIEAGEAVMGTDGQPRKVVGLPRGREVMYKVSQKTAHRVHKTDETRAAPVALFEYNCNATHKLVVRTPRSCRSITRKMQGVDYNEVIFFDLKKKKLEDGREIEIVKEVSRSYPAAEGAEKAAQMVKDYYDAARGKEFFEWTIEARDVELGAHVRKATHQVYAPVLYESDFFFHYVKNSKFALRSEASTALAYLLGLWVGDGLSDRAVLSVDSEDSSLLERITGYADILDLSAEYKDREIPKRAKTVCLYPKTIRGNDIRRNLNTDNPVWNAIVDLGYLKDGVKNVPSYLFSDSICHREVFLAGLIDSDGHVRGDDGLSVTIKTIHKTVMEGTVAVARSLGLIVSVNTEEAKIDKNDVNHRFVYAIYISGGDALLSVLAHCAAAKKFRAPPSNEVVRGLKKVFFEMEELKEDDYYGITLAKESDHQFLLANQLVVHNSIVGTATFDQYWSVRTSKRTSGTVTVTDHFRAWANRGLNLGTIDQITLCVEGYQSSGSANITQNTFSQGSSSGSSGGSSGSTTTTRIECENMSLSGPYVSRITNPFNGIALYANGDTARATVNFPASRNYNFRLRGCGNNNNLARVDLRIDGRTVGTFYYQGTYPWEAPIDNVYVSAGSHTVEITVTADNGTWDVYADYLVIQ

SEQ ID NO: 2529 - protein, 787 aa, Artificial Sequence
  Synthetic Construct, AS-157 intein modified protein
MQTSITLTSNASGTFDGYYYELWKDTGNTTMTVYTQGRFSCQWSNINNALFRTGKKYNQNWQSLGTIRITYSATYNPNGNSYLCIYGWSTNPLVEFYIVESWGNWRPPGATSLGQVTIDGGTYDIYRTTRVNQPCFAKGTEVMMSDGSIKEVEGIEVGQEVMGKDGKPREVVGTPSGREKMYKVSHKTAHRAHKSDSTSERFGLFEYTCNATHKLVVRTSRSCRPLVRNIQGTDYVEVCLFNMTKKTLEDGRVIDIVEETSDFYPAVEGPEKALRILKEYAEADGGKEYFEWTIEARDVALLSAQVRKATYQLSAPVLLENNHFSHYLKDSNSAVGNDTVRALSYFLGLWIGDGMLNNAATFSVDSQNASLLNRINEFAEVLGLSAEYKDSQEPKRAKTVNLYAKAIRDEGVRKNLDTHNLLWDAIVDLGYLKDDSKNVPGYICSDSFQHREVFLAGIIDSTGYVSDETATVKTIDQSVMTGTVAVARSLGINVSVDVEVDEDGVDRSFVYAIYMDRSDALLAVLANCASNNKQIEAPPHGVIREFNKAYFEMEELEEDEYYGLTLSNESDHQFLLANQLVVHNSIVGTATFDQYWSVRTSKRTSGTVTVTDHFRAWANRGLNLGTIDQITLCVEGYQSSGSANITQNTFSQGSSSGSSGGSSGSTTTTRIECENMSLSGPYVSRITNPFNGIALYANGDTARATVNFPASRNYNFRLRGCGNNNNLARVDLRIDGRTVGTFYYQGTYPWEAPIDNVYVSAGSHTVEITVTADNGTWDVYADYLVIQ

SEQ ID NO: 2530 - protein, 683 aa, Artificial Sequence
  Synthetic Construct, AT-1 intein modified protein
MQTSITLTSNASGTFDGYYYELWKDTGNTTMTVYTQGRFSCQWSNINNALFRTGKKYNQNWQSLGTIRITYSATYNPNGNSYLCIYGWSTNPLVEFYIVESWGNWRPPGACFIEGTEVLTKRGFVDFRELREDDLVAQYDIETGEISWTKPYAYVERDYEGSMYRLKHPKSNWEVVATEGHEFIVRNLKTGKERKEPIEKVKLHPYSAIPVAGRYTGEVEEYDLWELVSGKGITLKTRSAVKNKLTPIEKLLIVLQADGTIDSKRNGKFTGFQQLKFFFSKYRKINEFEKILNECAPYGIKWKKYERQDGIAYTVYYPNDLPIKPTKFFDEWVRLDEITEEWIREFVEELVKWDGHIPKDRNKKKVYYYSTKEKRNKDFVQALCALGGMRTVVSRERNPKAKNPVYRIWIYLEDDYINTQTMVKEEFYYKGKVYCVSVPKGNIVVRYKDSVCIAGNTSLGQVTIDGGTYDIYRTTRVNQPSIVGTATFDQYWSVRTSKRTSGTVTVTDHFRAWANRGLNLGTIDQITLCVEGYQSSGSANITQNTFSQGSSSGSSGGSSGSTTTTRIECENMSLSGPYVSRITNPFNGIALYANGDTARATVNFPASRNYNFRLRGCGNNNNLARVDLRIDGRTVGTFYYQGTYPWEAPIDNVYVSAGSHTVEITVTADNGTWDVYADYLVIQ

SEQ ID NO: 2531 - protein, 490 aa, Artificial Sequence
  Synthetic Construct, AT-2 intein modified protein
MQTSITLTSNASGTFDGYYYELWKDTGNTTMTVYTQGRFSCQWSNINNALFRTGKKYNQNWQSLGTIRITYSATYNPNGNSYLCIYGWSTNPLVEFYIVESWGNWRPPGACQPYSAPVSTPDGPIPIGKLVDANAVGEKVFDASGVTRIVATTCNGRKPVLRIRTSGGHVLDVTPDHLVWQVVDQTAGRFVPAGQLRVGDRLEWHDRANSDAMVAAFTADSAAAAQPGQIVDILAIDELGVMPVYDIQTESGEYLSDGIRVHNTSLGQVTIDGGTYDIYRTTRVNQPSIVGTATFDQYWSVRTSKRTSGTVTVTDHFRAWANRGLNLGTIDQITLCVEGYQSSGSANITQNTFSQGSSSGSSGGSSGSTTTTRIECENMSLSGPYVSRITNPFNGIALYANGDTARATVNFPASRNYNFRLRGCGNNNNLARVDLRIDGRTVGTFYYQGTYPWEAPIDNVYVSAGSHTVEITVTADNGTWDVYADYLVIQ

SEQ ID NO: 2532 - protein, 755 aa, Artificial Sequence
  Synthetic Construct, AT-3 intein modified protein
MQTSITLTSNASGTFDGYYYELWKDTGNTTMTVYTQGRFSCQWSNINNALFRTGKKYNQNWQSLGTIRITYSATYNPNGNSYLCIYGWSTNPLVEFYIVESWGNWRPPGACVTGDTRVLLADGQRVPIRDLVGQTPEVISVNAEGRLEPAKTDLVWSVGVRPLLQVRLASGRTIRCTPEHRLRGLWDWKEARDIRVGDRLGIARELPAPKVTKRWAEHELVLLAHLVGDGSYIKGQPLRYTTASEANSEAVSRAAEAMGSTVTRHPGRGQWHQLVISGNGNRWHPQGVGKWLKQLGVFGQRSREKHLPQEVFQLDNDQLALFLRHLWATDGSITQGSAGRPRIYFSTASRHLIQDVAALLLRFGIVGRTKHITHGDGEGWFTLDISGAVQQQRYLEKIGAFGHQAHNARRALQHLRGLVENTNVDTLPEEVFNYIRERMREEGITHRQMAALRGTAYGGSAHFTFSPSRETLLSYADILNDQRLRMLANQHVFWDRVVSVEPAGEEEVFDLTVPGNACWLADGIVSHNTSLGQVTIDGGTYDIYRTTRVNQPSIVGTATFDQYWSVRTSKRTSGTVTVTDHFRAWANRGLNLGTIDQITLCVEGYQSSGSANITQNTFSQGSSSGSSGGSSGSTTTTRIECENMSLSGPYVSRITNPFNGIALYANGDTARATVNFPASRNYNFRLRGCGNNNNLARVDLRIDGRTVGTFYYQGTYPWEAPIDNVYVSAGSHTVEITVTADNGTWDVYADYLVIQ

SEQ ID NO: 2533 - protein, 942 aa, Artificial Sequence
  Synthetic Construct, AT-4 intein modified protein
MQTSITLTSNASGTFDGYYYELWKDTGNTTMTVYTQGRFSCQWSNINNALFRTGKKYNQNWQSLGTIRITYSATYNPNGNSYLCIYGWSTNPLVEFYIVESWGNWRPPGACLANGTQLLRYDGTKVNVEDVKEGDLLLGPDGGPRRAFNVVSGKDRLYRIKIDGDKEDLVVTANHILVLHRAKAMNTSVCFDRSKEQQGGAGEQLDISEVSAAERYDTVEMTAAEFAALHPQERSWYRAIRCPGFELPEQDVPVNPYFLGLWLGDESRNQSAIYSNHEEALREFLVSHAAELDMHLVYHGQSAYSTVCNKDRPTNKRIGPANQTQTVRPTIRQTRRTIRQQRLAAEHAAAEYTTQRETASLTPLLESPTSDKHGLLSSVETPGRLSDSVTTELPMSRSASAMRSIRTASGLSEFNDVTNVSASMPDIQNSGIKNQGRIAKVTRQQDSKGEVDFRQQYSQAIKDDLELLETDIEDDVASSDEIEDVCVVGSENELIGSEKQDQSGRRRQIHRLRTGHRGYGDLSDDEQEQLLDSVVERYAGDSRLNTLQQELSKMGILNPETGPINDKKRIPQVFMQNSRSVRLSVLAGLLDSDGWYIYPENMFGFAQSELCHKELFWDVVTLARSLGFGVWTKKRMMPDPTGKRMSPMLVAQISGDLAEIPCVLARKKAMPRLIPQSHSFAIKDISLESEATEWAGFRVDKDQLYLRHDYVVLHNTSLGQVTIDGGTYDIYRTTRVNQPSIVGTATFDQYWSVRTSKRTSGTVTVTDHFRAWANRGLNLGTIDQITLCVEGYQSSGSANITQNTFSQGSSSGSSGGSSGSTTTTRIECENMSLSGPYVSRITNPFNGIALYANGDTARATVNFPASRNYNFRLRGCGNNNNLARVDLRIDGRTVGTFYYQGTYPWEAPIDNVYVSAGSHTVEITVTADNGTWDVYADYLVIQ

SEQ ID NO: 2534 - protein, 805 aa, Artificial Sequence
  Synthetic Construct, AT-5 intein modified protein
MQTSITLTSNASGTFDGYYYELWKDTGNTTMTVYTQGRFSCQWSNINNALFRTGKKYNQNWQSLGTIRITYSATYNPNGNSYLCIYGWSTNPLVEFYIVESWGNWRPPGASLPPWEPIVVRRGDEVRVTSIGEFVDSFLEGEGGLDIGGLGYYTLSLDTRTLKPVWRRIRGVIKHRIRGRLLRVKASKGRSIDLTGSHSIYRISRGGGLEVVGSSDLRPGDSLVTPASVELPESAPSSINAARELWSRGVEGIFVVGLPGEAAGYRGVERSRGYDGGHAIPLETLVERYGDSVWSLVSGAKLAVSRGAAGDHPVPATIPLDTGFYLLLGFIVSAGSVDVEGGHVTVTLGPGREGYVGDVVEAVNSTAPGAGVRISSGARGMEVTIRSRVLSELLARVFGAGPGPNRDIPSIVFRAPKPMKRVFLKGLYAGGGVFDRSSGSLIYATDSRSLLNGLALLLLNVGAGGYRIDSGDSGRALALIVENAGRLDAIGEVLEHLGFHGGREAVQGVGALERATAGLAGQATVAVQRPATRGGPGVDVAGVTGLEHLEASTEFVYDLSVEGDENFFAGLGWILVHNTSLGQVTIDGGTYDIYRTTRVNQPSIVGTATFDQYWSVRTSKRTSGTVTVTDHFRAWANRGLNLGTIDQITLCVEGYQSSGSANITQNTFSQGSSSGSSGGSSGSTTTTRIECENMSLSGPYVSRITNPFNGIALYANGDTARATVNFPASRNYNFRLRGCGNNNNLARVDLRIDGRTVGTFYYQGTYPWEAPIDNVYVSAGSHTVEITVTADNGTWDVYADYLVIQ

SEQ ID NO: 2535 - protein, 715 aa, Artificial Sequence
  Synthetic Construct, AT-6 intein modified protein
MQTSITLTSNASGTFDGYYYELWKDTGNTTMTVYTQGRFSCQWSNINNALFRTGKKYNQNWQSLGTIRITYSATYNPNGNSYLCIYGWSTNPLVEFYIVESWGNWRPPGACFAPETLVHTADGPRPIRDLQQGDLVLGISGRYREVTHKFVYNQTDAMLAIRVKHAVEPIEVTAGHPFYAIRGVPLEQSGERTLRQLESGKRSPEWIDAGELERGDYMAQVIPSEVVPVAGFDEDDARLYGILLGDGHLSKNGLQWGVSGHPQRDGHMDFVRAYLSARGIHFWETARDETYGQIHWASGRGVRRDATTGRITGAGAATLPFEHADLYDEQGRKRIARRFSHLPRQQSLALIRSLLESDGGVSRGKEIYFTNTSRPLIEGLRYQLLRLGVPTAGQYRERRQDHVGQRADGSPIRFEGVCKAYDLRIPAVPEVAQLVGCQPIAKRNWITWQGCVYSRIRDVQPIAVKPFVFDLKVEGDESYMTTSGLAHNTSLGQVTIDGGTYDIYRTTRVNQPSIVGTATFDQYWSVRTSKRTSGTVTVTDHFRAWANRGLNLGTIDQITLCVEGYQSSGSANITQNTFSQGSSSGSSGGSSGSTTTTRIECENMSLSGPYVSRITNPFNGIALYANGDTARATVNFPASRNYNFRLRGCGNNNNLARVDLRIDGRTVGTFYYQGTYPWEAPIDNVYVSAGSHTVEITVTADNGTWDVYADYLVIQ

SEQ ID NO: 2536 - protein, 825 aa, Artificial Sequence
  Synthetic Construct, AT-7 intein modified protein
MQTSITLTSNASGTFDGYYYELWKDTGNTTMTVYTQGRFSCQWSNINNALFRTGKKYNQNWQSLGTIRITYSATYNPNGNSYLCIYGWSTNPLVEFYIVESWGNWRPPGACLSGDTEVVLGNGMDVVLLTDLVDGACVSTIEPRTGVVSPSLIDHYFAKDATRVLKITLDDGRVIKADPEHPLFAAKVDETTRGLTGQWLRVEELTVGHHALLVSPQQAYCTSEQWTLTLSEKEVCTASTAQLAKQLSEIGLVGVPIPLSKVKSAARLFGLVLSAGDFSGKLYVEKDEDVTAVNSDLTALGFSPAHWVRYQDDQQKWFKCDDSNGKAICITLVPTANALLQTLGAHDAEKQHRYCLLPKWLLDAPTSIKREFLGALFGGNGAHITISCNEGKWEPTMSALTQHTDADHLESTVVYLKQVATLLGMLNICSSVSSEKHITAEKTGYAVHLHVDNTAENLVRFYEQVGYRYCFNKTSQSSAPVQWIKGSLFFIEQHRSKCQHAFELLHTGLGTKAAVSAEINMPHHNPSHMLNVKEIPTAPADEYITWIEFKDRYVHKESPRFVWVTIHSIEEAPAERLYDFNTVSQNHSFFANSIVSHNTSLGQVTIDGGTYDIYRTTRVNQPSIVGTATFDQYWSVRTSKRTSGTVTVTDHFRAWANRGLNLGTIDQITLCVEGYQSSGSANITQNTFSQGSSSGSSGGSSGSTTTTRIECENMSLSGPYVSRITNPFNGIALYANGDTARATVNFPASRNYNFRLRGCGNNNNLARVDLRIDGRTVGTFYYQGTYPWEAPIDNVYVSAGSHTVEITVTADNGTWDVYADYLVIQ

SEQ ID NO: 2537 - protein, 756 aa, Artificial Sequence
  Synthetic Construct, AT-8 intein modified protein
MQTSITLTSNASGTFDGYYYELWKDTGNTTMTVYTQGRFSCQWSNINNALFRTGKKYNQNWQSLGTIRITYSATYNPNGNSYLCIYGWSTNPLVEFYIVESWGNWRPPGACFGRDTPLLMADGTTKFVQDIKALDQLMGDDCTPRIVQERSLVHESGALYRVVPKNANGHDAFVCNKEHILVMVNVKQPWVSQTVIDGVDQFHVSEVVCIGNIPTVRSSGNFASAVEATKALPAWTLLIWEISVLEYLAVDADLRQHFMIYKPAGGIEYPTTTNLDIVQHFGAESVPNLEHAVMWCIGLWILLGDVDTAGNPVLILSGIDHLHPLIKTLHSHSQKLSISFTNQLDEGVADISKPTIIALGDKFGLLFKSLGIESAECIPDALLRSSKLHRAALLAGLVEGSNAFSIVKDTPKHWDISCKNNMIFENIKRLSSSLGLCVDTVTPATITQQVSVKTLQIRISGPRMHYVSELISNDSLKTTSVVSIDSWLNVKSNACEFEIESIGCGEYFGFTVMGPNSRFLLGDFTVTHNTSLGQVTIDGGTYDIYRTTRVNQPSIVGTATFDQYWSVRTSKRTSGTVTVTDHFRAWANRGLNLGTIDQITLCVEGYQSSGSANITQNTFSQGSSSGSSGGSSGSTTTTRIECENMSLSGPYVSRITNPFNGIALYANGDTARATVNFPASRNYNFRLRGCGNNNNLARVDLRIDGRTVGTFYYQGTYPWEAPIDNVYVSAGSHTVEITVTADNGTWDVYADYLVIQ

SEQ ID NO: 2538 - protein, 722 aa, Artificial Sequence
  Synthetic Construct, AT-9 intein modified protein
MQTSITLTSNASGTFDGYYYELWKDTGNTTMTVYTQGRFSCQWSNINNALFRTGKKYNQNWQSLGTIRITYSATYNPNGNSYLCIYGWSTNPLVEFYIVESWGNWRPPGACVTGETLLLTENGYEKAADLYKKQNNLKVVIDNRTKDFAVDSKGTTIVDAIPMQLTKKDAEIFKVKTKQGYEIRATEWHKFYVKRDGEIQKLQLNQLKTGDKLLVQSAEGAYGKIHEPDLAYIMGIIAGDGTITEKTAKIYLYDNKKVLEQKVTDAVHRIIHKHKVDRAYKHNTSLLPTFNMANPEKQDLLYMNSTVLFDILKKFGMNKERKTRVPEFIFQANKETQAAYLSGLFQTDGCVNANHKAKALTIELTSIHYESLQDVQKLLLNMGVYTTIYSNNKRSQELLPDGKGGSKLYNVKPTHKISIQDRNSRELFMSIVELKDYDVYKFNLLTETLQPKSRKPKHDFTAEIISIEEDGVEDVYDTTQEDYHSLIFNGIVTGNTSLGQVTIDGGTYDIYRTTRVNQPSIVGTATFDQYWSVRTSKRTSGTVTVTDHFRAWANRGLNLGTIDQITLCVEGYQSSGSANITQNTFSQGSSSGSSGGSSGSTTTTRIECENMSLSGPYVSRITNPFNGIALYANGDTARATVNFPASRNYNFRLRGCGNNNNLARVDLRIDGRTVGTFYYQGTYPWEAPIDNVYVSAGSHTVEITVTADNGTWDVYADYLVIQ

SEQ ID NO: 2539 - protein, 707 aa, Artificial Sequence
  Synthetic Construct, AT-10 intein modified protein
MQTSITLTSNASGTFDGYYYELWKDTGNTTMTVYTQGRFSCQWSNINNALFRTGKKYNQNWQSLGTIRITYSATYNPNGNSYLCIYGWSTNPLVEFYIVESWGNWRPPGACVTADTLIATDRGLERIGNIVGESRGIKSIDGKLHWVENIFPTGTKPVYQLRTKSGYQLKLTGDHVVFTENRGDVKACELRKDDMVRLVGAPFGKETTGSTDIAQLIGLLTGDGCITTANEIAASGEQRRTAFLTVSKAEQEIAEWANQFINTLRPELGEHNKSGSVTETATTARVAVGSPRILKQFEAFAVLDKGSVHKLFTDKVFQLAQSEQAALLRGLFTADGTVANYSDKSQYIALDATSLELLQQVQLLLFNFGIKSKIYENRRVGELVSLLPDGKGGIKEYPVQQMHSLRISRSSRILFEQQIGFMAESKKYEALAELNRTVSTYRDSAYDAVASLTYSGEEAVFDLTEPETDHFIANGIGVHNTSLGQVTIDGGTYDIYRTTRVNQPSIVGTATFDQYWSVRTSKRTSGTVTVTDHFRAWANRGLNLGTIDQITLCVEGYQSSGSANITQNTFSQGSSSGSSGGSSGSTTTTRIECENMSLSGPYVSRITNPFNGIALYANGDTARATVNFPASRNYNFRLRGCGNNNNLARVDLRIDGRTVGTFYYQGTYPWEAPIDNVYVSAGSHTVEITVTADNGTWDVYADYLVIQ

SEQ ID NO: 2540 - protein, 613 aa, Artificial Sequence
  Synthetic Construct, AT-11 intein modified protein
MQTSITLTSNASGTFDGYYYELWKDTGNTTMTVYTQGRFSCQWSNINNALFRTGKKYNQNWQSLGTIRITYSATYNPNGNSYLCIYGWSTNPLVEFYIVESWGNWRPPGACLHGDSLIVTDHGLVPMREVVNHRQRLQVSDGERQQTVYDWNRFADYPTVTMRTRAGFTLTGSHNHRIMLADGTWRRLDELQIGDRVRIAGGTELWATEPALLRCRRPLPRVLVTAGAPAATTSSPHRRGYRRAAAVVVDEKLAAAIGRRCVTHADQQALDAIRRSPRPQVVAFLRAFCQGAGQSVASGLTLTCADADLATTVQLLLTNLGVLAHRTDTTVRIDNGDDLERAYTTLATPTGWTDEVVALEHGTADVYDISVTATHRYAAQGFINHNTSLGQVTIDGGTYDIYRTTRVNQPSIVGTATFDQYWSVRTSKRTSGTVTVTDHFRAWANRGLNLGTIDQITLCVEGYQSSGSANITQNTFSQGSSSGSSGGSSGSTTTTRIECENMSLSGPYVSRITNPFNGIALYANGDTARATVNFPASRNYNFRLRGCGNNNNLARVDLRIDGRTVGTFYYQGTYPWEAPIDNVYVSAGSHTVEITVTADNGTWDVYADYLVIQ

SEQ ID NO: 2541 - protein, 483 aa, Artificial Sequence
  Synthetic Construct, AT-12 intein modified protein
MQTSITLTSNASGTFDGYYYELWKDTGNTTMTVYTQGRFSCQWSNINNALFRTGKKYNQNWQSLGTIRITYSATYNPNGNSYLCIYGWSTNPLVEFYIVESWGNWRPPGACVTGDTLICLADGRRVPIQDLVGHSPEVIAVDDKGRLVCAKSEVIWKVGERSVFEIKLASGRSIKATAEHRLLAFKGWRHVKDFKVGDRLAIAHQVPEPDRLLQHCQSDLFWDRIVSIEEKGSEEVYDLTVPKYASWLADGVVSHNTSLGQVTIDGGTYDIYRTTRVNQPSIVGTATFDQYWSVRTSKRTSGTVTVTDHFRAWANRGLNLGTIDQITLCVEGYQSSGSANITQNTFSQGSSSGSSGGSSGSTTTTRIECENMSLSGPYVSRITNPFNGIALYANGDTARATVNFPASRNYNFRLRGCGNNNNLARVDLRIDGRTVGTFYYQGTYPWEAPIDNVYVSAGSHTVEITVTADNGTWDVYADYLVIQ

SEQ ID NO: 2542 - protein, 793 aa, Artificial Sequence
  Synthetic Construct, AT-13 intein modified protein
MQTSITLTSNASGTFDGYYYELWKDTGNTTMTVYTQGRFSCQWSNINNALFRTGKKYNQNWQSLGTIRITYSATYNPNGNSYLCIYGWSTNPLVEFYIVESWGNWRPPGACLTSDHTVLTTRGWIPIADVTLDDKVAVLDNNTGEMSYQNPQKVHKYDYEGPMYEVKTAGVDLFVTPNHRMYVNTTNNTTNQNYNLVEASSIFGKKVRYKNDAIWNKTDYQFILPETATLTGHTNKISSTPAIQPEMNAWLTFFGLWIANGHTTKIAEKTAENNQQKQRYKVILTQVKEDVCDIIEQTLNKLGFNFIRSGKDYTIENKQLWSYLNPFDNGALNKYLPDWVWELSSQQCKILLNSLCLGNCLFTKNDDTLHYFSTSERFANDVSRLALHAGTTSTIQLEAAPSNLYDTIIGLPVEVNTTLWRVIINQSSFYSYSTDKSSALNLSNNVACYVNAQSALTLEQNSQKINKNTLVLTKNNVKSQTMHSQRAERVDTALLTQKELDNSLNHEILINKNPGTSQLECVVNPEVNNTSTNDRFVYYKGPVYCLTGPNNVFYVQRNGKAVWTGNTSLGQVTIDGGTYDIYRTTRVNQPSIVGTATFDQYWSVRTSKRTSGTVTVTDHFRAWANRGLNLGTIDQITLCVEGYQSSGSANITQNTFSQGSSSGSSGGSSGSTTTTRIECENMSLSGPYVSRITNPFNGIALYANGDTARATVNFPASRNYNFRLRGCGNNNNLARVDLRIDGRTVGTFYYQGTYPWEAPIDNVYVSAGSHTVEITVTADNGTWDVYADYLVIQ

SEQ ID NO: 2543 - protein, 682 aa, Artificial Sequence
  Synthetic Construct, AT-14 intein modified protein
MQTSITLTSNASGTFDGYYYELWKDTGNTTMTVYTQGRFSCQWSNINNALFRTGKKYNQNWQSLGTIRITYSATYNPNGNSYLCIYGWSTNPLVEFYIVESWGNWRPPGACVTGDTLVFTDKGLIEARKLEVGMKVWSGDGWNEIKEVINNGVKPVLKLKLKTGLEIKVTEEHKIFTGEGWKEAKDLKVGDKLYLPVSYPELDFPVKEENDFYEFLGYFLGDGSLSVSNHVSLHVGNDKELALYFKEKVEKYAGAAYLIERDGQYIIDVHRKEFAEKIKKIFGIEITDSKEKDIPSSLLAVNSEAMKALLRGLFSADGSVYDANGSITVALSSTSYPLLRKVQILLLSLGIPSTLTGEKDQDVKIIKGNEYETLPTYRLIISGERASLFFNKIGLIGEKKKKFLELMAGKTTYSTLNNHLYQEIVSIEPAGEEEVFDITAPPKYTWITNGILSLDTSLGQVTIDGGTYDIYRTTRVNQPSIVGTATFDQYWSVRTSKRTSGTVTVTDHFRAWANRGLNLGTIDQITLCVEGYQSSGSANITQNTFSQGSSSGSSGGSSGSTTTTRIECENMSLSGPYVSRITNPFNGIALYANGDTARATVNFPASRNYNFRLRGCGNNNNLARVDLRIDGRTVGTFYYQGTYPWEAPIDNVYVSAGSHTVEITVTADNGTWDVYADYLVIQ

SEQ ID NO: 2544 - protein, 472 aa, Artificial Sequence
  Synthetic Construct, AT-15 intein modified protein
MQTSITLTSNASGTFDGYYYELWKDTGNTTMTVYTQGRFSCQWSNINNALFRTGKKYNQNWQSLGTIRITYSATYNPNGNSYLCIYGWSTNPLVEFYIVESWGNWRPPGACFVAGTMILTVAGLVAIENIKAGDKVIATNPETFEVAEKTVLETYVRETTELLHLTINGDVIKTTFEHLFYAKDVGFVEAKELQVGDKLLDSKGNVLVVEDKKIKITDEPVKVYNFQVDDFHTYHVGCNGVLVHNTSLGQVTIDGGTYDIYRTTRVNQPSIVGTATFDQYWSVRTSKRTSGTVTVTDHFRAWANRGLNLGTIDQITLCVEGYQSSGSANITQNTFSQGSSSGSSGGSSGSTTTTRIECENMSLSGPYVSRITNPFNGIALYANGDTARATVNFPASRNYNFRLRGCGNNNNLARVDLRIDGRTVGTFYYQGTYPWEAPIDNVYVSAGSHTVEITVTADNGTWDVYADYLVIQ

SEQ ID NO: 2545 - protein, 670 aa, Artificial Sequence
  Synthetic Construct, AT-16 intein modified protein
MQTSITLTSNASGTFDGYYYELWKDTGNTTMTVYTQGRFSCQWSNINNALFRTGKKYNQNWQSLGTIRITYSATYNPNGNSYLCIYGWSTNPLVEFYIVESWGNWRPPGAQLALDTPIPTPDGWTTMGEIKAGDKVIDEKGRPCNVVAISEIDDTEQAYKINFRDGTSIVAGERHLWKVQVTNNGRREKLLTTGEMYQKQFKTKSKENRALFRIPIADAFILPENKLPIDPYLFGYWIGNGNAVKPEITVMRDDVDEVIKNIPYKLHNRYKQEGNSDILVYKELKSILVKNFREKRIPIEYLRASAQQRKRLLQGLIDSDGCVSTAKSQAIYVTILFELAKDVQDLLWSLGIKNTLKTAPSARYGIETGEICYLIKFTAFNDLEVSGLDRKLKRGRERNIKTRSHFHYIKSIEKTGKTKMRCIQVDSPSRLYLAGKSMIPTHNTSLGQVTIDGGTYDIYRTTRVNQPSIVGTATFDQYWSVRTSKRTSGTVTVTDHFRAWANRGLNLGTIDQITLCVEGYQSSGSANITQNTFSQGSSSGSSGGSSGSTTTTRIECENMSLSGPYVSRITNPFNGIALYANGDTARATVNFPASRNYNFRLRGCGNNNNLARVDLRIDGRTVGTFYYQGTYPWEAPIDNVYVSAGSHTVEITVTADNGTWDVYADYLVIQ

SEQ ID NO: 2546 - protein, 673 aa, Artificial Sequence
  Synthetic Construct, AT-17 intein modified protein
MQTSITLTSNASGTFDGYYYELWKDTGNTTMTVYTQGRFSCQWSNINNALFRTGKKYNQNWQSLGTIRITYSATYNPNGNSYLCIYGWSTNPLVEFYIVESWGNWRPPGACVAGDTKILTSSGYHPIKDMEGKQVRVWNGYEFSETIVHKTGVNQKLIMVSLDDGTELRCTPYHKFYIETGSRPADKSRVMEVRAGDLEKGDRIIRFELPTITVGETTMSDKEAYTKGFFSADGCVIKSKYGEDEYRISVKREDKIEALTKYVDVIKSHTNRFRTHFYVPDYVQNKFEVPINSMVNEKISWLAGFMDGDGCVIRYKDIENMQAVSINKSFLQDIRLMLQTIGIHSTINKFMPNRVMKMPDGRGGTDMYNGAESWRLQIDSEGVRKLFALGFTPRRLKMNGSRKRHHKTNKFTRVVSVTDHGDVEDTYCFNEPKRHMGVFNGVITGQTSLGQVTIDGGTYDIYRTTRVNQPSIVGTATFDQYWSVRTSKRTSGTVTVTDHFRAWANRGLNLGTIDQITLCVEGYQSSGSANITQNTFSQGSSSGSSGGSSGSTTTTRIECENMSLSGPYVSRITNPFNGIALYANGDTARATVNFPASRNYNFRLRGCGNNNNLARVDLRIDGRTVGTFYYQGTYPWEAPIDNVYVSAGSHTVEITVTADNGTWDVYADYLVIQ

SEQ ID NO: 2547 - protein, 731 aa, Artificial Sequence
  Synthetic Construct, AT-18 intein modified protein
MQTSITLTSNASGTFDGYYYELWKDTGNTTMTVYTQGRFSCQWSNINNALFRTGKKYNQNWQSLGTIRITYSATYNPNGNSYLCIYGWSTNPLVEFYIVESWGNWRPPGACFDGKTKILTNQGFMTLRQVYEQGYEGLSTLSLNTKTHKIEWKPILDTMKRQSEMIDISVSQTGRITDNTLRLTPDHKMVNLRGGKYTKTEIQDLLKQQEMLTVAQTIPSLGNNKHQEADLAYFLGGIITDGSIYTSSTRGEVQFIQKDVPEKQAFISKMNDLANSLYGKSFTAHIKPVSSSYIRGQKVTGQATAYRLHSKAIAYDVKERENNITQLLLENEAELSYHFLGGVIDGDGCYHKNRLHIYISEENLLQAVIIACLKMNTVPQVTKNRNIYHLQIVEKLEVILRYTQRVKGEVTPRTIQTRFFATRQLFENQETGQIKLRQDNNCLISDKQLREMGEFEELIDGDTRMQRVIQVGEKSDGDVYNITVAEHHNYVVFTAKYTPVVVCNTSLGQVTIDGGTYDIYRTTRVNQPSIVGTATFDQYWSVRTSKRTSGTVTVTDHFRAWANRGLNLGTIDQITLCVEGYQSSGSANITQNTFSQGSSSGSSGGSSGSTTTTRIECENMSLSGPYVSRITNPFNGIALYANGDTARATVNFPASRNYNFRLRGCGNNNNLARVDLRIDGRTVGTFYYQGTYPWEAPIDNVYVSAGSHTVEITVTADNGTWDVYADYLVIQ

SEQ ID NO: 2548 - protein, 684 aa, Artificial Sequence
  Synthetic Construct, AT-19 intein modified protein
MQTSITLTSNASGTFDGYYYELWKDTGNTTMTVYTQGRFSCQWSNINNALFRTGKKYNQNWQSLGTIRITYSATYNPNGNSYLCIYGWSTNPLVEFYIVESWGNWRPPGACVAPETKILTDRGQIAIADVAGEKVNIWNGSEWSEVLVKKTGENQPLLKVHFSNGESLDCTYYHKFHVQENYKGKVKIVEAKDLQEGDKLIKYRLPLVESENDIDFPYAYTSGFFSGDGSHDGMGKPEIDLYGEKKELLPFVTVRNKYYGGSYGDKSWRIERDEVAVYDDVNQDRIVCKLPLDIPAKFTVPVNGYTIQSRLEWLAGLLDADGTVARNGDNESLQVASTHQQFLLDIRLMLQTLGVDSKVVKMDEMGYRSLPDGKGGYQDYFCQAKYRLLISSNGLFQLGELGLKTNRLQWNLREPQREASQFIRVEKVELTCRYDDTYCFSEPKRHLGMFNGILTGQTSLGQVTIDGGTYDIYRTTRVNQPSIVGTATFDQYWSVRTSKRTSGTVTVTDHFRAWANRGLNLGTIDQITLCVEGYQSSGSANITQNTFSQGSSSGSSGGSSGSTTTTRIECENMSLSGPYVSRITNPFNGIALYANGDTARATVNFPASRNYNFRLRGCGNNNNLARVDLRIDGRTVGTFYYQGTYPWEAPIDNVYVSAGSHTVEITVTADNGTWDVYADYLVIQ

SEQ ID NO: 2549 - protein, 944 aa, Artificial Sequence
  Synthetic Construct, AT-20 intein modified protein
MQTSITLTSNASGTFDGYYYELWKDTGNTTMTVYTQGRFSCQWSNINNALFRTGKKYNQNWQSLGTIRITYSATYNPNGNSYLCIYGWSTNPLVEFYIVESWGNWRPPGACLASDTLVRTSEGDKPVAEVAIGDYLLDAEDKPVLCMGANPSQTGRMKEIAYQDFDSKKRVSFKCTPDHHLELTLTDSTPSLSGKSVTWFSRCTGAHLSEEVSEVYLDNMVSIFYNDLVDSTDSAVDKDSIHEAVDLALEDHYHRGNSDQYSIHLNEYISRIADKELQNEPEFIRECIHDAANRFVITSSGNRNIKSESFDDKLLLSRSRSSTADSDSDYVITDASVHSHSNNSSVYLASPDSMIPDGAANRFENIASKLKEPVCNCGGIRKIFRSFGTTEDAELAYSLLLSEHYYRLDPRFVTDGYTFQASVEQYENMCSQEVQNMHLKLYRSPLKFVEREHNSAELPVDPYFLGLWLGDGDSSGTTIMTTDREIVVWLNSYVERLNQNKPEGCFPLKLTEQLIYGAGHTSKSGHTTKVDVRNYKISSGDAFVRSGTYWNPIFDGLKKLGLLNNKSAGIPQEYMNSDEQNRLSVIAGLMDSDGCYVKSHNTYRFTQLTEDHKKIVYDLKELALSCGINTTGVELSVKPLGFNKHKHSTEYVVYLGNGSQKFQELLLLPRKKMEISKKHVSLDARPFTVSDVEDGEFRAIEVSGGVFQLANRLVVANTSLGQVTIDGGTYDIYRTTRVNQPSIVGTATFDQYWSVRTSKRTSGTVTVTDHFRAWANRGLNLGTIDQITLCVEGYQSSGSANITQNTFSQGSSSGSSGGSSGSTTTTRIECENMSLSGPYVSRITNPFNGIALYANGDTARATVNFPASRNYNFRLRGCGNNNNLARVDLRIDGRTVGTFYYQGTYPWEAPIDNVYVSAGSHTVEITVTADNGTWDVYADYLVIQ

SEQ ID NO: 2550 - protein, 631 aa, Artificial Sequence
  Synthetic Construct, AT-21 intein modified protein
MQTSITLTSNASGTFDGYYYELWKDTGNTTMTVYTQGRFSCQWSNINNALFRTGKKYNQNWQSLGTIRITYSATYNPNGNSYLCIYGWSTNPLVEFYIVESWGNWRPPGACQPYDALVSTPSGLVPIGALVETDAVGMKVFDAHGLTQVIATKSNGVKDVLRIWTRAGHALDVTADHLVWRSTSAGAGAFVPAGALRAGDTLEWHRTIAPGEGEITSREIAEAALAGRLQADGFVGRYAGTNASLTIEAMTVPTRLYDAPLPVVAAYLRSLFQADGYVSRRERSTLIGLDMISEGLIRGVQGLLARFGIFARVRREADPRPDRHDLWSLGIQNAGDRRTFADEIGFLDPVKAAKLEASFDQPGQAAKPVKRLQIERIEPRGPMPVYDIQTDSGEYLSAGLRVHNTSLGQVTIDGGTYDIYRTTRVNQPSIVGTATFDQYWSVRTSKRTSGTVTVTDHFRAWANRGLNLGTIDQITLCVEGYQSSGSANITQNTFSQGSSSGSSGGSSGSTTTTRIECENMSLSGPYVSRITNPFNGIALYANGDTARATVNFPASRNYNFRLRGCGNNNNLARVDLRIDGRTVGTFYYQGTYPWEAPIDNVYVSAGSHTVEITVTADNGTWDVYADYLVIQ

SEQ ID NO: 2551 - protein, 783 aa, Artificial Sequence
  Synthetic Construct, AT-22 intein modified protein
MQTSITLTSNASGTFDGYYYELWKDTGNTTMTVYTQGRFSCQWSNINNALFRTGKKYNQNWQSLGTIRITYSATYNPNGNSYLCIYGWSTNPLVEFYIVESWGNWRPPGACVVAGTEVTDAETGAVVTVGELFESRRAVTVHALGADSKLRPRPVTDVVWNGRKRVYRLTTELGKSITATDNHPFRVLDGWKNLGELKPGDRIAAPRRLAVPSAGTWPQHEIVALAGLLSEGNTCHPTTLYFYGNDRVLIDDFARAIGQFPDTVAKVYARPNRRNLEVRANTGRDTRLKSRAERDAAVALLAPPTRSGAFVWAQRLGILGKTATEKFVPHDVFRLCDSDLELFLGRLWAGDGFIANDTLKVPFYATSSRRLAQDVQHLLLRLGIVGRIHEKQFKYKGGLKPGFTVHLIGDGAAEAFLDRIAPHCLGREHAVTILREHVATTARGLTSKDTVPLEVRAWVDDGRRARGLTWDELEQQSDVSTQEFYGTPAPGKKGFRRATIAKLAAFFGSQRLAAVADSDVFWDRVVSIEYAGVQDTYDLTVDEDHNFVANGLIVHNTSLGQVTIDGGTYDIYRTTRVNQPSIVGTATFDQYWSVRTSKRTSGTVTVTDHFRAWANRGLNLGTIDQITLCVEGYQSSGSANITQNTFSQGSSSGSSGGSSGSTTTTRIECENMSLSGPYVSRITNPFNGIALYANGDTARATVNFPASRNYNFRLRGCGNNNNLARVDLRIDGRTVGTFYYQGTYPWEAPIDNVYVSAGSHTVEITVTADNGTWDVYADYLVIQ

SEQ ID NO: 2552 - protein, 624 aa, Artificial Sequence
  Synthetic Construct, AT-23 intein modified protein
MQTSITLTSNASGTFDGYYYELWKDTGNTTMTVYTQGRFSCQWSNINNALFRTGKKYNQNWQSLGTIRITYSATYNPNGNSYLCIYGWSTNPLVEFYIVESWGNWRPPGACQPAGTQVAKVIKEGRWREDSVIEQVPIESLQPGDRVVSFGNAKIYRRGRAVTGITSRRHTGNLHRVEVGEFRTRATPEHRFTVRFDPARPKAGLLYLMRRGDRWRVGVCGMFNSRGFGVSVRLSQERGDAAWVLGAFATLTEARIAEQVVSCRYGIPTTVWETGRNPGASWAQRDQAGIDAIYQRLGVDRIRAGVDRLLRDHGLSAGLPLLAANEPGNFSCRQSRQVAACNLVPGVMQVPVPTAGERFEWRDLTATSFERVHDLEVWSMDVERDKHYVADGIVVHNTSLGQVTIDGGTYDIYRTTRVNQPSIVGTATFDQYWSVRTSKRTSGTVTVTDHFRAWANRGLNLGTIDQITLCVEGYQSSGSANITQNTFSQGSSSGSSGGSSGSTTTTRIECENMSLSGPYVSRITNPFNGIALYANGDTARATVNFPASRNYNFRLRGCGNNNNLARVDLRIDGRTVGTFYYQGTYPWEAPIDNVYVSAGSHTVEITVTADNGTWDVYADYLVIQ

SEQ ID NO: 2553 - protein, 749 aa, Artificial Sequence
  Synthetic Construct, AT-24 intein modified protein
MQTSITLTSNASGTFDGYYYELWKDTGNTTMTVYTQGRFSCQWSNINNALFRTGKKYNQNWQSLGTIRITYSATYNPNGNSYLCIYGWSTNPLVEFYIVESWGNWRPPGACFAAGTLLHTEQGYVPVEQVVAGVGTRVCTHQGFRNISERFDNGEAEVFRVTTRKGYSVEVTANHKMARLDENGDLLLDELSHLQVGDNLLLLLGSNPVTEKVRLQCIPAGYRSSIEIAQPPELDEQLAYLLGYAYGDGCVGRGATYNYLSLAVSHTYPNVRDQLAAIIREKFGLTTKIYSGSGAVWNLLVHSANLLDWLKANGLLKQKAADLAMPEAILRSPSSVVGAFLSGYFDADGCVRGGKGGYGFDCTSKAFVGAVQLLLLAEGIVSNLHTTDRSRQGWRTIYRLNVCGTEFKRRFQTLCCRSAKVVHSPMVLGRDGTGGYPPALVRGASYQRVVAVGGKHLLYTALLKVIEKTRTAGKQALAESLCQHVNYFPDPIVAIESVGTQRVYDIEVEGMHLLGNGIYTSNTSLGQVTIDGGTYDIYRTTRVNQPSIVGTATFDQYWSVRTSKRTSGTVTVTDHFRAWANRGLNLGTIDQITLCVEGYQSSGSANITQNTFSQGSSSGSSGGSSGSTTTTRIECENMSLSGPYVSRITNPFNGIALYANGDTARATVNFPASRNYNFRLRGCGNNNNLARVDLRIDGRTVGTFYYQGTYPWEAPIDNVYVSAGSHTVEITVTADNGTWDVYADYLVIQ

SEQ ID NO: 2554 - protein, 829 aa, Artificial Sequence
  Synthetic Construct, AT-25 intein modified protein
MQTSITLTSNASGTFDGYYYELWKDTGNTTMTVYTQGRFSCQWSNINNALFRTGKKYNQNWQSLGTIRITYSATYNPNGNSYLCIYGWSTNPLVEFYIVESWGNWRPPGACLAYDAEIVQADGGVKTIEQIVRERRAHLATVGADWRLTWTEPCDYVDDGHKPVFEVTTRLGRRIETTLTHPFLTVHGWQRLEDLAEGDAIGVPRQLPVFGQEPIRDCEVRLLGHLIGDGGLTGSPPRLTSGQEAMTADFLEAVDAFGGVEAKPIRASRRTQSWVVVGAAQARAAARSSFASLVDALIRRSPLTGRAIARNLGVAPATLTYWRQGVNVPDAAMVGLLAGELGVDVGELRPEPVARRNDRNPLQAWLDRLGLAGKSAHEKTVPDCVFRLPREQLARFLNRLFSSDGWVTHLASGQGQIGYTTVSEALARQIQHLLLRFGVLAKLRHRSVRYQDGRRPAWQLDITHAESILTFAEQIGILGKEQRLASVAASVRGRRRQSHTDHIPCEIWQFIDRARGEWTWAELARRAGVASSNIHAYRRGMSRQRLAAFADALGSRELRQLASSDLYWDRIASIRPLGHKQVYDLTIPETHNFIANDVCVHNTSLGQVTIDGGTYDIYRTTRVNQPSIVGTATFDQYWSVRTSKRTSGTVTVTDHFRAWANRGLNLGTIDQITLCVEGYQSSGSANITQNTFSQGSSSGSSGGSSGSTTTTRIECENMSLSGPYVSRITNPFNGIALYANGDTARATVNFPASRNYNFRLRGCGNNNNLARVDLRIDGRTVGTFYYQGTYPWEAPIDNVYVSAGSHTVEITVTADNGTWDVYADYLVIQ

SEQ ID NO: 2555 - protein, 814 aa, Artificial Sequence
  Synthetic Construct, AT-26 intein modified protein
MQTSITLTSNASGTFDGYYYELWKDTGNTTMTVYTQGRFSCQWSNINNALFRTGKKYNQNWQSLGTIRITYSATYNPNGNSYLCIYGWSTNPLVEFYIVESWGNWRPPGACVHGDTRVTLADGHERPIREVVESNLDDPKPVDDGVWDTVDFDVPSLQSDGTVATQNATKVWKRKAPETLYRIRTATGRELDVTPSHPLFVQSDGRFQARKAEELESGTHVAVPRKVSTNACNELDVTFRQSQAHNRIDLDLPPQWTPELARLIGYIVAEGYVEQRPDNTGYVSITNNDREVLDDAKSVLETLNLNVTERSSHEGKTARELLCSAGEFVSFLASLDETLLQSSAERRVPQDIMRASDNVVTGFIRGYIEGEGHVSTSQREITVASMSKPLLEDVRTLLVTQGITAQLQPRNNGSYRLRISGQSFHDYAEQIGFITARKTEACRQFEGTHGNTNLDIVPNLGPELRRIREALGLTQSECGLPRSTYQHYERGRRNPSRDSLESVLDAFETRLAEMNNDTPISDTARSDGGGTGSLRQDLNGLAALVEGDIAWDRIESIEPIEHDEKWVYDLEIEGTHNYLTNGVVSHNTSLGQVTIDGGTYDIYRTTRVNQPSIVGTATFDQYWSVRTSKRTSGTVTVTDHFRAWANRGLNLGTIDQITLCVEGYQSSGSANITQNTFSQGSSSGSSGGSSGSTTTTRIECENMSLSGPYVSRITNPFNGIALYANGDTARATVNFPASRNYNFRLRGCGNNNNLARVDLRIDGRTVGTFYYQGTYPWEAPIDNVYVSAGSHTVEITVTADNGTWDVYADYLVIQ

SEQ ID NO: 2556 - protein, 875 aa, Artificial Sequence
  Synthetic Construct, AT-27 intein modified protein
MQTSITLTSNASGTFDGYYYELWKDTGNTTMTVYTQGRFSCQWSNINNALFRTGKKYNQNWQSLGTIRITYSATYNPNGNSYLCIYGWSTNPLVEFYIVESWGNWRPPGACLTADSDVLVRSENGDIERQTVDSLFSDGQVVLADGDTDIAVSKETPTVLSLDEATERVSEQESTLVSERPLRDDESVRTIETSRGAVTVTDDHPMYIRQDGEVTVRPASDIEAGTDLVAARRPPDTMVEPSDETVLSWETFAADCDKHSKLYGVDCGTELAAQRAARDESQTAFAERYGSYGSAVGKYERGEKDVPVWLLGELDIRPDRIHGLNYETSFENPFPLEWSPELAQVIGCLLGDGSIHRNDDENVVDVRYHNTDEALIERFARDIERLFDIEPTVTDRPGRESHHKRKYQVDVPSAVGRVLVCVLEAVTENGTPGLPDAVRPAFVGALFDDEGHISREGKAFISNTDHTLLTGVGEMLAEMGIETKLAPDQHKLHIRGRRNLEQFLDRIPIASDEKFYRGLDALDAYDVTTRKAELLEAIRQEPKTSAALAQTLGVTRGSVNKYLRELRESGHIEKQIEGSNRSLDENRTVQYVAADFEGSVYATLRGEPSSVTVEDVERREYDGPVYDLTVSENAPNFAVNGGAVVHNSTSLGQVTIDGGTYDIYRTTRVNQPSIVGTATFDQYWSVRTSKRTSGTVTVTDHFRAWANRGLNLGTIDQITLCVEGYQSSGSANITQNTFSQGSSSGSSGGSSGSTTTTRIECENMSLSGPYVSRITNPFNGIALYANGDTARATVNFPASRNYNFRLRGCGNNNNLARVDLRIDGRTVGTFYYQGTYPWEAPIDNVYVSAGSHTVEITVTADNGTWDVYADYLVIQ

SEQ ID NO: 2557 - protein, 519 aa, Artificial Sequence
  Synthetic Construct, AT-28 intein modified protein
MQTSITLTSNASGTFDGYYYELWKDTGNTTMTVYTQGRFSCQWSNINNALFRTGKKYNQNWQSLGTIRITYSATYNPNGNSYLCIYGWSTNPLVEFYIVESWGNWRPPGACVRGDTTVALADGSEREIRDLVEANLDDPRPVDDGVWDGVDVAVPSLAADGRLVQRRATKVWKREAPETMYRVRTAAGHRLTVTPSHPLFVAGSHGPDAVRTEDLEVGQLVGVAPDGDGSGQVAPDGGVIRDAQPAPVGDAETVAWSAIESITEVEPDEEWVYDLEVEGTHSYLTDGVVSHNTSLGQVTIDGGTYDIYRTTRVNQPSIVGTATFDQYWSVRTSKRTSGTVTVTDHFRAWANRGLNLGTIDQITLCVEGYQSSGSANITQNTFSQGSSSGSSGGSSGSTTTTRIECENMSLSGPYVSRITNPFNGIALYANGDTARATVNFPASRNYNFRLRGCGNNNNLARVDLRIDGRTVGTFYYQGTYPWEAPIDNVYVSAGSHTVEITVTADNGTWDVYADYLVIQ

SEQ ID NO: 2558 - protein, 774 aa, Artificial Sequence
  Synthetic Construct, AT-29 intein modified protein
MQTSITLTSNASGTFDGYYYELWKDTGNTTMTVYTQGRFSCQWSNINNALFRTGKKYNQNWQSLGTIRITYSATYNPNGNSYLCIYGWSTNPLVEFYIVESWGNWRPPGASVTGDRPVVVRDPGGTVRILPIEDLFARGTTESEVLIAADGDVVASATPGKTRRALDGWDALSVNEDGEAEWQPIAQAIRHNTDKPVVNLQHKFGESTTTRDHSYVVPGEDGLTTVSPDDVAEPYRVSGVPDVEPVEQVDVYEVLRGYEREYEDGRSVGSDNSITKRKQIHADDEYVWFGHEHHRDVDSTVKVKRFVDIDSEDGAALIRLLGAYVPEGSASTGETATSKFGASLAESDREWLAQLQRDYSRLFENTTAGIITSDRRAERTVEYQTDTGGASVTYNDETLKLQMMNELAAVFFREFAGQTSRGKRIPSFVFHLPEEKQDLFLTLLVEGDGSREFPRYTEAYAQRNFDFETTSRELAAGLSMLLTQRGQKHSLKYRDSKDSYTIRTCSTYREGRDPVLTEADHDGYVYDLSVEENENFVDGVGGIVLHNTSLGQVTIDGGTYDIYRTTRVNQPSIVGTATFDQYWSVRTSKRTSGTVTVTDHFRAWANRGLNLGTIDQITLCVEGYQSSGSANITQNTFSQGSSSGSSGGSSGSTTTTRIECENMSLSGPYVSRITNPFNGIALYANGDTARATVNFPASRNYNFRLRGCGNNNNLARVDLRIDGRTVGTFYYQGTYPWEAPIDNVYVSAGSHTVEITVTADNGTWDVYADYLVIQ

SEQ ID NO: 2559 - protein, 552 aa, Artificial Sequence
  Synthetic Construct, AT-30 intein modified protein
MQTSITLTSNASGTFDGYYYELWKDTGNTTMTVYTQGRFSCQWSNINNALFRTGKKYNQNWQSLGTIRITYSATYNPNGNSYLCIYGWSTNPLVEFYIVESWGNWRPPGACFSGDTEIALASGDSITFESLVDAYERGETHYCYTIGDDGRIRIEEIMNPRVTQEDAALLAVTLDNGEVIRCTPDHEFMLRDGNYCEAQNLTDGQSLMPLYRTTTEMTETTETTETTGTAEMVKQPFAQNNWESVSQLANRYNRRHTTTDHIVETQQIQSQQQSQIETVQISERADVHNHTVISVESLTETADVYDLEVPVTHNFALASGVFVHNTSLGQVTIDGGTYDIYRTTRVNQPSIVGTATFDQYWSVRTSKRTSGTVTVTDHFRAWANRGLNLGTIDQITLCVEGYQSSGSANITQNTFSQGSSSGSSGGSSGSTTTTRIECENMSLSGPYVSRITNPFNGIALYANGDTARATVNFPASRNYNFRLRGCGNNNNLARVDLRIDGRTVGTFYYQGTYPWEAPIDNVYVSAGSHTVEITVTADNGTWDVYADYLVIQ

SEQ ID NO: 2560 - protein, 546 aa, Artificial Sequence
  Synthetic Construct, AT-31 intein modified protein
MQTSITLTSNASGTFDGYYYELWKDTGNTTMTVYTQGRFSCQWSNINNALFRTGKKYNQNWQSLGTIRITYSATYNPNGNSYLCIYGWSTNPLVEFYIVESWGNWRPPGACVSGETDIALVEGKTATIGELVESALTDPKPVDDGVWDTADFTVTSAIETGELIERDVTRVWKRQSPETMRQIQIAGGRSVTVTPSHPVFVEHNGSYTARRADSLSAGESVAIADDVADSHPISVDNTANTLNPRSMSTPGITTDGGLYRTGSDGGIVHAEVGKEDVTDCLTTDRITAVKTVTPTAEWVYDLEVEGTHAYLTNGVLSHNTSLGQVTIDGGTYDIYRTTRVNQPSIVGTATFDQYWSVRTSKRTSGTVTVTDHFRAWANRGLNLGTIDQITLCVEGYQSSGSANITQNTFSQGSSSGSSGGSSGSTTTTRIECENMSLSGPYVSRITNPFNGIALYANGDTARATVNFPASRNYNFRLRGCGNNNNLARVDLRIDGRTVGTFYYQGTYPWEAPIDNVYVSAGSHTVEITVTADNGTWDVYADYLVIQ

SEQ ID NO: 2561 - protein, 909 aa, Artificial Sequence
  Synthetic Construct, AT-32 intein modified protein
MQTSITLTSNASGTFDGYYYELWKDTGNTTMTVYTQGRFSCQWSNINNALFRTGKKYNQNWQSLGTIRITYSATYNPNGNSYLCIYGWSTNPLVEFYIVESWGNWRPPGASYHPRSEVLLADGQRIDIGTFVDSRIEKNNANVIDGINCEILPVDDIDVYTVDTDTGSASTVSIDRVSRHPAPSEFIRVKFSNGRSVLVTPEHPMFIDDGSETKTVQANALSGGEFVPAPHHLPGVNTDASSVSDDINDVSTIRTHVRSRARAKAEVEVRATDGEFKLIDAAQTLGIITAVGKVSVDAPERGIIVDMDRTVDSSKDSINNVLGSVIPSNDNDSITRVQDTGSTGNQWRWSVNTFIERMIEIAPAVTADRPNRRVPDAVLGGSEAVVQQFLTGVIIAAGRILDETIRIYASSNELACDYADAFLRLGITASVEDGPAEIAAQTVIKCDSDYERACGMFDISSSRTTPSDTSSQNNQSSVTAQNEDTHQTTSHEILPSGIADELQSIRQLLNIPASEQLASITAGDDGIALSIARAEINLLRDHIETLRMDTENVSIGRDDCVTPTISSSSKYKYAKNSITSDENLQLFGQSQAQLSERTKTTESSSISASTDLVSIPANISENRLVAATQRLDEVETRCNRRYHRVIAVDTVSNAGPHACEWVYDITVEPTNTFISSGVVLHNTSLGQVTIDGGTYDIYRTTRVNQPSIVGTATFDQYWSVRTSKRTSGTVTVTDHFRAWANRGLNLGTIDQITLCVEGYQSSGSANITQNTFSQGSSSGSSGGSSGSTTTTRIECENMSLSGPYVSRITNPFNGIALYANGDTARATVNFPASRNYNFRLRGCGNNNNLARVDLRIDGRTVGTFYYQGTYPWEAPIDNVYVSAGSHTVEITVTADNGTWDVYADYLVIQ

SEQ ID NO: 2562 - protein, 695 aa, Artificial Sequence
  Synthetic Construct, AT-33 intein modified protein
MQTSITLTSNASGTFDGYYYELWKDTGNTTMTVYTQGRFSCQWSNINNALFRTGKKYNQNWQSLGTIRITYSATYNPNGNSYLCIYGWSTNPLVEFYIVESWGNWRPPGACFTPDTNVLTPNGVRNIRDLTVGDSVYSLNPETMQMEIKPVTQTHEYPDYQGDLIDIQTNEIDFRVTPNHRMLVEATGTDTTSTNDYDFIEAGNLDISSRYELPHGWSVDHTDSLGAYIDLITLLREQSDTYNVLSDGGMTTAATADINHNNVTRRVDSDTFVSLIGWYVATGRVSRTQNGSDRVYLQLSQTNTKARTQLTMLLDELGVDWQADNEKIHFVSHVWTELFDTTCGRTEKNKHIPELIFDASASQKRAFFDAIINGSGVKNDDSYQYHTSSEDLRDDILRLCVHIGIVARYDYINDESWRIECTETANPDFTLTHSGRQSTAEDGVYCVTVADNQTLLAGRNGTFQWTGNTSLGQVTIDGGTYDIYRTTRVNQPSIVGTATFDQYWSVRTSKRTSGTVTVTDHFRAWANRGLNLGTIDQITLCVEGYQSSGSANITQNTFSQGSSSGSSGGSSGSTTTTRIECENMSLSGPYVSRITNPFNGIALYANGDTARATVNFPASRNYNFRLRGCGNNNNLARVDLRIDGRTVGTFYYQGTYPWEAPIDNVYVSAGSHTVEITVTADNGTWDVYADYLVIQ

SEQ ID NO: 2563 - protein, 866 aa, Artificial Sequence
  Synthetic Construct, AT-34 intein modified protein
MQTSITLTSNASGTFDGYYYELWKDTGNTTMTVYTQGRFSCQWSNINNALFRTGKKYNQNWQSLGTIRITYSATYNPNGNSYLCIYGWSTNPLVEFYIVESWGNWRPPGACFHPETKIWFRDTDNEWHHETIQTFVEDRLDDPEIDAVGTLVQEVDDNTDREISVPSIDDNGNERLQSVTAVSKHRAPNHLVQIETISGREITITPDHEMHIFEQGNLVSKQASKITSGEYAVIPKRLQTISPSSHTPQHDLLREFLTRDELTADRLIIHTSDPVRLCNRVFPEEVTSCKDAVEIMQNTACHLDKNKETLIGWLGEGRIPVALLRGFVETDEALLMSIPDDVQIGLRGEKVRIDRHIGFTEELTSLLGYYAAAGIVHTQTNPISYESAQQEQSRITFYNIDTQTQTDLLNALNSVFEIEPIQYNLDGEILGVPGELIRRVFDTVFDVGTQPSHKRIPQALFDASESHITSYLRCFFSTHDSLTTDTRDISATTVSREFKEDIIAALRRLGITAEVTTQQSRSVPEVLPDWYAIDDITHHDADNSLNLTRSYVISIASSDAVTLQRDRQAQEQIKYDAQGLIANNNAIHQSRQVTDGGRKDYITEPITDIEYVDADIDYTYCLTVSETHSLIVNDLSQKQTSLGQVTIDGGTYDIYRTTRVNQPSIVGTATFDQYWSVRTSKRTSGTVTVTDHFRAWANRGLNLGTIDQITLCVEGYQSSGSANITQNTFSQGSSSGSSGGSSGSTTTTRIECENMSLSGPYVSRITNPFNGIALYANGDTARATVNFPASRNYNFRLRGCGNNNNLARVDLRIDGRTVGTFYYQGTYPWEAPIDNVYVSAGSHTVEITVTADNGTWDVYADYLVIQ

SEQ ID NO: 2564 - protein, 881 aa, Artificial Sequence
  Synthetic Construct, AT-35 intein modified protein
MQTSITLTSNASGTFDGYYYELWKDTGNTTMTVYTQGRFSCQWSNINNALFRTGKKYNQNWQSLGTIRITYSATYNPNGNSYLCIYGWSTNPLVEFYIVESWGNWRPPGASVAADSRLVAVSPDDKIVFTTIEDFWKKLNTPIERNGKFRKRTCVSEGWQTYAFDENHEASLRPIEKAIRYTADESEQLRRITTQLGRSLDITDEHSLFRYDDGIEEVAGDDLTAGDIIVAPRTLDVEVTQTTLDLSEYIHDNERCPSEQTGSGELNLASKSAISDSRNKETPGVTHNILPQRSKFTDEMTTLSPTAVGGLESEQNETLRVGESTGAIERYINVDDSFGWLLGQFIAQRSISTDALTMTVHTAAEKHAERIVATSDSVFGIKPTVNSIERGYEIVFPSVFDTIVSGLTAKEQSEPEQDVDHTHTDEIGIPECILHAPDDIVLSFLQGFILAENAQRKGNAASEASEMVSESETTVTLETPSVGVKDGLVFLCHRLGVITDISEKSGEEYSVHFEESRYTVSIATEGKTNPLDQILNGERPTMPEGVSVPVPDALLTIHESIANSPHIDQVIPDTVVQQETVSLETLQSLLTGLSTVDLPAQLEAKRDELTLLTEGDLSYLRVESVECVDYDGYLYDLQVGGEPVFTANWLYAHNTSLGQVTIDGGTYDIYRTTRVNQPSIVGTATFDQYWSVRTSKRTSGTVTVTDHFRAWANRGLNLGTIDQITLCVEGYQSSGSANITQNTFSQGSSSGSSGGSSGSTTTTRIECENMSLSGPYVSRITNPFNGIALYANGDTARATVNFPASRNYNFRLRGCGNNNNLARVDLRIDGRTVGTFYYQGTYPWEAPIDNVYVSAGSHTVEITVTADNGTWDVYADYLVIQ

SEQ ID NO: 2565 - protein, 745 aa, Artificial Sequence
  Synthetic Construct, AT-36 intein modified protein
MQTSITLTSNASGTFDGYYYELWKDTGNTTMTVYTQGRFSCQWSNINNALFRTGKKYNQNWQSLGTIRITYSATYNPNGNSYLCIYGWSTNPLVEFYIVESWGNWRPPGACLTADSTVMLKEKGMVSVSEVETGDQIAQRSDTGFQYKPVEETHAYENAETLTVTLTNGCSIRGTPNHRLMVDDEWTRIDEIQPDQEVHYTLGWLRETNQSPPKLHSQSHTTVNQTADSISPDSSEPIELSESENADTGNRHNSAVAVKQSRTQTQLISDEVVSRPEHTRRPDQLSEELAELLGLWIDTGLWHQSGVQFNVERENIAEYIDQLSQQLFDTPAAISDTDGTYTVDITDHKLKEWWKANFGGKPDGTQSSYVPQMIKEAPTNVIEAFLRGCFTAEGGLRKDMRPRLCTSSEDSIDDIAVLMMGLGYPVEKSVIRNADGEPYYSVMPATDDGLSAFLHDVGFIDERREIGLSNIESSDSRALNNTHKIEVESIVESPPATVYDITVADNHEYVTDGIISHNTSLGQVTIDGGTYDIYRTTRVNQPSIVGTATFDQYWSVRTSKRTSGTVTVTDHFRAWANRGLNLGTIDQITLCVEGYQSSGSANITQNTFSQGSSSGSSGGSSGSTTTTRIECENMSLSGPYVSRITNPFNGIALYANGDTARATVNFPASRNYNFRLRGCGNNNNLARVDLRIDGRTVGTFYYQGTYPWEAPIDNVYVSAGSHTVEITVTADNGTWDVYADYLVIQ

SEQ ID NO: 2566 - protein, 775 aa, Artificial Sequence
  Synthetic Construct, AT-37 intein modified protein
MQTSITLTSNASGTFDGYYYELWKDTGNTTMTVYTQGRFSCQWSNINNALFRTGKKYNQNWQSLGTIRITYSATYNPNGNSYLCIYGWSTNPLVEFYIVESWGNWRPPGACVEENSLVSTDEGLRPIKDLDNTTAEFEQWDEIDVGVTTDGGTKTATAVYDNGFANVRQIQTESGFNIAATPNHRFRTLSSDGTYTWKEAGKFESGDRVILQRNTFDAGSRVSLEANERADDAQDTTEGPELPGRMTSELAEFLGYFMGSGYISDETHASVDLVVDSDATELNSYLSNLGEQLFRITPAVESQEMSQVLSFRDCHLSRYFEDNGWKKTDTGHNGDASAAFVPEQILEGDEQVVNGFLRGVFEAIGTVSEKIEILTTSTTLADQLQSLLLSLGHVFTRDSTKLVETNNYHDDQLRQRLCGATRREDERFMNEIGSLIEPDELNLSTRADKNDTYPSSVIDHVQTLDGYDSVSESLKSRINQSQVDGTVSRKLIKDIEAETAETVSIADHELTGFYAATVESVTEDTAYTKDISVPSNNTYIADGFVTHNTSLGQVTIDGGTYDIYRTTRVNQPSIVGTATFDQYWSVRTSKRTSGTVTVTDHFRAWANRGLNLGTIDQITLCVEGYQSSGSANITQNTFSQGSSSGSSGGSSGSTTTTRIECENMSLSGPYVSRITNPFNGIALYANGDTARATVNFPASRNYNFRLRGCGNNNNLARVDLRIDGRTVGTFYYQGTYPWEAPIDNVYVSAGSHTVEITVTADNGTWDVYADYLVIQ

SEQ ID NO: 2567 - protein, 551 aa, Artificial Sequence
  Synthetic Construct, AT-38 intein modified protein
MQTSITLTSNASGTFDGYYYELWKDTGNTTMTVYTQGRFSCQWSNINNALFRTGKKYNQNWQSLGTIRITYSATYNPNGNSYLCIYGWSTNPLVEFYIVESWGNWRPPGASIEADESIVIRRDGETELTEIGSFVDTILAADNQETRITDGHEIALAPNGLEVPSLDTDEQIRWKHIEAVSRHASPDEILLIELESGRSIRATKAHSFVTRRDGDVLPVAGETLVVGDVLPTVGSYDHASGSISVPLQSQSVAADGGTVEPNTNITANAERDSASITSAGIIGSATWERISSIETVAPEYEYVYDLSVSGLETFTTGEGVVTHNTSLGQVTIDGGTYDIYRTTRVNQPSIVGTATFDQYWSVRTSKRTSGTVTVTDHFRAWANRGLNLGTIDQITLCVEGYQSSGSANITQNTFSQGSSSGSSGGSSGSTTTTRIECENMSLSGPYVSRITNPFNGIALYANGDTARATVNFPASRNYNFRLRGCGNNNNLARVDLRIDGRTVGTFYYQGTYPWEAPIDNVYVSAGSHTVEITVTADNGTWDVYADYLVIQ

SEQ ID NO: 2568 - protein, 765 aa, Artificial Sequence
  Synthetic Construct, AT-39 intein modified protein
MQTSITLTSNASGTFDGYYYELWKDTGNTTMTVYTQGRFSCQWSNINNALFRTGKKYNQNWQSLGTIRITYSATYNPNGNSYLCIYGWSTNPLVEFYIVESWGNWRPPGACLTAGTRVLRADTGAETTMGELFALQARDVPVWSLDESLRYVRRHLTRVFPTGVKPVFRLRTASGKTVRATANHPFLTYDGWKPLGELSVADRLAVPRHVPAPERVASWTDDQVLLLGHLIGDGSFVKRQPLRYASVDEANLSAVTEAAANAFSIVAVRDEYAAARCTTLRLPAPYRLTHGRRNPLAAWLDELGLFGLRSYEKFVPQEVFHLPKRQIALFLRHLWATDGSVTLTRQSRGGRIYYASTSLQLIQDVSRLLLRFGISTRVRTTTPKGDHRPGYTLDVSGVDDQRRFLQEIGVHGARGATADRLLEVIRDVSANTNVDTVPRQVWDDVRRLLVEKEMTHREFAAAMGTSFGGSSLWKHAPSRERLGRVAQVLDSAELDVLAVNDVLWDEVVAIEPDGEEQVYDATVLGGHNFVADGIAVHNTSLGQVTIDGGTYDIYRTTRVNQPSIVGTATFDQYWSVRTSKRTSGTVTVTDHFRAWANRGLNLGTIDQITLCVEGYQSSGSANITQNTFSQGSSSGSSGGSSGSTTTTRIECENMSLSGPYVSRITNPFNGIALYANGDTARATVNFPASRNYNFRLRGCGNNNNLARVDLRIDGRTVGTFYYQGTYPWEAPIDNVYVSAGSHTVEITVTADNGTWDVYADYLVIQ

SEQ ID NO: 2569 - protein, 717 aa, Artificial Sequence
  Synthetic Construct, AT-40 intein modified protein
MQTSITLTSNASGTFDGYYYELWKDTGNTTMTVYTQGRFSCQWSNINNALFRTGKKYNQNWQSLGTIRITYSATYNPNGNSYLCIYGWSTNPLVEFYIVESWGNWRPPGACVTADTWVMTASGARQVRDLIDRPFEAVVDGECHPTESRGFFFTGDKPVLRLSTAEGHTLRLTANHPVLRVSKMTRQLRETEWVKAGELRPHDKIVLHDHRALPSWDGAHTEAEGYLIGLLIGGGTLTRDKAILSIWDAAAPKVANGGGSVPAAGVAGVMRAAELAARTLPHRTDFNGWQTTMEGRGEYHMATGALHTLALELGLTPGDKRLTAPLETTSSAFHRGLLRGMFDADGSVQGSQRKGVSIRLPQTDLGNLQTVQRMLLRLGVASTIHQNRRPGGTKVLPDGEGGAKGHSCQAAHELIISGENVVRYAERIGFADSDKMDRLTALLQRYRHTRHAERFIATVQSLEDDGMEAVYDVTVADVHAFDANGLYVHNTSLGQVTIDGGTYDIYRTTRVNQPSIVGTATFDQYWSVRTSKRTSGTVTVTDHFRAWANRGLNLGTIDQITLCVEGYQSSGSANITQNTFSQGSSSGSSGGSSGSTTTTRIECENMSLSGPYVSRITNPFNGIALYANGDTARATVNFPASRNYNFRLRGCGNNNNLARVDLRIDGRTVGTFYYQGTYPWEAPIDNVYVSAGSHTVEITVTADNGTWDVYADYLVIQ

SEQ ID NO: 2570 - protein, 502 aa, Artificial Sequence
  Synthetic Construct, AT-41 intein modified protein
MQTSITLTSNASGTFDGYYYELWKDTGNTTMTVYTQGRFSCQWSNINNALFRTGKKYNQNWQSLGTIRITYSATYNPNGNSYLCIYGWSTNPLVEFYIVESWGNWRPPGACFAGDTEITVSDGRRWMSLPIRQFVTENFDISKPGLDHVGTFYSDPRQPFYVRSIDSQGKTSLKRVTSVSVHRAPAHLVRFATRRGRVLTVTPDHAMLVWDTDYLRKIKALEVAVGDRVPVEEGGLVVADEVVSRETVQALDDRVYCLTVAENHTLVANGIFCGQTSLGQVTIDGGTYDIYRTTRVNQPSIVGTATFDQYWSVRTSKRTSGTVTVTDHFRAWANRGLNLGTIDQITLCVEGYQSSGSANITQNTFSQGSSSGSSGGSSGSTTTTRIECENMSLSGPYVSRITNPFNGIALYANGDTARATVNFPASRNYNFRLRGCGNNNNLARVDLRIDGRTVGTFYYQGTYPWEAPIDNVYVSAGSHTVEITVTADNGTWDVYADYLVIQ

SEQ ID NO: 2571 - protein, 607 aa, Artificial Sequence
  Synthetic Construct, AT-42 intein modified protein
MQTSITLTSNASGTFDGYYYELWKDTGNTTMTVYTQGRFSCQWSNINNALFRTGKKYNQNWQSLGTIRITYSATYNPNGNSYLCIYGWSTNPLVEFYIVESWGNWRPPGACFAAGTLIKTPKGPVPIEQIQSGDLVFNAIGIGVVEGIVCQQKQTITLELSDGTSIVCTHDHPFFCPRGWVAAGDLEVGSGLFSHEDLRRLWSGGASLGLESGSSDGRGAVRSSEVLLRILREEAREPDAGYCGPAEDVRNASTDRAHAEGAWWQWQADPIASDEAARSAGRRVADRVRDEDRREARPEPTAVLLQDRHCEPLANDRNRSGREHSSRGTGEAEGQRQGDVPCSVRVVSISREERGGPEAVYNLRVSGHPSYFAGGVLVHNTSLGQVTIDGGTYDIYRTTRVNQPSIVGTATFDQYWSVRTSKRTSGTVTVTDHFRAWANRGLNLGTIDQITLCVEGYQSSGSANITQNTFSQGSSSGSSGGSSGSTTTTRIECENMSLSGPYVSRITNPFNGIALYANGDTARATVNFPASRNYNFRLRGCGNNNNLARVDLRIDGRTVGTFYYQGTYPWEAPIDNVYVSAGSHTVEITVTADNGTWDVYADYLVIQ

SEQ ID NO: 2572 - protein, 502 aa, Artificial Sequence
  Synthetic Construct, AT-43 intein modified protein
MQTSITLTSNASGTFDGYYYELWKDTGNTTMTVYTQGRFSCQWSNINNALFRTGKKYNQNWQSLGTIRITYSATYNPNGNSYLCIYGWSTNPLVEFYIVESWGNWRPPGACFHGDTLIEIYADGILEEIPIRRFVLEHLDLSQAGVDALGTFYADPVRPAHVRSVDTGGIPHLRKITSVSVHKAPANLIQFSTSRGKNLLVTPDHAMLVWDVSYLRKIRALEVKIGDAVPVWESGVVISDRIVSIDYVPCEDERVYCLTVDRDHNVVGNGIFTGQTSLGQVTIDGGTYDIYRTTRVNQPSIVGTATFDQYWSVRTSKRTSGTVTVTDHFRAWANRGLNLGTIDQITLCVEGYQSSGSANITQNTFSQGSSSGSSGGSSGSTTTTRIECENMSLSGPYVSRITNPFNGIALYANGDTARATVNFPASRNYNFRLRGCGNNNNLARVDLRIDGRTVGTFYYQGTYPWEAPIDNVYVSAGSHTVEITVTADNGTWDVYADYLVIQ

SEQ ID NO: 2573 - protein, 836 aa, Artificial Sequence
  Synthetic Construct, AT-44 intein modified protein
MQTSITLTSNASGTFDGYYYELWKDTGNTTMTVYTQGRFSCQWSNINNALFRTGKKYNQNWQSLGTIRITYSATYNPNGNSYLCIYGWSTNPLVEFYIVESWGNWRPPGACLHPDTYVILPDGRMKKISEIDEDEVLSVNFEDLKLYNKKIKKFKHKAPKILYKIKTAFSELITTGEHKLFVVENGKIVEKCVKDLNGSELIGVVRKLNYSFNDNVEFKDVYVERHYKLDETIRNKLRKVREKLGLTRKDVEKLCGVKEIYIVKIETGKLESIEEERLKKLCSLYGINFEEIIYRDNLHYTNPVKFPKTPTPELMQIIGYIIGDGHFPSNRMLRLKDERKEVLEEYNQLFKTVFNLEGNIKKGDGNYYILEINSKYLIDWFRENIPELFNKTGNERTPEFVFRLNNDLVASYLRGIFDAEGYIRAEAKQIGIGMTSKCFIKEIQFLLLRFGILASYSKIKRKEENWNNTHKLLISDKKSFELFKKYIGFTAKDKMEKLEAILNKMKGLNFRYISIPLTKKEIREFVGVPLKTIKNGDNYCTDYTIEKIIEELNSKGLYDKAEYLKRFLDADIVWTKFKIEEVESDVEYVYDLEVEDYHNFIGNLIINHNTSLGQVTIDGGTYDIYRTTRVNQPSIVGTATFDQYWSVRTSKRTSGTVTVTDHFRAWANRGLNLGTIDQITLCVEGYQSSGSANITQNTFSQGSSSGSSGGSSGSTTTTRIECENMSLSGPYVSRITNPFNGIALYANGDTARATVNFPASRNYNFRLRGCGNNNNLARVDLRIDGRTVGTFYYQGTYPWEAPIDNVYVSAGSHTVEITVTADNGTWDVYADYLVIQ

SEQ ID NO: 2574 - protein, 838 aa, Artificial Sequence
  Synthetic Construct, AT-45 intein modified protein
MQTSITLTSNASGTFDGYYYELWKDTGNTTMTVYTQGRFSCQWSNINNALFRTGKKYNQNWQSLGTIRITYSATYNPNGNSYLCIYGWSTNPLVEFYIVESWGNWRPPGACLNANTEILQESGFRKITELNKDEKVFALCGKEIKPVDGWKVHKTPQHEYNIVVKTVNGLEITTTPNHIFLVKENGSLKEKEAKDLKVGDYVATVDRIRVKEKDIDLSNGDLYFIGYFIGDGYTGVIEKNTLKATPDLAFNPKYPPNFDDSELHKKYFLKCRISKGVAHYIYSKKLRKIFNKLNMLTKDNKNIDAFCNLPLDKLAYLIAGLFDSDGYIYLNRKNIEFYSISEKLVEQLQFVLLRFGIHSSIRKKKTKTMVSPTNGKEYKCKDIYVLTIRDFMSIKRFYENIPLRHEEKRRKLEEIIKNKEIGQIPSEFVALRFTPIAKIWCDCGFSVDLTMFKPRTKRQRELNKKRVKLLFELLDGKKLITNYKEYYSKRKNPYFDFIVREKINGNNYYSLNEKGRVLMSLLNKHIKDKENLEEMYNFLVNLEKCPICGKPIHKEMRYSWKKECYDGDIYWDRIKEIKKIKVNDKYAYDIELPDDGSNSHYIVANGFIVHNTSLGQVTIDGGTYDIYRTTRVNQPSIVGTATFDQYWSVRTSKRTSGTVTVTDHFRAWANRGLNLGTIDQITLCVEGYQSSGSANITQNTFSQGSSSGSSGGSSGSTTTTRIECENMSLSGPYVSRITNPFNGIALYANGDTARATVNFPASRNYNFRLRGCGNNNNLARVDLRIDGRTVGTFYYQGTYPWEAPIDNVYVSAGSHTVEITVTADNGTWDVYADYLVIQ

SEQ ID NO: 2575 - protein, 729 aa, Artificial Sequence
  Synthetic Construct, AT-46 intein modified protein
MQTSITLTSNASGTFDGYYYELWKDTGNTTMTVYTQGRFSCQWSNINNALFRTGKKYNQNWQSLGTIRITYSATYNPNGNSYLCIYGWSTNPLVEFYIVESWGNWRPPGACVPPDTLLILENGFKRIVDIKVGDKVLTHENRFKKVEKVYKRRYIGDIIKIKVRYFPEEIILTPEHPVYAIKTEKRCDGSHGICKFNCLTQYTNPSCKKRYRKYKREWIIAKDLKVGDVIVYPIPNRVRDIKYLSLDKYLSNIKREFCRSRIPEKIEVSEEFCRLVGYFLSEGYCFRDGIGFALGENEKKIIDDIEYLMKKIFNLKPKIRDDGRSEGIELKYYSRVLRDFFGDMFYCGDEKRAWNKALPNEFLYLPKNKQLQIFIGWWRGDKGVTTSEILMNQLRLISLRLGFIITFSKHVPKNPKIGDREVIKYHARWQGRVSILDEKIVDELKNEDIKLPKKDVRYGWIKGNYLYAPIIRIGREYYDGFVYNLEVEDDSSYVTVSGTLHNTSLGQVTIDGGTYDIYRTTRVNQPSIVGTATFDQYWSVRTSKRTSGTVTVTDHFRAWANRGLNLGTIDQITLCVEGYQSSGSANITQNTFSQGSSSGSSGGSSGSTTTTRIECENMSLSGPYVSRITNPFNGIALYANGDTARATVNFPASRNYNFRLRGCGNNNNLARVDLRIDGRTVGTFYYQGTYPWEAPIDNVYVSAGSHTVEITVTADNGTWDVYADYLVIQ

SEQ ID NO: 2576 - protein, 883 aa, Artificial Sequence
  Synthetic Construct, AT-47 intein modified protein
MQTSITLTSNASGTFDGYYYELWKDTGNTTMTVYTQGRFSCQWSNINNALFRTGKKYNQNWQSLGTIRITYSATYNPNGNSYLCIYGWSTNPLVEFYIVESWGNWRPPGACLMPHEKVLTEYGEIKIEDLFKIGKEIVEKDELKEIRKLNIKVHTLNENGEIKIINAPYVWKLKHKGKMIKVKLKNWHSITTTPEHPFLTNNGWIKAENIKKGMYVAIPRKIYGNEDFEKFIEFINSKILTNELIVKVNEKDLKNVELPSTKIYKKQKNVFRSEDIIEHNLNIEKISFSPRIHRCGKPQHYIKLPKSLNEWKAIFYFAGVMFGDGCVDRIANNDEEVFNKLKSLNNLGIEVERIKRKSSYEIIFKNGKNALINLLKILFDYPSEKKSHNIKIPQILYIAPKELVAEFIKGYFDADGYVNLRQNRIEVISASKEFIEGLSILLLRFEITSKIYEIKKSYKETKKKYYQLNIVGKRNLKNFKNIGFSIKYKEENLNKIIEKSRKSEKYPINKDMKRLRILFGMTRNEVNVSYYAKYENGKEIPSYEIVKKFLNSLKPKNLDKKIKVLEGKERDVNYLKAFESDGLIENGRLTKLGREALNIWKNHEFGKENIDYMKSLIENIAFVEVEDVEIIDYDGYVYDLTTETHNFIANGIVVHNTSLGQVTIDGGTYDIYRTTRVNQPSIVGTATFDQYWSVRTSKRTSGTVTVTDHFRAWANRGLNLGTIDQITLCVEGYQSSGSANITQNTFSQGSSSGSSGGSSGSTTTTRIECENMSLSGPYVSRITNPFNGIALYANGDTARATVNFPASRNYNFRLRGCGNNNNLARVDLRIDGRTVGTFYYQGTYPWEAPIDNVYVSAGSHTVEITVTADNGTWDVYADYLVIQ

SEQ ID NO: 2577 - protein, 505 aa, Artificial Sequence
  Synthetic Construct, AT-48 intein modified protein
MQTSITLTSNASGTFDGYYYELWKDTGNTTMTVYTQGRFSCQWSNINNALFRTGKKYNQNWQSLGTIRITYSATYNPNGNSYLCIYGWSTNPLVEFYIVESWGNWRPPGAALAYDEPIYLSDGNIINIGEFVDKFFKKYKNSIKKEDNGFGWIDIGNENIYIKSFNKLSLIIEDKRILRVWRKKYSGKLIKITTKNRREITLTHDHPVYISKTGEVLEINAEMVKVGDYIYIPKNNTINLDEVIKVETVDYNGHIYDLTVEDNHTYIAGKNEGFAVSNTSLGQVTIDGGTYDIYRTTRVNQPSIVGTATFDQYWSVRTSKRTSGTVTVTDHFRAWANRGLNLGTIDQITLCVEGYQSSGSANITQNTFSQGSSSGSSGGSSGSTTTTRIECENMSLSGPYVSRITNPFNGIALYANGDTARATVNFPASRNYNFRLRGCGNNNNLARVDLRIDGRTVGTFYYQGTYPWEAPIDNVYVSAGSHTVEITVTADNGTWDVYADYLVIQ

SEQ ID NO: 2578 - protein, 749 aa, Artificial Sequence
  Synthetic Construct, AT-49 intein modified protein
MQTSITLTSNASGTFDGYYYELWKDTGNTTMTVYTQGRFSCQWSNINNALFRTGKKYNQNWQSLGTIRITYSATYNPNGNSYLCIYGWSTNPLVEFYIVESWGNWRPPGACIEGDAKILTDRGFLKMKEVYKLVKNGEKLKVLGLNAETLKTEWKEIIDAQKREARRYEIGVYRKNKNTKDTIKITPDHKFPVFVNGELSKVQLCDIIDNNLSVLSIDYIPMIEEKYESLAEVMYLGGAVLSDGHIVRRNGKPIRVRFTQKDTEEKKDFIEKVKGDVKLIGGNFIEISNRNNVIEYQTSRKIPSEILGFIEVNINTIPLYATKDEIADLIAGFVDGDGCLSGKRRVEIYQNSSHIKKIEGLIVGLYRLGIIPRLRYKRSSTATIYFNNNLETILQRTRRIKLDKLKEFKKPVEDKKLIDISQILPELKEFDYKGYLYKTYKEKLFIGINKLEEYLSKIDKDGIERIKQKIKLLKESDIYSIRIKKVGEDYGEVYNITVKAENEFNHNYVVWTKHYTPIVVFNTSLGQVTIDGGTYDIYRTTRVNQPSIVGTATFDQYWSVRTSKRTSGTVTVTDHFRAWANRGLNLGTIDQITLCVEGYQSSGSANITQNTFSQGSSSGSSGGSSGSTTTTRIECENMSLSGPYVSRITNPFNGIALYANGDTARATVNFPASRNYNFRLRGCGNNNNLARVDLRIDGRTVGTFYYQGTYPWEAPIDNVYVSAGSHTVEITVTADNGTWDVYADYLVIQ

SEQ ID NO: 2579 - protein, 706 aa, Artificial Sequence
  Synthetic Construct, AT-50 intein modified protein
MQTSITLTSNASGTFDGYYYELWKDTGNTTMTVYTQGRFSCQWSNINNALFRTGKKYNQNWQSLGTIRITYSATYNPNGNSYLCIYGWSTNPLVEFYIVESWGNWRPPGACHPKGTKVVVKGKGIVNIEDVKEGNYVLGIDGWQKVKKVWKYEYEGELINVNGLKCTPNHKIPLRYKIKHKKINKNDYLVRDIYAKSLLTKFKGEGKLILCKDFETIGNYEKYINDMDEDFILKSELIGILLAEGHLLRRDIEYFDSSRGKKRISHQYRVEITVNEDEKDFIEKIKYIFKKLFNYELYVRRKKGTKAITLGCAKKDIYLKIEEILKNKEKYLPNAILRGFFEGDGYVNTVRRAVVVNQGTNNYDKIKFIASLLDRLGIKYSFYTYSYEERGKKLKRYVIEIFSKGDLIKFSILISFISRRKNNLLNEIIRQKTLYKIGDYGFYDLDDVCVSLESYKGEVYDLTLEGRPYYFANGILTHNTSLGQVTIDGGTYDIYRTTRVNQPSIVGTATFDQYWSVRTSKRTSGTVTVTDHFRAWANRGLNLGTIDQITLCVEGYQSSGSANITQNTFSQGSSSGSSGGSSGSTTTTRIECENMSLSGPYVSRITNPFNGIALYANGDTARATVNFPASRNYNFRLRGCGNNNNLARVDLRIDGRTVGTFYYQGTYPWEAPIDNVYVSAGSHTVEITVTADNGTWDVYADYLVIQ

SEQ ID NO: 2580 - protein, 813 aa, Artificial Sequence
  Synthetic Construct, AT-51 intein modified protein
MQTSITLTSNASGTFDGYYYELWKDTGNTTMTVYTQGRFSCQWSNINNALFRTGKKYNQNWQSLGTIRITYSATYNPNGNSYLCIYGWSTNPLVEFYIVESWGNWRPPGASILPDEYLTIIEEDGIKVVKIGEYIDDLMRKHKDKIKFSGISEILETKNLKTFSFDKITKKCEIKKVKALIRHPYFGKAYKIKLRSGRTIKVTRGHSLFKYENGKIVEVKGDDVRFGDLIVVPKKLTCVDKEVVINIPKRLINADEEEIKDLVITKHKDKAFFVKLKKTLEDIENNKLKVIFDDCILYLKELGLIDYNIIKKINKVDIKILDEEKFKAYKKYFDTVIEHGNFKKGRCNIQYIKIKDYIANIPDKEFEDCEIGAYSGKINALLKLDEKLAKFLGFFVTRGRLKKQKLKGETVYEISVYKSLPEYQKEIAETFKEVFGAGSMVKDKVTMDNKIVYLVLKYIFKCGDKDKKHIPEELFLASESVIKSFLDGFLKAKKNSHKGTSTFMAKDEKYLNQLMILFNLVGIPTRFTPVKNKGYKLTLNPKYGTVKDLMLDEVKEIEAFEYSGYVYDLSVEDNENFLVNNIYAHNTSLGQVTIDGGTYDIYRTTRVNQPSIVGTATFDQYWSVRTSKRTSGTVTVTDHFRAWANRGLNLGTIDQITLCVEGYQSSGSANITQNTFSQGSSSGSSGGSSGSTTTTRIECENMSLSGPYVSRITNPFNGIALYANGDTARATVNFPASRNYNFRLRGCGNNNNLARVDLRIDGRTVGTFYYQGTYPWEAPIDNVYVSAGSHTVEITVTADNGTWDVYADYLVIQ

SEQ ID NO: 2581 - protein, 885 aa, Artificial Sequence
  Synthetic Construct, AT-52 intein modified protein
MQTSITLTSNASGTFDGYYYELWKDTGNTTMTVYTQGRFSCQWSNINNALFRTGKKYNQNWQSLGTIRITYSATYNPNGNSYLCIYGWSTNPLVEFYIVESWGNWRPPGACLTGDTKVIVNGEIREIGEVIEEISNGKFGVTLTNNLKVLGIDEDGKIREFDVQYVYKDKTNTLIKIKTKMGRELKVTTYHPLLINHKNGEIKWEKAENLKVGDKLATPRYILFNESDYNEELAEWLGYFIGDGHADKESNKITFTNGDEKLRKRFAELTEKLFKDAKIKERIHKDRTPDIYVNSKEAVEFIDKLGLRGKKADKVRIPKEIMRSDALRAFLRAYFDCDGGIEKHSIVLSTASKEMAEDLVYALLRFGIIAKLREKVNKNNNKVYYHIVISNSSNLRTFLDNIGFSQERKLKKLLEIIKDENPNLDVITIDKEKIRYIRDRLKVKLTRDIEKDNWSYNKCRKITQELLKEIYYRLEELKEIEKALEENILIDWDEVAERRKEIAEKTGIRSDRILEYIRGKRKPSLKNYIKIANTLGKNIEKIIDAMRIFAKKYSSYAEIGKMLNMWNSSIKIYLESNTQEIEKLEEIRKTELKLVKEILNDEKLIDSIGYVLFLASNEIYWDEIVEIEQLNGEFTIYDLHVPRYHNFIGGNLPTILHNTSLGQVTIDGGTYDIYRTTRVNQPSIVGTATFDQYWSVRTSKRTSGTVTVTDHFRAWANRGLNLGTIDQITLCVEGYQSSGSANITQNTFSQGSSSGSSGGSSGSTTTTRIECENMSLSGPYVSRITNPFNGIALYANGDTARATVNFPASRNYNFRLRGCGNNNNLARVDLRIDGRTVGTFYYQGTYPWEAPIDNVYVSAGSHTVEITVTADNGTWDVYADYLVIQ

SEQ ID NO: 2582 - protein, 773 aa, Artificial Sequence
  Synthetic Construct, AT-53 intein modified protein
MQTSITLTSNASGTFDGYYYELWKDTGNTTMTVYTQGRFSCQWSNINNALFRTGKKYNQNWQSLGTIRITYSATYNPNGNSYLCIYGWSTNPLVEFYIVESWGNWRPPGASVSKDTPILVKIDGKVKRTTFEELDKIYFETNDENEMYKKVDNLEVLTVDENFRVRWRKVSTIIRHKVDKILRIKFEGGYIELTGNHSIMMLDENGLVAKKASDIKVGDCFLSFVANIEGEKDRLDLKEFEPKDITSRVKIINDFDIDEDTAWMLGLYVAEGAVGFKGKTSGQVIYTLGSHEHDLINKLNDIVDKKGFSKYENFTGSGFDRKRLSAKQIRILNTQLARFVEENFYDGNGRRARNKRIPDIIFELKENLRVEFLKGLADGDSSGNWREVVRISSKSDNLLIDTVWLARISGIESSIFENEARLIWKGGMKWKKSNLLPAEPIIKMIKKLENKINGNWRYILRHQLYEGKKRVSKDKIKQILEMVNVEKLSDKEKEVYDLLKKLSKTELYALVVKEIEIIDYNDFVYDVSVPNNEMFFAGNVPILLHNTSLGQVTIDGGTYDIYRTTRVNQPSIVGTATFDQYWSVRTSKRTSGTVTVTDHFRAWANRGLNLGTIDQITLCVEGYQSSGSANITQNTFSQGSSSGSSGGSSGSTTTTRIECENMSLSGPYVSRITNPFNGIALYANGDTARATVNFPASRNYNFRLRGCGNNNNLARVDLRIDGRTVGTFYYQGTYPWEAPIDNVYVSAGSHTVEITVTADNGTWDVYADYLVIQ

SEQ ID NO: 2583 - protein, 880 aa, Artificial Sequence
  Synthetic Construct, AT-54 intein modified protein
MQTSITLTSNASGTFDGYYYELWKDTGNTTMTVYTQGRFSCQWSNINNALFRTGKKYNQNWQSLGTIRITYSATYNPNGNSYLCIYGWSTNPLVEFYIVESWGNWRPPGACLTGDAKITLPDEREIKIEDFIKMFEERKLKHVLNRNGEDLVLAGVKFNSKIVNHKVYRLVLESGREIEATGDHKFLTRDGWKEVYELKEDDEVLVYPALEGVGFEVDERRIIGLNEFYEFLTNYEIKLGYKPLGKAKSYKELITRDKEKILSRVLELSDKYSKSEIRRKIEEEFGIKISLTTIKNLINGKIDGFALKYVRKIKELGWDEITYDDEKAGIFARLLGFIIGDGHLSKSKEGRILITATINELEGIKKDLEKLGIKASNIIEKDIEHKLDGREIKGKTSFIYINNKAFYLLLNFWGVEIGNKTINGYNIPKWIKYGNKFVKREFLRGLFGADGTKPYIKKYNINGIKLGIRVENISKDKTLEFFEEVKKMLEEFEVESYIKVSKIDNKNLTELIVKANNKNYLKYLSRISYAYEKDNFARLVGEYLRIKEAYKDIILKEIAENALKEADGEKSLRELARKYNVPVDFIINQLKGKDIGLPRNFMTFEEFLKEKVVDGKYVSERIIKKECIGYRDVYDITCHKDPSFIANGFVSHNTSLGQVTIDGGTYDIYRTTRVNQPSIVGTATFDQYWSVRTSKRTSGTVTVTDHFRAWANRGLNLGTIDQITLCVEGYQSSGSANITQNTFSQGSSSGSSGGSSGSTTTTRIECENMSLSGPYVSRITNPFNGIALYANGDTARATVNFPASRNYNFRLRGCGNNNNLARVDLRIDGRTVGTFYYQGTYPWEAPIDNVYVSAGSHTVEITVTADNGTWDVYADYLVIQ

SEQ ID NO: 2584 - protein, 831 aa, Artificial Sequence
  Synthetic Construct, AT-55 intein modified protein
MQTSITLTSNASGTFDGYYYELWKDTGNTTMTVYTQGRFSCQWSNINNALFRTGKKYNQNWQSLGTIRITYSATYNPNGNSYLCIYGWSTNPLVEFYIVESWGNWRPPGACLTPDTYVVLGDGRIETIEDIVNAKERNVLSLDLDNLSIKIDTAIKFWKLRYNGNLSKITLSNNYELKATPDHCLLVLRDNQLKWIPAKDIKENDYIAMPFNYKVERKPISLLNLLKYLDITDVLIEFDENSTIFEKIAEYIRNNIKTSTKYKYLRNRRVPLKYLIEWNFDLDEIEKEAKYIYKSVAGTKKIPLFKLDERFWYFAGLVLGDGSIQDSKIRIAQTPLKDVKSILDETFPFLHNWISGNQVIISNPIIAEILEKLGMRNGKLNGIIFSLPESYINALIAGYFDTDGCFSLLYDKKAKKHNLRMVLTSKRRDVLEKIGIYLNSIGILNTLHKSREVYSLIISNKSLETFKEKIAKYLKIRKEAFINGYKTYKKEHEERFECDLLPVKEVFKKLTFEKGRKEILKDSKIHIENWYKEKTNNIPREKLKTVLRYANNSEHKEFLEKIVNGDISFVRVKKVENIPYDGYVYDLSIKHNQNFISNGVISHNTSLGQVTIDGGTYDIYRTTRVNQPSIVGTATFDQYWSVRTSKRTSGTVTVTDHFRAWANRGLNLGTIDQITLCVEGYQSSGSANITQNTFSQGSSSGSSGGSSGSTTTTRIECENMSLSGPYVSRITNPFNGIALYANGDTARATVNFPASRNYNFRLRGCGNNNNLARVDLRIDGRTVGTFYYQGTYPWEAPIDNVYVSAGSHTVEITVTADNGTWDVYADYLVIQ

SEQ ID NO: 2585 - protein, 790 aa, Artificial Sequence
  Synthetic Construct, AT-56 intein modified protein
MQTSITLTSNASGTFDGYYYELWKDTGNTTMTVYTQGRFSCQWSNINNALFRTGKKYNQNWQSLGTIRITYSATYNPNGNSYLCIYGWSTNPLVEFYIVESWGNWRPPGASLGRDELIFIKEGDKLKVCKIGEAIDEFMEKYKDKIIVDGDTEILYLDGIAEVYTISVNVKTGKAEFKRVYAISRHKPRGKVYKVIGKDGTSIIVTEDHSLFNYDENGNLVCVKPRQMKHIIRNFNNPYDVEYRIGDYIETNYQRTDSKYNSRQNDIPEKLKITKELCQFLGLFVAEGSYITNGISITTKDDDIAKFIERFVKEQINENIAVKRYEDSVRFVNKGFYRFLKEHINGKAINKNSPEFILKGDKEMKLAFLGGLISGDGYVSKDGRVQIYTTSEQLLGQLHLLLSDLGMIYSITKIKEEGEKIEIKRNEIVRNYKLYVIEIAKNCTEDLKPYVIPKYKKERIKPANYDQLPYDYRIIKEHLRKITDKKPYNDYAWKSNNRKLKLNTLEKIEQLNPHLREEINKFKLNIPFEIKEIKEIDYNGYVYDLSVEDNENFITATGILCHNTSLGQVTIDGGTYDIYRTTRVNQPSIVGTATFDQYWSVRTSKRTSGTVTVTDHFRAWANRGLNLGTIDQITLCVEGYQSSGSANITQNTFSQGSSSGSSGGSSGSTTTTRIECENMSLSGPYVSRITNPFNGIALYANGDTARATVNFPASRNYNFRLRGCGNNNNLARVDLRIDGRTVGTFYYQGTYPWEAPIDNVYVSAGSHTVEITVTADNGTWDVYADYLVIQ

SEQ ID NO: 2586 - protein, 870 aa, Artificial Sequence
  Synthetic Construct, AT-57 intein modified protein
MQTSITLTSNASGTFDGYYYELWKDTGNTTMTVYTQGRFSCQWSNINNALFRTGKKYNQNWQSLGTIRITYSATYNPNGNSYLCIYGWSTNPLVEFYIVESWGNWRPPGASLPYDEKILIFENNEYKLVKIGEFVEKYLNRYKDRAITYGDNNIEVYIKDENIYAPSFDKDGKIVLKPITHAIRHRGKEIYEIELESGKKVRVTGDHSVFTINDNLDVVEVKASDLKVGDFIITPKIIPSISKDKIYLSEIVKNKDKYYVKIKDHIKFIEEHEEILKESYKEYKTKWKDLKPVLKKKNAFRLDLIEDLVDKEKIEKISYGHANYINNKIKLDEKFGYLIGAFLSEGHWNDKCVEISSTNKEFIENLVEIIEEILGKDAYYITVKGDKRRYKDLYVIGLNKTVAMIFESLGLNKLSSNKEIPSILLSNETFLKGLIKGYIDGDGSIYVDESKRDYSIRLYTTSETLRDTLCLALKILGINYRLSIDKKSKVNENWRDCYVIKITGKENIEKLLDVEIKNNGGKDVIPKIAEKFKEIINQYSQREWKERFGIDVNNLHIWEDLKKGYMSRYRAKKVLNIMKNVKEIEEKYGRLLDKIGQLIDNDLLFERIKSIRVLDEIPEYVYDISVEGTENFIGGEGFICLHNTSLGQVTIDGGTYDIYRTTRVNQPSIVGTATFDQYWSVRTSKRTSGTVTVTDHFRAWANRGLNLGTIDQITLCVEGYQSSGSANITQNTFSQGSSSGSSGGSSGSTTTTRIECENMSLSGPYVSRITNPFNGIALYANGDTARATVNFPASRNYNFRLRGCGNNNNLARVDLRIDGRTVGTFYYQGTYPWEAPIDNVYVSAGSHTVEITVTADNGTWDVYADYLVIQ

SEQ ID NO: 2587 - protein, 789 aa, Artificial Sequence
  Synthetic Construct, AT-58 intein modified protein
MQTSITLTSNASGTFDGYYYELWKDTGNTTMTVYTQGRFSCQWSNINNALFRTGKKYNQNWQSLGTIRITYSATYNPNGNSYLCIYGWSTNPLVEFYIVESWGNWRPPGACVDGDTTVLLDGKLIKIKDLEDKWKDVKVLTSDDLNPKLTSLSKYWKLNADEYGKKIYKIKTELGREIIATEDHPFYTTNGRKRCGELKVGDEVIIYPNDFPMFEDDNRVIVDEEKIKKVINNIGGTYKNKIINELKDRKLIPLTYNDQKASILARIVGHVMGDGSLIINNKNSRVVFRGDIEDLKTIKEDLKELGYDGEEIKLHEGETEITDYNGKKRIIKGKGYSFEVRKKSLCILLKALGCVGGDKTKKMYGIPNWIKTAPKYIKKEFLSAYFGSELTTPKIRNHGTSFKELSFKIAKIEEIFDEDRFIKDIKEMLKEFGIELKVRVEEGNLRKDGYKTKVYVASIYNHKEFFGRIGYTYANKKETLARYAYEYLLTKEKYLKDRNIKKLENNTKFITFDKFIKEKCLKNGFVKEKIVSIEETKVDYVYDITTISETHNFIANGFLTGNTSLGQVTIDGGTYDIYRTTRVNQPSIVGTATFDQYWSVRTSKRTSGTVTVTDHFRAWANRGLNLGTIDQITLCVEGYQSSGSANITQNTFSQGSSSGSSGGSSGSTTTTRIECENMSLSGPYVSRITNPFNGIALYANGDTARATVNFPASRNYNFRLRGCGNNNNLARVDLRIDGRTVGTFYYQGTYPWEAPIDNVYVSAGSHTVEITVTADNGTWDVYADYLVIQ

SEQ ID NO: 2588 - protein, 808 aa, Artificial Sequence
  Synthetic Construct, AT-59 intein modified protein
MQTSITLTSNASGTFDGYYYELWKDTGNTTMTVYTQGRFSCQWSNINNALFRTGKKYNQNWQSLGTIRITYSATYNPNGNSYLCIYGWSTNPLVEFYIVESWGNWRPPGASLPYEEKIIIKEGEFIKPVEIGKLVDEMIERFGFEKIGNSEVCDLPIDIYALSLDQDEKVHWKRIISCIRHKHNGKLIKIKTKSGREITATPYHSFVIRKDNKIIPVKGSELKIGDRIPVVKHIPANCVEAINISDYVSGNYVVDNINNKIAPKINGKSIPNNIKLDYDFGYFIGIYLAEGSVTKYFVSISNVDELILNKIRAFADKLGLNYGEYDNNNGFAESHDIRIYSSTLAEFLSNFGTSSNTKKIAEFVFGANKEFVRGLIRGYFDGDGNVNADRKVIRVTSNSKELIDGIAILLARFNIFSIKTKTKNQFVLIIPHRYAKKFHEEINFSVEKKKSELERLVSSLNDDKTYDSIDMIPSIGDALTKLGEKVDYPKVILKKFERKQKIGRATLQRHLRRIEELAVKKGVNILALKEYWLLKKAVESDVIWDEIVKIEEISCDKKYVYDISVEGLETFTTFDGVLTHNTSLGQVTIDGGTYDIYRTTRVNQPSIVGTATFDQYWSVRTSKRTSGTVTVTDHFRAWANRGLNLGTIDQITLCVEGYQSSGSANITQNTFSQGSSSGSSGGSSGSTTTTRIECENMSLSGPYVSRITNPFNGIALYANGDTARATVNFPASRNYNFRLRGCGNNNNLARVDLRIDGRTVGTFYYQGTYPWEAPIDNVYVSAGSHTVEITVTADNGTWDVYADYLVIQ

SEQ ID NO: 2589 - protein, 825 aa, Artificial Sequence
  Synthetic Construct, AT-60 intein modified protein
MQTSITLTSNASGTFDGYYYELWKDTGNTTMTVYTQGRFSCQWSNINNALFRTGKKYNQNWQSLGTIRITYSATYNPNGNSYLCIYGWSTNPLVEFYIVESWGNWRPPGACLTSNSKILTDDGYYIKLEKLKEKLDLHIKIYNTEEGEKSSNILFVSERYADEKIIRIKTESGRVLEGSKDHPVLTLNGYVPMGMLKEGDDVIVYPYEGVEYEEPSDEIILDEDDFAEYDKQIIKYLKDRGLLPLRMDNKNIGIIARLLGFAFGDGSIVKENGDRERLYVAFYGKRETLIKIREDLEKLGIKASRIYSRKREVEIRNAYGDEYTSLCEDNSIKITSKAFALFMHKLGMPIGKKTEQIYKIPEWIKKAPKWVKRNFLAGLFGADGSRAVFKNYTPLPINLTMSKSEELKENILEFLNEIKLLLAEFDIESMIYEIKSLDGRVSYRLAIVGEESIKNFLGRINYEYSGEKKVIGLLAYEYLRRKDIAKEIRKKCIKRAKELYKKGVTVSEMLKMDEFRNEFISKRLIERAVYENLDEDDVRISTKFPKFEEFIEKYGVIGGFVIDKIKEIEEISYDSKLYDVGIVSKEHNFIANSIVVHNTSLGQVTIDGGTYDIYRTTRVNQPSIVGTATFDQYWSVRTSKRTSGTVTVTDHFRAWANRGLNLGTIDQITLCVEGYQSSGSANITQNTFSQGSSSGSSGGSSGSTTTTRIECENMSLSGPYVSRITNPFNGIALYANGDTARATVNFPASRNYNFRLRGCGNNNNLARVDLRIDGRTVGTFYYQGTYPWEAPIDNVYVSAGSHTVEITVTADNGTWDVYADYLVIQ

SEQ ID NO: 2590 - protein, 672 aa, Artificial Sequence
  Synthetic Construct, AT-61 intein modified protein
MQTSITLTSNASGTFDGYYYELWKDTGNTTMTVYTQGRFSCQWSNINNALFRTGKKYNQNWQSLGTIRITYSATYNPNGNSYLCIYGWSTNPLVEFYIVESWGNWRPPGASVDYNEPIIIKENGEIKVVKIGELIDKIIENSENIRREGILEIAKCKGIEVIAFNSNYKFKFMPVSEVSRHPVSEMFEIVVEGNKKVRVTRSHSVFTIRDNEVVPIRVDELKVGDILVLAKELPNIEEDIEIDKKFSKILGYIIAEGYYDDKKIVLSYDYNEKEFINETIDYFKSLNSDITIYSKDLNIQIEVKNKKIINLLKKLRVKNKRIPSIIFKSPYEIKKSFIDGIFNGKDAKVFVSKELAEDVIFLLLQIKENATINKKSINDIEVYEVRRITNIYTNRKLEKLINSDFIFLKIKEINKVEPTSGYAYDLTVPNAENFVAGFGGFVLHNTSLGQVTIDGGTYDIYRTTRVNQPSIVGTATFDQYWSVRTSKRTSGTVTVTDHFRAWANRGLNLGTIDQITLCVEGYQSSGSANITQNTFSQGSSSGSSGGSSGSTTTTRIECENMSLSGPYVSRITNPFNGIALYANGDTARATVNFPASRNYNFRLRGCGNNNNLARVDLRIDGRTVGTFYYQGTYPWEAPIDNVYVSAGSHTVEITVTADNGTWDVYADYLVIQ

SEQ ID NO: 2591 - protein, 791 aa, Artificial Sequence
  Synthetic Construct, AT-62 intein modified protein
MQTSITLTSNASGTFDGYYYELWKDTGNTTMTVYTQGRFSCQWSNINNALFRTGKKYNQNWQSLGTIRITYSATYNPNGNSYLCIYGWSTNPLVEFYIVESWGNWRPPGACFHPDEVLFIDRGRGLECITFKELFELEDKDNVKILSFDGEKLSLKKLKLASKRYYNDDLITLRFNLGREIKITKDHPVVILEDGELKIKLTSDVKEGDKVILPYGNFGEEREIEIDILEELSKTDLIEKVWIHNKDLATNEFNIIKPYLSNKYPHDVKRNGTIRAKDILPIKEILDKYGSKNRLFTAKSKSTTIPYKIKIDKDFARLIGYYLSEGWISKDYGRNGVVRKRIGLCFGIHEEEYINDVKNILNKLGIKYIEKIKDGSHSILISSKILAYVFENILNCGINCYNKNIPPQMFNAKEEIKWEFLKGLFRGDGGIVRLNNNKNLNIEFATVSKKMAHSLLILLQLLGIVASVKKCYNNKSTTMAYIIRINGLEQVKKIGELFGKKWENYKDIAESYKRNIEPLGYKKSDNFAILEVKEIIKEHYSGYVYSVETENSLLITSYGILIHNTSLGQVTIDGGTYDIYRTTRVNQPSIVGTATFDQYWSVRTSKRTSGTVTVTDHFRAWANRGLNLGTIDQITLCVEGYQSSGSANITQNTFSQGSSSGSSGGSSGSTTTTRIECENMSLSGPYVSRITNPFNGIALYANGDTARATVNFPASRNYNFRLRGCGNNNNLARVDLRIDGRTVGTFYYQGTYPWEAPIDNVYVSAGSHTVEITVTADNGTWDVYADYLVIQ

SEQ ID NO: 2592 - protein, 731 aa, Artificial Sequence
  Synthetic Construct, AT-63 intein modified protein
MQTSITLTSNASGTFDGYYYELWKDTGNTTMTVYTQGRFSCQWSNINNALFRTGKKYNQNWQSLGTIRITYSATYNPNGNSYLCIYGWSTNPLVEFYIVESWGNWRPPGASIPGDEVVWAKVDGEAKLIPIEDLYELWKEGRDVEVAALTEEGVVWSSVDRVARHRRRTGLVKIITRTGREVIVTEDHSVFTVRDGKIVDVPTSELSEGDWIVLPARLPAGDSDEIDGIKIDEDLAFLLGLYVAEGSLTNQKDAVRIHNKDPEVIEEIDRIVREKGWEGRYYESDHSYWIKSRKLRQLCEKLGTKAREKRLGPLLSLKPELLAAALRGYYTGDGSFSVKPHGRSAIIEATTVSKRLADELLVALQILDIVARRYECDDTKGSTRYRVMITKSEYIRTFVEKVGFAQSEKNERIRKFLAERKWTRGRSDIPTELIGSPYTYVEVEYISDRVAADGGLMKAELEHLYFDKIKEIVPLDRDDEYVYDVVEVKLGHNFVGGQGVLLHNTSLGQVTIDGGTYDIYRTTRVNQPSIVGTATFDQYWSVRTSKRTSGTVTVTDHFRAWANRGLNLGTIDQITLCVEGYQSSGSANITQNTFSQGSSSGSSGGSSGSTTTTRIECENMSLSGPYVSRITNPFNGIALYANGDTARATVNFPASRNYNFRLRGCGNNNNLARVDLRIDGRTVGTFYYQGTYPWEAPIDNVYVSAGSHTVEITVTADNGTWDVYADYLVIQ

SEQ ID NO: 2593 - protein, 859 aa, Artificial Sequence
  Synthetic Construct, AT-64 intein modified protein
MQTSITLTSNASGTFDGYYYELWKDTGNTTMTVYTQGRFSCQWSNINNALFRTGKKYNQNWQSLGTIRITYSATYNPNGNSYLCIYGWSTNPLVEFYIVESWGNWRPPGACVAPETKICLADGRFVRADELFEELKERGRLVKCDESEEVYELREPVGVSSLDKDAVEIVEGKITHVWRLKADKLVEVEVKNGRSIRTTPEHKFLVLDPSGEIVEKRADELEIGDYIVCTQKLVHEGMSEEELKREVFRRLGRDFFVHLPEEEAESVLELAKERGIKALWETLEVDIEENSFYYQLRKGRIRADILVDLAEELGLDLADLYDAVEVSYRSNTKSTKPIRLPEPEDLFYLAGLMFGDGCWNQLTNGSEAIQGEVKRIASDMGLEVRVRRYEGKTARIDFPETVPRILEALFDYPRRKKAHRIRVNDFLTRAPLDCIAEFIRGYFDADGTVEEGRSAVSVTSVSREFLEDLQLLLQKFDVASYLREGDGAYTLYVSGARSLERFPGFREPEKAEKLKKLMEKASSSELEKVPISGEILREVRGDVPTTRMFNCYSNYEGGQVGLTKSSLEKVISTLEAVGVEGEALERLKALARDDVCFLEVVRVEEVEYDGYVYDFTVEEHHNFAAEGFVVHNTSLGQVTIDGGTYDIYRTTRVNQPSIVGTATFDQYWSVRTSKRTSGTVTVTDHFRAWANRGLNLGTIDQITLCVEGYQSSGSANITQNTFSQGSSSGSSGGSSGSTTTTRIECENMSLSGPYVSRITNPFNGIALYANGDTARATVNFPASRNYNFRLRGCGNNNNLARVDLRIDGRTVGTFYYQGTYPWEAPIDNVYVSAGSHTVEITVTADNGTWDVYADYLVIQ

SEQ ID NO: 2594 - protein, 642 aa, Artificial Sequence
  Synthetic Construct, AT-65 intein modified protein
MQTSITLTSNASGTFDGYYYELWKDTGNTTMTVYTQGRFSCQWSNINNALFRTGKKYNQNWQSLGTIRITYSATYNPNGNSYLCIYGWSTNPLVEFYIVESWGNWRPPGASVSADTPILVRRGGEVLRVTFEDLDSWYFGDRGGEYVDVSDLEVLTVDRNFRVTWARVSKLIRHRARKILRVHLEDGTIELTGNHAVMVLDEGGLRAVKASEIEEGSFLLSFVAELDEQPTDGGTVVTSVGSGSRVSDTTYELPVEVRVELLRELADDGVIEASEDVSVDLAWLARISGVESRVTDDGVELVWETRTGDLLPADPVLKLVERLESDLVDDLESWVFDGRVSKEAVRKVLSSVDAKNLRGDARRAYRMLRTLVRSDVHAVKVEDLDVMDYDGYVYDVSVPGNEMFFAGEVPVLLHNTSLGQVTIDGGTYDIYRTTRVNQPSIVGTATFDQYWSVRTSKRTSGTVTVTDHFRAWANRGLNLGTIDQITLCVEGYQSSGSANITQNTFSQGSSSGSSGGSSGSTTTTRIECENMSLSGPYVSRITNPFNGIALYANGDTARATVNFPASRNYNFRLRGCGNNNNLARVDLRIDGRTVGTFYYQGTYPWEAPIDNVYVSAGSHTVEITVTADNGTWDVYADYLVIQ

SEQ ID NO: 2595 - protein, 819 aa, Artificial Sequence
  Synthetic Construct, AT-66 intein modified protein
MQTSITLTSNASGTFDGYYYELWKDTGNTTMTVYTQGRFSCQWSNINNALFRTGKKYNQNWQSLGTIRITYSATYNPNGNSYLCIYGWSTNPLVEFYIVESWGNWRPPGACLAPGTKILTEHGCWVKVEDLPKMLTDQKLKVYDVDEGREDDSEIKFVMERGIEEDERAVVLVTESGLTIEGSEDHPVLTPEGYVELGEIEEGDLVVVYPFEGVEYEEKEGTILDESDFEDVDPQVLRYLEERDLIPLRWSDPKVGTLARILGFAMGDGHLGEQAGRLTLSFYGDERTLRELKRDLESLGVKANLHVRKRRYEIETASGRYEGEATSVELRVASRSFALLMEKLGMPRGRKVETPYKVPDWIKEAPLWVKRNFLAGLFAADGSVVKFKRYTPLPINLTQAKVEELEENLREFMNDVAKLLREFGIETTLYEVKSKKNVVYKLAIVGEENIKRFLGKVGYEYDPEKKVEGLAAYAYLKLKERVKKDRKEAAETAAEVYEETGSITKAHEAVADVVNRRFVERVVYDGGISSVRVPEDFPTFERFKEERVLAGGFVIEEVVEVKGVEPEYDRFYDIGVCHGAHNFIADGVVVHNTSLGQVTIDGGTYDIYRTTRVNQPSIVGTATFDQYWSVRTSKRTSGTVTVTDHFRAWANRGLNLGTIDQITLCVEGYQSSGSANITQNTFSQGSSSGSSGGSSGSTTTTRIECENMSLSGPYVSRITNPFNGIALYANGDTARATVNFPASRNYNFRLRGCGNNNNLARVDLRIDGRTVGTFYYQGTYPWEAPIDNVYVSAGSHTVEITVTADNGTWDVYADYLVIQ

SEQ ID NO: 2596 - protein, 854 aa, Artificial Sequence
  Synthetic Construct, AT-67 intein modified protein
MQTSITLTSNASGTFDGYYYELWKDTGNTTMTVYTQGRFSCQWSNINNALFRTGKKYNQNWQSLGTIRITYSATYNPNGNSYLCIYGWSTNPLVEFYIVESWGNWRPPGACFAPGTRVITASGDVVEIDEIVERAAETAVDGGLREGSTEVTVGVTNVRTLAAWDGDLTSNDVVAVEKIEAPSRAVRVRTRSGAELVVSEDHKFLVDTEDGPRMVEASELKSGDELYSVRELRVSEKVPTYLELLLEAEDKFYVHPTEEFEEAVAERYGSLAEACREKELPYRAREAKERRYYELSEFARLATAVIESVDEATEYIDYVTAGGRKRVKFSSPRPGKEVMYVAGLIASDGSVDTERGFVMFSNTERELLSAFEEIVTEEFGVDASKTENQNGVTMLRVNSRVLARVFERLADPKTVLKMPRELVAAYLAGYVDGDGHLKDGKIVITTADRERAGDLQLLLKRLGVPSVLRERDGAYDVVVTGHDAAELAEELPLRHPKKAEAAASMSSGRRSSRFDRVSRRFGRLLREVRRKYGVRASDLGSSSTISQIESGERRATRRLALEIVERLEEVVGDVEEVRELRELAEGNYVLDEVVEVETVEYEHEYLYDVTVVPDHTLVVENGIITSNTSLGQVTIDGGTYDIYRTTRVNQPSIVGTATFDQYWSVRTSKRTSGTVTVTDHFRAWANRGLNLGTIDQITLCVEGYQSSGSANITQNTFSQGSSSGSSGGSSGSTTTTRIECENMSLSGPYVSRITNPFNGIALYANGDTARATVNFPASRNYNFRLRGCGNNNNLARVDLRIDGRTVGTFYYQGTYPWEAPIDNVYVSAGSHTVEITVTADNGTWDVYADYLVIQ

SEQ ID NO: 2597 - protein, 654 aa, Artificial Sequence
  Synthetic Construct, AT-68 intein modified protein
MQTSITLTSNASGTFDGYYYELWKDTGNTTMTVYTQGRFSCQWSNINNALFRTGKKYNQNWQSLGTIRITYSATYNPNGNSYLCIYGWSTNPLVEFYIVESWGNWRPPGACSWTNARAVTRRGFVHVDDLTTDDEVMSVDDQGRTIWQQIDEVVRFPFSGTLYSLGGREINATITANHRVVGLNREKTKWVEHTPTSLPGNKMWVYTAGEGSNEDYPLTDTEIRLAVWGLTDSHRSPDGRWTFYQSGEKAEQVRKLLADAGIEYRERARNRGITEIDGKVLKAPPKTQYEFSLGKVQELDDLLDRGRSELPTWTLSLSQRQARLFLEEYRFTDGTDTTSAGDSYVLYVCKDRMREQLQMLAAANGLRASTTEYRPGHWRLNISNRALSGLYKNTVEEVAYEGEVWCLRVPNGRFFIEDGGKIHLTGNTSLGQVTIDGGTYDIYRTTRVNQPSIVGTATFDQYWSVRTSKRTSGTVTVTDHFRAWANRGLNLGTIDQITLCVEGYQSSGSANITQNTFSQGSSSGSSGGSSGSTTTTRIECENMSLSGPYVSRITNPFNGIALYANGDTARATVNFPASRNYNFRLRGCGNNNNLARVDLRIDGRTVGTFYYQGTYPWEAPIDNVYVSAGSHTVEITVTADNGTWDVYADYLVIQ

SEQ ID NO: 2598 - protein, 668 aa, Artificial Sequence
  Synthetic Construct, AT-69 intein modified protein
MQTSITLTSNASGTFDGYYYELWKDTGNTTMTVYTQGRFSCQWSNINNALFRTGKKYNQNWQSLGTIRITYSATYNPNGNSYLCIYGWSTNPLVEFYIVESWGNWRPPGASLACSTPILTTNGWSTMGALQDGDEVYAPDGQPTKVIKAHPINLNRPCFKVRFRDGQEVVTDAEHLWQVNDRNNGGRDRVMTTQEIADAPWGGRYRFRVPVTEPLQTPEADLPVDPWLLGAWLGDGDASMVSICSGSQDLDYLISRVEGLGLSHRVNRYGSRAASVYVHGMRAVFSELGLLKNKHIPDRYLTASVAQRRQLLAGLMDSDGTVSDRQVTISMKNERLMRQVLQLVRSLGYRAGFGSRMARLNGRDCGLVYVVRFHTGWGESPFDMPRKRDGWEQATKTSVQNLRLNAIVAVEPVETVPVRCITVAHESSLYVAGEGFVPTHNTSLGQVTIDGGTYDIYRTTRVNQPSIVGTATFDQYWSVRTSKRTSGTVTVTDHFRAWANRGLNLGTIDQITLCVEGYQSSGSANITQNTFSQGSSSGSSGGSSGSTTTTRIECENMSLSGPYVSRITNPFNGIALYANGDTARATVNFPASRNYNFRLRGCGNNNNLARVDLRIDGRTVGTFYYQGTYPWEAPIDNVYVSAGSHTVEITVTADNGTWDVYADYLVIQ

SEQ ID NO: 2599 - protein, 773 aa, Artificial Sequence
  Synthetic Construct, AT-70 intein modified protein
MQTSITLTSNASGTFDGYYYELWKDTGNTTMTVYTQGRFSCQWSNINNALFRTGKKYNQNWQSLGTIRITYSATYNPNGNSYLCIYGWSTNPLVEFYIVESWGNWRPPGACVKNDSLIFTDRGLVTAAELAVGVPEEHAAFTEVGVDTSTGRATTNAVYNGGRSPTKRARLALGYELEATPEHPIRVLRDDALAWVRMDELHVGDRVALRRGSEVWGRSSLPEAFRWVKPKYAANLKLPKGLVLDEVAAEACGLLVSEGTLTKRLVTEFTNADADNVGFISRWAASIGIDLSRNGSDSIQYLLCSVVLREWLAWLGLDYTRAAGKCIPRAVRFGGRDIMRAFLRGLFDGDASVDPLKGVIEFCTASERMAREVQVALLGLGILASRHSRTVAGYEQLYWRVTVNDVATFEREVGFSSNWNRLRLREAVARAEGRCRNPNVDTVPINGLVERLYRTAQKQLSWSSQEGRIFGNYVHGEHAPSRAALERMVQRWGSECPTECLPIEAFLELPVAFLSVESIEDGEADVVDLSVPETHEFVANGVVCHNTSLGQVTIDGGTYDIYRTTRVNQPSIVGTATFDQYWSVRTSKRTSGTVTVTDHFRAWANRGLNLGTIDQITLCVEGYQSSGSANITQNTFSQGSSSGSSGGSSGSTTTTRIECENMSLSGPYVSRITNPFNGIALYANGDTARATVNFPASRNYNFRLRGCGNNNNLARVDLRIDGRTVGTFYYQGTYPWEAPIDNVYVSAGSHTVEITVTADNGTWDVYADYLVIQ

SEQ ID NO: 2600 - protein, 762 aa, Artificial Sequence
  Synthetic Construct, AT-71 intein modified protein
MQTSITLTSNASGTFDGYYYELWKDTGNTTMTVYTQGRFSCQWSNINNALFRTGKKYNQNWQSLGTIRITYSATYNPNGNSYLCIYGWSTNPLVEFYIVESWGNWRPPGACLPASTRILRADTGAESTLGELLASGEQPLVWSLDERMRMVARPMVKVFPSGRKEVFRLRLASGREVEATGNHPFLTVDGWIPLDRLTVGDRLATPRSVPEPVHTERMADAEVVLLAHMIGDGSCVRRQPVRYASIDEQNLAAVSEAAEHFGVTAVRDDYAAARVTTLRLPAPYRLSRGKRNPIAAWLDELGLFGLRSHEKFIPRRVFALPNDQVALFLRHLWATDGSVRWDSTYRQARVYYTSTSRRLIDDVAQLLLRLGVHGRIRRVTKPGYRDAWHLTIDGADNQTVFLRDVGVHGARGDAAQVALAELEPLVRNTNVDTVPNEVWNQVRHLLATKNITHREFSAAMGSRFCGSTMWKRSPSRSRLARVAAVLDDADIEMYATNDVFWDKIVEITSLGEQDVYDGTVPGTHNFVAQSISVHNTSLGQVTIDGGTYDIYRTTRVNQPSIVGTATFDQYWSVRTSKRTSGTVTVTDHFRAWANRGLNLGTIDQITLCVEGYQSSGSANITQNTFSQGSSSGSSGGSSGSTTTTRIECENMSLSGPYVSRITNPFNGIALYANGDTARATVNFPASRNYNFRLRGCGNNNNLARVDLRIDGRTVGTFYYQGTYPWEAPIDNVYVSAGSHTVEITVTADNGTWDVYADYLVIQ

SEQ ID NO: 2601 - protein, 650 aa, Artificial Sequence
  Synthetic Construct, AT-72 intein modified protein
MQTSITLTSNASGTFDGYYYELWKDTGNTTMTVYTQGRFSCQWSNINNALFRTGKKYNQNWQSLGTIRITYSATYNPNGNSYLCIYGWSTNPLVEFYIVESWGNWRPPGACFPAGTVVSGPSAEAATRRWFEGELVVFTTASGKQLSLTGNHPVLTRGGWVPANLLNEGDEVVRSTRPQGATPLVVPDHHQVPALIEDVWGSFAVNGLHRVPAAPEDFHGDGQRGEVDIVGPDRTLWCGHDAAIAQQREQQFFTRRTESSGLLVAESVAQLVDLWQAPHSGSSIGRSGLPFALIGGHGGGPVERGLTVAAGGYPGLHEALADYRPGDAVLPPQGVFAGSSEIGGDDCVIGKVDSTRWDAPALPFLVEGRAGYASRGKELFDRLTGQVELDRIVILRRVQWSGHVFSLTSSEGWHTGNSLIVSNTSLGQVTIDGGTYDIYRTTRVNQPSIVGTATFDQYWSVRTSKRTSGTVTVTDHFRAWANRGLNLGTIDQITLCVEGYQSSGSANITQNTFSQGSSSGSSGGSSGSTTTTRIECENMSLSGPYVSRITNPFNGIALYANGDTARATVNFPASRNYNFRLRGCGNNNNLARVDLRIDGRTVGTFYYQGTYPWEAPIDNVYVSAGSHTVEITVTADNGTWDVYADYLVIQ

SEQ ID NO: 2602 - protein, 746 aa, Artificial Sequence
  Synthetic Construct, AT-73 intein modified protein
MQTSITLTSNASGTFDGYYYELWKDTGNTTMTVYTQGRFSCQWSNINNALFRTGKKYNQNWQSLGTIRITYSATYNPNGNSYLCIYGWSTNPLVEFYIVESWGNWRPPGACFPAGTPVDTIDGPKPIESLRAGDRVLSHDGSYATVEKLIENTNDQPLVSISHFGHKEPIRCTPEHPILVWTDRDVETLIDGDGADPFNGFVWLAAQDVHPSDFIVATAPLETRERRVFDLMNHVGEGTYEEVDGLIRKVNTDARHRNKQRHRQGFVAVTRYVEESYDLGLILGWYLAEGHVSKRSGVEDVRPTGVHFTLGANEIERHVELGMAFKQVFGVDLVLHTNHSDHSTRMVCNSKIVASLLLSLAGTGYSTKRLAHEVMTADEDFQRGLLVGLFRGDGCTTTGGMVLDLVNQELIDQVQLLLRRLGIVSVVRTYTNQAGNPTGQVFVPGLPGTNEEFIFDVDKNLQNYTGRKGTKRTTYQVVHGRHVYGIRAVERTGETPRQVYNLHVEGTHTYTIRGAVVHNTSLGQVTIDGGTYDIYRTTRVNQPSIVGTATFDQYWSVRTSKRTSGTVTVTDHFRAWANRGLNLGTIDQITLCVEGYQSSGSANITQNTFSQGSSSGSSGGSSGSTTTTRIECENMSLSGPYVSRITNPFNGIALYANGDTARATVNFPASRNYNFRLRGCGNNNNLARVDLRIDGRTVGTFYYQGTYPWEAPIDNVYVSAGSHTVEITVTADNGTWDVYADYLVIQ

SEQ ID NO: 2603 - protein, 676 aa, Artificial Sequence
  Synthetic Construct, AT-74 intein modified protein
MQTSITLTSNASGTFDGYYYELWKDTGNTTMTVYTQGRFSCQWSNINNALFRTGKKYNQNWQSLGTIRITYSATYNPNGNSYLCIYGWSTNPLVEFYIVESWGNWRPPGACVDGDTSVTLASGDEKPIRDIVESTLEDPTEISDGFYQESDIDVLTTDGGAVAPGRATKVWKRQAPEKMYRIRTESGRELEVTPSHPLFVQSEGGLSPLVADDLSENDFVAVPRALPADDGDDFGQHVDDLGSVTARKTADAEAVRSEDAATTPDVIPNVGDQLRRIRTSLRLSQHDCGLPRSTYQQYERGDRNPSRSRLQTVLTAFERRIEQLSSLSDRVDDGDSDAIAAARDELNPSQASLASGMDATRTAIGDDERTEARPDGGAVADAERAVADALCRALAVADDVERLRSLADGDIGWDRIDSIEPVEPEDEWVYDLEVESTHSYLSNDVVSHNTSLGQVTIDGGTYDIYRTTRVNQPSIVGTATFDQYWSVRTSKRTSGTVTVTDHFRAWANRGLNLGTIDQITLCVEGYQSSGSANITQNTFSQGSSSGSSGGSSGSTTTTRIECENMSLSGPYVSRITNPFNGIALYANGDTARATVNFPASRNYNFRLRGCGNNNNLARVDLRIDGRTVGTFYYQGTYPWEAPIDNVYVSAGSHTVEITVTADNGTWDVYADYLVIQ

SEQ ID NO: 2604 - protein, 829 aa, Artificial Sequence
  Synthetic Construct, AT-75 intein modified protein
MQTSITLTSNASGTFDGYYYELWKDTGNTTMTVYTQGRFSCQWSNINNALFRTGKKYNQNWQSLGTIRITYSATYNPNGNSYLCIYGWSTNPLVEFYIVESWGNWRPPGASIPADEQVVVRRNGETELTEIGPLVDSLMDSRETRSFDDHEVTLAPDGIEVPSLSSEETVEWKPIEEVSRHETPDELLRFELESGRSIRATKAHSFVTRQENEVVPVAGEELEAGDWLPVVASLDATDTQETVDLRKYLPAGDYWYTSVLADGGAEAVPGGPDQLRNKRAALEAGELAEHTAYPVQGTVGLPEQFPLDEETGFFVGAWLAEGSLADHYVSISNVDAAFQSRIRSFAERFDLTVNEYENDSGFAAGYDIRLNGTILSDFLRAACTDDGEKSIPGFAIGANEAFLKGLLQGYFSGDGNVGTNAIRSSSTSDRLTAGVGLLLARFDVYATLGQQEDSRTLRVPKKHVSRFDNRIGMVGERGAELEALAESADSDGPDATDQIPNFGDALEAVAEAADIPQRQVNSATKRQRIDRSRLARLVAAAEAELDGEQSELDALRQAVTGDVVWDRIESIETVESDHEYVYDVSVEGLETFTTADGVVTHNTSLGQVTIDGGTYDIYRTTRVNQPSIVGTATFDQYWSVRTSKRTSGTVTVTDHFRAWANRGLNLGTIDQITLCVEGYQSSGSANITQNTFSQGSSSGSSGGSSGSTTTTRIECENMSLSGPYVSRITNPFNGIALYANGDTARATVNFPASRNYNFRLRGCGNNNNLARVDLRIDGRTVGTFYYQGTYPWEAPIDNVYVSAGSHTVEITVTADNGTWDVYADYLVIQ

SEQ ID NO: 2605 - protein, 659 aa, Artificial Sequence
  Synthetic Construct, AT-76 intein modified protein
MQTSITLTSNASGTFDGYYYELWKDTGNTTMTVYTQGRFSCQWSNINNALFRTGKKYNQNWQSLGTIRITYSATYNPNGNSYLCIYGWSTNPLVEFYIVESWGNWRPPGACFIGDTLIPLADGKSYRIKDLMDWGTEFIVYACTPTGKIVAAQATAKLTRRNAPLVKVILDNGEEIICTPDHQFMLRDGTYKEAQLLQAETSLMPFYSKTDKDGYTLITQPYSSRWQKAHWIIARSGLLGKVPRFEGQKTFIHHQNFDESDNRPENLEFMGNRDHSAYHRSLVERNQHWHSAEFEEKRVASLAQKAKTSEGYQYYAERGTRNIFQYMEQQPEHFKNAVAGNGNRGKQYLVEYNKTEKGRGKSQEIANRYYTCEICGVDVKTPIGLHNHRRKEHQCNHKVVAVNLLNYTEDVYCLTVPEYHNFALKAGVFVHNTSLGQVTIDGGTYDIYRTTRVNQPSIVGTATFDQYWSVRTSKRTSGTVTVTDHFRAWANRGLNLGTIDQITLCVEGYQSSGSANITQNTFSQGSSSGSSGGSSGSTTTTRIECENMSLSGPYVSRITNPFNGIALYANGDTARATVNFPASRNYNFRLRGCGNNNNLARVDLRIDGRTVGTFYYQGTYPWEAPIDNVYVSAGSHTVEITVTADNGTWDVYADYLVIQ

SEQ ID NO: 2606 - protein, 689 aa, Artificial Sequence
  Synthetic Construct, AT-77 intein modified protein
MQTSITLTSNASGTFDGYYYELWKDTGNTTMTVYTQGRFSCQWSNINNALFRTGKKYNQNWQSLGTIRITYSATYNPNGNSYLCIYGWSTNPLVEFYIVESWGNWRPPGAALALDTALPTPSGWTTMGDVQVGDQLYDAHGRPTTVVAATEVLTGRPCYEVEFSDGSRIVADAQHQWLTESRAARKSRWAADKQYNRARNQNIVASVVTTEAIAGTLRVGADQRANHAVLTADPLSGSDVDLPIPPYVLGAWLGDGHSASARITCETPEIPMYLEACGLRVDHQGAMLYSLKFPDGDPRGSVQGVLRTIGVLNDKHIPADYLRASEGQRRDLLAGLMDTDGTVVRGVGSCQFAVTNKRLADDVYELVVSLGYKCGRTTRRVQGRSPETSTCHILNFSTVDDVFRLERKHLLHKEERPVTRARIARRYITAVRPIESVPVRCVEVDNTEHLYLAGESMIPTHNTSLGQVTIDGGTYDIYRTTRVNQPSIVGTATFDQYWSVRTSKRTSGTVTVTDHFRAWANRGLNLGTIDQITLCVEGYQSSGSANITQNTFSQGSSSGSSGGSSGSTTTTRIECENMSLSGPYVSRITNPFNGIALYANGDTARATVNFPASRNYNFRLRGCGNNNNLARVDLRIDGRTVGTFYYQGTYPWEAPIDNVYVSAGSHTVEITVTADNGTWDVYADYLVIQ

SEQ ID NO: 2607 - protein, 744 aa, Artificial Sequence
  Synthetic Construct, AT-78 intein modified protein
MQTSITLTSNASGTFDGYYYELWKDTGNTTMTVYTQGRFSCQWSNINNALFRTGKKYNQNWQSLGTIRITYSATYNPNGNSYLCIYGWSTNPLVEFYIVESWGNWRPPGACLPEDALVHTAKGLVPIRDVQVGDLVQTPLGFRRVVDKFDQGFQDVYEIETNATYPRATLNHRQAVLEDAKGGIVWKHIASLEAGDRLLHNKQVLPGTVTHLPADFTESRPSHSRTAKSFVVPELTAEVAWLIGFTHGDGYVALGRNKYDKPYGRVEWSMNSLDAEVTSRIQAKIDAALALFGLSAVHSITKGENTAKSICSSIRLAEYFHRHIKQPNIPLTVPSFILQGSVDIRAAYLAGLMDSDGAVNNRPPHLITSVYRSFIRQVSVVLSSLGIAGRLTTTYPQNSNWQVKYNLTIPALKERYNALISPHSAKGELRQGLKMYGFTVPGAVMRETYTYSEMREMGFQGSRTVDANYERYVAEADISLDIPVTVKGLGSYDHVQTYDIEVDEAHCFYCDGYLTHNTSLGQVTIDGGTYDIYRTTRVNQPSIVGTATFDQYWSVRTSKRTSGTVTVTDHFRAWANRGLNLGTIDQITLCVEGYQSSGSANITQNTFSQGSSSGSSGGSSGSTTTTRIECENMSLSGPYVSRITNPFNGIALYANGDTARATVNFPASRNYNFRLRGCGNNNNLARVDLRIDGRTVGTFYYQGTYPWEAPIDNVYVSAGSHTVEITVTADNGTWDVYADYLVIQ

SEQ ID NO: 2608 - protein, 501 aa, Artificial Sequence
  Synthetic Construct, AT-79 intein modified protein
MQTSITLTSNASGTFDGYYYELWKDTGNTTMTVYTQGRFSCQWSNINNALFRTGKKYNQNWQSLGTIRITYSATYNPNGNSYLCIYGWSTNPLVEFYIVESWGNWRPPGACVDYETEVVLGNGERKKIGEIVERAIEEAEKNGKLGRVDDGFYAPIDIEVYSLDLETLKVRKARANIAWKRTAPKKMMLVKTRGGKRIRVTPTHPFFVLEEGKVAMRKARDLEEGNKIATIEGLSVSWDEVAEILEYEPKDPWVYDLQVPGYHNFLANGIFVHNTSLGQVTIDGGTYDIYRTTRVNQPSIVGTATFDQYWSVRTSKRTSGTVTVTDHFRAWANRGLNLGTIDQITLCVEGYQSSGSANITQNTFSQGSSSGSSGGSSGSTTTTRIECENMSLSGPYVSRITNPFNGIALYANGDTARATVNFPASRNYNFRLRGCGNNNNLARVDLRIDGRTVGTFYYQGTYPWEAPIDNVYVSAGSHTVEITVTADNGTWDVYADYLVIQ

SEQ ID NO: 2609 - protein, 605 aa, Artificial Sequence
  Synthetic Construct, AT-80 intein modified protein
MQTSITLTSNASGTFDGYYYELWKDTGNTTMTVYTQGRFSCQWSNINNALFRTGKKYNQNWQSLGTIRITYSATYNPNGNSYLCIYGWSTNPLVEFYIVESWGNWRPPGACVAPETLIITENGTKEIGEVVERWMKELGEIEYDDGISYSPAFEKVASLNGGKVKMLPVRRVWKLRSPGKMIKIRSESGKQITVTPETKLLTIIDGSLEWVEARKLKKGNYVAVVNKERSIVPIGDFLAKLLKFYGVELNLNEAVERDQARKLLETLKSKGLSDVTIEIPEKLRRFIKCDRVRYVDLVEMLSSMEGELKEEVMLLLSDVGDIHEVIQERLKEIGKILESDASWERIAEVEEVVRDGHVYDLTVEGSHSFIANGFVVHNTSLGQVTIDGGTYDIYRTTRVNQPSIVGTATFDQYWSVRTSKRTSGTVTVTDHFRAWANRGLNLGTIDQITLCVEGYQSSGSANITQNTFSQGSSSGSSGGSSGSTTTTRIECENMSLSGPYVSRITNPFNGIALYANGDTARATVNFPASRNYNFRLRGCGNNNNLARVDLRIDGRTVGTFYYQGTYPWEAPIDNVYVSAGSHTVEITVTADNGTWDVYADYLVIQ

SEQ ID NO: 2610 - protein, 731 aa, Artificial Sequence
  Synthetic Construct, AT-81 intein modified protein
MQTSITLTSNASGTFDGYYYELWKDTGNTTMTVYTQGRFSCQWSNINNALFRTGKKYNQNWQSLGTIRITYSATYNPNGNSYLCIYGWSTNPLVEFYIVESWGNWRPPGACLLPDEKVVVPSVGFVTLKELFETASKVVERDDEKEIRELDERITSVNGDGKTGLVKASYVWKVRHKGKVIRVKLKNWHGVTVTPEHPFLTTKGWKRADQLRPGDYVAVPRFIHGNEDEKIFLSYVKVKKSGEEWKEYFYLAGRKGNIDVNLLFVAPKRYVVEFLRGYFEERSEVKGESVIVEARELVEPLSLALLRFGIFSKIQGSKLIVTGKRNLEAFKDYIGFKDEREKALEEAIEKVKGSEVYPIFEEIRRLRLLFGFTREELGSYAKYENSEAPTYEELMEILDFIERGSPSLSKKIAILEGKLKAELRVLEEEGLIKDGKLTPLGRELLEVWRNREFDSKDVDYIRNIAETLVFIPVENVEEEEYDGYVYDLTTETHNFIANGILVHNTSLGQVTIDGGTYDIYRTTRVNQPSIVGTATFDQYWSVRTSKRTSGTVTVTDHFRAWANRGLNLGTIDQITLCVEGYQSSGSANITQNTFSQGSSSGSSGGSSGSTTTTRIECENMSLSGPYVSRITNPFNGIALYANGDTARATVNFPASRNYNFRLRGCGNNNNLARVDLRIDGRTVGTFYYQGTYPWEAPIDNVYVSAGSHTVEITVTADNGTWDVYADYLVIQ

SEQ ID NO: 2611 - protein, 533 aa, Artificial Sequence
  Synthetic Construct, AT-82 intein modified protein
MQTSITLTSNASGTFDGYYYELWKDTGNTTMTVYTQGRFSCQWSNINNALFRTGKKYNQNWQSLGTIRITYSATYNPNGNSYLCIYGWSTNPLVEFYIVESWGNWRPPGAALYYFSEIQLPNGKEFIGKLVDELFEKYHDKIGKYKDMEYVELNEEDTFEVISIGPDLSARRHKVTHVWRRKVKDGEKLVKIRTASGKELVLTQDHPVFVLLGRDVARRDAGNVKVGDEIAVLNTRPDFSVLSPPAMPELLSEPFNYELSSIGDVAWDEVVEVDEIDAKGLGVEYLYDLTVDINHNYVANGIVVSNTSLGQVTIDGGTYDIYRTTRVNQPSIVGTATFDQYWSVRTSKRTSGTVTVTDHFRAWANRGLNLGTIDQITLCVEGYQSSGSANITQNTFSQGSSSGSSGGSSGSTTTTRIECENMSLSGPYVSRITNPFNGIALYANGDTARATVNFPASRNYNFRLRGCGNNNNLARVDLRIDGRTVGTFYYQGTYPWEAPIDNVYVSAGSHTVEITVTADNGTWDVYADYLVIQ

SEQ ID NO: 2612 - protein, 670 aa, Artificial Sequence
  Synthetic Construct, AT-83 intein modified protein
MQTSITLTSNASGTFDGYYYELWKDTGNTTMTVYTQGRFSCQWSNINNALFRTGKKYNQNWQSLGTIRITYSATYNPNGNSYLCIYGWSTNPLVEFYIVESWGNWRPPGACFSGEETVVIRENGEVKVLRLKDFVEKALEKPSGEGLDGDVKVVYHDFRNENVEVLTKDGFTKLLYANKRIGKQKLRRVVNLEKDYWFALTPDHKVYTTDGLKEAGEITEKDELISVPITVFDCEDEDLKKIGLLPLTSDDERLRKIATLMGILFNGGSIDEGLGVLTLKSERSVIEKFVITLKELFGKFEYEIIKEENTILKTRDPRIIKFLVGLGAPIEGKDLKMPWWVKLKPSLFLAFLEGFRAHIVEQLVDDPNKNLPFFQELSWYLGLFGIKADIKVEEVGDKHKIIFDAGRLDVDKQFIETWEDVEVTYNLTTEKGNLLANGLFVKNTSLGQVTIDGGTYDIYRTTRVNQPSIVGTATFDQYWSVRTSKRTSGTVTVTDHFRAWANRGLNLGTIDQITLCVEGYQSSGSANITQNTFSQGSSSGSSGGSSGSTTTTRIECENMSLSGPYVSRITNPFNGIALYANGDTARATVNFPASRNYNFRLRGCGNNNNLARVDLRIDGRTVGTFYYQGTYPWEAPIDNVYVSAGSHTVEITVTADNGTWDVYADYLVIQ

SEQ ID NO: 2613 - protein, 792 aa, Artificial Sequence
  Synthetic Construct, AT-84 intein modified protein
MQTSITLTSNASGTFDGYYYELWKDTGNTTMTVYTQGRFSCQWSNINNALFRTGKKYNQNWQSLGTIRITYSATYNPNGNSYLCIYGWSTNPLVEFYIVESWGNWRPPGACFPPTEEAVFKFGDKVKIATFEEVAKNFKFEHKVEIDGFKGEYSIPNDLYVLTFNDGKAEWTRVTKFLRRKHEGKIRVIKTKTGRTIRTTPEHKFFVYKDGELVKKRADELEPGDELVLLWRFESEETLTEINLLEAFKDLPQEEKEKVYVRGIKDLDLTPLKEKYGDKVYYWARQDSMPLSVFYELNVDLDKEFRLGRDATTYELPSKLKITPSLAKLIGYFVSDGNYSDKDLRITVGHEDVEKEIVNILEELGLPYSFLEWEGKTKQIVIGSRLLRLVFKHVFKIPEGAPNKRLPEGFLSFPFEAKVALLSGLFNGDGYVVRGEHHLSIGYASTSKGLIRDILYLLASLGIFARVYRVPKEKMKGANHDLYKLYIAGTDLVRLVELLELREGHREKLGEIGNRKPARVKKIADFYIDVVDEVSEEEYSGYVYDLEVENEGHSFVAADGILVSNTSLGQVTIDGGTYDIYRTTRVNQPSIVGTATFDQYWSVRTSKRTSGTVTVTDHFRAWANRGLNLGTIDQITLCVEGYQSSGSANITQNTFSQGSSSGSSGGSSGSTTTTRIECENMSLSGPYVSRITNPFNGIALYANGDTARATVNFPASRNYNFRLRGCGNNNNLARVDLRIDGRTVGTFYYQGTYPWEAPIDNVYVSAGSHTVEITVTADNGTWDVYADYLVIQ

SEQ ID NO: 2614 - protein, 522 aa, Artificial Sequence
  Synthetic Construct, AT-85 intein modified protein
MQTSITLTSNASGTFDGYYYELWKDTGNTTMTVYTQGRFSCQWSNINNALFRTGKKYNQNWQSLGTIRITYSATYNPNGNSYLCIYGWSTNPLVEFYIVESWGNWRPPGACFPGDTRILVQIDGVPQKITLRELYELFEDERYENMVYVRKKPKREIKVYSIDLETGKVVLTDIEDVIKAPATDHLIRFELEDGRSFETTVDHPVLVYENGRFIEKRAFEVKEGDKVLVSELELVEQSSSSQDNPKNENLGSPEHDQLLEIKNIKYVRANDDFVFSLNAKKYHNVIINENIVTHQTSLGQVTIDGGTYDIYRTTRVNQPSIVGTATFDQYWSVRTSKRTSGTVTVTDHFRAWANRGLNLGTIDQITLCVEGYQSSGSANITQNTFSQGSSSGSSGGSSGSTTTTRIECENMSLSGPYVSRITNPFNGIALYANGDTARATVNFPASRNYNFRLRGCGNNNNLARVDLRIDGRTVGTFYYQGTYPWEAPIDNVYVSAGSHTVEITVTADNGTWDVYADYLVIQ

SEQ ID NO: 2615 - protein, 836 aa, Artificial Sequence
  Synthetic Construct, AT-86 intein modified protein
MQTSITLTSNASGTFDGYYYELWKDTGNTTMTVYTQGRFSCQWSNINNALFRTGKKYNQNWQSLGTIRITYSATYNPNGNSYLCIYGWSTNPLVEFYIVESWGNWRPPGACLTGDAKVIANGELTTIGELVERISNGKLGPTPVRGLTVLGIDEDGKLVELPVEYVYKDKTSELVKIRTRLGRELKVTPYHPLLVNRRNGKIEWVKAEELKPGDRLAIPSFLPAMLNDNPLAEWLGYFFGNGYTDSEERVVFESKSKELRKRFMELTRKLFQDAEIKEDSGKVYVSSSEVKRLVKSLNKDSIPEQAWKGLRSFLRAYFDCNAEIKDKIIVSTAGKEIAEQISYALAGLGIVAEVDDKGSVIISDPENVSRFLDEIGFSVEEKKEEAKALIKKSTLNLGIYVDKELISYVREKLKLSFYENETMWSPEKAREIAWKLMKEIYYRLDELERFKKALSKSVIIDWSEVEKKKEEISEKTGISVNEILEYAKGKRKPSLEEYVKIAKALGVELKETLEAIFTFGKKYLGYVISDEIETLEEVRKEELKRLKELLNDEKLKKGVAYLIFLAQNELLWDEIIEVEKLKGDFVIYDLHVPKYHNFIGGNLPTVLHNTSLGQVTIDGGTYDIYRTTRVNQPSIVGTATFDQYWSVRTSKRTSGTVTVTDHFRAWANRGLNLGTIDQITLCVEGYQSSGSANITQNTFSQGSSSGSSGGSSGSTTTTRIECENMSLSGPYVSRITNPFNGIALYANGDTARATVNFPASRNYNFRLRGCGNNNNLARVDLRIDGRTVGTFYYQGTYPWEAPIDNVYVSAGSHTVEITVTADNGTWDVYADYLVIQ

SEQ ID NO: 2616 - protein, 945 aa, Artificial Sequence
  Synthetic Construct, AT-87 intein modified protein
MQTSITLTSNASGTFDGYYYELWKDTGNTTMTVYTQGRFSCQWSNINNALFRTGKKYNQNWQSLGTIRITYSATYNPNGNSYLCIYGWSTNPLVEFYIVESWGNWRPPGACVTGDTKVYTPDEREVKIRDFMNYFENGLIKEVSNRIGRDTVIAAVSFNSRIVGHPVYRLTLESGRIIEATGDHMFLTPEGWKQTYDIKEGSEVLVKPTLEGTPYEPDPRVIIDIKEFYNFLEKIEREHNLKPLKEAKTFRELITKDKEKILRRALELRAEIENGLTKREAEILELISADTWIPRAELEKKARISRTRLNQILQRLEKKGYIERRIEGRKQFVRKIRNGKILRNAMDIKRILEEEFGIKISYTTVKKLLSGNVDGMAYRILKEVKEKWLVRYDDEKAGILARVVGFILGDGHLARNGRIWFNSSKEELEMLANDLRKLGLKPSEIIERDSSSEIQGRKVKGRIYMLYVDNAAFHALLRFWKVEVGNKTKKGYTVPEWIKKGNLFVKREFLRGLFGADGTKPCGKRYNFNGIKLEIRAKKESLERTVEFLNDVADLLREFDVDSKITVSPTKEGFIIRLIVTPNDANYLNFLTRVGYAYAKDTYARLVGEYIRIKLAYKNIILPGIAEKAIELATVTNSTYAAKVLGVSRDFVVNRLKGTQIGITRDFMTFEEFMKERVLNGYVIEKVIKKEKLGYLDVYDVTCARDHSFISNGLVSHNTSLGQVTIDGGTYDIYRTTRVNQPSIVGTATFDQYWSVRTSKRTSGTVTVTDHFRAWANRGLNLGTIDQITLCVEGYQSSGSANITQNTFSQGSSSGSSGGSSGSTTTTRIECENMSLSGPYVSRITNPFNGIALYANGDTARATVNFPASRNYNFRLRGCGNNNNLARVDLRIDGRTVGTFYYQGTYPWEAPIDNVYVSAGSHTVEITVTADNGTWDVYADYLVIQ

SEQ ID NO: 2617 - protein, 736 aa, Artificial Sequence
  Synthetic Construct, AT-88 intein modified protein
MQTSITLTSNASGTFDGYYYELWKDTGNTTMTVYTQGRFSCQWSNINNALFRTGKKYNQNWQSLGTIRITYSATYNPNGNSYLCIYGWSTNPLVEFYIVESWGNWRPPGACIDGNAKIIFENEGEEHLTTMAEMYERYRHLGEFYDENYNRWGIDVSSVPIYVKSFDPETRRVVKGRVRAIWKYELGEEIPKYEIRTHKGTKILTSPWHPFFVLTPDFEVIEKRADELKVGDILIGGMPDGEDHELIFDYWLAGFIAGNGNLDDSEREYKARELLDGIENGIPPKILRKGKNAVLSFITGLFDAEGHVNDKSGIELGMVNKKLIEAVTHYLNSLGIKARMREKRRKNGIDYIMHVEEYSSLLRFYELIGKHLQNNEKKEKLEILLHKHNGGAFDLSLNFNAFKEWASRYGVEFKTNGNQILAIIGNEKVSLGQWHARGHVSKAVLVKMLRKLYEVTKNDEVKEMLHLIESLEVVKEITITNEPKTFYDLTVDKYQNYLAGENGMIFVHNTSLGQVTIDGGTYDIYRTTRVNQPSIVGTATFDQYWSVRTSKRTSGTVTVTDHFRAWANRGLNLGTIDQITLCVEGYQSSGSANITQNTFSQGSSSGSSGGSSGSTTTTRIECENMSLSGPYVSRITNPFNGIALYANGDTARATVNFPASRNYNFRLRGCGNNNNLARVDLRIDGRTVGTFYYQGTYPWEAPIDNVYVSAGSHTVEITVTADNGTWDVYADYLVIQ

SEQ ID NO: 2618 - protein, 775 aa, Artificial Sequence
  Synthetic Construct, AT-89 intein modified protein
MQTSITLTSNASGTFDGYYYELWKDTGNTTMTVYTQGRFSCQWSNINNALFRTGKKYNQNWQSLGTIRITYSATYNPNGNSYLCIYGWSTNPLVEFYIVESWGNWRPPGACFTGDTRILTEKGLIPIEEIVHETGKKPKVVTHAGLKDIIETYDNGEMEVFRVTTEDGYELKVTGDHKFLVFDENGNPTLKPLKELKVGDYVYILAPEWKGGEYVELDTNIELKGKGYNVNLPSKLDEKLAYLLGIIYADGHIRHYFENGKRKNSKIEIYLHQDETEIKEKVKRYFKEIFGIEPKEFLKEEQHKVILVIPSTKIVKFLEINGLLKDKSENIRVPEAIFRSRPSVIAAFLAGFFDGDGSIDQNYRIAFKSISREFIKEAQLLFLALGIVTSIQEYNPPNPNNKTVYTLRVQTRDMKIKAFNVLKESVKLSKIMKEAISKLEENGKNKKFSFPFNAIYHIKDPKIRAKIQRDYKILSYNSKVTHRAFINNILKLKEELGLDDEEVKYFEMLSKLYPTKITKIEPLGKAHVYDLQVEDVHLLTGNGIYTSNTSLGQVTIDGGTYDIYRTTRVNQPSIVGTATFDQYWSVRTSKRTSGTVTVTDHFRAWANRGLNLGTIDQITLCVEGYQSSGSANITQNTFSQGSSSGSSGGSSGSTTTTRIECENMSLSGPYVSRITNPFNGIALYANGDTARATVNFPASRNYNFRLRGCGNNNNLARVDLRIDGRTVGTFYYQGTYPWEAPIDNVYVSAGSHTVEITVTADNGTWDVYADYLVIQ

SEQ ID NO: 2619 - protein, 719 aa, Artificial Sequence
  Synthetic Construct, AT-90 intein modified protein
MQTSITLTSNASGTFDGYYYELWKDTGNTTMTVYTQGRFSCQWSNINNALFRTGKKYNQNWQSLGTIRITYSATYNPNGNSYLCIYGWSTNPLVEFYIVESWGNWRPPGACVVGETRILTPEGYIKAEELFKLAKERGKMEAIAVEGIAEGGEPYAYSLEILLPGDKQVKYETVHGNAVEVADPVSVPAYVWKVGMKEVARVRTKEGYEITATLDHKLMTPEGWKEIKDLKPGDKILLPRFEVEEDFGSESIGEDLAFVLGWFIGDGYLNVKDKRAWFYFNAEKEEEIAWKIREILAKRFEIKAEPHRYGNQIKLGVRGKAYEWLESIVKTNEKRIPEIVYRLKPNEIASFLRGLFSADGYVDNDMAIRLTSKSRELLREVQDLLLLFGILSKIYERPYKREFKYTTKDGEERTYTTEGYYELVIANYSRKIFAERIGLEGYKMEKLSLEKIKVDEPIVTVESVEILGKKLVYDFTVPEHHMYISNGFMSHNTSLGQVTIDGGTYDIYRTTRVNQPSIVGTATFDQYWSVRTSKRTSGTVTVTDHFRAWANRGLNLGTIDQITLCVEGYQSSGSANITQNTFSQGSSSGSSGGSSGSTTTTRIECENMSLSGPYVSRITNPFNGIALYANGDTARATVNFPASRNYNFRLRGCGNNNNLARVDLRIDGRTVGTFYYQGTYPWEAPIDNVYVSAGSHTVEITVTADNGTWDVYADYLVIQ

SEQ ID NO: 2620 - protein, 773 aa, Artificial Sequence
  Synthetic Construct, AT-91 intein modified protein
MQTSITLTSNASGTFDGYYYELWKDTGNTTMTVYTQGRFSCQWSNINNALFRTGKKYNQNWQSLGTIRITYSATYNPNGNSYLCIYGWSTNPLVEFYIVESWGNWRPPGACLAPGSKVLTEHGYWLKVEELPEKFKLQGVKVYNLDEGHNDTSNVAFVAEREVETGEMAVRVTTESGRIIEGSEDHPVLTPEGYVYLGNLKEGNLVIVYPFEGVEYEERKGVILDEDAFKDEDPQVLSFLREKGLVPLRWDDPRIGTIARILGFAFGDGYLGEMGGRLTLTFYGKEETLRELKKDLERLGISANLYVRESIETTSGHSEGKSLSIELRVTSRSFALFLEKLGMPRGKKTEKAYRVPGWILEAPLWVKRNFLAGLFAADGSIVEFKGNTPLPINLTQSKSDELAENLVEFLGDVAKLLAEFGIETTLYEVKSKKGVTYRLSIVGEDSIRTFVERINYEYDPEKKVKGLIAAAYLKLKERIVKEAHEAVKDDFPTFEEFAKERGYEGGFVAEKVVKVERVKPEYTKFYDIGVYHEAHNFIANGIVVHNTSLGQVTIDGGTYDIYRTTRVNQPSIVGTATFDQYWSVRTSKRTSGTVTVTDHFRAWANRGLNLGTIDQITLCVEGYQSSGSANITQNTFSQGSSSGSSGGSSGSTTTTRIECENMSLSGPYVSRITNPFNGIALYANGDTARATVNFPASRNYNFRLRGCGNNNNLARVDLRIDGRTVGTFYYQGTYPWEAPIDNVYVSAGSHTVEITVTADNGTWDVYADYLVIQ

SEQ ID NO: 2621 - protein, 766 aa, Artificial Sequence
  Synthetic Construct, AT-92 intein modified protein
MQTSITLTSNASGTFDGYYYELWKDTGNTTMTVYTQGRFSCQWSNINNALFRTGKKYNQNWQSLGTIRITYSATYNPNGNSYLCIYGWSTNPLVEFYIVESWGNWRPPGACVDGDTLVLTKEFGLIKIKDLYKILDGKGKKTVNGNEEWTELERPITLYGYKDGKIVEIKATHVYKGFSAGMIEIRTRTGRKIKVTPIHKLFTGRVTKNGLEIREVMAKDLKKGDRIIVAKKIDGGERVKLNIRVEQKRGKKIRIPDVLDEKLAEFLGYLIADGTLKPRTVAIYNNDESLLRRANELANELFNIEGKIVKGRTVKALLIHSKALVEFFSKLGVPRNKKARTWKVPKELLISEPEVVKAFIKAYIMCDGYYDENKGEIEIVTASEEAAYGFSYLLAKLGIYAIIREKIIGDKVYYRVVISGESNLEKLGIERVGRGYTSYDIVPVEVEELYNALGRPYAELKRAGIEIHNYLSGENMSYEMFRKFAKFVGMEEIAENHLTHVLFDEIVEIRYISEGQEVYDVTTETHNFIGGNMPTLLHNTSLGQVTIDGGTYDIYRTTRVNQPSIVGTATFDQYWSVRTSKRTSGTVTVTDHFRAWANRGLNLGTIDQITLCVEGYQSSGSANITQNTFSQGSSSGSSGGSSGSTTTTRIECENMSLSGPYVSRITNPFNGIALYANGDTARATVNFPASRNYNFRLRGCGNNNNLARVDLRIDGRTVGTFYYQGTYPWEAPIDNVYVSAGSHTVEITVTADNGTWDVYADYLVIQ

SEQ ID NO: 2622 - protein, 986 aa, Artificial Sequence
  Synthetic Construct, AT-93 intein modified protein
MQTSITLTSNASGTFDGYYYELWKDTGNTTMTVYTQGRFSCQWSNINNALFRTGKKYNQNWQSLGTIRITYSATYNPNGNSYLCIYGWSTNPLVEFYIVESWGNWRPPGACLSPDTMVRTTNGDKPIRDIAVGDQLFDHEDRPVQCLAAEAIQTSRMMKVTYTGYNSVSKSSFTCTPDHIMTLVAYGVKPFRHSNSNRVTWWTRCDRTELGADAVEIKWDAAMHDLYTEYREQLGRRPTDAEVRKYLKAITSTRVVPDSEDDDSQRVEETYQSPVLIKLLAKLKAMDVDVDGEDESVVLMLLQQHMEDYLEHMIPEPEDISDEDNDDLIIDLDTNRKRKIGTISTLSSRISDKTFRQSPSIKSSPVNSQQQSQNEASQSTVPTYASVLTEDDHREMFAPVRSKLAVRDPKCKCQNLSCKGLRRVSTVFETSEQADLALELLSGDHYRVVDPCAVQDMEVFTMTLEEYQATCTAPMTQHKSKLRLYRSPLRFQPYQGSVSPVPIDPFWFGFWLGNGTKNNSEITSTDPEVEVYTQALVDRLNRDSIPPGKAPLKVSKYKIDIGTKHVYKGEEIKTTKVAHRLRVMSTVSNLDKTHWNPVHDGLRELGLLGDKSGGIPDCYMNADENTRLAVLAGLIESDGWLSHGLNCYGFGQYTYELKKLVEDARKLALSCGIQCNPIFERKNGKDRPEPGWFFYMGRGVEKFQPHLLLPRKRMTIPFTTSKNRDVRPFDVEDAGDGEFRLIEVSGELFQLADRTVVHNTSLGQVTIDGGTYDIYRTTRVNQPSIVGTATFDQYWSVRTSKRTSGTVTVTDHFRAWANRGLNLGTIDQITLCVEGYQSSGSANITQNTFSQGSSSGSSGGSSGSTTTTRIECENMSLSGPYVSRITNPFNGIALYANGDTARATVNFPASRNYNFRLRGCGNNNNLARVDLRIDGRTVGTFYYQGTYPWEAPIDNVYVSAGSHTVEITVTADNGTWDVYADYLVIQ

SEQ ID NO: 2623 - protein, 910 aa, Artificial Sequence
  Synthetic Construct, AT-94 intein modified protein
MQTSITLTSNASGTFDGYYYELWKDTGNTTMTVYTQGRFSCQWSNINNALFRTGKKYNQNWQSLGTIRITYSATYNPNGNSYLCIYGWSTNPLVEFYIVESWGNWRPPGACLAKGTLLLRYDGTKVEVENVREGDLLLGPDGGPRRAFNIVGGRDRLYRIKMEGGKEDLVVTPNHILVLHREKRDGVDKVYARPFALPLLQEDATDDGEDLSEISAIEHFDTMEITAADFASLDPNERKLYRLFTSPGYELNGRPVPIDPYFLGLWLGDRSRTKSSIYTNHEEEIREFIADHAAELDLQLVSYVSNRPSLAAMKNGNQLPLRHQARQTIRKQRIAAKSITQPGGARSSSYPATNGGLSSNTVTSLHSRERHPLSESSAAATMNLLPRSTSVSTSVAAQPKSSMSTFITDAILPSESSNISVISDSGIEISKSSKMLSEEEADLDLFDIDSEDEEIEDLDEKKNVSNVDEFPKRRRIHYLRTGCRTYGELCPGEEDQILEDIVGRPDGTTSVESLLLALEALGLHTCGTNDSGSDKKRIPSVYMKNSRAVRLALLAGLIDSGGWYVDSENTFGFSQTEDSNSTLIWDVVTLARSLGFSVSTKRRMTHKPTRTQHKAQEFAQISGNVAEIPSLLARERGVERPISQAHSFKIKDIQLETEATEWAGFRVDQDQLYLRHDFLVLHNTSLGQVTIDGGTYDIYRTTRVNQPSIVGTATFDQYWSVRTSKRTSGTVTVTDHFRAWANRGLNLGTIDQITLCVEGYQSSGSANITQNTFSQGSSSGSSGGSSGSTTTTRIECENMSLSGPYVSRITNPFNGIALYANGDTARATVNFPASRNYNFRLRGCGNNNNLARVDLRIDGRTVGTFYYQGTYPWEAPIDNVYVSAGSHTVEITVTADNGTWDVYADYLVIQ

SEQ ID NO: 2624 - protein, 498 aa, Artificial Sequence
  Synthetic Construct, AT-95 intein modified protein
MQTSITLTSNASGTFDGYYYELWKDTGNTTMTVYTQGRFSCQWSNINNALFRTGKKYNQNWQSLGTIRITYSATYNPNGNSYLCIYGWSTNPLVEFYIVESWGNWRPPGACLAKGTRLLRYDGTEINVEDVREGDQLLGPDGEPRRAFNIVSGIDRLYRVKIGGEKEDLVVTPNHILVFYREGPSDGPENAERQTVEITAAEFATLSTEERSLYSAFTSPAVEKGAEGSAAQMHSFKVEDISLESEKTEWAGFRVDKDQLYLRHDYLVLHNTSLGQVTIDGGTYDIYRTTRVNQPSIVGTATFDQYWSVRTSKRTSGTVTVTDHFRAWANRGLNLGTIDQITLCVEGYQSSGSANITQNTFSQGSSSGSSGGSSGSTTTTRIECENMSLSGPYVSRITNPFNGIALYANGDTARATVNFPASRNYNFRLRGCGNNNNLARVDLRIDGRTVGTFYYQGTYPWEAPIDNVYVSAGSHTVEITVTADNGTWDVYADYLVIQ

SEQ ID NO: 2625 - protein, 704 aa, Artificial Sequence
  Synthetic Construct, AT-96 intein modified protein
MQTSITLTSNASGTFDGYYYELWKDTGNTTMTVYTQGRFSCQWSNINNALFRTGKKYNQNWQSLGTIRITYSATYNPNGNSYLCIYGWSTNPLVEFYIVESWGNWRPPGACVAPDSLVVVNDKVQEIGKLTEEWGREVGFLEYSSGIFYAPYLGRGISLDLVTGKVKPSVVSKVWKLKSPEELVTIKTITGKEITVTPETKLLTFNGTLEWKEAGKIKPGDYVLTVKKLHINGKQETLDEKLAYKRGLSLSDPLEFFSSSERTISAYLKGIFDKVGRLVGDTAVIKVDKDMAKRLQILLLRLGIVSSVDETGKVIIGREYIQKILGYNVSVVTHEVELFREFIAEISKFYGTSEEDVYSSLHEKGELDIGTVPVELPEGLREEINRERATYSELVKIAQEIKDEKLYNKLAWILSEVTEEEAKIKEKVNTLKVILSSDLIPERVESVKIIKSPYPYVYDLTVEGSHSFIANGFVVHNTSLGQVTIDGGTYDIYRTTRVNQPSIVGTATFDQYWSVRTSKRTSGTVTVTDHFRAWANRGLNLGTIDQITLCVEGYQSSGSANITQNTFSQGSSSGSSGGSSGSTTTTRIECENMSLSGPYVSRITNPFNGIALYANGDTARATVNFPASRNYNFRLRGCGNNNNLARVDLRIDGRTVGTFYYQGTYPWEAPIDNVYVSAGSHTVEITVTADNGTWDVYADYLVIQ

SEQ ID NO: 2626 - protein, 724 aa, Artificial Sequence
  Synthetic Construct, AT-97 intein modified protein
MQTSITLTSNASGTFDGYYYELWKDTGNTTMTVYTQGRFSCQWSNINNALFRTGKKYNQNWQSLGTIRITYSATYNPNGNSYLCIYGWSTNPLVEFYIVESWGNWRPPGACLLPEEKVVLPEIGLVTLRELFELANEVVVKDEEKEVRKLGKMLTGVDERGNVKLLNALYVWRVAHKGEMIRVKVNGWYSVTVTPEHPFLTNRGWVKAGELKEGDYIAIPRRVYGNEDLMKFSKIAKELGIKGDEKEFYLAGASLDIPIKVLFLAPSKLVSAFLRGYFDAKGVVRENYIEVPLFEDLPLLLLRFGIVSRIEKSTLKISGKRNLELFRKHVGFTDSEKAKALDELISKAKESERYPILEELRRLGLLFGFTRNELRIEENPTYEVLMEILERIERGSPNLAEKIAVLEGRIKEENYLRILEEEGLIENGKLTELGKELLEVWRNREFDSKDVDYVRNIVENLVFLPVEKVERIEYEGYVYDVTTETHNFVANGILVHNTSLGQVTIDGGTYDIYRTTRVNQPSIVGTATFDQYWSVRTSKRTSGTVTVTDHFRAWANRGLNLGTIDQITLCVEGYQSSGSANITQNTFSQGSSSGSSGGSSGSTTTTRIECENMSLSGPYVSRITNPFNGIALYANGDTARATVNFPASRNYNFRLRGCGNNNNLARVDLRIDGRTVGTFYYQGTYPWEAPIDNVYVSAGSHTVEITVTADNGTWDVYADYLVIQ

SEQ ID NO: 2627 - protein, 859 aa, Artificial Sequence
  Synthetic Construct, AT-98 intein modified protein
MQTSITLTSNASGTFDGYYYELWKDTGNTTMTVYTQGRFSCQWSNINNALFRTGKKYNQNWQSLGTIRITYSATYNPNGNSYLCIYGWSTNPLVEFYIVESWGNWRPPGAALYDFSVIQLSNGRFVLIGDLVEELFKKYAEKIKTYKDLEYIELNEEDRFEVVSVSPDLKANKHVVSRVWRRKVREGEKLIRIKTRTGNEIILTRNHPLFAFSNGDVVRKEAEKLKVGDRVAVMMRPPSPPQTKAVVDPAIYVKISDYYLVPNGKGMIKVPNDGIPPEKAQYLLSVNSYPVKLVREVDEKLSYLAGVILGDGYISSNGYYISATFDDEAYMDAFVSVVSDFIPNYVPSIRKNGDYTIVTVGSKIFAEMLSRIFGIPRGRKSMWDIPDVVLSNDDLMRYFIAGLFDADGYVDENGPSIVLVTKSETVARKIWYVLQRLGIISTVSRVKSRGFKEGELFRVIISGVEDLAKFAKFIPLRHSRKRAKLMEILRTKKPYRGRRTYRVPISSDMIAPLRQMLGLTVAELSKLASYYAGEKVSESLIRHIEKGRVKEIRRSTLKGIALALQQIAKDVGNEEAWVRAKRLQLIAEGDVYWDEVVSVEEVDPKELGIEYVYDLTVEDDHNYVANGILVSNTSLGQVTIDGGTYDIYRTTRVNQPSIVGTATFDQYWSVRTSKRTSGTVTVTDHFRAWANRGLNLGTIDQITLCVEGYQSSGSANITQNTFSQGSSSGSSGGSSGSTTTTRIECENMSLSGPYVSRITNPFNGIALYANGDTARATVNFPASRNYNFRLRGCGNNNNLARVDLRIDGRTVGTFYYQGTYPWEAPIDNVYVSAGSHTVEITVTADNGTWDVYADYLVIQ

SEQ ID NO: 2628 - protein, 738 aa, Artificial Sequence
  Synthetic Construct, AT-99 intein modified protein
MQTSITLTSNASGTFDGYYYELWKDTGNTTMTVYTQGRFSCQWSNINNALFRTGKKYNQNWQSLGTIRITYSATYNPNGNSYLCIYGWSTNPLVEFYIVESWGNWRPPGACFSGEEVILIEKDGEKKVFKLREFVDGLLKEASGEGMDGSIRVVYKDLQGENIKILTKDGLVKLLYVNRREGKQKLRKIVNLEKDYWLALTPEHKVYTIKGLKEAGEITKDDEIIRVPLTILDGFDVAEKSIREELERLSLLPLNSEDSRLEKIAGIMGALFGSGGIDENLNTLSFVSSEKKTIEQFVKALSELFGEFDYKIEEKENSIIFRTCDKRIVTFFATLGAPVGDKSKVKLKLPWWVKLKPSLFLAFMDGLYSSNRNDKEILEITQLTDNVETFFEEISWYLSFFGIKAEAEEDEEKDKYRARLTLSSSIDNMLNFIEFIPISFSPAKREKFFKEIEKYLEYSIPEKTEDLKKRVKRVKKGERRNFLESWEEVEVTYNVTTETGNLLANGLFVKNTSLGQVTIDGGTYDIYRTTRVNQPSIVGTATFDQYWSVRTSKRTSGTVTVTDHFRAWANRGLNLGTIDQITLCVEGYQSSGSANITQNTFSQGSSSGSSGGSSGSTTTTRIECENMSLSGPYVSRITNPFNGIALYANGDTARATVNFPASRNYNFRLRGCGNNNNLARVDLRIDGRTVGTFYYQGTYPWEAPIDNVYVSAGSHTVEITVTADNGTWDVYADYLVIQ

SEQ ID NO: 2629 - protein, 862 aa, Artificial Sequence
  Synthetic Construct, AT-100 intein modified protein
MQTSITLTSNASGTFDGYYYELWKDTGNTTMTVYTQGRFSCQWSNINNALFRTGKKYNQNWQSLGTIRITYSATYNPNGNSYLCIYGWSTNPLVEFYIVESWGNWRPPGACLTGDTKVIANGQLFELGELVEKLSGGRFGPTPVKGLKVLGIDEDGKLREFEVQYVYKDRTDRLIKIKTQLGRELKVTPYHPLLVNRENGEIKWIKAEELKPGDKLAIPSFLPLITGENPLAEWLGYFMGSGYAYPSNSVITFTNEDPLIRQRFMELTEKLFPDAKIRERIHADGTPEVYVVSRKAWSLVNSISLTLIPREGWKGIRSFLRAYSDCNGRIESDAIVLSTDNNDMAQQIAYALASFGIIAKMDGEDVIISGSDNIERFLNEIGFSTQSKLKEAQKLIRKTNVRSDGLKINYELISYVKDRLRLNVNDKRNLSYRNAKELSWELMKEIYYRLEELERLKKVLSEPILIDWNEVAKKSDEVIEKAKIRAEKLLEYIKGERKPSFKEYIEIAKVLGINVERTIEAMKIFAKRYSSYAEIGRKLGTWNFNVKTILESDTVDNVEILEKIRKIELELIEEILSDGKLKEGIAYLIFLFQNELYWDEITEVKELRGDFIIYDLHVPGYHNFIAGNMPTVVHNTSLGQVTIDGGTYDIYRTTRVNQPSIVGTATFDQYWSVRTSKRTSGTVTVTDHFRAWANRGLNLGTIDQITLCVEGYQSSGSANITQNTFSQGSSSGSSGGSSGSTTTTRIECENMSLSGPYVSRITNPFNGIALYANGDTARATVNFPASRNYNFRLRGCGNNNNLARVDLRIDGRTVGTFYYQGTYPWEAPIDNVYVSAGSHTVEITVTADNGTWDVYADYLVIQ

SEQ ID NO: 2630 - protein, 710 aa, Artificial Sequence
  Synthetic Construct, AT-101 intein modified protein
MQTSITLTSNASGTFDGYYYELWKDTGNTTMTVYTQGRFSCQWSNINNALFRTGKKYNQNWQSLGTIRITYSATYNPNGNSYLCIYGWSTNPLVEFYIVESWGNWRPPGACLHPDTLILTSQGVRKIKELSREGEVFALDFNLKLSKAKYRLLERDADEQMYKVTLLDGTELYLTADHPVLVYREGNLAFVPADKLRETDHVVLVLNKSARDNYGFLDLLLEITDSQEDYAILENGETLSLHSLKMLVERGEIKDIAVVGFSHNNFGKVMLRDELWYLIGYLAGKGGEIKGNGVVISSRTKEIVGLTKSLNIDLIETEEGIVLSNKSFVRLLHLIHYTPRVPEVYGIINNTEWLKAFLAGYYDATLLEGLTLEALYKIKVYLQLLGIRAKIEDNKLKVHLEDLQRFRELLGKFSRRKLYVETSQVPVFTDFDERSYDFPRILGGDIYIIGIKSIEKFHYKGKVYDLVVENYHNFIANGIAVHNTSLGQVTIDGGTYDIYRTTRVNQPSIVGTATFDQYWSVRTSKRTSGTVTVTDHFRAWANRGLNLGTIDQITLCVEGYQSSGSANITQNTFSQGSSSGSSGGSSGSTTTTRIECENMSLSGPYVSRITNPFNGIALYANGDTARATVNFPASRNYNFRLRGCGNNNNLARVDLRIDGRTVGTFYYQGTYPWEAPIDNVYVSAGSHTVEITVTADNGTWDVYADYLVIQ

SEQ ID NO: 2631 - protein, 597 aa, Artificial Sequence
  Synthetic Construct, AT-102 intein modified protein
MQTSITLTSNASGTFDGYYYELWKDTGNTTMTVYTQGRFSCQWSNINNALFRTGKKYNQNWQSLGTIRITYSATYNPNGNSYLCIYGWSTNPLVEFYIVESWGNWRPPGACVAPDTLINTDNGRVEIGKFVEEWMKEVGEISEEGISYAPCFRKVETFKDGKIVESPIRRVWKLRAPKKLVRIKTENGRSIALTRETKLLTINDGELSWVEAGEVKVGTYVGTVKSEKDVIPGAGKTIRDVSKLYNMEMEVKDYLTREEVRKAIEKLEEIMNPMNIKIPGVQESYEELLRKLETTNDERVRNETLILLSDVSDAHELAKEKIEKIKEIVNSEVHWEKVTEVGEVDGVEYVYDLTVEGSHNFVANGFIVHNTSLGQVTIDGGTYDIYRTTRVNQPSIVGTATFDQYWSVRTSKRTSGTVTVTDHFRAWANRGLNLGTIDQITLCVEGYQSSGSANITQNTFSQGSSSGSSGGSSGSTTTTRIECENMSLSGPYVSRITNPFNGIALYANGDTARATVNFPASRNYNFRLRGCGNNNNLARVDLRIDGRTVGTFYYQGTYPWEAPIDNVYVSAGSHTVEITVTADNGTWDVYADYLVIQ

SEQ ID NO: 2632 - protein, 781 aa, Artificial Sequence
  Synthetic Construct, AT-103 intein modified protein
MQTSITLTSNASGTFDGYYYELWKDTGNTTMTVYTQGRFSCQWSNINNALFRTGKKYNQNWQSLGTIRITYSATYNPNGNSYLCIYGWSTNPLVEFYIVESWGNWRPPGACLLPEERVILPDYGPITLEELFNMTKETVFKDEEKEVRKLGIRMPVAGVDGRVRLLEGPYVWKVRYKGKMLRVKLKDWHSVAVTPEHPFLTTRGWVRADQLKPGDYVAVPKILPGKDDKEKFLQYVHEKLKGKVHIKLPSSDEEWETFFYFAGTIFGRENSVNPEGLTHEVKALLELFKVLFEYPREVLRVLFMAPVRYVANFLRGFFDINGYVNGEELRVEVRGAPHEVLEELSLILLRLGIVSKIYPTSLAISGRRNLELFRRYIGFSEKQKAKELEGIIRRSENSESYPIFEELRRIRLLFGFTRAELSSTIPLYSKYESKEAPSYEILMKILNTIEKGSKDLNKKITILEGRVRDHEYIEEFKREGLIKDGKLTELGKELLEVWRNREFDSRDVNYLRNIIENFVFLPVEKIEEFEYDGYVYDVTTETHNFIANGILVHNTSLGQVTIDGGTYDIYRTTRVNQPSIVGTATFDQYWSVRTSKRTSGTVTVTDHFRAWANRGLNLGTIDQITLCVEGYQSSGSANITQNTFSQGSSSGSSGGSSGSTTTTRIECENMSLSGPYVSRITNPFNGIALYANGDTARATVNFPASRNYNFRLRGCGNNNNLARVDLRIDGRTVGTFYYQGTYPWEAPIDNVYVSAGSHTVEITVTADNGTWDVYADYLVIQ

SEQ ID NO: 2633 - protein, 812 aa, Artificial Sequence
  Synthetic Construct, AT-104 intein modified protein
MQTSITLTSNASGTFDGYYYELWKDTGNTTMTVYTQGRFSCQWSNINNALFRTGKKYNQNWQSLGTIRITYSATYNPNGNSYLCIYGWSTNPLVEFYIVESWGNWRPPGACVSGDSKVLTEKGPVEIRHLNSGMIVGINGFKSRFVKFQELHQVKYQEYGVKIRTQLGFEVKCTREHRFLTIDKNGELRWVEAWRLKEGDYVGIIRKLPSPNSKVLILDFLPESTYLWLNKEFLKKLKVSIKEKFGSIKNYAKERGFNSSYLVKQLNGLSPFRWGRLRVILNDVSIEISRDDIERITSRRGKYSLPPELTPGIARLLGFWMASGSLNRNTLIFYSQDKKILERYEDLCKREFRVKGRIKAQDKGTYILEIPSSLLSFVFKNLARPKLEVPPIIYILPEKHKEEFLAGYFDGNGFIKIENGRIHSLGFFAFNRKFAEGIRDILLQLGILSSINEQTFEVSIIEGEKFLKIVNSWRSNYYKEWEDVIPNLEKRLKEIEEKLGYPGTYNRREIRRSELKAIIKLYEKVARERGLNDVLKELSYLKELSEGDIFFDRITSIEPVYLDVAYGIINSETGNYVVNGFVSKNTSLGQVTIDGGTYDIYRTTRVNQPSIVGTATFDQYWSVRTSKRTSGTVTVTDHFRAWANRGLNLGTIDQITLCVEGYQSSGSANITQNTFSQGSSSGSSGGSSGSTTTTRIECENMSLSGPYVSRITNPFNGIALYANGDTARATVNFPASRNYNFRLRGCGNNNNLARVDLRIDGRTVGTFYYQGTYPWEAPIDNVYVSAGSHTVEITVTADNGTWDVYADYLVIQ

SEQ ID NO: 2634 - protein, 811 aa, Artificial Sequence
  Synthetic Construct, AT-105 intein modified protein
MQTSITLTSNASGTFDGYYYELWKDTGNTTMTVYTQGRFSCQWSNINNALFRTGKKYNQNWQSLGTIRITYSATYNPNGNSYLCIYGWSTNPLVEFYIVESWGNWRPPGACFSGEEVIIVEKGKDRKVVKLREFVEDALKEPSGEGMDGDIKVTYKDLRGEDVRILTKDGFVKLLYVNKREGKQKLRKIVNLDKDYWLAVTPDHKVFTSEGLKEAGEITEKDEIIRVPLVILDGPKIASTYGEDGKFDDYIRWKKYYEKTGNGYKRAAKELNIKESTLRWWTQGAKPNSLKMIEELEKLNLLPLTSEDSRLEKVAIILGALFSDGNIDRNFNTLSFISSERKAIERFVETLKELFGEFNYEIRDNHESLGKSILFRTWDRRIIRFFVALGAPVGNKTKVKLELPWWIKLKPSLFLAFMDGLYSGDGSVPRFARYEEGIKFNGTFEIAQLTDDVEKKLPFFEEIAWYLSFFGIKAKVRVDKTGDKYKVRLIFSQSIDNVLNFLEFIPISLSPAKREKFLREVESYLAAVPESSLAGRIEELREHFNRIKKGERRSFIETWEVVNVTYNVTTETGNLLANGLFVKNTSLGQVTIDGGTYDIYRTTRVNQPSIVGTATFDQYWSVRTSKRTSGTVTVTDHFRAWANRGLNLGTIDQITLCVEGYQSSGSANITQNTFSQGSSSGSSGGSSGSTTTTRIECENMSLSGPYVSRITNPFNGIALYANGDTARATVNFPASRNYNFRLRGCGNNNNLARVDLRIDGRTVGTFYYQGTYPWEAPIDNVYVSAGSHTVEITVTADNGTWDVYADYLVIQ

SEQ ID NO: 2635 - protein, 797 aa, Artificial Sequence
  Synthetic Construct, AT-106 intein modified protein
MQTSITLTSNASGTFDGYYYELWKDTGNTTMTVYTQGRFSCQWSNINNALFRTGKKYNQNWQSLGTIRITYSATYNPNGNSYLCIYGWSTNPLVEFYIVESWGNWRPPGASILPDEWLPIVENEKVRFVKIGDFIDREIEENAERVKRDGETEILEVKDLKALSFNRETKKSELKKVKALIRHRYSGKVYSIKLKSGRRIKITSGHSLFSVKNGKLVKVRGDELKPGDLVVVPGRLKLPESKQVLNLVELLLKLPEEETSNIVMMIPVKGRKNFFKGMLKTLYWIFGEGERPRTAGRYLKHLERLGYVKLKRRGCEVLDWESLKRYRKLYETLIKNLKYNGNSRAYMVEFNSLRDVVSLMPIEELKEWIIGEPRGPKIGTFIDVDDSFAKLLGYYISSGDVEKDRVKFHSKDQNVLEDIAKLAEKLFGKVRRGRGYIEVSGKISHAIFRVLAEGKRIPEFIFTSPMDIKVAFLKGLNGNAEELTFSTKSELLVNQLILLLNSIGVSDIKIEHEKGVYRVYINKKESSNGDIVLDSVESIEVEKYEGYVYDLSVEDNENFLVGFGLLYAHNTSLGQVTIDGGTYDIYRTTRVNQPSIVGTATFDQYWSVRTSKRTSGTVTVTDHFRAWANRGLNLGTIDQITLCVEGYQSSGSANITQNTFSQGSSSGSSGGSSGSTTTTRIECENMSLSGPYVSRITNPFNGIALYANGDTARATVNFPASRNYNFRLRGCGNNNNLARVDLRIDGRTVGTFYYQGTYPWEAPIDNVYVSAGSHTVEITVTADNGTWDVYADYLVIQ

SEQ ID NO: 2636 - protein, 509 aa, Artificial Sequence
  Synthetic Construct, AT-107 intein modified protein
MQTSITLTSNASGTFDGYYYELWKDTGNTTMTVYTQGRFSCQWSNINNALFRTGKKYNQNWQSLGTIRITYSATYNPNGNSYLCIYGWSTNPLVEFYIVESWGNWRPPGACFARDTEVYYENDTVPHMESIEEMYSKYASMNGELPFDNGYAVPLDNVFVYTLDIASGEIKKTRASYIYREKVEKLIEIKLSSGYSLKVTPSHPVLLFRDGLQWVPAAEVKPGDVVVGVREEVLRRRIISKGELEFHEVSSVRIIDYNNWVYDLVIPETHNFIAPNGLVLHNTSLGQVTIDGGTYDIYRTTRVNQPSIVGTATFDQYWSVRTSKRTSGTVTVTDHFRAWANRGLNLGTIDQITLCVEGYQSSGSANITQNTFSQGSSSGSSGGSSGSTTTTRIECENMSLSGPYVSRITNPFNGIALYANGDTARATVNFPASRNYNFRLRGCGNNNNLARVDLRIDGRTVGTFYYQGTYPWEAPIDNVYVSAGSHTVEITVTADNGTWDVYADYLVIQ

SEQ ID NO: 2637 - protein, 747 aa, Artificial Sequence
  Synthetic Construct, AT-108 intein modified protein
MQTSITLTSNASGTFDGYYYELWKDTGNTTMTVYTQGRFSCQWSNINNALFRTGKKYNQNWQSLGTIRITYSATYNPNGNSYLCIYGWSTNPLVEFYIVESWGNWRPPGACVTPDTLVSLSDGRIIEIREAVENSEESLLGINGLKPKEAKALKFWEIDWDGPIKVIKLKNGHEIKATPDHGLLVMRDGKIGWVSAKNIREGDYVAFIYNLGHRGGKKYTLPQLLKELGISEYENSSSQELNNREQEMDSKQISIELDERFWYIFGVILGKGTLKGDKVVIFQKDVKPVIEEALPFVRIFESADHIGFSHLILAEVFRRLGVGEGKLHSLVFGLREEYINAMIAGYFDASGTFLRRAVLTSKRGDILRMLSVYLYQIGIVNNLRRDEHAGVWELIISDLEKFREKIYPYLRIKKSQFDKVYSISKNEGDFLPVASIFRKLKFRDGFKNRILDEEIPRDEVAKVLEYAEDSPEKEFLNSLVEARVTWVRVEKIEERHYTGKLYDFTTTTENFISNGIVSHNTSLGQVTIDGGTYDIYRTTRVNQPSIVGTATFDQYWSVRTSKRTSGTVTVTDHFRAWANRGLNLGTIDQITLCVEGYQSSGSANITQNTFSQGSSSGSSGGSSGSTTTTRIECENMSLSGPYVSRITNPFNGIALYANGDTARATVNFPASRNYNFRLRGCGNNNNLARVDLRIDGRTVGTFYYQGTYPWEAPIDNVYVSAGSHTVEITVTADNGTWDVYADYLVIQ

SEQ ID NO: 2638 - protein, 727 aa, Artificial Sequence
  Synthetic Construct, AT-109 intein modified protein
MQTSITLTSNASGTFDGYYYELWKDTGNTTMTVYTQGRFSCQWSNINNALFRTGKKYNQNWQSLGTIRITYSATYNPNGNSYLCIYGWSTNPLVEFYIVESWGNWRPPGACLAPGTRVLTEHGYWLKIEEMPEKFKLQRLRVYNIEEGHNDFSKVVFVAEREVGSEEKAIRIVTESGKVIEGSEDHPVLTPEGYVYLRNVKEGDYILVYPFEGVPYEEKKGVILDESAFEGEDPQVVKFLRERNLIPLQWKDPKVGILARILGFALANGYISENDNLTFHGKEEVLREVRKDLEELGIEAIVAEEDKLKVTSREFAFLLEKLGMAHDSIPEWIIEGPLWIKRNFLAGLFGANGSIVEFKGDVPLPITLTHSRELLNDVSRILEGFKVRAKIKMGKNGSYQLVIEDEDSIRNFLGRINYEYDPEKKARGLIAYAYLKFKELMKGNLMTFEEFARDRGYEGGFVAEKVIEVKSVKPEYDKFYDIGVYHSAHNFIANGIVVHNTSLGQVTIDGGTYDIYRTTRVNQPSIVGTATFDQYWSVRTSKRTSGTVTVTDHFRAWANRGLNLGTIDQITLCVEGYQSSGSANITQNTFSQGSSSGSSGGSSGSTTTTRIECENMSLSGPYVSRITNPFNGIALYANGDTARATVNFPASRNYNFRLRGCGNNNNLARVDLRIDGRTVGTFYYQGTYPWEAPIDNVYVSAGSHTVEITVTADNGTWDVYADYLVIQ

SEQ ID NO: 2639 - protein, 713 aa, Artificial Sequence
  Synthetic Construct, AT-110 intein modified protein
MQTSITLTSNASGTFDGYYYELWKDTGNTTMTVYTQGRFSCQWSNINNALFRTGKKYNQNWQSLGTIRITYSATYNPNGNSYLCIYGWSTNPLVEFYIVESWGNWRPPGACVDGDTLVLTKEFGLIKIKELYEKLDGKGRKIVEGNEEWTELEKPITVYGYKDGKIVEIKATHVYKGVSSGMVEIRTRTGRKIKVTPIHRLFTGRVTKDGLILKEVMAMHVKPGDRIAVVKKIDGGEYIKLDSSNVGEIKVPEILNEELAEFLGYLMANGTLKSGIIEIYCDDESLLERVNSLSLKLFGVGGRIVQKVDGKALVIQSKPLVDVLRRLGVPEDKKVENWKVPRELLLSPSNVVRAFVNAYIKGKEEVEITLASEEGAYELSYLFAKLGIYVTISKSGEYYKVRVSRRGNLDTIPVEVNGMPKVLPYEDFRKFAKSIGLEEVAENHLQHIIFDEVIDVRYIPEPQEVYDVTTETHNFVGGNMPTLLHNTSLGQVTIDGGTYDIYRTTRVNQPSIVGTATFDQYWSVRTSKRTSGTVTVTDHFRAWANRGLNLGTIDQITLCVEGYQSSGSANITQNTFSQGSSSGSSGGSSGSTTTTRIECENMSLSGPYVSRITNPFNGIALYANGDTARATVNFPASRNYNFRLRGCGNNNNLARVDLRIDGRTVGTFYYQGTYPWEAPIDNVYVSAGSHTVEITVTADNGTWDVYADYLVIQ

SEQ ID NO: 2640 - protein, 711 aa, Artificial Sequence
  Synthetic Construct, AT-111 intein modified protein
MQTSITLTSNASGTFDGYYYELWKDTGNTTMTVYTQGRFSCQWSNINNALFRTGKKYNQNWQSLGTIRITYSATYNPNGNSYLCIYGWSTNPLVEFYIVESWGNWRPPGACVTADTRLATQHGLVPIGWLQANGGALDCTVDRRALGEDRRGTVTRAAVPAFLSAGQAEVFKVTTAEGYQIKATAWHEFYTARGKLKLSELKAGDELWVQSGKGQFGAQGSGALGLLIGLITGDGHFTNRGKDEQAAVISLWGEERQLADDIAGSVNALIAGTSLAPRDYLVKPVAVAERNMVFIRSTMLVRVLDGYGFNGETKLEVPEVVWRGSEACMRGYLQGLFQTDGTVNVSSNSQSCSVRLSSSHRPLLQDVQVLLANFGVFSRIHERREAGPRSLPDGQGGQRDYLCQTQHELIVDGESREAFMREIGFLLPAKREKYDAWVADKALVKTQRFAATITAIEPAGVEPVYDTTQPDGNTVIFNGLVTGQTSLGQVTIDGGTYDIYRTTRVNQPSIVGTATFDQYWSVRTSKRTSGTVTVTDHFRAWANRGLNLGTIDQITLCVEGYQSSGSANITQNTFSQGSSSGSSGGSSGSTTTTRIECENMSLSGPYVSRITNPFNGIALYANGDTARATVNFPASRNYNFRLRGCGNNNNLARVDLRIDGRTVGTFYYQGTYPWEAPIDNVYVSAGSHTVEITVTADNGTWDVYADYLVIQ

SEQ ID NO: 2641 - protein, 793 aa, Artificial Sequence
  Synthetic Construct, AT-112 intein modified protein
MQTSITLTSNASGTFDGYYYELWKDTGNTTMTVYTQGRFSCQWSNINNALFRTGKKYNQNWQSLGTIRITYSATYNPNGNSYLCIYGWSTNPLVEFYIVESWGNWRPPGACLSADHEVLTSTGWKALPAIKDADQVMTLDLQTGTQQWNSVQATTRFAREGSLYRLKSDDMDAVCNESHRWYLNTKDQPTTYTAFTTQQMLDNQLVALRNSSGKATDQWNHESGTTTHTNHNIPTVGHNGNVMFSWPDCPWLPREFVADEACNLDWCRFIGLVMGDGSIDHVTDAQGQEHYSIQIHQRAGNPASNANTEDVLERLAAKLPNFVVHPSCVSGAEEKHTWTINHRDMYHFFLPMMRGPQSYDPLDNAMCRTYQAPDYQALSRSDNEPIIPVPADWKTGNWWHLRRWINYPWLFSLAQSQARAMIKGMAAANGDWSLSLKARLDTGDSGVVRVFSNSIPLMHDMSVLGLLADTRVNIGVDHKKGQMQLQVPVTMPALLAWCISFSFANSDLAVAAPKPEAYDNPRHDGFVYCLTVPNGNFLARRTVEYSDNDKIQEVIDAAQKPFFTGNTSLGQVTIDGGTYDIYRTTRVNQPSIVGTATFDQYWSVRTSKRTSGTVTVTDHFRAWANRGLNLGTIDQITLCVEGYQSSGSANITQNTFSQGSSSGSSGGSSGSTTTTRIECENMSLSGPYVSRITNPFNGIALYANGDTARATVNFPASRNYNFRLRGCGNNNNLARVDLRIDGRTVGTFYYQGTYPWEAPIDNVYVSAGSHTVEITVTADNGTWDVYADYLVIQ

SEQ ID NO: 2642 - protein, 717 aa, Artificial Sequence
  Synthetic Construct, AT-113 intein modified protein
MQTSITLTSNASGTFDGYYYELWKDTGNTTMTVYTQGRFSCQWSNINNALFRTGKKYNQNWQSLGTIRITYSATYNPNGNSYLCIYGWSTNPLVEFYIVESWGNWRPPGACVTADTWVMTTAGPAQVSELTGRSFSAVVDGKAYAVTSDGFFRTGHKPVLALRTREGPALRLTADHRVRRVARRTRYTLEAEWTEAGQLQPGDEILLHDHRALGGWEGAGTHAEGYLLGLLIGDGTLKSDKAVISVWAPELKVAGGGAVAYAQTGAGGIVQAAEAAAATLSHRVDFRGFQRSISGRGEARMASGAVRHLAHEMGMRPGHKTITTAMEKASSVFTEGLLRGLFDADGSVQGSQEKGVSLRLSQSDLSLLQTAQRMLLRLGIASTIYPNRRLAQARPLPDGRGGLRVYETASQHELVISADNLRIYAERIGFADTDKADRLDQALGSYNRSLNRERFTVTVESLTEEGSEDVFDVTVADIHAFDANGLYVHNTSLGQVTIDGGTYDIYRTTRVNQPSIVGTATFDQYWSVRTSKRTSGTVTVTDHFRAWANRGLNLGTIDQITLCVEGYQSSGSANITQNTFSQGSSSGSSGGSSGSTTTTRIECENMSLSGPYVSRITNPFNGIALYANGDTARATVNFPASRNYNFRLRGCGNNNNLARVDLRIDGRTVGTFYYQGTYPWEAPIDNVYVSAGSHTVEITVTADNGTWDVYADYLVIQ

SEQ ID NO: 2643 - protein, 703 aa, Artificial Sequence
  Synthetic Construct, AT-114 intein modified protein
MQTSITLTSNASGTFDGYYYELWKDTGNTTMTVYTQGRFSCQWSNINNALFRTGKKYNQNWQSLGTIRITYSATYNPNGNSYLCIYGWSTNPLVEFYIVESWGNWRPPGAAGVLSSKIKIPGGWKTMGNIRVGDEVVTPDGGTAKVLAVHPQGVTKVVRVHFKDGRYTDVSPDHLWKVRRHHWCNDKAMAKLTREEVEERVWRVITTNELKDYIGLSTKVYVQLIEPERNADKPFKIHPYVLGVLLGDGCISQKAVDITKPYQQLFDKVQSLLPEHLECVWRPNRKGDGEPKTFGIRFKDRRSEQHINWHIRDGLKELGLYGMRSWGKVIPEEYLHGSAKQRLELLQGLLDTDGTVDKHKSVSFSSSSKLLSLGVQYLVRSLGGMARLQERTPHYTHNGEKREGRTDYRVYIRYPRPEELFTLDHKRERAVSHQHTETLRLQVTHIEERPDEETQCITIDHPDHLYITDDFIVTHNTSLGQVTIDGGTYDIYRTTRVNQPSIVGTATFDQYWSVRTSKRTSGTVTVTDHFRAWANRGLNLGTIDQITLCVEGYQSSGSANITQNTFSQGSSSGSSGGSSGSTTTTRIECENMSLSGPYVSRITNPFNGIALYANGDTARATVNFPASRNYNFRLRGCGNNNNLARVDLRIDGRTVGTFYYQGTYPWEAPIDNVYVSAGSHTVEITVTADNGTWDVYADYLVIQ

SEQ ID NO: 2644 - protein, 786 aa, Artificial Sequence
  Synthetic Construct, AT-115 intein modified protein
MQTSITLTSNASGTFDGYYYELWKDTGNTTMTVYTQGRFSCQWSNINNALFRTGKKYNQNWQSLGTIRITYSATYNPNGNSYLCIYGWSTNPLVEFYIVESWGNWRPPGACFAKGTKVLMANGDDKNIEDIAVGEEVLGKDGLPREVVALPRGRETMYEVSEKTQHRAETVFGTASYTCNATHKLVLQTNQRVNITNHVLRGESQTSVTYFQMKTAVADGREIELPKLCTKSFQHSSHGRENAWKKAEVFASTISRDPIDWTAEARDISRLGYHVRRATRQLWSPVLVEKEVLAPMIAKRGFDESIAPYMAYLVGLWVGDGYSDRATFSIDIQDVEIHERIKDFASHAGLTPRIACYKKSRDATISLHNSETRGKNVRQNLNTGNLLWSLLAEICGKKENEMLFKLVPSFLRSESIAVREYFISGLVDSDGHVKRDEADKCYSATVKTIYPAVRDGLVSVARSLGIQTSVSVEEAKEVNSVKHQESYAIYMANSSALDSVLSKCAAPRKRAEEPVCVNREPHPYTFHMVEKEEDDFYGITLSEDSDHQFLLSNLALVHNTSLGQVTIDGGTYDIYRTTRVNQPSIVGTATFDQYWSVRTSKRTSGTVTVTDHFRAWANRGLNLGTIDQITLCVEGYQSSGSANITQNTFSQGSSSGSSGGSSGSTTTTRIECENMSLSGPYVSRITNPFNGIALYANGDTARATVNFPASRNYNFRLRGCGNNNNLARVDLRIDGRTVGTFYYQGTYPWEAPIDNVYVSAGSHTVEITVTADNGTWDVYADYLVIQ

SEQ ID NO: 2645 - protein, 765 aa, Artificial Sequence
  Synthetic Construct, AT-116 intein modified protein
MQTSITLTSNASGTFDGYYYELWKDTGNTTMTVYTQGRFSCQWSNINNALFRTGKKYNQNWQSLGTIRITYSATYNPNGNSYLCIYGWSTNPLVEFYIVESWGNWRPPGACLAGDTLITLADGRRVPIRELVSQQNFSVWALNPQTYRLERARVSRAFCTGIKPVYRLTTRLGRSIRATANHRFLTPQGWKRVDELQPGDYLALPRRIPTASTPTLTEAELALLGHLIGDGCTLPHHVIQYTSRDADLATLVAHLATKVFGSKVTPQIRKELRWYQVYLRAARPLAPGKRNPISDWLRDLGIFGLRSYEKKVPALLFCQTSEAIATFLRHLWATDGCIQMRRGKKPYPAVYYATSSYQLARDVQSLLLRLGINARLKTVAQGEKGRVQYHVKVSGREDLLRFVEKIGAVGARQRAALASVYDYLSVRTGNPNRDIIPVALWYELVREAMYQRGISHRQLHANLGMAYGGMTLFRQNLSRARALRLAEAAACPELRQLAQSDVYWDPIVSIEPDGVEEVFDLTVPGPHNFVANDIIAHNTSLGQVTIDGGTYDIYRTTRVNQPSIVGTATFDQYWSVRTSKRTSGTVTVTDHFRAWANRGLNLGTIDQITLCVEGYQSSGSANITQNTFSQGSSSGSSGGSSGSTTTTRIECENMSLSGPYVSRITNPFNGIALYANGDTARATVNFPASRNYNFRLRGCGNNNNLARVDLRIDGRTVGTFYYQGTYPWEAPIDNVYVSAGSHTVEITVTADNGTWDVYADYLVIQ

SEQ ID NO: 2646 - protein, 709 aa, Artificial Sequence
  Synthetic Construct, AT-117 intein modified protein
MQTSITLTSNASGTFDGYYYELWKDTGNTTMTVYTQGRFSCQWSNINNALFRTGKKYNQNWQSLGTIRITYSATYNPNGNSYLCIYGWSTNPLVEFYIVESWGNWRPPGACVTAETWVMTDEGARQVSALLDRPFRAVVNGIAYDSGEHGFFCTGLKPVKRLSTACGRHLRLTADHLVRKVVGKTRWRQEVEWVPAGDLRPGDEVKLHDHRTAMIQTRPEDERGYLLGLLIGDGVIRDDKTLISVWPQEECIGAQPLGHPVMHKVEALLRDLPHRADFAGWQKVEGRGEYRIGTAALTALAAEYGLTRGRKTITPEIEGAETAGFGAAVLRGLFDADGSVQGAQEKGVSVRLAQSDLALLQAAQRMLARLGMNAVIYENRREAGRAFLPDGKGGQAHFETKAQHELVISGENLATYQERIGFTDVAKARRLAVALSGYKRALNRERFSAVVADVVDDGMAEVFDVQVPGVNAFDANGFYVHNTSLGQVTIDGGTYDIYRTTRVNQPSIVGTATFDQYWSVRTSKRTSGTVTVTDHFRAWANRGLNLGTIDQITLCVEGYQSSGSANITQNTFSQGSSSGSSGGSSGSTTTTRIECENMSLSGPYVSRITNPFNGIALYANGDTARATVNFPASRNYNFRLRGCGNNNNLARVDLRIDGRTVGTFYYQGTYPWEAPIDNVYVSAGSHTVEITVTADNGTWDVYADYLVIQ

SEQ ID NO: 2647 - protein, 685 aa, Artificial Sequence
  Synthetic Construct, AT-118 intein modified protein
MQTSITLTSNASGTFDGYYYELWKDTGNTTMTVYTQGRFSCQWSNINNALFRTGKKYNQNWQSLGTIRITYSATYNPNGNSYLCIYGWSTNPLVEFYIVESWGNWRPPGACLKRGTEVIMFDGTTKKVEDVIVGDVLMGPDSTPRNVLSLGRGREMMYEVKPRKGESYTVNESHILSLRTTTGIAKGSWPDNTVFDISVRDWLKLPKYVTGPNGYLKGWRVPVDFPRKEQDEALLPPYLMGLWLGDGTSSSGAITSGENEKEIRAYLESYAARNGMQIRKEGLTWSISHGNTGHKKHGFTHALKSAGVLNNKHIPHNYKCGDRRQRLELLAGLLDSDGYCDLSKAGFDWISVSERLADDFCYLCRSLGFAAYKKKTCKRCANTDVWGDYFRVSVSGDFSEVPFVRGRHQNLPKRNINKNVLNVGIESITPVGVDDYFGFTIDGDSRFLLGDFTVTHNTTSLGQVTIDGGTYDIYRTTRVNQPSIVGTATFDQYWSVRTSKRTSGTVTVTDHFRAWANRGLNLGTIDQITLCVEGYQSSGSANITQNTFSQGSSSGSSGGSSGSTTTTRIECENMSLSGPYVSRITNPFNGIALYANGDTARATVNFPASRNYNFRLRGCGNNNNLARVDLRIDGRTVGTFYYQGTYPWEAPIDNVYVSAGSHTVEITVTADNGTWDVYADYLVIQ

SEQ ID NO: 2648 - protein, 675 aa, Artificial Sequence
  Synthetic Construct, AT-119 intein modified protein
MQTSITLTSNASGTFDGYYYELWKDTGNTTMTVYTQGRFSCQWSNINNALFRTGKKYNQNWQSLGTIRITYSATYNPNGNSYLCIYGWSTNPLVEFYIVESWGNWRPPGAAQPLDSLVLAPTGFRRMGDLREGDEVVVPNGEIALIDGVFPQGVRDVWRIVLSDGSSVECDDEHLWIVGTSCGWHRGQTPKVMTTREIRLDTFKANGSSKWYVPAATPVDLGPDVGLPLDPYLFGLLLGDGSFRHNLRLSTVDDEIRDAAADAVAPDCRLVPVTGSRCDYTIQLKQRSGGVRNPVIQALRRLDLWGKTSHGKFIPEDFKNTSIKNRLSLLQGLLDTDGTVHADGMSVSLRSASLRLAEDVAWLVRSLGGRARVLPEKAAFHVSVALPDEYAPFRLSRKADRVRPRPKYNTFRRGIRAVEYVGRKPAQCISVGHPSHAYVTDNFTVTHNTSLGQVTIDGGTYDIYRTTRVNQPSIVGTATFDQYWSVRTSKRTSGTVTVTDHFRAWANRGLNLGTIDQITLCVEGYQSSGSANITQNTFSQGSSSGSSGGSSGSTTTTRIECENMSLSGPYVSRITNPFNGIALYANGDTARATVNFPASRNYNFRLRGCGNNNNLARVDLRIDGRTVGTFYYQGTYPWEAPIDNVYVSAGSHTVEITVTADNGTWDVYADYLVIQ

SEQ ID NO: 2649 - protein, 836 aa, Artificial Sequence
  Synthetic Construct, AT-120 intein modified protein
MQTSITLTSNASGTFDGYYYELWKDTGNTTMTVYTQGRFSCQWSNINNALFRTGKKYNQNWQSLGTIRITYSATYNPNGNSYLCIYGWSTNPLVEFYIVESWGNWRPPGACFAKGTQVMMADGSDKSIEDIQLGENVMGKDGTPRTVISLPRGKETMYEVCHSSTKGTTKDTLMNYVCSGNHKIVMQTPQQIGITEHGIDGKTYTSVSYFALRDSQHGYPIVKKLTKSFEHQQHGGKEQTLITVNNFVSSLKSEPINWDVEAKHYESLGHYVKKCSYQLINPVFHQSGKLAQEIASLNYSKDKAPLLAWLIGFWVGNGAMRHSQFVVESQDIELVNRIQDIAGLLNLSATTACYYSGSKDDEAKLAKLNSSSAEGFEDDLEGNPSVKELADMDRLSESKTATLPTAFGVENIDELIISLGEGRGNGNVFAQVIGSFGIDLADKDTLVTKIAHELAGDAFEVREQFVAGLVDAAGYVRKDVYDHASEATISTESKSTVLGLVKIARSLGIKITVTSDDSDDSDEHDHAHCGHDHGSSSSYTAVMTGDALTNSMRFCAIGRNRVAAKEFMRQAVPFYFSLEKKSEDDYYGITVPDNTDKQYLLSSMALVHNTSLGQVTIDGGTYDIYRTTRVNQPSIVGTATFDQYWSVRTSKRTSGTVTVTDHFRAWANRGLNLGTIDQITLCVEGYQSSGSANITQNTFSQGSSSGSSGGSSGSTTTTRIECENMSLSGPYVSRITNPFNGIALYANGDTARATVNFPASRNYNFRLRGCGNNNNLARVDLRIDGRTVGTFYYQGTYPWEAPIDNVYVSAGSHTVEITVTADNGTWDVYADYLVIQ

SEQ ID NO: 2650 - protein, 817 aa, Artificial Sequence
  Synthetic Construct, AT-121 intein modified protein
MQTSITLTSNASGTFDGYYYELWKDTGNTTMTVYTQGRFSCQWSNINNALFRTGKKYNQNWQSLGTIRITYSATYNPNGNSYLCIYGWSTNPLVEFYIVESWGNWRPPGASVSYDTPVLIRDPINKIHLVKIGEFIDKFYEEGEERTAKHVNGYYVLSHDGFQVVWKPIKYVLRHRTNEIYEIIYEGGGKLEATGSHSVFVLDPDTLDIVEKPVMLLNKGEYLVSFNGVKENKDHQTIDLIDLVSDYNDVYVDNIPSELKKHTGGRNPIPLKQYMILRKRVITKKNNSLIKLRRSKYTLPIRLVLDEKLAFLFGAYIANGCVKERRDKLICFTFGKSAKNIADKVMNIMYEKFNIKPFIDDRGTYIIYEYPHTLLAIIFEKLLGRKLEEKKMPEILWSSPKSVIRAFFEGLRAYSQRTLRRRYTSYTTANKNLAYQLLWLARFAGFYSVLKEEKEAGKNNGKTYYHVIVYLDQSYRKPNASERVPVKPILKLIKYTKPRTMPPELAYIKRREFISRKTALKALEWIRRDGSFTDFSREYLRKIESLINGDIIVLKIKDVRKKQYKGYVYDISVPITEAFFGGNIPILLHNTSLGQVTIDGGTYDIYRTTRVNQPSIVGTATFDQYWSVRTSKRTSGTVTVTDHFRAWANRGLNLGTIDQITLCVEGYQSSGSANITQNTFSQGSSSGSSGGSSGSTTTTRIECENMSLSGPYVSRITNPFNGIALYANGDTARATVNFPASRNYNFRLRGCGNNNNLARVDLRIDGRTVGTFYYQGTYPWEAPIDNVYVSAGSHTVEITVTADNGTWDVYADYLVIQ

SEQ ID NO: 2651 - protein, 687 aa, Artificial Sequence
  Synthetic Construct, AT-122 intein modified protein
MQTSITLTSNASGTFDGYYYELWKDTGNTTMTVYTQGRFSCQWSNINNALFRTGKKYNQNWQSLGTIRITYSATYNPNGNSYLCIYGWSTNPLVEFYIVESWGNWRPPGASYHKDFKIMLADGRKVRIGDLVDELIGKNREKVIKGKDTEILFVDDLFLLSYNMRSGEQVLVKADRVSRHKAPDQFIKLRFSNGAEIIVTPEHPVLIINNGKIKTVRADTVRKGTLTIGVLGHKIIKEVNEDDIINNIRRKIVLDKELPYIHAKNISEAVEMRDQLMSIDIPTFIVKHKNEIRLYPSGPCSLRRLLLMHGVEEVVFSDELLYEIMNCHLYPATWYELLYSMGLTKIAKELNVYDFEILAGIIKKVEKEVIMLSQVLGLRNETQTELLHLKSRRELLIRLKDKLDMLRKRLKDLEEALGKDAVIRMITDVEVIKNTDSDWVYDITIEPYHLFVSDGLILHNTSLGQVTIDGGTYDIYRTTRVNQPSIVGTATFDQYWSVRTSKRTSGTVTVTDHFRAWANRGLNLGTIDQITLCVEGYQSSGSANITQNTFSQGSSSGSSGGSSGSTTTTRIECENMSLSGPYVSRITNPFNGIALYANGDTARATVNFPASRNYNFRLRGCGNNNNLARVDLRIDGRTVGTFYYQGTYPWEAPIDNVYVSAGSHTVEITVTADNGTWDVYADYLVIQ

SEQ ID NO: 2652 - protein, 681 aa, Artificial Sequence
  Synthetic Construct, AT-123 intein modified protein
MQTSITLTSNASGTFDGYYYELWKDTGNTTMTVYTQGRFSCQWSNINNALFRTGKKYNQNWQSLGTIRITYSATYNPNGNSYLCIYGWSTNPLVEFYIVESWGNWRPPGACLGKGTPVMMYDGRTKPVEKVEVGDRLMGDDGSPRTVQSLARGREQMYWVRQKRGMDYRVNESHILSLKKSRREGARDRGSIADISVRDYLDQSDKWKDDNKGFKVAAEFPDQPVPLDPYFLGLWLGDGKSDNARIYTTDEEVITGLQEIAEKRGDTISVSDEHRRCPAYLVKSGDRGGAMATRESVQGALRALGVLGDKHIPHLYLGNSRGKRLRLLAGLIDSDGHLNDGHGGTYEITQSSEQLARDIKFLCDTLGYRTSLTQKTARISSTGYESEVHRVRFNGNVDEIPVRVERKKASPWTDVRDWRMTGIDVEPDGVGDYFGFTLDGNGRFLLGDGTVTHNTSLGQVTIDGGTYDIYRTTRVNQPSIVGTATFDQYWSVRTSKRTSGTVTVTDHFRAWANRGLNLGTIDQITLCVEGYQSSGSANITQNTFSQGSSSGSSGGSSGSTTTTRIECENMSLSGPYVSRITNPFNGIALYANGDTARATVNFPASRNYNFRLRGCGNNNNLARVDLRIDGRTVGTFYYQGTYPWEAPIDNVYVSAGSHTVEITVTADNGTWDVYADYLVIQ

SEQ ID NO: 2653 - protein, 695 aa, Artificial Sequence
  Synthetic Construct, AT-124 intein modified protein
MQTSITLTSNASGTFDGYYYELWKDTGNTTMTVYTQGRFSCQWSNINNALFRTGKKYNQNWQSLGTIRITYSATYNPNGNSYLCIYGWSTNPLVEFYIVESWGNWRPPGACFDPETEVVTVDGIRHVEEIEVGDRVYSLNPDTGAVEIKPVTATQSQHYAGPMVEIKNQHTDFLVTPNHRFLTQRFTSGEYTDLEWETAGDMLGDRIRRRLPSLRSLPATQERPGPISLSAVCDRLAIEHKTGPRGIKELRRQARWQPEEYELTDWLRILGWFATEGTLYKSKARQYENGNVRGVSYQTTLCQKNDIGRSEIATLLNRTGITYSSDQNDHSFCSKVLYEILEAECGSDSFSKHLPPWIFQLGPKDLKIVFDTLMQGDSAANGDRFTTSSNQLAEDFIRLAMHIGRRAFHMPNDGSHRIQVNTVRGQRPTIKPKHRQQVDYDGMIHCLTVADNHTVLAGRNRKFNWTGQTSLGQVTIDGGTYDIYRTTRVNQPSIVGTATFDQYWSVRTSKRTSGTVTVTDHFRAWANRGLNLGTIDQITLCVEGYQSSGSANITQNTFSQGSSSGSSGGSSGSTTTTRIECENMSLSGPYVSRITNPFNGIALYANGDTARATVNFPASRNYNFRLRGCGNNNNLARVDLRIDGRTVGTFYYQGTYPWEAPIDNVYVSAGSHTVEITVTADNGTWDVYADYLVIQ

SEQ ID NO: 2654 - protein, 766 aa, Artificial Sequence
  Synthetic Construct, AT-125 intein modified protein
MQTSITLTSNASGTFDGYYYELWKDTGNTTMTVYTQGRFSCQWSNINNALFRTGKKYNQNWQSLGTIRITYSATYNPNGNSYLCIYGWSTNPLVEFYIVESWGNWRPPGACISGDSLISLASTGKRVSIKDLLDEKDFEIWAINEQTMKLESAKVSRVFCTGKKLVYILKTRLGRTIKATANHRFLTIDGWKRLDELSLKEHIALPRKLESSSLQLMSDEELGLLGHLIGDGCTLPRHAIQYTSNKIELAEKVVELAKAVFGDQINPRISQERQWYQVYIPASYRLTHNKKNPITKWLENLDVFGLRSYEKFVPNQVFEQPQRAIAIFLRHLWSTDGCVKLIVEKSSRPVAYYATSSEKLAKDVQSLLLKLGINARLSKISQNGKGRDNYHVTITGQADLQIFVDQIGAVDKDKQASVEEIKTHIAQHQANTNRDVIPKQIWKTYVLPQIQIKGITTRDLQMRLGNAYCGTALYKHNLSRERAAKIATITQSPEIEKLSQSDIYWDSIVSITETGVEEVFDLTVPGPHNFVANDIIVHNTSLGQVTIDGGTYDIYRTTRVNQPSIVGTATFDQYWSVRTSKRTSGTVTVTDHFRAWANRGLNLGTIDQITLCVEGYQSSGSANITQNTFSQGSSSGSSGGSSGSTTTTRIECENMSLSGPYVSRITNPFNGIALYANGDTARATVNFPASRNYNFRLRGCGNNNNLARVDLRIDGRTVGTFYYQGTYPWEAPIDNVYVSAGSHTVEITVTADNGTWDVYADYLVIQ

SEQ ID NO: 2655 - protein, 772 aa, Artificial Sequence
  Synthetic Construct, AT-126 intein modified protein
MQTSITLTSNASGTFDGYYYELWKDTGNTTMTVYTQGRFSCQWSNINNALFRTGKKYNQNWQSLGTIRITYSATYNPNGNSYLCIYGWSTNPLVEFYIVESWGNWRPPGACFSGDTLVALTDGRSVSFEQLVEEEKQGKQNFCYTIRHDGSIGVEKIINARKTKTNAKVIKVTLDNGESIICTPDHKFMLRDGSYKCAMDLTLDDSLMPLHRKISTTEDSGITIDGYEMVWSPRSDSWLFTHLVADWYNRWQGIYIAEEKQHCHHKDFNKRNNNPDNLIRLSPEKHLALHRKHISKTLHRPDVVEKCRRIHQSPEFRRKMSARMQSPETRAILSKQAQAQWQNETYKLTMMESWRSFYDSNEDYRQQNAEQLNRAQQEYWAQAENRTAQAERVRQHFAQNPGLRQQYSENAVKQWNNPELLKWRQKKTKEQWTPEFREKRREALAQTYYRKTLAALKQVEIENGYLDISAYDSYRISTKDKSLLRFDRFCERYFENDENLAREAVLNYNHRIVNIEAVSETIDVYDIEVPHTHNFALASGVFVHNTSLGQVTIDGGTYDIYRTTRVNQPSIVGTATFDQYWSVRTSKRTSGTVTVTDHFRAWANRGLNLGTIDQITLCVEGYQSSGSANITQNTFSQGSSSGSSGGSSGSTTTTRIECENMSLSGPYVSRITNPFNGIALYANGDTARATVNFPASRNYNFRLRGCGNNNNLARVDLRIDGRTVGTFYYQGTYPWEAPIDNVYVSAGSHTVEITVTADNGTWDVYADYLVIQ

SEQ ID NO: 2656 - protein, 757 aa, Artificial Sequence
  Synthetic Construct, AT-127 intein modified protein
MQTSITLTSNASGTFDGYYYELWKDTGNTTMTVYTQGRFSCQWSNINNALFRTGKKYNQNWQSLGTIRITYSATYNPNGNSYLCIYGWSTNPLVEFYIVESWGNWRPPGACISMDSMILTTEGYKSLQEIFETQGVKVDNKEKVIELKYPLINRYGDVEYTSHFTKNGEKPTKRIKTNKGIELVNTYNHPLLVREGFNLIWKKSEDIEVGDILVSRVGDHQFGNNNTVENEEEAYALGCMVADSYLGSYSRLSFSNDKKEILDKVSKFWNTFSNKEVYYDTYKESKGITIHLHDTNKTKEFHDKYKIEYGVAKDKKIPKCIMESPENIQLAFVSGYLECESSISEKNLEVTSASKDLLKDLQLILSNIGIVSTNKEKVVKKYKHNKYYRLIVNRKELIKLLPLLRFETQQRKNQKENFLSNNTKIKSSYGNTIEGSRYLLKKYRDSLNIDKKEFSKYLSRDTITIDRLREVISLYPDGDKEIRELFENVVNNNIYYQKVEQVLEGEIIPTFDVCMPKTHSFIANTIVNHNTSLGQVTIDGGTYDIYRTTRVNQPSIVGTATFDQYWSVRTSKRTSGTVTVTDHFRAWANRGLNLGTIDQITLCVEGYQSSGSANITQNTFSQGSSSGSSGGSSGSTTTTRIECENMSLSGPYVSRITNPFNGIALYANGDTARATVNFPASRNYNFRLRGCGNNNNLARVDLRIDGRTVGTFYYQGTYPWEAPIDNVYVSAGSHTVEITVTADNGTWDVYADYLVIQ

SEQ ID NO: 2657 - protein, 697 aa, Artificial Sequence
  Synthetic Construct, AT-128 intein modified protein
MQTSITLTSNASGTFDGYYYELWKDTGNTTMTVYTQGRFSCQWSNINNALFRTGKKYNQNWQSLGTIRITYSATYNPNGNSYLCIYGWSTNPLVEFYIVESWGNWRPPGACHPADTKVIVKGKGIVNISDVKEGDYILGIDGWQRVKKVWKYHYEGKLININGLKCTPNHKVPVVTENDRQTRIRDSLAKSFLSGKVKGKIITTKLFEKIAEFEKNKPSEEEILKGELSGIILAEGTLLRKDIEYFDSSRGKKRISHQYRVEITIGENEKELLERILYIFDKLFGIRPSVKKKGDTNALKITTAKKAVYLQIEELLKNIESLYAPAVLRGFFERDATVNKIRSTIVVTQGTNNKWKIDIVAKLLDSLGIPYSRYEYKYIENGKELTKHILEITGRDGLILFQTLVGFISSEKNEALEKAIEVREMNRLKNNSFYNLSTFEVSSEYYKGEVYDLTLEGNPYYFANGILTHNTSLGQVTIDGGTYDIYRTTRVNQPSIVGTATFDQYWSVRTSKRTSGTVTVTDHFRAWANRGLNLGTIDQITLCVEGYQSSGSANITQNTFSQGSSSGSSGGSSGSTTTTRIECENMSLSGPYVSRITNPFNGIALYANGDTARATVNFPASRNYNFRLRGCGNNNNLARVDLRIDGRTVGTFYYQGTYPWEAPIDNVYVSAGSHTVEITVTADNGTWDVYADYLVIQ

SEQ ID NO: 2658 - protein, 873 aa, Artificial Sequence
  Synthetic Construct, AT-129 intein modified protein
MQTSITLTSNASGTFDGYYYELWKDTGNTTMTVYTQGRFSCQWSNINNALFRTGKKYNQNWQSLGTIRITYSATYNPNGNSYLCIYGWSTNPLVEFYIVESWGNWRPPGASILPNEWLPIIENGEVKFVKIGEFIDRYMEEQKDKVRTVDNTEVLEVDNIFAFSLNKESKKSEIKKVKALIRHKYKGEAYEVELNSGRKIHITRGHSLFTIRNGKIKEIWGEEVKVGDLIIVPKKVKLNEKEAVINIPELISKLPDEDTADVVMTTPVKGRKNFFKGMLRTLKWIFGEESKRIRTFNRYLFHLEELGFVKLLPRGYEVTDWEGLKRYRQLYEKLVKNLRYNGNKREYLVRFNDIKDSVSCFPRKELEEWKIGTKGFRKCILKVDEDFGKFLGYYVSEGYAGAQKNKTGGMSYSVKLYNENPNVLKDMKNIAEKFFGKVRVGKNCVDIPKKMAYLLAKSLCGVTAENKRIPSIIFDSSEPVRWAFLRAYFVGDGDIHPSKRLRLSTKSELLANQLVFLLNSLGVSSIKIGFDSGVYRVYINEDLPFLQTSRQKNTYYPNLIPKEVLEEIFGRKFQKNITFEKFKELADSGKLDKRKVKLLDFLLNGDIVLDRVKNVEKREYEGYVYDLSVEDNENFLVGFGLLYAHNTSLGQVTIDGGTYDIYRTTRVNQPSIVGTATFDQYWSVRTSKRTSGTVTVTDHFRAWANRGLNLGTIDQITLCVEGYQSSGSANITQNTFSQGSSSGSSGGSSGSTTTTRIECENMSLSGPYVSRITNPFNGIALYANGDTARATVNFPASRNYNFRLRGCGNNNNLARVDLRIDGRTVGTFYYQGTYPWEAPIDNVYVSAGSHTVEITVTADNGTWDVYADYLVIQ

SEQ ID NO: 2659 - protein, 2323 aa, Artificial Sequence
  Synthetic Construct, AT-130 intein modified protein
MQTSITLTSNASGTFDGYYYELWKDTGNTTMTVYTQGRFSCQWSNINNALFRTGKKYNQNWQSLGTIRITYSATYNPNGNSYLCIYGWSTNPLVEFYIVESWGNWRPPGACAAYDTLVLQKDGSLVTLAEVYKRQEIELLTLGKNSKFYLTKPSAFIDDGIKPIFRVTTKLGRFVETTITHPFLTVNGWKPLSKLQVGEKIAVPRRLNIFGNETISESKFSSLINFDNLYLFPLVFQLERSQLALFIRYLFSLDGWVKIYQNKIVCFGYSTVSEKLIRQIQHILLRFGIVSGIEKFEEKRTEKIKVVKEVKSQRSHREEFTFATYRNCYCDGKWHLTITDALSQKNLMEDIGGFDSKNFYLFDLLQPHNSGNQELENHLIFWDELVNVLAKFAASKNQSLKNRTAKGKSPKNSENLTTTETICRKNILANMENLPSDNQNFDSEKLDLSQPHNSGNQELENHLIFWDELVNVLAKFATSKNQSLKNRTTKRNSPKNSENLTTTETICRKNILANMENLPSDNQNFDSEKLDLPQPHNSGNQELENHLIFWDELVNVLAKFAASKNQSLKNRTTKRNSPKNSENLTTTETICRKNILANMENLPSDNQNFDSEKLDLPQPHNSGNQELENHLIFWDELVNVLAKFATSKNQSLKNRTTKRNSPKNSENLTTTETICRKNILANMENLPSDNQNFDSEKLDLSQPHNSGTQELENHLIFWDELVNVLAKFAASKNQSLKNRTAKGKSPKNSENLTTTETICRKNILANMENLPSDNQNFDSEKLDLSQPHNSGNQELENHLIFWDELVNVLAKFATSKNQSLKNRTTKRNSPKNSENLTTTETICRKNILANMENLPSDNQNFDSEKLDLPQPHNSGNQELENHLIFWDELVNVLAKFATSKNQSLKNRTTKRNSPKNSENLTTTETICRKNILANMENLPSDNQNFDSEKLDLPQPHNSGNQELENHLIFWDELVNVLAKFATSKNQSLKNRTTKRNSPKNSENLTTTETICRKNILANMENLPSDNQNFDSEKLDLPQPHNSGNQELENHLIFWDELVNVLAKFATSKNQSLKNRTTKRNSPKNSENLTTTETICRKNILANMENLPSDNQNFDSEKLDLPQPHNSGNQELENHLIFWDELVNVLAKFATSKNQSLKNRTTKRNSPKNSENLTTTETICRKNILANMENLPSDNQNFDSEKLDLSQPHNSGTQELENHLIFWDELVNVLAKFAASKNQSLKNRTTKRNSPKNSENLTTTETICRKNILANMENLPSDNQNFDSEKLDLPQPHNSGTQELENHLIFWDELVNVLAKFAASKNQSLKNRTTKRNSPKNSENLTTTETICRKNILANMENLPSDNQNFDSEKLDLPQPHNSGNQELENHLIFWDELVNVLAKFAASKNQSLKNRTTKRNSPKNSENLTTTETICRKNILANMENLPSDNQNFDSEKLDLPQPHNSGNQELENHLIFWDELVNVLAKFATSKNQSLKNRTTKRNSPKNSENLTTTETICRKNILANMENLPSDNQNFDSEKLDLPQPHNSGNQELENHLIFWDELVNVLAKFATSKNQSLKNRTAKGKSPKNSENLTTTETICRKNILANMENLPSDNQNFDSEKLDLPQPHNSGNQELENHLIFWDELVNVLAKFATSKNQSLKNRTTKRNSPKNSENLTTTETICRKNILANMENLPSDNQNFDSEKLDLPQPHNSGNQELENHLIFWDELVNVLAKFATSKNQSLKNRTTKRNSPKNSENLTTTETICRKNILANMENLPSDNQNFDSEKLDLPQPHNSGNQELENHLIFWDELVNVLAKFATSKNQSLKNRTAKGKSPKNSENLTTTETICRKNILANMENLPSDNQNFDSEKLDLPQPHNSGNQELENHLIFWDELVNVLAKFATSKNQSLKNRTTKRNSPKNSENLTTTETICRKNILANMENLPSDNQNFDSEKLDLPQPHNSGNQELENHLIFWDELVNVLAKFATSKNQSLKNRTTKRNSPKNSENLTTTETICRKNILANMENLPSDNQNFDSEKLDLPQPHNSGTQELENSDIFWDKIVSIEPVGEKQVYDLTVPETHNFVANDICLHNTSLGQVTIDGGTYDIYRTTRVNQPSIVGTATFDQYWSVRTSKRTSGTVTVTDHFRAWANRGLNLGTIDQITLCVEGYQSSGSANITQNTFSQGSSSGSSGGSSGSTTTTRIECENMSLSGPYVSRITNPFNGIALYANGDTARATVNFPASRNYNFRLRGCGNNNNLARVDLRIDGRTVGTFYYQGTYPWEAPIDNVYVSAGSHTVEITVTADNGTWDVYADYLVIQ

SEQ ID NO: 2660 - protein, 765 aa, Artificial Sequence
  Synthetic Construct, AT-131 intein modified protein
MQTSITLTSNASGTFDGYYYELWKDTGNTTMTVYTQGRFSCQWSNINNALFRTGKKYNQNWQSLGTIRITYSATYNPNGNSYLCIYGWSTNPLVEFYIVESWGNWRPPGACLSGSTKVIDAATGNLFSLKEIAAQPEYWLSRKVFSLDLKSQQVVQQPITEIHPNGVRDVWQITTRTNRKVCATDDHLFYTVLGWKPLKDFSVGDRLGLPNKIPINYRSQISDSKVKFTAYLIGEGYLYTNSFSCSYFCNSDGELIADFYGCAEELFGSSAPIEKQLHLGNKSVIYVRIGLISGLKNWVDSYLQCANSRVQEIPNWIFSLSQSQLQLFLGILWSTSGIFDETIGYTYYSSNSEVLVRQVQHLFLRLGIVSLFNVNKVKGQGELDVSYVVEVRGREDMLKFYKLIKPYLSSYKQGLCESCYLVIKYQQSYQFKYFLTPDFFDLIVKAKKASSMTRALGVCGGEISSVWNFQNTSNRSLSFDKFNNFSTVLADEELTAIANSDVFWDEIISIEYIGKEEVFDLTIPETHNFIANDFIVHNTSLGQVTIDGGTYDIYRTTRVNQPSIVGTATFDQYWSVRTSKRTSGTVTVTDHFRAWANRGLNLGTIDQITLCVEGYQSSGSANITQNTFSQGSSSGSSGGSSGSTTTTRIECENMSLSGPYVSRITNPFNGIALYANGDTARATVNFPASRNYNFRLRGCGNNNNLARVDLRIDGRTVGTFYYQGTYPWEAPIDNVYVSAGSHTVEITVTADNGTWDVYADYLVIQ

SEQ ID NO: 2661 - protein, 474 aa, Artificial Sequence
  Synthetic Construct, AT-132 intein modified protein
MQTSITLTSNASGTFDGYYYELWKDTGNTTMTVYTQGRFSCQWSNINNALFRTGKKYNQNWQSLGTIRITYSATYNPNGNSYLCIYGWSTNPLVEFYIVESWGNWRPPGACLTYETEIMTVEYGPLPIGKIVEYRIECTVYTVDKNGYIYTQPIAQWHNRGMQEVYEYSLEDGTVIRATPEHKFMTEDGQMLPIDEIFERNLDLKCLGTLEMVKIVSRKLAKTENVYDIGVTKDHNFVLANGLIASNTSLGQVTIDGGTYDIYRTTRVNQPSIVGTATFDQYWSVRTSKRTSGTVTVTDHFRAWANRGLNLGTIDQITLCVEGYQSSGSANITQNTFSQGSSSGSSGGSSGSTTTTRIECENMSLSGPYVSRITNPFNGIALYANGDTARATVNFPASRNYNFRLRGCGNNNNLARVDLRIDGRTVGTFYYQGTYPWEAPIDNVYVSAGSHTVEITVTADNGTWDVYADYLVIQ

SEQ ID NO: 2662 - protein, 767 aa, Artificial Sequence
  Synthetic Construct, AT-133 intein modified protein
MQTSITLTSNASGTFDGYYYELWKDTGNTTMTVYTQGRFSCQWSNINNALFRTGKKYNQNWQSLGTIRITYSATYNPNGNSYLCIYGWSTNPLVEFYIVESWGNWRPPGASLTGDQKVLYYIAKKLYYETFAECYDRINGDISSVSVPCFDENYQTVIKPISAIWKHHVKKKGFKIKITWGKQIKITEDHSLFTRNENNKPQAVFGNEIKVGDEIGIPSYISFLEQPLEPFHITDKILIQEEIYVESEDTISYIEKYGDKMREYLLAKSLSPSQFYSILKTYEAKNQIPWHLWKYLELPLSEKDKVCYLSKKAIKNWIDNVEELLWFLGFYVARGSLIKNEVVLKGEPSQLEKVIELIERIFEYKSEINDSGYISIKSKILVDLIGYGLNFGNQEKDIPNWILQLPEQQLIRFLKGFVAGNNLENQLNFYLEFKTDSQLVAEKLVLILSKFGLVADVSEIEVNEEDIAKIYRIIIEGLEDKNIHNLSKVEQKISALTTGDIAWGKIESIEEFEIDDYVYDFSVPNYENFIGGSYNVFAHNTSLGQVTIDGGTYDIYRTTRVNQPSIVGTATFDQYWSVRTSKRTSGTVTVTDHFRAWANRGLNLGTIDQITLCVEGYQSSGSANITQNTFSQGSSSGSSGGSSGSTTTTRIECENMSLSGPYVSRITNPFNGIALYANGDTARATVNFPASRNYNFRLRGCGNNNNLARVDLRIDGRTVGTFYYQGTYPWEAPIDNVYVSAGSHTVEITVTADNGTWDVYADYLVIQ

SEQ ID NO: 2663 - protein, 660 aa, Artificial Sequence
  Synthetic Construct, AT-134 intein modified protein
MQTSITLTSNASGTFDGYYYELWKDTGNTTMTVYTQGRFSCQWSNINNALFRTGKKYNQNWQSLGTIRITYSATYNPNGNSYLCIYGWSTNPLVEFYIVESWGNWRPPGACVSGDTLLITRDSIHKIKDVVGQKIEIWNGKNWSQVIPLKTGKDRKLYRVRFGDGSYLDVTEYHRFFVKDRFGKKYEEVQTKDLLTHSKYALDVEPFIIDYHDGDSINLSYAYTLGAALGNGTIDQNSNGKIRVYSHKAELIFAGNKSLERQYNYLPSFVDVIDLGFSGELLRRLQTEPDALNTIASWNKSAILAFIAGLADTDGSETKGNGIKISVSDYERAKRLQLLLTKCGIRASVNLMASRGCTTNLGERNQDLYYLQITDCREIPCQRLDTTKVCEAKFQGKYQTIQNVEELPGLHDTYCFEEPEFHKGVFGNALTGNTSLGQVTIDGGTYDIYRTTRVNQPSIVGTATFDQYWSVRTSKRTSGTVTVTDHFRAWANRGLNLGTIDQITLCVEGYQSSGSANITQNTFSQGSSSGSSGGSSGSTTTTRIECENMSLSGPYVSRITNPFNGIALYANGDTARATVNFPASRNYNFRLRGCGNNNNLARVDLRIDGRTVGTFYYQGTYPWEAPIDNVYVSAGSHTVEITVTADNGTWDVYADYLVIQ

SEQ ID NO: 2664 - protein, 718 aa, Artificial Sequence
  Synthetic Construct, AT-135 intein modified protein
MQTSITLTSNASGTFDGYYYELWKDTGNTTMTVYTQGRFSCQWSNINNALFRTGKKYNQNWQSLGTIRITYSATYNPNGNSYLCIYGWSTNPLVEFYIVESWGNWRPPGACLDKTALRIFNQGLLYADEVVTPGSGETVGLGLTVRNGIGASTAIANQPMELVEIKLANGRKLRMTPNHRMSVKGKWIHACNLKPGMLLDYSIGEYQKREDTLLIPLQLEDYTEVNNSQTLGHNGGVLTKKIMTPASMTSDLAYFLGCLFGNGCIVQNKYQVCFYHSRLDVLYGLQEKGKKLFGIKGSLNDFANGRFELCFASRQLFYWLHLNQLVKTQKSEDLERIPLSLRRSSRVTLLSFFCGLIDTNGYVPQDGKLSIASASSDFIHNLQQIGESIGLCFSIYQNTKGENLQNQHNNTWGLCLSPMLSNVDALDYLNHNSIKCQEGPVVISKCVLNYSPYKIESVNIGAVCDYSYDFAIEGINDNDSWYWQGALKSHNTSLGQVTIDGGTYDIYRTTRVNQPSIVGTATFDQYWSVRTSKRTSGTVTVTDHFRAWANRGLNLGTIDQITLCVEGYQSSGSANITQNTFSQGSSSGSSGGSSGSTTTTRIECENMSLSGPYVSRITNPFNGIALYANGDTARATVNFPASRNYNFRLRGCGNNNNLARVDLRIDGRTVGTFYYQGTYPWEAPIDNVYVSAGSHTVEITVTADNGTWDVYADYLVIQ

SEQ ID NO: 2665 - protein, 806 aa, Artificial Sequence
  Synthetic Construct, AT-136 intein modified protein
MQTSITLTSNASGTFDGYYYELWKDTGNTTMTVYTQGRFSCQWSNINNALFRTGKKYNQNWQSLGTIRITYSATYNPNGNSYLCIYGWSTNPLVEFYIVESWGNWRPPGACVLHDTEIYVNGMVMEAEQIWQAYAGEAEFDGEGFWTEPNKELLVNSLDETTGKIVFARIRRLYRQWVREKLRKVRLKDGSSITITCRHKLFIRDSWKNDFQVGDDVCVPAKLMWDGKPEDPDVVKFVAWQVAEGWERVNSGMFGVSQKGKDVLEGLLEVFSRLGKRYDIKINCPKVVAHGSKKNCYEFSAHSLEYRKFLEEKRYGWGKRSHEKTIPLFIMQADLDSVRVFLSNYFDAEGWVNKTVRCVEISTASSQLIQELSILLRRFGVWMKISPQQKCATNGTGVFCTYYIGTFGGNSARCFLQEIGFNDSGKQENLKSICEKIADSNVEGIPASDIVAELVEKTQLPVGSLGIQDPIYMDGCQDFSPTSLEKVINSIEDIISGAGEEEYGQLKSSKLRNKTLEAYSLLNILELEIYKTRLQKLLNQEVYYCQIESIEEMEYEGWVYDFEVSKYHNFVANNIICHNTSLGQVTIDGGTYDIYRTTRVNQPSIVGTATFDQYWSVRTSKRTSGTVTVTDHFRAWANRGLNLGTIDQITLCVEGYQSSGSANITQNTFSQGSSSGSSGGSSGSTTTTRIECENMSLSGPYVSRITNPFNGIALYANGDTARATVNFPASRNYNFRLRGCGNNNNLARVDLRIDGRTVGTFYYQGTYPWEAPIDNVYVSAGSHTVEITVTADNGTWDVYADYLVIQ

SEQ ID NO: 2666 - protein, 726 aa, Artificial Sequence
  Synthetic Construct, AT-137 intein modified protein
MQTSITLTSNASGTFDGYYYELWKDTGNTTMTVYTQGRFSCQWSNINNALFRTGKKYNQNWQSLGTIRITYSATYNPNGNSYLCIYGWSTNPLVEFYIVESWGNWRPPGASVTGDTEVTIRRNGRIEFVPIEKLFERVDHRVGEKEYCVLGGVEALTLDNRGRLVWKKVPYVMRHKTDKRIYRVWFTNSWYLDVTEDHSLIGYLNTSKVKPGKPLKERLVEVKPEELGGKVKSLITPNRPIARTIKANPIAVKLWELIGLLVGDGNWGGQSNWAKYYVGLSCGLDKAEIERKVLNPLREASVISNYYDKSKKGDVSILSKWLAGFMVKYFKDENGNKAIPSFMFNLPREYIEAFLRGLFSADGTVSLRRGIPEIRLTSVNRELSDAVRKLLWLVGVSNSLFTETKPNRYLEKESGTHSIHVRIKNKHRFADRIGFLIDRKSTKLSENLGGHTNKKRAYKYDFDLVYPRKIEEITYDGYVYDIEVEGTHRFFANGILVHNTSLGQVTIDGGTYDIYRTTRVNQPSIVGTATFDQYWSVRTSKRTSGTVTVTDHFRAWANRGLNLGTIDQITLCVEGYQSSGSANITQNTFSQGSSSGSSGGSSGSTTTTRIECENMSLSGPYVSRITNPFNGIALYANGDTARATVNFPASRNYNFRLRGCGNNNNLARVDLRIDGRTVGTFYYQGTYPWEAPIDNVYVSAGSHTVEITVTADNGTWDVYADYLVIQ

SEQ ID NO: 2667 - protein, 759 aa, Artificial Sequence
  Synthetic Construct, AT-138 intein modified protein
MQTSITLTSNASGTFDGYYYELWKDTGNTTMTVYTQGRFSCQWSNINNALFRTGKKYNQNWQSLGTIRITYSATYNPNGNSYLCIYGWSTNPLVEFYIVESWGNWRPPGACLTADTYVWTDRGLETVAEVFGRAGLPLSSTSRVTDVRDRDIRVVNEKGELEQVAALTHNGRQPVVRITVASGRQVTVTRNHPLRVMNDDGFIVWREAGQLREGDVLVSAAFGAVQAASGGGLSEDEAVLLGYLTAAGSLDPAGHVCFTTTDIETGAEFAALAEWLLDTTVTAVPGDGQVAYVLSDPAARHTLAERYGVDYAAAARIPQCVRTAGDKMQRAFLAALYTAAGWTDTSAAVGLRTASAPLAREVQYLLYGLGIPADLDRSHGNGQHPWAVTISPAAAPRFHTEVGFRTAQQSPQTGLHEPTPQVEAIPNLTGLIHALRDSIGDRAESTDDPFPAASGGAYDRDQVRRVIDWAKRRTDEAPATANAILGYLTQLTDARYTYEPITAVEDAGQQPTFDLMVPRTHSFLANGILSHNTSLGQVTIDGGTYDIYRTTRVNQPSIVGTATFDQYWSVRTSKRTSGTVTVTDHFRAWANRGLNLGTIDQITLCVEGYQSSGSANITQNTFSQGSSSGSSGGSSGSTTTTRIECENMSLSGPYVSRITNPFNGIALYANGDTARATVNFPASRNYNFRLRGCGNNNNLARVDLRIDGRTVGTFYYQGTYPWEAPIDNVYVSAGSHTVEITVTADNGTWDVYADYLVIQ

SEQ ID NO: 2668 - protein, 694 aa, Artificial Sequence
  Synthetic Construct, AT-139 intein modified protein
MQTSITLTSNASGTFDGYYYELWKDTGNTTMTVYTQGRFSCQWSNINNALFRTGKKYNQNWQSLGTIRITYSATYNPNGNSYLCIYGWSTNPLVEFYIVESWGNWRPPGACMHYDTLVTLADGTQEKIGTIVDRKLDVEVLSYDPETDRIVPRRVVNWFDNGAADHFLQFTVGRSGKPGGAQFTATPNHLIRTPGGWREAGELIAGDRVLVHEPHYLNEQQRQVVYGSLMGRGTLVPDRHGGPGVHFCMAHTAEQAAYLDWKVSLLGNIAHSRTAEASATVGVEFTPMPELSELHRVVDFGDGHTHLTWEFLKQLTPLALAVWYLDAGTLTIPQSGTDDDARVQIDVETLSPGSRQRLVEYLRDTHELDAAVVQQGADARSLLEFTPAATVRFLELVAPYVPESMSSMLLAQFRGRCSVTPEYSDPVQRLVAAPVLDIQVKPGSTRKFDIEVEGNHNYFVDGVMVHNTSLGQVTIDGGTYDIYRTTRVNQPSIVGTATFDQYWSVRTSKRTSGTVTVTDHFRAWANRGLNLGTIDQITLCVEGYQSSGSANITQNTFSQGSSSGSSGGSSGSTTTTRIECENMSLSGPYVSRITNPFNGIALYANGDTARATVNFPASRNYNFRLRGCGNNNNLARVDLRIDGRTVGTFYYQGTYPWEAPIDNVYVSAGSHTVEITVTADNGTWDVYADYLVIQ

SEQ ID NO: 2669 - protein, 874 aa, Artificial Sequence
  Synthetic Construct, AT-140 intein modified protein
MQTSITLTSNASGTFDGYYYELWKDTGNTTMTVYTQGRFSCQWSNINNALFRTGKKYNQNWQSLGTIRITYSATYNPNGNSYLCIYGWSTNPLVEFYIVESWGNWRPPGASLLPEEWIPLVENGKVRLHRIGEFVDKLMETDSELVKRNGDTEVLEVRGIRALSFDRKSKKARVMPVKAVIRHRYSGDVYEIVLGSGRRITVTEGHSLFAYGDGELREVTGGEIKAGDLLAVPRRVNLPEKKERLNLVELLRRLPEEETGDIILTIPVKGRKNFFKGMLRTLRWISGEEKRPRTARRYLEHLEGLGYVRLKKIGYEVTDREGLERYRKLYERLVEAVRYNGNKREYLVEFNAVRDVIALMPEEELRDWLVGTRNGFRMRPFVEIEEDFAKLLGYYVSEGNARKWRNQKNGWSYTVKLYNENQRVLDDMESLAERFFGRVKRGKNYIEIPRKMAYIIFENLCGTLAENKRVPEAIFTSPESVRWAFIEGYFIGDGDVHPSKRVRLSTKSELLVNGLVLLLNSLGVSAIKIRHDSGVYRVYVNEELPFTDYRKKKNAYYSHVIPKEILEETFGKVFQRSVSYEKFRELVKSEKLDGEKAKRIEWLLNGDVVLDKVLEVKKRPYEGYVYDLSVEEDENFLAGFGLLYAHNTSLGQVTIDGGTYDIYRTTRVNQPSIVGTATFDQYWSVRTSKRTSGTVTVTDHFRAWANRGLNLGTIDQITLCVEGYQSSGSANITQNTFSQGSSSGSSGGSSGSTTTTRIECENMSLSGPYVSRITNPFNGIALYANGDTARATVNFPASRNYNFRLRGCGNNNNLARVDLRIDGRTVGTFYYQGTYPWEAPIDNVYVSAGSHTVEITVTADNGTWDVYADYLVIQ

SEQ ID NO: 2670 - protein, 672 aa, Artificial Sequence
  Synthetic Construct, AT-141 intein modified protein
MQTSITLTSNASGTFDGYYYELWKDTGNTTMTVYTQGRFSCQWSNINNALFRTGKKYNQNWQSLGTIRITYSATYNPNGNSYLCIYGWSTNPLVEFYIVESWGNWRPPGASYHHDFELLLADGRKVKIGELVDKLIEKNRDRVILGKDTEILPVEDIELLAYDLEKREIVKVKADRVSRHKAPERFIKLRFSNGREITVTPEHPVMVWENGEITEKPAEKITPGDIALGVLRYPIQVDGKFKERYRDMREAEDYQDYLYSRGVVSKIKRTGIYFTVEKARRALPRELVKPLINAGKILRVTQTPKERASFNQKLVRENIIEGYLQRIIERMDELERLSREDPAKALELLPKTQLYYKYGITYGKLKKLAEARNSWAEGIIQSAVAERISLAKRELEEFFKWWNANVNFLKVKCVEEIKNDRWEWVYDVTVEPHHLFVSHGLVLHNTSLGQVTIDGGTYDIYRTTRVNQPSIVGTATFDQYWSVRTSKRTSGTVTVTDHFRAWANRGLNLGTIDQITLCVEGYQSSGSANITQNTFSQGSSSGSSGGSSGSTTTTRIECENMSLSGPYVSRITNPFNGIALYANGDTARATVNFPASRNYNFRLRGCGNNNNLARVDLRIDGRTVGTFYYQGTYPWEAPIDNVYVSAGSHTVEITVTADNGTWDVYADYLVIQ

SEQ ID NO: 2671 - protein, 740 aa, Artificial Sequence
  Synthetic Construct, AT-142 intein modified protein
MQTSITLTSNASGTFDGYYYELWKDTGNTTMTVYTQGRFSCQWSNINNALFRTGKKYNQNWQSLGTIRITYSATYNPNGNSYLCIYGWSTNPLVEFYIVESWGNWRPPGACMHPDTYVVTKSGAKKVSELTEGDEVLTHTGTFKKVIQPLRREHKGRLLVIKAYGTVPVKITPEHMVWVVKQIRHKSHYSDGRQVIWWEFEGPEWMTAQELKERLESETDPKVSYMLLQPIPEPSVDADKIPLRKEVYVVNQHGKTDKLHPSVKRTPEYLPLNFETARLIGLWIAEGSTSKNGVIKFDISSNEEDLTEFITGTIRKYFPHAKIVVKDHERNRRTVRFCNKRFAEWLRENIGHGADNKSIPPLLLLNKNREVRLGLLRGLIEGDGYVRRESQRRANYISYSTVSPSLAYQLQLLVASLGYTSSIHRSIRTEGIGKTRKPIYDVKVSGKSYYSLLEELGFEVPQRGNRTYNVNRTWKNYLLLKVRSIEEEEYEGDVYNLEVEGDESGSVGFIVHNTSLGQVTIDGGTYDIYRTTRVNQPSIVGTATFDQYWSVRTSKRTSGTVTVTDHFRAWANRGLNLGTIDQITLCVEGYQSSGSANITQNTFSQGSSSGSSGGSSGSTTTTRIECENMSLSGPYVSRITNPFNGIALYANGDTARATVNFPASRNYNFRLRGCGNNNNLARVDLRIDGRTVGTFYYQGTYPWEAPIDNVYVSAGSHTVEITVTADNGTWDVYADYLVIQ

SEQ ID NO: 2672 - protein, 883 aa, Artificial Sequence
  Synthetic Construct, AT-143 intein modified protein
MQTSITLTSNASGTFDGYYYELWKDTGNTTMTVYTQGRFSCQWSNINNALFRTGKKYNQNWQSLGTIRITYSATYNPNGNSYLCIYGWSTNPLVEFYIVESWGNWRPPGACLLPDEKVILPEHGPITLKGLFDLAKETVVADNEKEIRKLGAKLTIVGEDGRLRVLESPYVWKVRHRGKMLRVKLKNWHSVSVTPEHPFLTTRGWVRADQLKPGDYVAVPRVIHGNESDERFVSFVYEKLKNDELIAKLRGEVLSKISSEFKGDRAYKVERNVFRWEDIERLNLWDEVERVAFTPRMHRSGKPLHYVKLPRSPEEWEAFFYFAGVMFGDGSQDKIANNDVEVYEELKKLSVLGVAVKRVERTTSYEIELTNGKNALLRLLRVLFEYPERQKAKSIRVPRILFIAPRKYVSRFLRGYFDADGHVSLKDARIEVTSASQEFLEDLSLLLLRFGIVSKIYRSDYTTLVISGRRNLDLFRRYIGFSVKNKAEALEKAIKKSRRSESYPIFEELKRLRLLFGFTRTELNSNVPFYGKYESEEAPSYETLMRILDAIEKGSINLDKKIAVLEGRIRDHNYIKAFEKDGLIKDGKLTELGRELLEVWRNREFDSSDVDYIRNLAENLVFIPVEDIEEFEYEGYVYDVTTETHNFVANGILVHNTSLGQVTIDGGTYDIYRTTRVNQPSIVGTATFDQYWSVRTSKRTSGTVTVTDHFRAWANRGLNLGTIDQITLCVEGYQSSGSANITQNTFSQGSSSGSSGGSSGSTTTTRIECENMSLSGPYVSRITNPFNGIALYANGDTARATVNFPASRNYNFRLRGCGNNNNLARVDLRIDGRTVGTFYYQGTYPWEAPIDNVYVSAGSHTVEITVTADNGTWDVYADYLVIQ

SEQ ID NO: 2673 - protein, 862 aa, Artificial Sequence
  Synthetic Construct, AT-144 intein modified protein
MQTSITLTSNASGTFDGYYYELWKDTGNTTMTVYTQGRFSCQWSNINNALFRTGKKYNQNWQSLGTIRITYSATYNPNGNSYLCIYGWSTNPLVEFYIVESWGNWRPPGACVSGDSKILTGKGPVEIGRLNSNMIAGIWRFQTELVRFEEPHRVEYRREGVKIRTRLGFEIKATKEHKFLTVDENGELRWVEAWKLKEGNWVGVVRRLPSPNVKVSILDLLPPNAYLKLKGEFLRELKLSIQAKFGSIRTYAKKKRWSESYLVKQLNGVYPFRWERLSAVLKDLDLRMTENDVERITSDKGKYSLPIEFTPSMARLLGFWMADGSWKGGTLTLFSSDRKMLEKYKELCKEEFGVVGRIRMLNESTYSLEISFNLLPAIFKNLTGNTERKSKLGTFPSIIYSLPEEHKREFLAGYFDGDGFLEVKGGRVYSAGFSTFNKRFAEGIRDILLQLGIVSSIRAREYDEVQKFKGRVIPKKGASYTVSVLGGEYLKRFFDAVRPWRSDYEGWEGMYNEGYSNSDVVPNLGKRLRSIRERLGISAYRMSKMGFYNPVRVELGEREISRRNLRLLVEFYERVAKEKRVEDVLEELSYLRELAEGDVFFDRITSVEPAYIDVAYGIINSETENYIVEGFISKNTSLGQVTIDGGTYDIYRTTRVNQPSIVGTATFDQYWSVRTSKRTSGTVTVTDHFRAWANRGLNLGTIDQITLCVEGYQSSGSANITQNTFSQGSSSGSSGGSSGSTTTTRIECENMSLSGPYVSRITNPFNGIALYANGDTARATVNFPASRNYNFRLRGCGNNNNLARVDLRIDGRTVGTFYYQGTYPWEAPIDNVYVSAGSHTVEITVTADNGTWDVYADYLVIQ

SEQ ID NO: 2674 - protein, 873 aa, Artificial Sequence
  Synthetic Construct, AT-145 intein modified protein
MQTSITLTSNASGTFDGYYYELWKDTGNTTMTVYTQGRFSCQWSNINNALFRTGKKYNQNWQSLGTIRITYSATYNPNGNSYLCIYGWSTNPLVEFYIVESWGNWRPPGASILPEEWLPVLEEGEVHFVRIGELIDRMMEENAGKVKREGETEVLEVSGLEVPSFNRRTNKAELKRVKALIRHDYSGKVYTIRLKSGRRIKITSGHSLFSVRNGELVEVTGDELKPGDLVAVPRRLELPERNHVLNLVELLLGTPEEETLDIVMTIPVKGKKNFFKGMLRTLRWIFGEEKRPRTARRYLRHLEDLGYVRLKKIGYEVLDWDSLKNYRRLYEALVENVRYNGNKREYLVEFNSIRDAVGIMPLKELKEWKIGTLNGFRMRKLIEVDESLAKLLGYYVSEGYARKQRNPKNGWSYSVKLYNEDPEVLDDMERLASRFFGKVRRGRNYVEIPKKIGYLLFENMCGVLAENKRIPEFVFTSPKGVRLAFLEGYSSAMATSTEQETQALNEKRALANQLVLLLNSVGVSAVKLGHDSGVYRVYINEELPFVKLDKKKNAYYSHVIPKEVLSEVFGKVFQKNVSPQTFRKMVEDGRLDPEKAQRLSWLIEGDVVLDRVESVDVEDYDGYVYDLSVEDNENFLVGFGLVYAHNTSLGQVTIDGGTYDIYRTTRVNQPSIVGTATFDQYWSVRTSKRTSGTVTVTDHFRAWANRGLNLGTIDQITLCVEGYQSSGSANITQNTFSQGSSSGSSGGSSGSTTTTRIECENMSLSGPYVSRITNPFNGIALYANGDTARATVNFPASRNYNFRLRGCGNNNNLARVDLRIDGRTVGTFYYQGTYPWEAPIDNVYVSAGSHTVEITVTADNGTWDVYADYLVIQ

SEQ ID NO: 2675 - protein, 819 aa, Artificial Sequence
  Synthetic Construct, AT-146 intein modified protein
MQTSITLTSNASGTFDGYYYELWKDTGNTTMTVYTQGRFSCQWSNINNALFRTGKKYNQNWQSLGTIRITYSATYNPNGNSYLCIYGWSTNPLVEFYIVESWGNWRPPGACFAKDTKVYYENDTLVHFESIEDMYHKYASLGREVPFDNGYAVPLETVSVYTFDPKTGEVKRTKASYIYREKVEKLAEIRLSNGYLLRITLLHPVLVFRNGLQWVPAGMIKPGDLIVGIRSVPANAATIEESEAYFLGLFVAEGTSNPLSITTGSEELKDFIVSFIEDHDGYTPTVEVRRGLYRILFRKKTAEWLGELATSNASTKVVPERVLNAGESAIAAFLAGYLDGDGYLTESIVELVTKSRELADGLVFLLKRLGITPRISQKTIEGSVYYRIYITGEDRKTFEKVLEKSRIKPGEMNEGGVGRYPPALGKFLGKLYSEFRLPKRDNETAYHILTRSRNVWFTEKTLSRIEEYFREALEKLSEARKALEMGDKPELPFPWTAITKYGFTDRQVANYRTRGLPKRPELKEKVVSALLKEIERLEGVAKLALETIELARRLEFHEVSSVEVVDYNDWVYDLVIPETHNFIAPNGLVLHNTSLGQVTIDGGTYDIYRTTRVNQPSIVGTATFDQYWSVRTSKRTSGTVTVTDHFRAWANRGLNLGTIDQITLCVEGYQSSGSANITQNTFSQGSSSGSSGGSSGSTTTTRIECENMSLSGPYVSRITNPFNGIALYANGDTARATVNFPASRNYNFRLRGCGNNNNLARVDLRIDGRTVGTFYYQGTYPWEAPIDNVYVSAGSHTVEITVTADNGTWDVYADYLVIQ

SEQ ID NO: 2676 - protein, 826 aa, Artificial Sequence
  Synthetic Construct, AT-147 intein modified protein
MQTSITLTSNASGTFDGYYYELWKDTGNTTMTVYTQGRFSCQWSNINNALFRTGKKYNQNWQSLGTIRITYSATYNPNGNSYLCIYGWSTNPLVEFYIVESWGNWRPPGACVTPDTLVSLADGRIMEIKDAVEKSEGNLLSVNGLKPKEAKALKFWEIDWNGPLKVIKLKNGHEIKATPDHGLLVMREGKLGWVSAKNVREGDYVAFAYNTGHRGRDEYTLLKLMIKLGITDVMVELDEEYFNEKVAPIVRERISTSTKYKYLRRRVLPLYLLQEWGLDDYEAHVKSLYRQRAGSKPIPNFKLDGRFWYVFGLVLGDGTLRDSKVLISQTPLKDVKSVLEDVFPFLRVFETTNQVGFSNSIIAEVFRRLGARKGKLHPLVFGLREEYINAMIAGYFDTDGTFSILNDRKGPNFRGILTSKRGDVLRMLSVYLYQIGIMNYLRRDERTGVWDLIISNRSLEKFREKIYPYLRIRRAQFDEAYSVYRASRRAFEGDLLPVAPVFGKLKFKNGTKNRILKETGIDVWNWLKRPEGEIPRDKLSKVLEYAEESPEKEFLKSLVEAGVTWVKVKGVEEELYTGKLYDFTTTTENFLSNGAVSHNTSLGQVTIDGGTYDIYRTTRVNQPSIVGTATFDQYWSVRTSKRTSGTVTVTDHFRAWANRGLNLGTIDQITLCVEGYQSSGSANITQNTFSQGSSSGSSGGSSGSTTTTRIECENMSLSGPYVSRITNPFNGIALYANGDTARATVNFPASRNYNFRLRGCGNNNNLARVDLRIDGRTVGTFYYQGTYPWEAPIDNVYVSAGSHTVEITVTADNGTWDVYADYLVIQ

SEQ ID NO: 2677 - protein, 791 aa, Artificial Sequence
  Synthetic Construct, AT-148 intein modified protein
MQTSITLTSNASGTFDGYYYELWKDTGNTTMTVYTQGRFSCQWSNINNALFRTGKKYNQNWQSLGTIRITYSATYNPNGNSYLCIYGWSTNPLVEFYIVESWGNWRPPGACIDGNAKIIFENDGEEHIMTMAEMYERYKDLGEFYDPEYNRWGINVEEVPVYVKSFDPSTKEITKGKVKVIWKYELGEDVPKYEIKTNKGTRVLTSPWHPFFVITQDLKIVEKRADELREGDMLVGGMPSDDDYEFLLDYWLAGFIAGDGSIDKYRSHVKGHEYVYDRLRIYDYTTETLGIINDHLEKTFGKRYSLQRDRNIHYIDIKAKGITSHYIELLRGITNGIPQPILKEGRNAVLSFITGLFDAEGHVNSKPGVELGMVNRKLIEDITYYLNSLGIKARMRKKPRKDGVDYVMHVEEYSSLLRFYELIGKNLQNSEKRIKLEELLSKHNGGSFGLTLSFEDFKAWSSKYGVEFKTNGSQTLAIIKNEKVSLGQWHRRGRVSKAVLVKMLRKLYDTTKSEDVKRMLHLIEGLEVVKEINVTNEPKTFYDLTVERYQNYLAGENGMVFVHNTSLGQVTIDGGTYDIYRTTRVNQPSIVGTATFDQYWSVRTSKRTSGTVTVTDHFRAWANRGLNLGTIDQITLCVEGYQSSGSANITQNTFSQGSSSGSSGGSSGSTTTTRIECENMSLSGPYVSRITNPFNGIALYANGDTARATVNFPASRNYNFRLRGCGNNNNLARVDLRIDGRTVGTFYYQGTYPWEAPIDNVYVSAGSHTVEITVTADNGTWDVYADYLVIQ

SEQ ID NO: 2678 - protein, 848 aa, Artificial Sequence
  Synthetic Construct, AT-149 intein modified protein
MQTSITLTSNASGTFDGYYYELWKDTGNTTMTVYTQGRFSCQWSNINNALFRTGKKYNQNWQSLGTIRITYSATYNPNGNSYLCIYGWSTNPLVEFYIVESWGNWRPPGACLHPDSLIPTPQGVKRIKELPEKGEVFALDFDLKLSRARYRLLERDADEPMYKVTLSDRTELYLTADHPVLVYRDDQLIFVPAEELRENDQVVLFINRSEYSPRTESPTLLGFLLENATSMKDYILYDPEFGGVLRNRIKDAGLKTEILWRFRIREPTYYKYLRGKMPVPIVRFLLEEGVVSIEELREVFRGFSYSTSLTPISFEFSEEFWYLFGLVAGDGHLAKKGAITIPAKDRTEDTVKAVKEIANSLQVPFAFDEKYKMIILRSKSLTRLFELLGCPYGNKTEIFRIPGEIMAKPEWMAAFLAGYYDADGHIGTKPTGGKKSHSPQIVLTSKNRMAIYTVKQMWQLLGVGTYLWEKKDRNGNFMAYELKVYSRDAWRFYEVMKNHLRIKRKDLEHVKEVAIRKRKAYSHHYSVLNVKSWEGKIKSSNVLWKKFDMSNQTAHGRGISLDKLQRIVDYLTDTDLRRIAMGDVYVLGIRSIEKFHYRGKVYDLVVDQYHNFIANGVVVHNTSLGQVTIDGGTYDIYRTTRVNQPSIVGTATFDQYWSVRTSKRTSGTVTVTDHFRAWANRGLNLGTIDQITLCVEGYQSSGSANITQNTFSQGSSSGSSGGSSGSTTTTRIECENMSLSGPYVSRITNPFNGIALYANGDTARATVNFPASRNYNFRLRGCGNNNNLARVDLRIDGRTVGTFYYQGTYPWEAPIDNVYVSAGSHTVEITVTADNGTWDVYADYLVIQ

SEQ ID NO: 2679 - protein, 760 aa, Artificial Sequence
  Synthetic Construct, AT-150 intein modified protein
MQTSITLTSNASGTFDGYYYELWKDTGNTTMTVYTQGRFSCQWSNINNALFRTGKKYNQNWQSLGTIRITYSATYNPNGNSYLCIYGWSTNPLVEFYIVESWGNWRPPGACLPARARVVDWCTGRVVRVGEIVRGEAKGVWVVSLDEARLRLVPRPVVAAFPSGKAQVYALRTATGRVLEATANHPVYTPEGWRPLGTLAPGDYVALPRHLSYRPSLHLEGHELDLLGFALAEGHLRHPSGVYLYTSSEEELAAMEEALRAFPNTRIRVVWRRGVAHVYVGRVDRRQEAGAVAFLRRMGLLGLDAKTKRLPEAVFGLPPEEVARFLGRLWTGDGGVDPKGRLIHYATASKELAWGVQHLLLRLGLQSRLVEKRFSGGYKGYAVYLLGGLEAARRFAETVGPYLVGKRRQDLEALLASWEKAGRSTGDVLPLAFLEEVRAAVAEVAQGQVADLLREAGLAEGLLCLGRGRRGLSRATVGRLAALTGSLALLRLAEAEVYWDRVEAVEPLGEEEVFDLTVEGTHTFVAEDVIVHNTSLGQVTIDGGTYDIYRTTRVNQPSIVGTATFDQYWSVRTSKRTSGTVTVTDHFRAWANRGLNLGTIDQITLCVEGYQSSGSANITQNTFSQGSSSGSSGGSSGSTTTTRIECENMSLSGPYVSRITNPFNGIALYANGDTARATVNFPASRNYNFRLRGCGNNNNLARVDLRIDGRTVGTFYYQGTYPWEAPIDNVYVSAGSHTVEITVTADNGTWDVYADYLVIQ

SEQ ID NO: 2680 - protein, 775 aa, Artificial Sequence
  Synthetic Construct, AT-151 intein modified protein
MQTSITLTSNASGTFDGYYYELWKDTGNTTMTVYTQGRFSCQWSNINNALFRTGKKYNQNWQSLGTIRITYSATYNPNGNSYLCIYGWSTNPLVEFYIVESWGNWRPPGACLHPDTLVHTDRGTLRLRELVDPFRRGWQPHTLSVATDEGWRPSPEGYNNGVAPTLRVVLENGLEVQGTLNHKLKVLREDGTREWVELQDLRPGDWVIWVLDEHTGTPVQLAPLDEPLHPNTTPIRTPEVLTEDLAFLLGFFFGEGFVSGDRIGFSVHEEEPMREEAKRLFRELFGLELREERKPGDRSVTLVVRSRPLVTWLRKNGLLKGKARELEVPRAIRQSPRPVLAAFLRGLFEADGTITAGYPMLTTASKRLAQDVMVLLGGLGIPSKLLRYNPLPGRFSKAEHYGVRVVTAKGLERYLERIGVPKGSRLEALHGIKPDVRRESSWPLPHAEGLLKPLLTVTEKGRKGYASPYTPLRKDLLRYLRGERQLTATGYAMVLEKAQDLGLEAEPFPFNEYYVRVASVEPGGEILTLDLSVEGNHTYLANGLVSHNTSLGQVTIDGGTYDIYRTTRVNQPSIVGTATFDQYWSVRTSKRTSGTVTVTDHFRAWANRGLNLGTIDQITLCVEGYQSSGSANITQNTFSQGSSSGSSGGSSGSTTTTRIECENMSLSGPYVSRITNPFNGIALYANGDTARATVNFPASRNYNFRLRGCGNNNNLARVDLRIDGRTVGTFYYQGTYPWEAPIDNVYVSAGSHTVEITVTADNGTWDVYADYLVIQ

SEQ ID NO: 2681 - protein, 744 aa, Artificial Sequence
  Synthetic Construct, AT-152 intein modified protein
MQTSITLTSNASGTFDGYYYELWKDTGNTTMTVYTQGRFSCQWSNINNALFRTGKKYNQNWQSLGTIRITYSATYNPNGNSYLCIYGWSTNPLVEFYIVESWGNWRPPGACFVGSTRIPTERGLVPIEELAREGGSFYLVTDNRAPFGGRGAPLPGHGTAVRKAVRAFFTGVKPVVRLRTREGLEVTLTPDHLLLTPEGYREAGKLRPGEKILVQSGEGLFPKEESLPAQALAVVHERVATAGGRGGRGRADVRAQYRNLPTRWSRELGVALGWLLGDGYLREDGVGFYFSRKDFADLAWLPDLLRDWFGPGTLQETRSNTFHLHFNRIPAEFFQALGVKAARATEKRVPESLFRAPREAVVGFLQGLFSADGSVQINENKQDATVRLASSSLALLQDVQLLLLNLGILGKIHKRREAARKALPDGKGGLREYPVAPQYELILGGENRDRFAEVVGFLQEEKQSKLLAFLRHRPRGSYRKPFLATVASVEPAGEAPVYDLTEPVTHSLIANGLVAHNTSLGQVTIDGGTYDIYRTTRVNQPSIVGTATFDQYWSVRTSKRTSGTVTVTDHFRAWANRGLNLGTIDQITLCVEGYQSSGSANITQNTFSQGSSSGSSGGSSGSTTTTRIECENMSLSGPYVSRITNPFNGIALYANGDTARATVNFPASRNYNFRLRGCGNNNNLARVDLRIDGRTVGTFYYQGTYPWEAPIDNVYVSAGSHTVEITVTADNGTWDVYADYLVIQ

SEQ ID NO: 2682 - protein, 523 aa, Artificial Sequence
  Synthetic Construct, AT-153 intein modified protein
MQTSITLTSNASGTFDGYYYELWKDTGNTTMTVYTQGRFSCQWSNINNALFRTGKKYNQNWQSLGTIRITYSATYNPNGNSYLCIYGWSTNPLVEFYIVESWGNWRPPGACVSGETPVYLADGKTIKIKDLYSSERKKEDNIVEAGSGEEIIHLKDPIQIYSYVDGTIVRSRSRLLYKGKSSYLVRIETIGGRSVSVTPVHKLFVLTEKGIEEVMASNLKVGDMIAAVAESESEARDCGMSEECVMEAEVYTSLEATFDRVKSIAYEKGDFDVYDLSVPEYGRNFIGGEGLLVLHNTSLGQVTIDGGTYDIYRTTRVNQPSIVGTATFDQYWSVRTSKRTSGTVTVTDHFRAWANRGLNLGTIDQITLCVEGYQSSGSANITQNTFSQGSSSGSSGGSSGSTTTTRIECENMSLSGPYVSRITNPFNGIALYANGDTARATVNFPASRNYNFRLRGCGNNNNLARVDLRIDGRTVGTFYYQGTYPWEAPIDNVYVSAGSHTVEITVTADNGTWDVYADYLVIQ

SEQ ID NO: 2683 - protein, 489 aa, Artificial Sequence
  Synthetic Construct, AT-154 intein modified protein
MQTSITLTSNASGTFDGYYYELWKDTGNTTMTVYTQGRFSCQWSNINNALFRTGKKYNQNWQSLGTIRITYSATYNPNGNSYLCIYGWSTNPLVEFYIVESWGNWRPPGACLSGETAVMTVEYGAIPIRRLVQERLICQVYSLDPQGHLYTQPIAQWHFQGFRPVYAYQLEDGSTICATPDHRFMTTSGQMLPIEQIFREGLELWQVAIAPPGALAQGLKPAVQMSCMKIVGRRLVGWQAVYDIGLAGDHNFLLANGAIAANTSLGQVTIDGGTYDIYRTTRVNQPSIVGTATFDQYWSVRTSKRTSGTVTVTDHFRAWANRGLNLGTIDQITLCVEGYQSSGSANITQNTFSQGSSSGSSGGSSGSTTTTRIECENMSLSGPYVSRITNPFNGIALYANGDTARATVNFPASRNYNFRLRGCGNNNNLARVDLRIDGRTVGTFYYQGTYPWEAPIDNVYVSAGSHTVEITVTADNGTWDVYADYLVIQ

SEQ ID NO: 2684 - protein, 644 aa, Artificial Sequence
  Synthetic Construct, AT-155 intein modified protein
MQTSITLTSNASGTFDGYYYELWKDTGNTTMTVYTQGRFSCQWSNINNALFRTGKKYNQNWQSLGTIRITYSATYNPNGNSYLCIYGWSTNPLVEFYIVESWGNWRPPGACVTADTWVTTAEGPRQVEELIGKKFTAIVNGEEWESSEEGFFETDVKPVYTLKTAEGFELRLTADHPVMKVERMTRYKVETQWSNAGDLKPGDKIIINNHRDFGNWSVKGKYTEGEGYLIGLLLGDGTIKKLNPWMKAISKKMEKASADFCEGILRGLFDADGSVQGNQSKGVSIRLAQSDVEILKAVQRILLRFGIFSKVYMNRRGERKVKMPDGKGGVKEYITKPQHELVISNDNILYFAERVGFSDAEKMEKLEKAIWNYKRKMNRERFVASVEEVVPDGVEKVYDVKIPGINAFNANGFVVHNTSLGQVTIDGGTYDIYRTTRVNQPSIVGTATFDQYWSVRTSKRTSGTVTVTDHFRAWANRGLNLGTIDQITLCVEGYQSSGSANITQNTFSQGSSSGSSGGSSGSTTTTRIECENMSLSGPYVSRITNPFNGIALYANGDTARATVNFPASRNYNFRLRGCGNNNNLARVDLRIDGRTVGTFYYQGTYPWEAPIDNVYVSAGSHTVEITVTADNGTWDVYADYLVIQ

SEQ ID NO: 2685 - protein, 792 aa, Artificial Sequence
  Synthetic Construct, AT-156 intein modified protein
MQTSITLTSNASGTFDGYYYELWKDTGNTTMTVYTQGRFSCQWSNINNALFRTGKKYNQNWQSLGTIRITYSATYNPNGNSYLCIYGWSTNPLVEFYIVESWGNWRPPGACFAKGTEVMMHDGSVKAIETIEAGEAVMGTDGQPRKVVGLPRGREVMYKVSQKTAHRVHKTDETRAAPVALFEYNCNATHKLVVRTPRSCRSITRKMQGVDYNEVIFFDLKKKKLEDGREIEIVKEVSRSYPAAEGAEKAAQMVKDYYDAARGKEFFEWTIEARDVELGAHVRKATHQVYAPVLYESDFFFHYVKNSKFALRSEASTALAYLLGLWVGDGLSDRAVLSVDSEDSSLLERITGYADILDLSAEYKDREIPKRAKTVCLYPKTIRGNDIRRNLNTDNPVWNAIVDLGYLKDGVKNVPSYLFSDSICHREVFLAGLIDSDGHVRGDDGLSVTIKTIHKTVMEGTVAVARSLGLIVSVNTEEAKIDKNDVNHRFVYAIYISGGDALLSVLAHCAAAKKFRAPPSNEVVRGLKKVFFEMEELKEDDYYGITLAKESDHQFLLANQLVVHNTSLGQVTIDGGTYDIYRTTRVNQPSIVGTATFDQYWSVRTSKRTSGTVTVTDHFRAWANRGLNLGTIDQITLCVEGYQSSGSANITQNTFSQGSSSGSSGGSSGSTTTTRIECENMSLSGPYVSRITNPFNGIALYANGDTARATVNFPASRNYNFRLRGCGNNNNLARVDLRIDGRTVGTFYYQGTYPWEAPIDNVYVSAGSHTVEITVTADNGTWDVYADYLVIQ

SEQ ID NO: 2686 - protein, 787 aa, Artificial Sequence
  Synthetic Construct, AT-157 intein modified protein
MQTSITLTSNASGTFDGYYYELWKDTGNTTMTVYTQGRFSCQWSNINNALFRTGKKYNQNWQSLGTIRITYSATYNPNGNSYLCIYGWSTNPLVEFYIVESWGNWRPPGACFAKGTEVMMSDGSIKEVEGIEVGQEVMGKDGKPREVVGTPSGREKMYKVSHKTAHRAHKSDSTSERFGLFEYTCNATHKLVVRTSRSCRPLVRNIQGTDYVEVCLFNMTKKTLEDGRVIDIVEETSDFYPAVEGPEKALRILKEYAEADGGKEYFEWTIEARDVALLSAQVRKATYQLSAPVLLENNHFSHYLKDSNSAVGNDTVRALSYFLGLWIGDGMLNNAATFSVDSQNASLLNRINEFAEVLGLSAEYKDSQEPKRAKTVNLYAKAIRDEGVRKNLDTHNLLWDAIVDLGYLKDDSKNVPGYICSDSFQHREVFLAGIIDSTGYVSDETATVKTIDQSVMTGTVAVARSLGINVSVDVEVDEDGVDRSFVYAIYMDRSDALLAVLANCASNNKQIEAPPHGVIREFNKAYFEMEELEEDEYYGLTLSNESDHQFLLANQLVVHNTSLGQVTIDGGTYDIYRTTRVNQPSIVGTATFDQYWSVRTSKRTSGTVTVTDHFRAWANRGLNLGTIDQITLCVEGYQSSGSANITQNTFSQGSSSGSSGGSSGSTTTTRIECENMSLSGPYVSRITNPFNGIALYANGDTARATVNFPASRNYNFRLRGCGNNNNLARVDLRIDGRTVGTFYYQGTYPWEAPIDNVYVSAGSHTVEITVTADNGTWDVYADYLVIQ

SEQ ID NO: 2687 - DNA, 2052 bp, Artificial Sequence
  Synthetic Construct, AS-1 intein modified protein encoding nucleic acids
atgcaaacaagcattactctgacatccaacgcatccggtacgtttgacggttactattacgaactctggaaggatactggcaatacaacaatgacggtctacactcaaggtcgcttttcctgccagtggtcgaacatcaataacgcgttgtttaggaccgggaagaaatacaaccagaattggcagtctcttggcacaatccggatcacgtactctgcgacttacaacccaaacgggaactcctacttgtgtatctatggctggtctaccaacccattggtcgagttctacatcgttgagtcctgggggaactggagaccgcctggtgccacgtccctgggccaagtgacaatcgatggcgggacctacgacatctataggacgacacgcgtcaaccagccttgcttcatcgaggggacggaggttctcactaagcgggggttcgtggatttcagggagctgcgggaggatgatctggtcgctcagtacgacatcgagaccggcgagatttcctggacgaagccatacgcttacgtcgagcgggattacgagggctccatgtaccgcctgaagcaccctaagagcaactgggaggtggtcgctaccgagggccatgagttcatcgtgaggaatctgaagacggggaaggagcggaaggagccaatcgagaaggtcaagctccacccatactccgctattcctgttgctggcaggtacacaggggaggtggaggagtacgacctctgggagctggtctcgggcaaggggatcacactcaagactaggtctgccgttaagaacaagctgaccccgatcgagaagctcctgattgtgctccaggcggacggcacaattgattcaaagcgcaatggcaagttcactgggttccagcagctgaagttcttcttctccaagtacaggaagatcaacgagttcgagaagattctcaatgagtgcgcgccgtacggcatcaagtggaagaagtacgagcgccaggacgggattgcttacacagtttactaccccaacgatctgccgatcaagcccactaagttcttcgacgagtgggtgcgcctcgatgagatcacggaggagtggattagggagttcgtggaggagctggtcaagtgggacggccatatcccgaaggatcggaacaagaagaaggtctactactacagcaccaaggagaagcgcaataaggacttcgttcaggctctctgcgctctgggcgggatgaggacggttgtgtcgcgcgagaggaacccgaaggccaagaatcccgtctaccggatctggatctacctggaggacgattacatcaacacccagacgatggtgaaggaggagttctactacaagggcaaggtctactgcgtttctgttccaaagggcaacatcgtggttaggtacaaggattctgtctgcattgctggcaactccattgtggggacagccacgttcgatcagtactggagcgtgcgcacctctaagcggacttcaggaacagtgaccgtgaccgatcacttccgcgcctgggcgaaccggggcctgaacctcggcacaatagaccaaattacattgtgcgtggagggttaccaaagctctggatcagccaacatcacccagaacaccttctctcagggctcttcttccggcagttcgggtggctcatccggctccacaacgactactcgcatcgagtgtgagaacatgtccttgtccggaccctacgttagcaggatcaccaatccctttaatggtattgcgctgtacgccaacggagacacagcccgcgctaccgttaacttccccgcaagtcgcaactacaatttccgcctgcggggttgcggcaacaacaataatcttgcccgtgtggacctgaggatcgacggacggaccgtcgggaccttttattaccagggcacatacccctgggaggccccaattgacaatgtttatgtcagtgcggggagtcatacagtcgaaatcactgttactgcggataacggcacatgggacgtgtatgccgactacctggtgatacagtga

SEQ ID NO: 2688 - DNA, 1473 bp, Artificial Sequence
  Synthetic Construct, AS-2 intein modified protein encoding nucleic acids
atgcaaacaagcattactctgacatccaacgcatccggtacgtttgacggttactattacgaactctggaaggatactggcaatacaacaatgacggtctacactcaaggtcgcttttcctgccagtggtcgaacatcaataacgcgttgtttaggaccgggaagaaatacaaccagaattggcagtctcttggcacaatccggatcacgtactctgcgacttacaacccaaacgggaactcctacttgtgtatctatggctggtctaccaacccattggtcgagttctacatcgttgagtcctgggggaactggagaccgcctggtgccacgtccctgggccaagtgacaatcgatggcgggacctacgacatctataggacgacacgcgtcaaccagccttgccagccttactctgcgccggtttcaactcctgatgggcctattcctatcggcaagctcgtggacgctaatgcggtcggggagaaggtgttcgacgcgtcgggcgtcaccaggattgttgctaccacgtgcaacgggaggaagccagtcctccgcatcaggacatccggcgggcacgttctcgacgtgactccagatcatctggtttggcaggtggtcgaccagaccgctggcaggttcgtgccagctggccagctccgggtcggggataggctggagtggcacgacagggccaattccgatgctatggtcgctgcgttcacggctgacagcgctgctgcggctcagccaggccagatcgttgacattctcgcgatcgatgagctgggcgtgatgcctgtctacgatattcagacagagtcgggggagtacctctcagatggcattagggttcataactccattgtggggacagccacgttcgatcagtactggagcgtgcgcacctctaagcggacttcaggaacagtgaccgtgaccgatcacttccgcgcctgggcgaaccggggcctgaacctcggcacaatagaccaaattacattgtgcgtggagggttaccaaagctctggatcagccaacatcacccagaacaccttctctcagggctcttcttccggcagttcgggtggctcatccggctccacaacgactactcgcatcgagtgtgagaacatgtccttgtccggaccctacgttagcaggatcaccaatccctttaatggtattgcgctgtacgccaacggagacacagcccgcgctaccgttaacttccccgcaagtcgcaactacaatttccgcctgcggggttgcggcaacaacaataatcttgcccgtgtggacctgaggatcgacggacggaccgtcgggaccttttattaccagggcacatacccctgggaggccccaattgacaatgtttatgtcagtgcggggagtcatacagtcgaaatcactgttactgcggataacggcacatgggacgtgtatgccgactacctggtgatacagtga

SEQ ID NO: 2689 - DNA, 2268 bp, Artificial Sequence
  Synthetic Construct, AS-3 intein modified protein encoding nucleic acids
atgcaaacaagcattactctgacatccaacgcatccggtacgtttgacggttactattacgaactctggaaggatactggcaatacaacaatgacggtctacactcaaggtcgcttttcctgccagtggtcgaacatcaataacgcgttgtttaggaccgggaagaaatacaaccagaattggcagtctcttggcacaatccggatcacgtactctgcgacttacaacccaaacgggaactcctacttgtgtatctatggctggtctaccaacccattggtcgagttctacatcgttgagtcctgggggaactggagaccgcctggtgccacgtccctgggccaagtgacaatcgatggcgggacctacgacatctataggacgacacgcgtcaaccagccttgcgttacaggggacacaagggtcctcctcgcggacgggcagcgggttcctattcgggatctcgtggggcagacgcctgaggtcatttctgtcaacgctgagggcaggctggagccagctaagaccgacctcgtgtggtccgttggggtgcgccctctcctgcaggtcaggctggcttccggcaggaccatcaggtgcacgccagagcacaggctcaggggcctgtgggattggaaggaggcccgcgacatcagggtcggggataggctgggcattgctcgggagctcccagctccaaaggtgacgaagcgctgggctgagcacgagctggtgctcctggctcatctcgtcggcgacgggtcctacattaagggccagccactgaggtacaccacggcttcagaggcgaactccgaggctgttagcagggccgctgaggctatgggctctacagtgactaggcacccaggcagggggcagtggcatcagctcgtcatctcaggcaacgggaataggtggcacccacagggcgttgggaagtggctcaagcagctgggggtgttcggccagaggagccgggagaagcacctgccacaggaggtgttccagctcgacaatgatcagctggccctcttcctgaggcatctgtgggcgacagacggctcgatcactcaggggtctgctggccgccctaggatctacttctcgacggcctctcggcacctcatccaggatgtcgctgccctcctgctccggttcgggatcgttggccgcacaaagcacattactcatggcgacggggagggctggttcacactggatatttcgggcgctgtccagcagcagaggtacctggagaagatcggggccttcggccaccaggctcataacgctaggagggctctccagcatctgaggggcctcgtcgagaacaccaatgttgacacgctgccggaggaggtgttcaattacatccgggagcgcatgagggaggaggggattacacacaggcagatggctgctctcaggggcactgcttacggcgggagcgctcatttcaccttctccccgagcagggagacgctgctctcgtacgcggacatcctcaacgatcagcggctgcgcatgctcgccaatcagcacgttttctgggaccgcgtggtctccgtggagcccgcgggcgaggaggaggtcttcgatctcacagttccgggcaatgcttgctggctcgcggatggcatcgtttcacacaactccattgtggggacagccacgttcgatcagtactggagcgtgcgcacctctaagcggacttcaggaacagtgaccgtgaccgatcacttccgcgcctgggcgaaccggggcctgaacctcggcacaatagaccaaattacattgtgcgtggagggttaccaaagctctggatcagccaacatcacccagaacaccttctctcagggctcttcttccggcagttcgggtggctcatccggctccacaacgactactcgcatcgagtgtgagaacatgtccttgtccggaccctacgttagcaggatcaccaatccctttaatggtattgcgctgtacgccaacggagacacagcccgcgctaccgttaacttccccgcaagtcgcaactacaatttccgcctgcggggttgcggcaacaacaataatcttgcccgtgtggacctgaggatcgacggacggaccgtcgggaccttttattaccagggcacatacccctgggaggccccaattgacaatgtttatgtcagtgcggggagtcatacagtcgaaatcactgttactgcggataacggcacatgggacgtgtatgccgactacctggtgatacagtga

SEQ ID NO: 2690 - DNA, 2829 bp, Artificial Sequence
  Synthetic Construct, AS-4 intein modified protein encoding nucleic acids
atgcaaacaagcattactctgacatccaacgcatccggtacgtttgacggttactattacgaactctggaaggatactggcaatacaacaatgacggtctacactcaaggtcgcttttcctgccagtggtcgaacatcaataacgcgttgtttaggaccgggaagaaatacaaccagaattggcagtctcttggcacaatccggatcacgtactctgcgacttacaacccaaacgggaactcctacttgtgtatctatggctggtctaccaacccattggtcgagttctacatcgttgagtcctgggggaactggagaccgcctggtgccacgtccctgggccaagtgacaatcgatggcgggacctacgacatctataggacgacacgcgtcaaccagccttgcctcgccaatgggacacagctgctgcgctacgatgggacaaaggtcaacgtggaggacgtgaaggagggggatctgctgctgggcccagacggcgggccaaggagggcgttcaacgtggtctccggcaaggaccgcctgtacaggatcaagattgacggggataaggaggatctcgttgtgaccgccaaccacatcctcgtgctgcatagggcgaaggctatgaatacgtctgtctgcttcgaccggtcaaaggagcagcagggcggggctggcgagcagctggacatttccgaggtcagcgccgcggagcgctacgataccgttgagatgacggctgctgagttcgctgctctgcacccacaggagaggtcctggtacagggctatcaggtgcccaggcttcgagctccctgagcaggacgtcccagttaacccttacttcctcggcctgtggctcggggatgagtcccggaaccagagcgctatctactcgaatcacgaggaggccctgcgcgagttcctcgtgagccatgccgcggagctggacatgcacctcgtttaccatggccagtcggcgtactctaccgtgtgcaacaaggatcgcccaacgaataagaggatcggccctgccaaccagacccagacggtcaggccaaccatccggcagacacggcgcactattaggcagcagaggctggctgctgagcacgctgctgctgagtacaccacgcagagggagacagcgtccctcactccgctcctggagtcacccacatccgacaagcatggcctcctgtccagcgtcgagactccagggaggctgtcagattccgttacaactgagctccccatgagcaggtcggcctctgctatgaggtcgatcaggaccgccagcggcctctcggagttcaacgacgtgacgaatgtctcagcttccatgccggatatccagaactctggcattaagaatcaggggaggatcgctaaggtgaccaggcagcaggactctaagggcgaggtcgatttccgccagcagtactcacaggccattaaggacgatctggagctcctggagacggacatcgaggacgatgtggcgtcgtctgacgagattgaggatgtctgcgtcgttggcagcgagaacgagctcatcgggtccgagaagcaggaccagagcggcaggaggaggcagattcacaggctgaggaccgggcataggggctacggggacctctcggacgatgagcaggagcagctcctggacagcgtggtcgagcgctacgcgggcgattcgcggctgaatacactccagcaggagctgagcaagatgggcatcctcaacccagagactgggcctatcaatgacaagaagcgcattccgcaggtgttcatgcagaacagccggtcggttcgcctgtcggtgctcgctggcctcctggactctgatgggtggtacatctaccccgagaatatgttcggcttcgctcagtccgagctgtgccacaaggagctcttctgggacgttgtgacactggctaggagcctcggcttcggggtctggacaaagaagcggatgatgccggaccccactggcaagcgcatgtcaccaatgctggtggcccagatctccggcgatctggcggagattccttgcgtcctcgctcgcaagaaggccatgccgaggctgatcccccagtctcactcattcgccatcaaggacatttctctggagtcagaggcgacggagtgggctggcttcagggtggataaggatcagctctacctcaggcatgactacgtggttctgcataattccattgtggggacagccacgttcgatcagtactggagcgtgcgcacctctaagcggacttcaggaacagtgaccgtgaccgatcacttccgcgcctgggcgaaccggggcctgaacctcggcacaatagaccaaattacattgtgcgtggagggttaccaaagctctggatcagccaacatcacccagaacaccttctctcagggctcttcttccggcagttcgggtggctcatccggctccacaacgactactcgcatcgagtgtgagaacatgtccttgtccggaccctacgttagcaggatcaccaatccctttaatggtattgcgctgtacgccaacggagacacagcccgcgctaccgttaacttccccgcaagtcgcaactacaatttccgcctgcggggttgcggcaacaacaataatcttgcccgtgtggacctgaggatcgacggacggaccgtcgggaccttttattaccagggcacatacccctgggaggccccaattgacaatgtttatgtcagtgcggggagtcatacagtcgaaatcactgttactgcggataacggcacatgggacgtgtatgccgactacctggtgatacagtga

SEQ ID NO: 2691 - DNA, 2418 bp, Artificial Sequence
  Synthetic Construct, AS-5 intein modified protein encoding nucleic acids
atgcaaacaagcattactctgacatccaacgcatccggtacgtttgacggttactattacgaactctggaaggatactggcaatacaacaatgacggtctacactcaaggtcgcttttcctgccagtggtcgaacatcaataacgcgttgtttaggaccgggaagaaatacaaccagaattggcagtctcttggcacaatccggatcacgtactctgcgacttacaacccaaacgggaactcctacttgtgtatctatggctggtctaccaacccattggtcgagttctacatcgttgagtcctgggggaactggagaccgcctggtgccacgtccctgggccaagtgacaatcgatggcgggacctacgacatctataggacgacacgcgtcaaccagccttcgctgccaccatgggagcctatcgtggtcaggcggggggatgaggttcgggttacatcaatcggggagttcgtggattctttcctggagggcgagggcgggctggacatcggcgggctcggctactacaccctgtcgctcgatacccggacgctgaagccagtctggaggaggatccgcggcgttattaagcaccggatccgcggcaggctcctgagggtcaaggcctcaaagggccgctccatcgacctgacgggctctcattcaatctacaggattagcaggggcgggggcctggaggtggtcggctccagcgacctgaggccaggcgattctctcgtgacacctgcttcagtcgagctcccagagtccgccccttcgtctattaacgctgcgagggagctgtggagccggggggtggagggcatcttcgttgtggggctcccaggcgaggctgctgggtacaggggcgtcgagcggtcgcgcggctacgacgggggccacgctatccctctggagacgctcgtggagcgctacggcgattcggtctggtctctggtttcaggcgcgaagctcgctgtttcccggggggctgctggcgaccacccagtgcccgccaccattccgctggatacggggttctacctcctgctcggcttcatcgtgtccgctggcagcgtggacgtcgaggggggccatgttacagtgactctcggcccagggagggagggctacgtgggcgatgtcgttgaggctgtcaactccactgctccaggcgctggggtccgcatttcatccggggcgaggggcatggaggttaccatcaggagccgggtgctgtcggagctgctcgctagggtgttcggcgctgggccaggccctaatcgggacatcccctctattgtcttcagggccccgaagcccatgaagcgggttttcctgaagggcctctacgctgggggcggggtcttcgaccggagctcgggcagcctgatctacgccaccgattcccgcagcctgctcaacggcctcgctctgctcctgctcaatgtgggcgctggcgggtacaggatcgactcgggggattctggcagggctctggcgctcattgtggagaatgctggcaggctcgacgctatcggcgaggtcctggagcacctcggcttccatggcgggagggaggctgttcagggggtgggcgctctggagagggctacagctgggctcgctggccaggctactgtcgctgttcagaggccagctacccgcggcgggccaggcgtggacgtcgcgggggtgacgggcctggagcacctggaggctagcacagagttcgtctacgatctctctgtggagggggatgagaacttcttcgccgggctcgggtggattctcgtgcataattccattgtggggacagccacgttcgatcagtactggagcgtgcgcacctctaagcggacttcaggaacagtgaccgtgaccgatcacttccgcgcctgggcgaaccggggcctgaacctcggcacaatagaccaaattacattgtgcgtggagggttaccaaagctctggatcagccaacatcacccagaacaccttctctcagggctcttcttccggcagttcgggtggctcatccggctccacaacgactactcgcatcgagtgtgagaacatgtccttgtccggaccctacgttagcaggatcaccaatccctttaatggtattgcgctgtacgccaacggagacacagcccgcgctaccgttaacttccccgcaagtcgcaactacaatttccgcctgcggggttgcggcaacaacaataatcttgcccgtgtggacctgaggatcgacggacggaccgtcgggaccttttattaccagggcacatacccctgggaggccccaattgacaatgtttatgtcagtgcggggagtcatacagtcgaaatcactgttactgcggataacggcacatgggacgtgtatgccgactacctggtgatacagtga

SEQ ID NO: 2692 - DNA, 2148 bp, Artificial Sequence
  Synthetic Construct, AS-6 intein modified protein encoding nucleic acids
atgcaaacaagcattactctgacatccaacgcatccggtacgtttgacggttactattacgaactctggaaggatactggcaatacaacaatgacggtctacactcaaggtcgcttttcctgccagtggtcgaacatcaataacgcgttgtttaggaccgggaagaaatacaaccagaattggcagtctcttggcacaatccggatcacgtactctgcgacttacaacccaaacgggaactcctacttgtgtatctatggctggtctaccaacccattggtcgagttctacatcgttgagtcctgggggaactggagaccgcctggtgccacgtccctgggccaagtgacaatcgatggcgggacctacgacatctataggacgacacgcgtcaaccagccttgcttcgctcctgagacactcgtgcataccgctgatgggcctcggcctattcgggatctccagcagggggatctcgttctgggcatcagcggccgctacagggaggttacccacaagttcgtgtacaaccagacggacgctatgctcgccatccgcgtcaagcacgccgttgagccaattgaggttacagctggccatcctttctacgccatcaggggcgtgccactggagcagtcgggggagcgcaccctcaggcagctggagtccggcaagcggagcccagagtggatcgacgctggcgagctggagaggggggattacatggcccaggtcatcccatctgaggtggtccctgtcgcgggcttcgacgaggacgatgctcgcctctacgggatcctcctgggcgatgggcatctcagcaagaatggcctgcagtggggcgtctcggggcacccacagagggacgggcacatggatttcgttagggcgtacctgtccgctcggggcatccacttctgggagaccgcgagggacgagacgtacgggcagattcattgggctagcggcaggggggtccgcagggatgctaccacgggcaggatcacaggcgctggggctgcgactctccctttcgagcacgccgacctgtacgatgagcagggccggaagcgcatcgctaggcgcttctcacatctcccaaggcagcagtccctcgctctgatcaggtcgctcctggagtctgacggcggggtgtctcgcggcaaggagatctacttcacaaacacttcaaggcccctcattgagggcctgaggtaccagctcctgaggctgggcgtgccaaccgctgggcagtacagggagaggaggcaggaccacgtcggccagagggctgatgggtcgccaatcaggttcgagggcgtgtgcaaggcgtacgacctcaggattccggctgttccagaggtggctcagctggtcggctgccagccaatcgccaagcggaattggattacgtggcagggctgcgtctactccaggatccgggatgttcagccgattgcggtgaagcccttcgtcttcgatctcaaggtggagggggatgagagctacatgactacttccgggctcgctcacaactccattgtggggacagccacgttcgatcagtactggagcgtgcgcacctctaagcggacttcaggaacagtgaccgtgaccgatcacttccgcgcctgggcgaaccggggcctgaacctcggcacaatagaccaaattacattgtgcgtggagggttaccaaagctctggatcagccaacatcacccagaacaccttctctcagggctcttcttccggcagttcgggtggctcatccggctccacaacgactactcgcatcgagtgtgagaacatgtccttgtccggaccctacgttagcaggatcaccaatccctttaatggtattgcgctgtacgccaacggagacacagcccgcgctaccgttaacttccccgcaagtcgcaactacaatttccgcctgcggggttgcggcaacaacaataatcttgcccgtgtggacctgaggatcgacggacggaccgtcgggaccttttattaccagggcacatacccctgggaggccccaattgacaatgtttatgtcagtgcggggagtcatacagtcgaaatcactgttactgcggataacggcacatgggacgtgtatgccgactacctggtgatacagtga

SEQ ID NO: 2693 - DNA, 2478 bp, Artificial Sequence
  Synthetic Construct, AS-7 intein modified protein encoding nucleic acids
atgcaaacaagcattactctgacatccaacgcatccggtacgtttgacggttactattacgaactctggaaggatactggcaatacaacaatgacggtctacactcaaggtcgcttttcctgccagtggtcgaacatcaataacgcgttgtttaggaccgggaagaaatacaaccagaattggcagtctcttggcacaatccggatcacgtactctgcgacttacaacccaaacgggaactcctacttgtgtatctatggctggtctaccaacccattggtcgagttctacatcgttgagtcctgggggaactggagaccgcctggtgccacgtccctgggccaagtgacaatcgatggcgggacctacgacatctataggacgacacgcgtcaaccagccttgcctctcgggggatactgaggtcgttctcgggaatggcatggacgtggttctgctgacggatctcgtggacggggcgtgcgtttcgacaatcgagccaaggactggcgtggtcagcccatcgctcatcgaccattacttcgccaaggatgcgacccgcgtcctcaagatcacgctggacgatggcagggttattaaggctgacccagagcaccctctgttcgctgctaaggtggatgagaccacgcgcggcctcaccgggcagtggctgagggtggaggagctcacggtcggccaccatgctctcctggtgtcgccacagcaggcttactgcacctctgagcagtggacactcactctgtcagagaaggaggtctgcaccgcttccacggctcagctcgctaagcagctgtccgagatcggcctggtcggggttccgattcccctctctaaggtgaagtcagctgccaggctgttcggcctcgtcctgtccgctggcgacttcagcgggaagctctacgtggagaaggacgaggatgttacagccgtgaacagcgacctcactgcgctgggcttctcgccagctcactgggtccggtaccaggacgatcagcagaagtggttcaagtgcgacgattcgaacggcaaggcgatctgcattaccctggtccctacggctaatgctctcctgcagaccctcggggctcacgacgctgagaagcagcatcggtactgcctcctgccaaagtggctcctggatgcccctacgtccatcaagagggagttcctcggcgctctgttcggcgggaacggggcccacatcacaatttcgtgcaatgagggcaagtgggagccgactatgtctgcgctcacacagcacactgacgctgatcatctggagagcacagttgtgtacctcaagcaggttgccactctcctgggcatgctgaacatctgctccagcgtgtcgtctgagaagcacattacagccgagaagactgggtacgcggtccacctgcatgttgacaacacggcggagaatctcgttcggttctacgagcaagtgggctaccgctactgcttcaataagacatcccagtcatccgcccccgtgcagtggatcaaggggtctctgttcttcattgagcagcaccgctcaaagtgccagcatgctttcgagctcctgcacaccggcctcgggacgaaggctgctgtctccgccgagatcaacatgccacaccataatcctagccacatgctgaacgttaaggagatcccgaccgctcccgccgacgagtacatcacgtggattgagttcaaggatcgctacgtgcataaggagtccccgcggttcgtgtgggtcaccatccacagcattgaggaggcgcccgctgagaggctctacgacttcaatacggtttcgcagaatcatagcttcttcgccaacagcatcgtctctcataattccattgtggggacagccacgttcgatcagtactggagcgtgcgcacctctaagcggacttcaggaacagtgaccgtgaccgatcacttccgcgcctgggcgaaccggggcctgaacctcggcacaatagaccaaattacattgtgcgtggagggttaccaaagctctggatcagccaacatcacccagaacaccttctctcagggctcttcttccggcagttcgggtggctcatccggctccacaacgactactcgcatcgagtgtgagaacatgtccttgtccggaccctacgttagcaggatcaccaatccctttaatggtattgcgctgtacgccaacggagacacagcccgcgctaccgttaacttccccgcaagtcgcaactacaatttccgcctgcggggttgcggcaacaacaataatcttgcccgtgtggacctgaggatcgacggacggaccgtcgggaccttttattaccagggcacatacccctgggaggccccaattgacaatgtttatgtcagtgcggggagtcatacagtcgaaatcactgttactgcggataacggcacatgggacgtgtatgccgactacctggtgatacagtga

SEQ ID NO: 2694 - DNA, 2271 bp, Artificial Sequence
  Synthetic Construct, AS-8 intein modified protein encoding nucleic acids
atgcaaacaagcattactctgacatccaacgcatccggtacgtttgacggttactattacgaactctggaaggatactggcaatacaacaatgacggtctacactcaaggtcgcttttcctgccagtggtcgaacatcaataacgcgttgtttaggaccgggaagaaatacaaccagaattggcagtctcttggcacaatccggatcacgtactctgcgacttacaacccaaacgggaactcctacttgtgtatctatggctggtctaccaacccattggtcgagttctacatcgttgagtcctgggggaactggagaccgcctggtgccacgtccctgggccaagtgacaatcgatggcgggacctacgacatctataggacgacacgcgtcaaccagccttgcttcgggcgggatacccctctcctcatggcggacggcactactaagttcgttcaggacattaaggctctggatcagctcatgggcgacgattgcacgccgcgcatcgtccaggagaggtctctcgttcacgagtcaggggctctgtacagggtggtccccaagaacgccaatggccacgacgcgttcgtgtgcaacaaggagcatatcctcgtgatggtcaatgttaagcagccgtgggtcagccagacggttatcgacggcgtggatcagttccatgtctcggaggttgtgtgcatcgggaacattccgacagtgcgctccagcggcaatttcgcttctgctgtcgaggctacgaaggctctgccagcttggacactcctgatctgggagattagcgtgctggagtacctggcggtcgacgctgatctcaggcagcacttcatgatctacaagccagctggcgggattgagtacccaaccacgacaaacctggacatcgtgcagcacttcggcgccgagtcggttcccaacctggagcatgccgtgatgtggtgcatcggcctgtggattctcctgggggacgtcgatacagccggcaacccagttctcatcctgagcggcattgaccacctccatcctctgatcaagactctccactcgcattctcagaagctgtcaatttccttcaccaaccagctcgacgagggggtcgctgatatcagcaagccaaccatcattgccctcggcgacaagttcgggctcctgttcaagtccctgggcatcgagagcgctgagtgcattcctgatgccctcctgaggtcgtctaagctccacagggctgctctcctggctggcctggtggaggggagcaacgctttctcgatcgtcaaggacactccaaagcattgggatatttcctgcaagaacaatatgatcttcgagaatattaagaggctctcatccagcctcggcctgtgcgttgacacggtgacaccagcgactatcacccagcaggtgtccgtcaagacgctgcagatccggatttcgggccctcgcatgcactacgtgtctgagctcatcagcaacgactcgctgaagactacctctgtcgtttcaatcgattcctggctgaacgtcaagtcaaatgcctgcgagttcgagatcgagtccattggctgcggggagtacttcggcttcacagttatggggccaaactcaaggttcctcctcggggatttcacagtcacacacaactccattgtggggacagccacgttcgatcagtactggagcgtgcgcacctctaagcggacttcaggaacagtgaccgtgaccgatcacttccgcgcctgggcgaaccggggcctgaacctcggcacaatagaccaaattacattgtgcgtggagggttaccaaagctctggatcagccaacatcacccagaacaccttctctcagggctcttcttccggcagttcgggtggctcatccggctccacaacgactactcgcatcgagtgtgagaacatgtccttgtccggaccctacgttagcaggatcaccaatccctttaatggtattgcgctgtacgccaacggagacacagcccgcgctaccgttaacttccccgcaagtcgcaactacaatttccgcctgcggggttgcggcaacaacaataatcttgcccgtgtggacctgaggatcgacggacggaccgtcgggaccttttattaccagggcacatacccctgggaggccccaattgacaatgtttatgtcagtgcggggagtcatacagtcgaaatcactgttactgcggataacggcacatgggacgtgtatgccgactacctggtgatacagtga

SEQ ID NO: 2695 - DNA, 2169 bp, Artificial Sequence
  Synthetic Construct, AS-9 intein modified protein encoding nucleic acids
atgcaaacaagcattactctgacatccaacgcatccggtacgtttgacggttactattacgaactctggaaggatactggcaatacaacaatgacggtctacactcaaggtcgcttttcctgccagtggtcgaacatcaataacgcgttgtttaggaccgggaagaaatacaaccagaattggcagtctcttggcacaatccggatcacgtactctgcgacttacaacccaaacgggaactcctacttgtgtatctatggctggtctaccaacccattggtcgagttctacatcgttgagtcctgggggaactggagaccgcctggtgccacgtccctgggccaagtgacaatcgatggcgggacctacgacatctataggacgacacgcgtcaaccagccttgcgttacgggggagacgctgctgctgacggagaatggctacgagaaggccgctgatctctacaagaagcagaacaatctgaaggttgtgatcgacaacaggacaaaggacttcgctgtggatagcaagggcaccacgatcgtcgacgctattccaatgcagctgacgaagaaggatgccgagatcttcaaggtcaagaccaagcagggctacgagattcgcgcgacggagtggcacaagttctacgttaagagggacggcgagatccagaagctgcagctcaaccagctgaagaccggggataagctcctggtccagtccgctgagggcgcttacgggaagatccatgagcccgacctcgcctacattatgggcatcattgcgggcgatgggaccatcacggagaagaccgccaagatctacctctacgacaacaagaaggtgctggagcagaaggttacggatgcggtgcacaggatcattcacaagcataaggtcgaccgggcttacaagcataatacatcactcctgccaactttcaacatggcgaatcctgagaagcaggacctcctgtacatgaactccacagttctgttcgatatcctcaagaagttcggcatgaataaggagcgcaagactagggtcccggagttcattttccaggccaacaaggagacacaggccgcgtacctgagcggcctcttccagactgacgggtgcgtgaacgcgaatcacaaggctaaggccctgaccatcgagctcacgtccattcattacgagagcctgcaggatgttcagaagctcctgctcaatatgggcgtgtacacaactatctactcgaacaataagcggtctcaggagctgctcccagacgggaagggcgggtcgaagctctacaacgtcaagcccacccacaagatctcaattcaggatcgcaactcccgcgagctgttcatgagcatcgtcgagctcaaggactacgatgtttacaagttcaacctgctcacagagactctccagccgaagtcgcgcaagcccaagcacgacttcacggccgagatcatttctatcgaggaggacggcgtggaggatgtctacgatactactcaggaggattaccactctctcatcttcaatggcatcgttacgggcaactccattgtggggacagccacgttcgatcagtactggagcgtgcgcacctctaagcggacttcaggaacagtgaccgtgaccgatcacttccgcgcctgggcgaaccggggcctgaacctcggcacaatagaccaaattacattgtgcgtggagggttaccaaagctctggatcagccaacatcacccagaacaccttctctcagggctcttcttccggcagttcgggtggctcatccggctccacaacgactactcgcatcgagtgtgagaacatgtccttgtccggaccctacgttagcaggatcaccaatccctttaatggtattgcgctgtacgccaacggagacacagcccgcgctaccgttaacttccccgcaagtcgcaactacaatttccgcctgcggggttgcggcaacaacaataatcttgcccgtgtggacctgaggatcgacggacggaccgtcgggaccttttattaccagggcacatacccctgggaggccccaattgacaatgtttatgtcagtgcggggagtcatacagtcgaaatcactgttactgcggataacggcacatgggacgtgtatgccgactacctggtgatacagtga

SEQ ID NO: 2696 - DNA, 2124 bp, Artificial Sequence
  Synthetic Construct, AS-10 intein modified protein encoding nucleic acids
atgcaaacaagcattactctgacatccaacgcatccggtacgtttgacggttactattacgaactctggaaggatactggcaatacaacaatgacggtctacactcaaggtcgcttttcctgccagtggtcgaacatcaataacgcgttgtttaggaccgggaagaaatacaaccagaattggcagtctcttggcacaatccggatcacgtactctgcgacttacaacccaaacgggaactcctacttgtgtatctatggctggtctaccaacccattggtcgagttctacatcgttgagtcctgggggaactggagaccgcctggtgccacgtccctgggccaagtgacaatcgatggcgggacctacgacatctataggacgacacgcgtcaaccagccttgcgttaccgctgacacactcatcgctactgacagggggctggagaggatcggcaacatcgtgggggagtctaggggcatcaagtctattgacggcaagctccactgggtcgagaacatcttcccgacagggactaagcccgtttaccagctgaggaccaagtctggctaccagctgaagctcaccggggatcatgtggtcttcacggagaataggggcgacgtcaaggcttgcgagctgaggaaggacgatatggtccggctcgttggcgctccattcgggaaggagaccacgggctccacagatatcgcccagctcattgggctcctgactggcgacgggtgcatcacaactgccaacgagattgctgcttcgggcgagcagaggaggaccgcgttcctgacggtttctaaggctgagcaggagattgcggagtgggctaaccagttcatcaatacgctgaggccggagctcggcgagcacaataagtcggggtctgtgaccgagacggccaccacggcgcgggttgctgtgggctccccacgcatcctcaagcagttcgaggcgttcgctgttctggataagggcagcgtgcataagctcttcacagacaaggtgttccagctggctcagtcggagcaggctgctctcctgaggggcctgttcacagctgacgggactgtcgccaactactccgataagtcccagtacatcgctctggacgctacgagcctggagctcctgcagcaggtccagctcctgctcttcaacttcggcatcaagtccaagatctacgagaataggagggtgggcgagctcgtctccctgctcccagacgggaagggcgggatcaaggagtaccctgtgcagcagatgcacagcctcaggatctcgcggtccagccgcattctgttcgagcagcagatcggcttcatggccgagtcgaagaagtacgaggccctggcggagctcaaccgcacagtgtccacttacagggacagcgcgtacgatgctgtcgcctctctgacctactcaggcgaggaggccgttttcgatctcacggagccggagacggatcatttcattgctaatggcattggggttcataattccattgtggggacagccacgttcgatcagtactggagcgtgcgcacctctaagcggacttcaggaacagtgaccgtgaccgatcacttccgcgcctgggcgaaccggggcctgaacctcggcacaatagaccaaattacattgtgcgtggagggttaccaaagctctggatcagccaacatcacccagaacaccttctctcagggctcttcttccggcagttcgggtggctcatccggctccacaacgactactcgcatcgagtgtgagaacatgtccttgtccggaccctacgttagcaggatcaccaatccctttaatggtattgcgctgtacgccaacggagacacagcccgcgctaccgttaacttccccgcaagtcgcaactacaatttccgcctgcggggttgcggcaacaacaataatcttgcccgtgtggacctgaggatcgacggacggaccgtcgggaccttttattaccagggcacatacccctgggaggccccaattgacaatgtttatgtcagtgcggggagtcatacagtcgaaatcactgttactgcggataacggcacatgggacgtgtatgccgactacctggtgatacagtga

SEQ ID NO: 2697 - DNA, 1842 bp, Artificial Sequence
  Synthetic Construct, AS-11 intein modified protein encoding nucleic acids
atgcaaacaagcattactctgacatccaacgcatccggtacgtttgacggttactattacgaactctggaaggatactggcaatacaacaatgacggtctacactcaaggtcgcttttcctgccagtggtcgaacatcaataacgcgttgtttaggaccgggaagaaatacaaccagaattggcagtctcttggcacaatccggatcacgtactctgcgacttacaacccaaacgggaactcctacttgtgtatctatggctggtctaccaacccattggtcgagttctacatcgttgagtcctgggggaactggagaccgcctggtgccacgtccctgggccaagtgacaatcgatggcgggacctacgacatctataggacgacacgcgtcaaccagccttgcctccatggggattcgctcatcgtgacagatcatgggctcgttcctatgcgggaggtcgtgaatcatcgccagcggctgcaggtctcagacggcgagaggcagcagacagtgtacgactggaaccggttcgccgattacccaaccgtcacgatgaggaccagggcgggcttcacactgactgggtcccacaatcatcgcatcatgctcgctgacggcacctggaggaggctggacgagctccagatcggggatcgggtgcgcattgctggcgggaccgagctgtgggctacggagccagctctcctgaggtgcaggaggccgctgcccagggtcctcgttaccgctggcgccccggccgcgaccacgtccagcccccacaggcgggggtacaggagggctgctgctgtggtcgttgacgagaagctcgctgctgctatcggcaggcgctgcgttacgcatgctgaccagcaggccctggatgcgattaggaggtcgccaaggcctcaggtggtcgcgttcctccgcgctttctgccagggcgctgggcagtcggtcgcttctggcctgaccctcacgtgcgctgacgctgatctggccacaactgtgcagctcctgctcacaaacctgggcgtcctcgcgcacaggactgacaccacggttcggattgataatggcgacgatctggagagggcttacacaactctcgccacaccgactggctggaccgacgaggttgtggcgctggagcatgggacggctgatgtctacgacatttctgttactgctactcatcgctacgctgctcagggcttcatcaaccacaactccattgtggggacagccacgttcgatcagtactggagcgtgcgcacctctaagcggacttcaggaacagtgaccgtgaccgatcacttccgcgcctgggcgaaccggggcctgaacctcggcacaatagaccaaattacattgtgcgtggagggttaccaaagctctggatcagccaacatcacccagaacaccttctctcagggctcttcttccggcagttcgggtggctcatccggctccacaacgactactcgcatcgagtgtgagaacatgtccttgtccggaccctacgttagcaggatcaccaatccctttaatggtattgcgctgtacgccaacggagacacagcccgcgctaccgttaacttccccgcaagtcgcaactacaatttccgcctgcggggttgcggcaacaacaataatcttgcccgtgtggacctgaggatcgacggacggaccgtcgggaccttttattaccagggcacatacccctgggaggccccaattgacaatgtttatgtcagtgcggggagtcatacagtcgaaatcactgttactgcggataacggcacatgggacgtgtatgccgactacctggtgatacagtga

SEQ ID NO: 2698 - DNA, 1452 bp, Artificial Sequence
  Synthetic Construct, AS-12 intein modified protein encoding nucleic acids
atgcaaacaagcattactctgacatccaacgcatccggtacgtttgacggttactattacgaactctggaaggatactggcaatacaacaatgacggtctacactcaaggtcgcttttcctgccagtggtcgaacatcaataacgcgttgtttaggaccgggaagaaatacaaccagaattggcagtctcttggcacaatccggatcacgtactctgcgacttacaacccaaacgggaactcctacttgtgtatctatggctggtctaccaacccattggtcgagttctacatcgttgagtcctgggggaactggagaccgcctggtgccacgtccctgggccaagtgacaatcgatggcgggacctacgacatctataggacgacacgcgtcaaccagccttgcgtgacaggggacactctcatctgcctcgctgacgggcgccgcgttcctattcaggatctcgtggggcattcgccggaggttattgcggtcgacgataagggccgcctcgtttgcgctaagtcagaggtcatctggaaggtcggcgagcggtccgttttcgagatcaagctggcttccgggaggagcattaaggctaccgctgagcacaggctcctggcgttcaagggctggaggcatgttaaggacttcaaagtgggggataggctcgctattgctcaccaggtcccagagccagacaggctcctgcagcattgccagtcggacctgttctgggataggatcgtgtcgattgaggagaaggggtctgaggaggtctacgatctcacagttccaaagtacgcttcttggctcgcggatggggttgtttcacataattccattgtggggacagccacgttcgatcagtactggagcgtgcgcacctctaagcggacttcaggaacagtgaccgtgaccgatcacttccgcgcctgggcgaaccggggcctgaacctcggcacaatagaccaaattacattgtgcgtggagggttaccaaagctctggatcagccaacatcacccagaacaccttctctcagggctcttcttccggcagttcgggtggctcatccggctccacaacgactactcgcatcgagtgtgagaacatgtccttgtccggaccctacgttagcaggatcaccaatccctttaatggtattgcgctgtacgccaacggagacacagcccgcgctaccgttaacttccccgcaagtcgcaactacaatttccgcctgcggggttgcggcaacaacaataatcttgcccgtgtggacctgaggatcgacggacggaccgtcgggaccttttattaccagggcacatacccctgggaggccccaattgacaatgtttatgtcagtgcggggagtcatacagtcgaaatcactgttactgcggataacggcacatgggacgtgtatgccgactacctggtgatacagtga

SEQ ID NO: 2699 - DNA, 2382 bp, Artificial Sequence
  Synthetic Construct, AS-13 intein modified protein encoding nucleic acids
atgcaaacaagcattactctgacatccaacgcatccggtacgtttgacggttactattacgaactctggaaggatactggcaatacaacaatgacggtctacactcaaggtcgcttttcctgccagtggtcgaacatcaataacgcgttgtttaggaccgggaagaaatacaaccagaattggcagtctcttggcacaatccggatcacgtactctgcgacttacaacccaaacgggaactcctacttgtgtatctatggctggtctaccaacccattggtcgagttctacatcgttgagtcctgggggaactggagaccgcctggtgccacgtccctgggccaagtgacaatcgatggcgggacctacgacatctataggacgacacgcgtcaaccagccttgcctgacatcggaccatacggttctcactacaaggggctggattcctatcgctgacgttactctggatgacaaggtcgctgttctcgacaacaatacgggcgagatgtcctaccagaacccacagaaggtccacaagtacgactacgagggccctatgtacgaggttaagactgccggggtcgatctgttcgttaccccaaaccataggatgtatgtgaataccacgaacaatacaactaaccagaattacaacctcgttgaggcttccagcatcttcggcaagaaggtgcggtacaagaacgacgcgatctggaataagaccgattaccagttcattctcccggagacagccactctgaccgggcacacgaacaagatctcgtctacaccggcgattcagcccgagatgaacgcttggctcacgttcttcggcctgtggatcgcgaacgggcataccacgaagattgccgagaagacagcggagaacaatcagcagaagcagcgctacaaggtcatcctgacgcaggtgaaggaggacgtctgcgatatcattgagcagacactcaacaagctgggcttcaatttcatcaggtccgggaaggactacacgattgagaacaagcagctctggagctacctgaatccgttcgacaacggcgccctcaataagtacctgcccgattgggtctgggagctctcatcccagcagtgcaagatcctcctgaacagcctctgcctgggcaattgcctgttcactaagaacgacgataccctccactacttctccaccagcgagaggttcgctaacgacgtgtcgcgcctcgctctgcatgctggcacaacttctactatccagctggaggccgcgccatcaaacctgtacgataccatcattgggctccctgttgaagtgaataccacgctgtggcgggtcatcattaaccagagctcgttctactcgtactctactgacaagtcttcagccctcaacctgagcaacaatgttgcgtgctacgtgaacgcgcagagcgctctcacactggagcagaactcgcagaagatcaataagaacactctcgtcctgaccaagaacaatgttaagtcacagacgatgcactcccagagggctgagagggtggacacggctctcctgacacagaaggagctcgataattcgctgaaccatgagatcctgattaataagaacccgggcacctctcagctggagtgcgtggtcaatcccgaggtcaacaatacgtccacaaacgataggttcgtgtactacaaggggccggtctactgcctcactgggcctaacaatgttttctacgttcagaggaatggcaaggctgtttggactggcaactccattgtggggacagccacgttcgatcagtactggagcgtgcgcacctctaagcggacttcaggaacagtgaccgtgaccgatcacttccgcgcctgggcgaaccggggcctgaacctcggcacaatagaccaaattacattgtgcgtggagggttaccaaagctctggatcagccaacatcacccagaacaccttctctcagggctcttcttccggcagttcgggtggctcatccggctccacaacgactactcgcatcgagtgtgagaacatgtccttgtccggaccctacgttagcaggatcaccaatccctttaatggtattgcgctgtacgccaacggagacacagcccgcgctaccgttaacttccccgcaagtcgcaactacaatttccgcctgcggggttgcggcaacaacaataatcttgcccgtgtggacctgaggatcgacggacggaccgtcgggaccttttattaccagggcacatacccctgggaggccccaattgacaatgtttatgtcagtgcggggagtcatacagtcgaaatcactgttactgcggataacggcacatgggacgtgtatgccgactacctggtgatacagtga

SEQ ID NO: 2700 - DNA, 2049 bp, Artificial Sequence
  Synthetic Construct, AS-14 intein modified protein encoding nucleic acids
atgcaaacaagcattactctgacatccaacgcatccggtacgtttgacggttactattacgaactctggaaggatactggcaatacaacaatgacggtctacactcaaggtcgcttttcctgccagtggtcgaacatcaataacgcgttgtttaggaccgggaagaaatacaaccagaattggcagtctcttggcacaatccggatcacgtactctgcgacttacaacccaaacgggaactcctacttgtgtatctatggctggtctaccaacccattggtcgagttctacatcgttgagtcctgggggaactggagaccgcctggtgccacgtccctgggccaagtgacaatcgatggcgggacctacgacatctataggacgacacgcgtcaaccagccttgcgttacgggggacactctcgttttcactgacaaggggctgattgaggctcgcaagctggaggtcggcatgaaggtctggtcgggggacggctggaacgagatcaaggaggtcattaacaatggggtgaagccggtcctgaagctcaagctgaagaccggcctggagatcaaggttacggaggagcacaagatcttcacaggcgaggggtggaaggaggccaaggacctcaaggttggcgataagctctacctgccggtgtcttaccccgagctggacttccccgtcaaggaggagaacgatttctacgagttcctcggctacttcctgggcgacgggtcactctccgttagcaaccacgtgtccctgcatgtcgggaatgacaaggagctcgcgctgtacttcaaggagaaggttgagaagtacgctggcgctgcttacctgatcgagagggacgggcagtacatcattgatgtgcatcgcaaggagttcgccgagaagatcaagaagattttcggcatcgagattaccgactcgaaggagaaggatatcccgtccagcctcctggcggtgaactccgaggctatgaaggctctcctgaggggcctcttctcggctgacgggtctgtctacgatgctaatggctctatcacagttgccctgtcgtctacttcatacccactcctgcggaaggtccagatcctcctgctctcactcggcattccttccacactgactggggagaaggaccaggatgtgaagatcattaagggcaacgagtacgagaccctcccaacgtaccgcctgatcattagcggggagagggcctcgctcttcttcaataagatcggcctgattggggagaagaagaagaagttcctggagctgatggcgggcaagaccacgtactccaccctcaacaatcacctgtaccaggagatcgtgagcattgagcccgctggcgaggaggaggtcttcgatattacagctccaccaaagtacacttggattaccaatggcattctctctctggattccattgtggggacagccacgttcgatcagtactggagcgtgcgcacctctaagcggacttcaggaacagtgaccgtgaccgatcacttccgcgcctgggcgaaccggggcctgaacctcggcacaatagaccaaattacattgtgcgtggagggttaccaaagctctggatcagccaacatcacccagaacaccttctctcagggctcttcttccggcagttcgggtggctcatccggctccacaacgactactcgcatcgagtgtgagaacatgtccttgtccggaccctacgttagcaggatcaccaatccctttaatggtattgcgctgtacgccaacggagacacagcccgcgctaccgttaacttccccgcaagtcgcaactacaatttccgcctgcggggttgcggcaacaacaataatcttgcccgtgtggacctgaggatcgacggacggaccgtcgggaccttttattaccagggcacatacccctgggaggccccaattgacaatgtttatgtcagtgcggggagtcatacagtcgaaatcactgttactgcggataacggcacatgggacgtgtatgccgactacctggtgatacagtga

SEQ ID NO: 2701 - DNA, 1419 bp, Artificial Sequence
  Synthetic Construct, AS-15 intein modified protein encoding nucleic acids
atgcaaacaagcattactctgacatccaacgcatccggtacgtttgacggttactattacgaactctggaaggatactggcaatacaacaatgacggtctacactcaaggtcgcttttcctgccagtggtcgaacatcaataacgcgttgtttaggaccgggaagaaatacaaccagaattggcagtctcttggcacaatccggatcacgtactctgcgacttacaacccaaacgggaactcctacttgtgtatctatggctggtctaccaacccattggtcgagttctacatcgttgagtcctgggggaactggagaccgcctggtgccacgtccctgggccaagtgacaatcgatggcgggacctacgacatctataggacgacacgcgtcaaccagccttgcttcgtggcgggcactatgatcctgacagtcgcggggctggtcgctattgagaatattaaggcgggggacaaggtcatcgctactaacccggagacattcgaggtggctgagaagaccgtcctggagacctacgtgcgcgagaccacggagctcctgcacctgacgatcaatggcgacgtcattaagacaactttcgagcatctcttctacgccaaggatgtcgggttcgttgaggcgaaggagctgcaggtcggcgacaagctcctggattccaaggggaacgtgctcgtggtcgaggacaagaagatcaagattaccgatgagcccgttaaggtgtacaatttccaggttgatgacttccacacataccacgttgggtgcaatggggttctcgttcataattccattgtggggacagccacgttcgatcagtactggagcgtgcgcacctctaagcggacttcaggaacagtgaccgtgaccgatcacttccgcgcctgggcgaaccggggcctgaacctcggcacaatagaccaaattacattgtgcgtggagggttaccaaagctctggatcagccaacatcacccagaacaccttctctcagggctcttcttccggcagttcgggtggctcatccggctccacaacgactactcgcatcgagtgtgagaacatgtccttgtccggaccctacgttagcaggatcaccaatccctttaatggtattgcgctgtacgccaacggagacacagcccgcgctaccgttaacttccccgcaagtcgcaactacaatttccgcctgcggggttgcggcaacaacaataatcttgcccgtgtggacctgaggatcgacggacggaccgtcgggaccttttattaccagggcacatacccctgggaggccccaattgacaatgtttatgtcagtgcggggagtcatacagtcgaaatcactgttactgcggataacggcacatgggacgtgtatgccgactacctggtgatacagtga

SEQ ID NO: 2702 - DNA, 2013 bp, Artificial Sequence
  Synthetic Construct, AS-16 intein modified protein encoding nucleic acids
atgcaaacaagcattactctgacatccaacgcatccggtacgtttgacggttactattacgaactctggaaggatactggcaatacaacaatgacggtctacactcaaggtcgcttttcctgccagtggtcgaacatcaataacgcgttgtttaggaccgggaagaaatacaaccagaattggcagtctcttggcacaatccggatcacgtactctgcgacttacaacccaaacgggaactcctacttgtgtatctatggctggtctaccaacccattggtcgagttctacatcgttgagtcctgggggaactggagaccgcctggtgccacgtccctgggccaagtgacaatcgatggcgggacctacgacatctataggacgacacgcgtcaaccagcctcagctggctctggacactcctattcctacgcctgacgggtggacaactatgggggagatcaaggcgggggacaaggttatcgatgagaagggcaggccgtgcaatgtggtcgctatctccgagattgacgatacagagcaggcctacaagatcaacttccgggacggcactagcattgtcgccggggagcgccacctctggaaggttcaggtgaccaacaatggcaggagggagaagctcctgaccacgggggagatgtaccagaagcagttcaagaccaagtcgaaggagaatcgcgcgctcttcaggatcccaattgccgacgcgttcatcctccctgagaacaagctgccgattgatccctacctgttcggctactggatcggcaacgggaatgctgtgaagccggagatcacagtcatgcgcgacgatgtcgacgaggttatcaagaacattccctacaagctccataataggtacaagcaggagggcaactcagacatcctggtttacaaggagctcaagtccattctggtgaagaacttcagggagaagcggatcccaattgagtacctcagggcttctgctcagcagcggaagcgcctcctgcagggcctgatcgactcagatgggtgcgtctccacagccaagagccaggcgatctacgttactattctcttcgagctggccaaggacgtgcaggatctcctgtggagcctcggcatcaagaacacactgaagactgctccatcggctcgctacggcatcgagaccggggagatctgctacctcattaagttcacggcgttcaatgacctggaggtgagcggcctcgataggaagctgaagagggggcgggagcgcaacatcaagacccggtcgcacttccattacatcaagtctattgagaagaccggcaagacgaagatgcgctgcatccaggttgattctccaagcaggctctacctcgctggcaagtctatgattccaacacataactccattgtggggacagccacgttcgatcagtactggagcgtgcgcacctctaagcggacttcaggaacagtgaccgtgaccgatcacttccgcgcctgggcgaaccggggcctgaacctcggcacaatagaccaaattacattgtgcgtggagggttaccaaagctctggatcagccaacatcacccagaacaccttctctcagggctcttcttccggcagttcgggtggctcatccggctccacaacgactactcgcatcgagtgtgagaacatgtccttgtccggaccctacgttagcaggatcaccaatccctttaatggtattgcgctgtacgccaacggagacacagcccgcgctaccgttaacttccccgcaagtcgcaactacaatttccgcctgcggggttgcggcaacaacaataatcttgcccgtgtggacctgaggatcgacggacggaccgtcgggaccttttattaccagggcacatacccctgggaggccccaattgacaatgtttatgtcagtgcggggagtcatacagtcgaaatcactgttactgcggataacggcacatgggacgtgtatgccgactacctggtgatacagtga

SEQ ID NO: 2703 - DNA, 2022 bp, Artificial Sequence
  Synthetic Construct, AS-17 intein modified protein encoding nucleic acids
atgcaaacaagcattactctgacatccaacgcatccggtacgtttgacggttactattacgaactctggaaggatactggcaatacaacaatgacggtctacactcaaggtcgcttttcctgccagtggtcgaacatcaataacgcgttgtttaggaccgggaagaaatacaaccagaattggcagtctcttggcacaatccggatcacgtactctgcgacttacaacccaaacgggaactcctacttgtgtatctatggctggtctaccaacccattggtcgagttctacatcgttgagtcctgggggaactggagaccgcctggtgccacgtccctgggccaagtgacaatcgatggcgggacctacgacatctataggacgacacgcgtcaaccagccttgcgtggcgggggacactaagattctcacatcatcgggctaccatcccatcaaggacatggagggcaagcaggttcgggtttggaatggctacgagttctcggagacaatcgttcacaagactggggtgaaccagaagctcattatggtgtctctggacgatggcaccgagctcaggtgcacgccgtaccataagttctacatcgagaccgggtcgcggccagctgacaagtctcgggtcatggaggttcgcgctggcgacctggagaagggggaccgcatcattaggttcgagctgccgacaatcactgtcggcgagaccacgatgagcgacaaggaggcctacacaaagggcttcttctctgcggatgggtgcgtcattaagtcaaagtacggcgaggatgagtacaggatctcggttaagcgggaggacaagattgaggctctgacgaagtatgtggatgtgatcaagtcccacacaaaccggttccgcactcatttctacgtgccagactacgtccagaataagttcgaggtccctatcaactcaatggttaatgagaagatttcctggctcgccggcttcatggacggcgatgggtgcgttatccgctacaaggacattgagaacatgcaggcggtgtccatcaataagagcttcctgcaggatattaggctcatgctgcagaccatcggcattcactccacgatcaacaagttcatgccgaatcgcgtgatgaagatgcccgatggcaggggcgggaccgacatgtacaacggggctgagagctggaggctccagatcgactcggagggcgtccgcaagctcttcgctctggggttcacgccgcgcaggctgaagatgaacggctccaggaagcggcaccataagaccaataagttcacgcgcgtggtcagcgtgacagaccatggcgatgtcgaggacacttactgcttcaatgagccaaagaggcacatgggggtcttcaacggggtcattacggggcagtccattgtggggacagccacgttcgatcagtactggagcgtgcgcacctctaagcggacttcaggaacagtgaccgtgaccgatcacttccgcgcctgggcgaaccggggcctgaacctcggcacaatagaccaaattacattgtgcgtggagggttaccaaagctctggatcagccaacatcacccagaacaccttctctcagggctcttcttccggcagttcgggtggctcatccggctccacaacgactactcgcatcgagtgtgagaacatgtccttgtccggaccctacgttagcaggatcaccaatccctttaatggtattgcgctgtacgccaacggagacacagcccgcgctaccgttaacttccccgcaagtcgcaactacaatttccgcctgcggggttgcggcaacaacaataatcttgcccgtgtggacctgaggatcgacggacggaccgtcgggaccttttattaccagggcacatacccctgggaggccccaattgacaatgtttatgtcagtgcggggagtcatacagtcgaaatcactgttactgcggataacggcacatgggacgtgtatgccgactacctggtgatacagtga

SEQ ID NO: 2704 - DNA, 2196 bp, Artificial Sequence
  Synthetic Construct, AS-18 intein modified protein encoding nucleic acids
atgcaaacaagcattactctgacatccaacgcatccggtacgtttgacggttactattacgaactctggaaggatactggcaatacaacaatgacggtctacactcaaggtcgcttttcctgccagtggtcgaacatcaataacgcgttgtttaggaccgggaagaaatacaaccagaattggcagtctcttggcacaatccggatcacgtactctgcgacttacaacccaaacgggaactcctacttgtgtatctatggctggtctaccaacccattggtcgagttctacatcgttgagtcctgggggaactggagaccgcctggtgccacgtccctgggccaagtgacaatcgatggcgggacctacgacatctataggacgacacgcgtcaaccagccttgcttcgatggcaagacaaagattctcacaaatcaggggttcatgacgctgcggcaggtttacgagcagggctacgaggggctctcaacgctgtcactcaacaccaagacgcacaagatcgagtggaagccaattctggacaccatgaagcgccagtccgagatgatcgatatttccgttagccagactggcaggatcaccgacaacacgctgcggctcacccctgatcataagatggtcaatctcaggggcgggaagtacacaaagactgagatccaggacctcctgaagcagcaggagatgctgactgtggcccagaccatcccgagcctcggcaacaataagcaccaggaggcggacctggcttacttcctcggcgggatcattacggatggctcgatctacacatccagcactcggggggaggtccagttcatccagaaggacgttccggagaagcaggctttcatttcgaagatgaacgatctggccaattcgctctacggcaagtctttcacggcgcacatcaagcccgtgtcgtcttcatacattaggggccagaaggtcacggggcaggctacagcgtacaggctgcattccaaggctatcgcctacgacgtcaaggagcgcgagaacaatattacacagctcctgctggagaacgaggctgagctgtcttaccatttcctcggcggcgtgatcgacggcgatgggtgctaccacaagaacaggctccatatctacatttcagaggagaatctgctccaggccgtcatcattgcgtgcctgaagatgaatactgtgccgcaggtcaccaagaaccggaatatctaccacctccagattgtggagaagctggaggtcatcctccggtacacccagcgcgtcaagggcgaggttacccccaggacgatccagacacggttcttcgcgacgcgccagctgttcgagaaccaggagacaggccagatcaagctccggcaggacaacaattgcctgatttctgataagcagctccgcgagatgggcgagttcgaggagctgatcgacggggatactcgcatgcagagggttattcaagtgggcgagaagagcgacggggatgtttacaacatcaccgtggcggagcatcataactacgtcgttttcacagccaagtacacaccagtcgtcgtttgcaactccattgtggggacagccacgttcgatcagtactggagcgtgcgcacctctaagcggacttcaggaacagtgaccgtgaccgatcacttccgcgcctgggcgaaccggggcctgaacctcggcacaatagaccaaattacattgtgcgtggagggttaccaaagctctggatcagccaacatcacccagaacaccttctctcagggctcttcttccggcagttcgggtggctcatccggctccacaacgactactcgcatcgagtgtgagaacatgtccttgtccggaccctacgttagcaggatcaccaatccctttaatggtattgcgctgtacgccaacggagacacagcccgcgctaccgttaacttccccgcaagtcgcaactacaatttccgcctgcggggttgcggcaacaacaataatcttgcccgtgtggacctgaggatcgacggacggaccgtcgggaccttttattaccagggcacatacccctgggaggccccaattgacaatgtttatgtcagtgcggggagtcatacagtcgaaatcactgttactgcggataacggcacatgggacgtgtatgccgactacctggtgatacagtga

SEQ ID NO: 2705 - DNA, 2055 bp, Artificial Sequence
  Synthetic Construct, AS-19 intein modified protein encoding nucleic acids
atgcaaacaagcattactctgacatccaacgcatccggtacgtttgacggttactattacgaactctggaaggatactggcaatacaacaatgacggtctacactcaaggtcgcttttcctgccagtggtcgaacatcaataacgcgttgtttaggaccgggaagaaatacaaccagaattggcagtctcttggcacaatccggatcacgtactctgcgacttacaacccaaacgggaactcctacttgtgtatctatggctggtctaccaacccattggtcgagttctacatcgttgagtcctgggggaactggagaccgcctggtgccacgtccctgggccaagtgacaatcgatggcgggacctacgacatctataggacgacacgcgtcaaccagccttgcgtcgcgccggagacaaagatcctcacagacagggggcagatcgccatcgctgacgtcgcgggggagaaggtcaatatttggaacgggtcggagtggtctgaggttctcgtgaagaagacaggcgagaaccagccgctcctgaaggtgcacttctcaaatggcgagtccctggactgcacttactaccacaagttccatgtccaggagaactacaaggggaaggtcaagatcgttgaggctaaggacctccaggagggcgataagctgattaagtaccggctcccactggtggagtccgagaatgacatcgatttcccttacgcctacaccagcggcttcttctcgggcgacgggtctcatgatggcatggggaagccggagattgacctctacggcgagaagaaggagctcctgcccttcgtcacggttaggaacaagtactacggcgggtcatacggcgacaagtcctggcgcatcgagagggatgaggtggccgtctacgacgatgttaaccaggaccggatcgtgtgcaagctcccgctggatattcccgcgaagttcacagttcccgtgaatggctacactatccagagcaggctggagtggctggctggcctcctggacgcggatgggacagtcgctaggaacggcgacaatgagagcctgcaggttgcgtcgacccaccagcagttcctcctggacatccgcctcatgctgcagacgctcggcgtcgactctaaggtggtcaagatggatgagatggggtacaggtcgctgccagacggcaagggcgggtaccaggattacttctgccaggcgaagtaccgcctcctgatttccagcaacggcctcttccagctgggcgagctcgggctgaagaccaacaggctccagtggaatctgagggagcctcagagggaggcttcccagttcatcagggtggagaaggtcgagctcacctgccggtacgacgatacgtactgcttctcagagccaaagaggcatctcggcatgttcaatggcatcctcacagggcagtccattgtggggacagccacgttcgatcagtactggagcgtgcgcacctctaagcggacttcaggaacagtgaccgtgaccgatcacttccgcgcctgggcgaaccggggcctgaacctcggcacaatagaccaaattacattgtgcgtggagggttaccaaagctctggatcagccaacatcacccagaacaccttctctcagggctcttcttccggcagttcgggtggctcatccggctccacaacgactactcgcatcgagtgtgagaacatgtccttgtccggaccctacgttagcaggatcaccaatccctttaatggtattgcgctgtacgccaacggagacacagcccgcgctaccgttaacttccccgcaagtcgcaactacaatttccgcctgcggggttgcggcaacaacaataatcttgcccgtgtggacctgaggatcgacggacggaccgtcgggaccttttattaccagggcacatacccctgggaggccccaattgacaatgtttatgtcagtgcggggagtcatacagtcgaaatcactgttactgcggataacggcacatgggacgtgtatgccgactacctggtgatacagtga

SEQ ID NO: 2706 - DNA, 2835 bp, Artificial Sequence
  Synthetic Construct, AS-20 intein modified protein encoding nucleic acids
atgcaaacaagcattactctgacatccaacgcatccggtacgtttgacggttactattacgaactctggaaggatactggcaatacaacaatgacggtctacactcaaggtcgcttttcctgccagtggtcgaacatcaataacgcgttgtttaggaccgggaagaaatacaaccagaattggcagtctcttggcacaatccggatcacgtactctgcgacttacaacccaaacgggaactcctacttgtgtatctatggctggtctaccaacccattggtcgagttctacatcgttgagtcctgggggaactggagaccgcctggtgccacgtccctgggccaagtgacaatcgatggcgggacctacgacatctataggacgacacgcgtcaaccagccttgcctcgcttcggacactctcgttcgcacatcggagggggacaagccagtcgctgaggtcgctatcggggactacctgctggacgctgaggacaagccagtcctctgcatgggcgctaacccttcccagaccgggcgcatgaaggagatcgcttaccaggacttcgattcgaagaagagggtgtctttcaagtgcacaccggaccaccacctggagctgacactcactgattccactccctccctcagcggcaagtcagtcacctggttctccaggtgcacgggggctcacctcagcgaggaggtgtcggaggtctacctggacaacatggtttcgatcttctacaatgatctggttgactcgacggattctgcggtggacaaggattccattcacgaggccgtggacctggcgctggaggatcactaccataggggcaactctgaccagtactcaatccatctcaatgagtacatcagccggattgccgataaggagctgcagaacgagccggagttcatccgggagtgcattcacgacgccgcgaatcgcttcgtcatcacctccagcggcaacaggaatattaagtcggagtctttcgacgataagctcctgctctcacgctccaggtcgtctacagctgacagcgattcggactacgtgatcactgacgcctccgtccactctcattcaaacaattcatccgtctacctcgcctcaccagactccatgatccctgatggcgctgccaaccgcttcgagaatattgcgtccaagctgaaggagccagtgtgcaactgcggcgggatccggaagattttccgcagcttcggcaccacggaggacgctgagctcgcttactccctgctcctgagcgagcactactacaggctggacccacggttcgtcacagatggctacactttccaggcctcggttgagcagtacgagaacatgtgctctcaggaggtgcagaatatgcacctgaagctctaccgctcacctctcaagttcgtggagagggagcataactccgctgagctgccagtcgacccatacttcctgggcctctggctgggcgatggggacagctcggggacaactatcatgaccacggatcgggagattgtggtctggctcaactcctacgtcgagcgcctgaaccagaataagccggagggctgcttccccctcaagctgaccgagcagctgatctacggcgctgggcacacgtccaagagcgggcatacaactaaggtcgacgttaggaattacaagatctcttcaggcgatgctttcgtgcggtcggggacatactggaacccgattttcgacggcctcaagaagctggggctcctgaacaataagagcgctggcatcccccaggagtacatgaactctgacgagcagaataggctctcagttattgccggcctgatggattccgacgggtgctacgtgaagagccacaacacctaccgcttcacccagctcacggaggaccataagaagatcgtctacgatctgaaggagctcgccctgagctgcggcattaacaccacgggggtcgagctctcggttaagccgctgggcttcaataagcacaagcattctaccgagtatgtggtgtacctcggcaacgggagccagaagttccaggagctcctgctcctgccacggaagaagatggagatcagcaagaagcacgtgtcgctggacgcgcgccctttcacggttagcgacgtggaggatggcgagttccgggctattgaggtttcagggggggttttccagctcgctaataggctcgtggttgctaattccattgtggggacagccacgttcgatcagtactggagcgtgcgcacctctaagcggacttcaggaacagtgaccgtgaccgatcacttccgcgcctgggcgaaccggggcctgaacctcggcacaatagaccaaattacattgtgcgtggagggttaccaaagctctggatcagccaacatcacccagaacaccttctctcagggctcttcttccggcagttcgggtggctcatccggctccacaacgactactcgcatcgagtgtgagaacatgtccttgtccggaccctacgttagcaggatcaccaatccctttaatggtattgcgctgtacgccaacggagacacagcccgcgctaccgttaacttccccgcaagtcgcaactacaatttccgcctgcggggttgcggcaacaacaataatcttgcccgtgtggacctgaggatcgacggacggaccgtcgggaccttttattaccagggcacatacccctgggaggccccaattgacaatgtttatgtcagtgcggggagtcatacagtcgaaatcactgttactgcggataacggcacatgggacgtgtatgccgactacctggtgatacagtga

SEQ ID NO: 2707 - DNA, 1896 bp, Artificial Sequence
  Synthetic Construct, AS-21 intein modified protein encoding nucleic acids
atgcaaacaagcattactctgacatccaacgcatccggtacgtttgacggttactattacgaactctggaaggatactggcaatacaacaatgacggtctacactcaaggtcgcttttcctgccagtggtcgaacatcaataacgcgttgtttaggaccgggaagaaatacaaccagaattggcagtctcttggcacaatccggatcacgtactctgcgacttacaacccaaacgggaactcctacttgtgtatctatggctggtctaccaacccattggtcgagttctacatcgttgagtcctgggggaactggagaccgcctggtgccacgtccctgggccaagtgacaatcgatggcgggacctacgacatctataggacgacacgcgtcaaccagccttgccagccatacgacgctctcgtttcaacgccatcggggctcgttcctatcggggctctcgtggagacagacgcggtcggcatgaaggtgttcgatgcgcacggcctcacacaggtcattgctactaagagcaacggggttaaggacgtgctgaggatctggacccgcgcgggccacgctctcgacgtcacggccgatcatctggtttggaggtccacaagcgctggcgctggggctttcgtgccagctggcgctctcagggctggggacacactggagtggcataggactattgctccaggcgagggggagatcacgagccgcgagattgctgaggctgctctcgctggcaggctgcaggctgatggcttcgtcgggcgctacgctgggaccaatgcttcgctcacgatcgaggcgatgaccgttccaacgaggctctacgacgctccactgccagtggtcgctgcctacctcaggtcactgttccaggctgatggctacgtctcgcgcagggagaggtctaccctcatcggcctggacatgatttccgaggggctgatcaggggcgttcaggggctcctggctaggttcggcatcttcgccagggtgcggagggaggctgatccacgccctgacaggcacgatctctggtccctgggcattcagaacgctggggacaggcggaccttcgccgatgagatcggcttcctcgacccagtgaaggcggctaagctggaggcttccttcgaccagccaggccaggctgctaagcctgtcaagaggctccagatcgagaggattgagccgaggggcccgatgcccgtctacgacattcagacagattccggggagtacctctctgctgggctcagggttcataactccattgtggggacagccacgttcgatcagtactggagcgtgcgcacctctaagcggacttcaggaacagtgaccgtgaccgatcacttccgcgcctgggcgaaccggggcctgaacctcggcacaatagaccaaattacattgtgcgtggagggttaccaaagctctggatcagccaacatcacccagaacaccttctctcagggctcttcttccggcagttcgggtggctcatccggctccacaacgactactcgcatcgagtgtgagaacatgtccttgtccggaccctacgttagcaggatcaccaatccctttaatggtattgcgctgtacgccaacggagacacagcccgcgctaccgttaacttccccgcaagtcgcaactacaatttccgcctgcggggttgcggcaacaacaataatcttgcccgtgtggacctgaggatcgacggacggaccgtcgggaccttttattaccagggcacatacccctgggaggccccaattgacaatgtttatgtcagtgcggggagtcatacagtcgaaatcactgttactgcggataacggcacatgggacgtgtatgccgactacctggtgatacagtga

SEQ ID NO: 2708 - DNA, 2352 bp, Artificial Sequence
  Synthetic Construct, AS-22 intein modified protein encoding nucleic acids
atgcaaacaagcattactctgacatccaacgcatccggtacgtttgacggttactattacgaactctggaaggatactggcaatacaacaatgacggtctacactcaaggtcgcttttcctgccagtggtcgaacatcaataacgcgttgtttaggaccgggaagaaatacaaccagaattggcagtctcttggcacaatccggatcacgtactctgcgacttacaacccaaacgggaactcctacttgtgtatctatggctggtctaccaacccattggtcgagttctacatcgttgagtcctgggggaactggagaccgcctggtgccacgtccctgggccaagtgacaatcgatggcgggacctacgacatctataggacgacacgcgtcaaccagccttgcgtggtcgcgggcactgaggtcacagacgctgagacaggggcggtcgttacggtcggggagctcttcgagtcgcggagggcggtcacagtccacgctctcggcgctgacagcaagctgaggccaaggcctgttactgatgtggtctggaacgggcgcaagagggtgtaccgcctcaccacggagctgggcaagtcgatcacagccactgacaaccatcctttccgcgtgctggatggctggaagaatctcggggagctgaagccaggcgacaggatcgctgctccaaggaggctggcggtcccttcggctggcacctggccgcagcacgagattgttgcgctcgctgggctcctgtctgagggcaacacgtgccatcccacaactctctacttctacgggaatgaccgggttctgatcgacgatttcgcgcgggcaattggccagttccccgatacagtcgccaaggtttacgctaggccaaacaggaggaacctggaggtgcgcgctaacacaggcagggacactcgcctgaagtcaagggcggagagggatgctgctgtggctctcctggctccaccaacgaggtccggcgctttcgtctgggctcagaggctcggcatcctggggaagaccgctacggagaagttcgtgcctcacgacgtcttccggctctgcgacagcgatctggagctcttcctgggcaggctgtgggctggcgacgggttcattgctaatgataccctcaaggtcccgttctacgctacgtccagcaggaggctcgctcaggacgtgcagcacctcctgctcaggctgggcatcgtcgggaggattcatgagaagcagttcaagtacaagggcgggctcaagcccggcttcacagtgcacctgatcggcgacggggctgctgaggccttcctcgataggattgctccacactgcctggggagggagcatgctgtcactatcctcagggagcatgttgctaccacggcgaggggcctcacctccaaggacacggttccgctggaggtgcgcgcttgggtcgacgatgggaggagggcgaggggcctcacctgggacgagctggagcagcagtcggatgtctctacacaggagttctacggcactccagctccaggcaagaaggggttccggagggctacgatcgctaagctcgctgcgttcttcggctcacagaggctggctgctgttgctgactccgatgtgttctgggacagggttgtgagcattgagtacgcgggcgtgcaggatacctacgatctcacagtggatgaggatcataatttcgttgctaatgggctcatcgttcacaattccattgtggggacagccacgttcgatcagtactggagcgtgcgcacctctaagcggacttcaggaacagtgaccgtgaccgatcacttccgcgcctgggcgaaccggggcctgaacctcggcacaatagaccaaattacattgtgcgtggagggttaccaaagctctggatcagccaacatcacccagaacaccttctctcagggctcttcttccggcagttcgggtggctcatccggctccacaacgactactcgcatcgagtgtgagaacatgtccttgtccggaccctacgttagcaggatcaccaatccctttaatggtattgcgctgtacgccaacggagacacagcccgcgctaccgttaacttccccgcaagtcgcaactacaatttccgcctgcggggttgcggcaacaacaataatcttgcccgtgtggacctgaggatcgacggacggaccgtcgggaccttttattaccagggcacatacccctgggaggccccaattgacaatgtttatgtcagtgcggggagtcatacagtcgaaatcactgttactgcggataacggcacatgggacgtgtatgccgactacctggtgatacagtga

SEQ ID NO: 2709 - DNA, 1875 bp, Artificial Sequence
  Synthetic Construct, AS-23 intein modified protein encoding nucleic acids
atgcaaacaagcattactctgacatccaacgcatccggtacgtttgacggttactattacgaactctggaaggatactggcaatacaacaatgacggtctacactcaaggtcgcttttcctgccagtggtcgaacatcaataacgcgttgtttaggaccgggaagaaatacaaccagaattggcagtctcttggcacaatccggatcacgtactctgcgacttacaacccaaacgggaactcctacttgtgtatctatggctggtctaccaacccattggtcgagttctacatcgttgagtcctgggggaactggagaccgcctggtgccacgtccctgggccaagtgacaatcgatggcgggacctacgacatctataggacgacacgcgtcaaccagccttgccagcctgcggggacacaggtcgctaaggttattaaggaggggaggtggagggaggattcggttattgagcaggttcctattgagtcactccagccaggcgacagggtggtctccttcgggaacgcgaagatctaccgcaggggccgcgctgtgacagggattacttcccggcgccacacaggcaatctgcatagggtcgaggttggggagttccgcaccagggccacgccagagcacaggttcaccgtccggttcgacccagctaggcctaaggctggcctcctgtacctcatgaggaggggcgataggtggagggtgggcgtctgcgggatgttcaactcgcgcggcttcggggtttccgtgcggctgagccaggagaggggcgacgctgcttgggtgctcggggccttcgcgacactgactgaggctaggatcgccgagcaggttgtgagctgccggtacggcattccaaccacggtctgggagaccggcaggaatcctggggcttcgtgggctcagagggaccaggctggcatcgatgccatctaccagaggctcggcgtcgataggatccgggctggggttgacaggctcctgagggatcacggcctctctgctgggctgccactcctggctgccaacgagcccggcaatttctcgtgcaggcagtctaggcaggtggctgcttgcaacctggtgccaggcgtcatgcaggtcccagttccaacggctggcgagaggttcgagtggagggacctcaccgctacgagcttcgagagggttcatgatctggaggtgtggagcatggatgtggagagggataagcattacgttgcggatggcatcgttgtgcataactccattgtggggacagccacgttcgatcagtactggagcgtgcgcacctctaagcggacttcaggaacagtgaccgtgaccgatcacttccgcgcctgggcgaaccggggcctgaacctcggcacaatagaccaaattacattgtgcgtggagggttaccaaagctctggatcagccaacatcacccagaacaccttctctcagggctcttcttccggcagttcgggtggctcatccggctccacaacgactactcgcatcgagtgtgagaacatgtccttgtccggaccctacgttagcaggatcaccaatccctttaatggtattgcgctgtacgccaacggagacacagcccgcgctaccgttaacttccccgcaagtcgcaactacaatttccgcctgcggggttgcggcaacaacaataatcttgcccgtgtggacctgaggatcgacggacggaccgtcgggaccttttattaccagggcacatacccctgggaggccccaattgacaatgtttatgtcagtgcggggagtcatacagtcgaaatcactgttactgcggataacggcacatgggacgtgtatgccgactacctggtgatacagtga

SEQ ID NO: 2710 - DNA, 2250 bp, Artificial Sequence
  Synthetic Construct, AS-24 intein modified protein encoding nucleic acids
atgcaaacaagcattactctgacatccaacgcatccggtacgtttgacggttactattacgaactctggaaggatactggcaatacaacaatgacggtctacactcaaggtcgcttttcctgccagtggtcgaacatcaataacgcgttgtttaggaccgggaagaaatacaaccagaattggcagtctcttggcacaatccggatcacgtactctgcgacttacaacccaaacgggaactcctacttgtgtatctatggctggtctaccaacccattggtcgagttctacatcgttgagtcctgggggaactggagaccgcctggtgccacgtccctgggccaagtgacaatcgatggcgggacctacgacatctataggacgacacgcgtcaaccagccttgcttcgctgcggggacgctgctgcatactgagcagggctacgttccggtggagcaggtcgtggcgggggtcgggacaagggtttgcacacaccagggcttccggaacatctctgagcgcttcgataatggggaggccgaggttttcagggtgaccacgcggaagggctactccgtggaggtcactgcgaaccacaagatggctcgcctcgacgagaatggcgatctcctgctcgacgagctctcacatctgcaagtgggcgacaacctgctcctgctcctggggtccaatccggtgaccgagaaggtccggctgcagtgcatcccagctggctaccgctccagcatcgagattgctcagccgcccgagctcgatgagcagctggcttacctcctgggctacgcctacggcgacgggtgcgtcggcaggggggctacatacaactacctcagcctggctgtgtcgcacacttacccgaatgtccgcgaccagctcgccgcgatcattagggagaagttcggcctgacaactaagatctactcaggctccggggcggtttggaacctcctggtgcattccgccaatctcctggattggctcaaggcgaacggcctcctgaagcagaaggctgcggacctcgccatgccagaggcgattctgcgctcgccttcgtctgtggtcggcgctttcctgtctgggtacttcgacgctgatggctgcgtgaggggcgggaagggcgggtacgggttcgattgcacgagcaaggctttcgtcggcgctgttcagctcctgctcctggccgaggggatcgtgtccaacctccacaccacggaccggagccgccagggctggcgcacaatctacaggctcaatgtctgcggcaccgagttcaagcgcaggttccagacgctgtgctgcaggtctgcgaaggttgtgcattcaccaatggtgctcggcagggatgggaccggcgggtacccacctgctctggttaggggcgcttcgtaccagagggtcgttgctgtcggcgggaagcacctcctgtacacggcgctcctgaaggtcatcgagaagacaaggactgctggcaagcaggctctcgctgagagcctgtgccagcatgtcaactacttcccggaccccatcgtcgcgattgagtcggttggcacgcagagggtttacgatattgaggtggagggcatgcatctgctcggcaatggcatctacacaagcaactccattgtggggacagccacgttcgatcagtactggagcgtgcgcacctctaagcggacttcaggaacagtgaccgtgaccgatcacttccgcgcctgggcgaaccggggcctgaacctcggcacaatagaccaaattacattgtgcgtggagggttaccaaagctctggatcagccaacatcacccagaacaccttctctcagggctcttcttccggcagttcgggtggctcatccggctccacaacgactactcgcatcgagtgtgagaacatgtccttgtccggaccctacgttagcaggatcaccaatccctttaatggtattgcgctgtacgccaacggagacacagcccgcgctaccgttaacttccccgcaagtcgcaactacaatttccgcctgcggggttgcggcaacaacaataatcttgcccgtgtggacctgaggatcgacggacggaccgtcgggaccttttattaccagggcacatacccctgggaggccccaattgacaatgtttatgtcagtgcggggagtcatacagtcgaaatcactgttactgcggataacggcacatgggacgtgtatgccgactacctggtgatacagtga

SEQ ID NO: 2711 - DNA, 2490 bp, Artificial Sequence
  Synthetic Construct, AS-25 intein modified protein encoding nucleic acids
atgcaaacaagcattactctgacatccaacgcatccggtacgtttgacggttactattacgaactctggaaggatactggcaatacaacaatgacggtctacactcaaggtcgcttttcctgccagtggtcgaacatcaataacgcgttgtttaggaccgggaagaaatacaaccagaattggcagtctcttggcacaatccggatcacgtactctgcgacttacaacccaaacgggaactcctacttgtgtatctatggctggtctaccaacccattggtcgagttctacatcgttgagtcctgggggaactggagaccgcctggtgccacgtccctgggccaagtgacaatcgatggcgggacctacgacatctataggacgacacgcgtcaaccagccttgcctcgcctacgacgcggagatcgttcaggctgacgggggggttaagactattgagcagatcgttagggagcggcgggcgcatctcgctacggtcggcgctgactggaggctgacatggactgagccgtgcgattacgttgacgatggccacaagcccgtcttcgaggttaccacgcgcctcgggcgcaggatcgagacaactctgacacacccgttcctcactgtccatggctggcagaggctggaggacctcgctgagggcgatgctatcggggtcccaaggcagctgccagttttcggccaggagcccattagggactgcgaggtgaggctcctgggccacctgatcggggatggcgggctcaccggctcgccacccaggctgacgtctgggcaggaggcgatgacagctgacttcctggaggctgtggatgctttcggcggggtcgaggctaagccaatcagggcgtcccggaggacgcagagctgggtggtcgttggcgctgctcaggcccgcgctgctgctaggtccagcttcgcttcactggtcgacgccctcattaggaggtcccctctcaccggcagggctatcgctaggaacctgggggtggcgccagctaccctcacgtactggaggcagggcgtgaatgtccctgacgctgctatggttgggctcctggctggcgagctgggggttgatgtgggcgagctcaggccagagcctgtggctcgcaggaacgaccgcaatccactgcaggcttggctcgataggctgggcctcgctgggaagtccgctcacgagaagactgtgccagactgcgtcttccggctgcctcgcgagcagctcgctaggttcctgaaccggctcttctcgtctgacgggtgggtgacacatctggctagcggccaggggcagattggctacaccacggtctcggaggctctcgctaggcagatccagcacctcctgctccggttcggcgttctggctaagctcaggcataggtccgtgcgctaccaggacggcaggaggccagcctggcagctggatattactcacgcggagagcatcctcaccttcgctgagcagatcggcattctggggaaggagcagcggctcgcctctgttgctgcttcagtgcgcggcaggaggaggcagtcgcacacggaccatatcccctgcgagatttggcagttcatcgatagggccaggggcgagtggacatgggctgagctggctaggagggctggggtcgcttcatccaatatccacgcctacaggaggggcatgtctaggcagaggctggctgctttcgctgacgctctcggctcaagggagctgaggcagctcgcgagctcggacctgtactgggatcggatcgcctccattcgcccgctcggccataagcaggtgtacgatctcactattccagagactcataacttcattgctaatgatgtttgcgtgcataattccattgtggggacagccacgttcgatcagtactggagcgtgcgcacctctaagcggacttcaggaacagtgaccgtgaccgatcacttccgcgcctgggcgaaccggggcctgaacctcggcacaatagaccaaattacattgtgcgtggagggttaccaaagctctggatcagccaacatcacccagaacaccttctctcagggctcttcttccggcagttcgggtggctcatccggctccacaacgactactcgcatcgagtgtgagaacatgtccttgtccggaccctacgttagcaggatcaccaatccctttaatggtattgcgctgtacgccaacggagacacagcccgcgctaccgttaacttccccgcaagtcgcaactacaatttccgcctgcggggttgcggcaacaacaataatcttgcccgtgtggacctgaggatcgacggacggaccgtcgggaccttttattaccagggcacatacccctgggaggccccaattgacaatgtttatgtcagtgcggggagtcatacagtcgaaatcactgttactgcggataacggcacatgggacgtgtatgccgactacctggtgatacagtga

SEQ ID NO: 2712 - DNA, 2445 bp, Artificial Sequence
  Synthetic Construct, AS-26 intein modified protein encoding nucleic acids
atgcaaacaagcattactctgacatccaacgcatccggtacgtttgacggttactattacgaactctggaaggatactggcaatacaacaatgacggtctacactcaaggtcgcttttcctgccagtggtcgaacatcaataacgcgttgtttaggaccgggaagaaatacaaccagaattggcagtctcttggcacaatccggatcacgtactctgcgacttacaacccaaacgggaactcctacttgtgtatctatggctggtctaccaacccattggtcgagttctacatcgttgagtcctgggggaactggagaccgcctggtgccacgtccctgggccaagtgacaatcgatggcgggacctacgacatctataggacgacacgcgtcaaccagccttgcgtgcatggggatacaagggttactctcgctgatgggcatgagcggcctattcgggaggtcgtggagtcaaatctggatgatccgaagccagtcgacgatggggtttgggataccgtggacttcgatgtcccttctctgcagtcagacggcacagttgcgactcagaacgctacgaaagtgtggaagcggaaggcgccggagacactctaccgcatcaggaccgctacgggcagggagctggatgtcacaccatcacaccctctcttcgttcagtccgacgggaggttccaggctaggaaggctgaggagctggagtctggcacccatgttgctgtgcccaggaaggtttcaactaacgcctgcaatgagctcgacgtcaccttccggcagtctcaggcccacaaccgcatcgacctcgatctgccaccacagtggacgccagagctcgctaggctgatcgggtacattgttgcggagggctacgtggagcagaggcctgataatacgggctacgtgtccatcacaaacaatgaccgggaggtgctggacgatgccaagagcgtcctggagactctcaacctgaatgtcaccgagcgctccagccacgaggggaagacggcgagggagctcctgtgcagcgctggcgagttcgtgtccttcctcgccagcctggacgagacactcctgcagtcgtctgctgagaggagggtcccgcaggatattatgagggcttccgacaacgtggtcaccgggttcattcggggctacatcgagggggagggccatgtgtcaacgtcccagcgcgagatcacagtcgcgagcatgtcgaagccgctcctggaggacgtcaggaccctcctggttacgcagggcattacagcccagctgcagccccggaacaatgggtcctacaggctcaggatctccggccagagcttccacgactacgcggagcagatcggcttcattactgcccgcaagaccgaggcttgcaggcagttcgaggggacgcatggcaacacaaatctggacattgtgccgaacctgggcccagagctcaggcgcatccgcgaggctctcgggctgactcagagcgagtgcggcctcccaaggtcgacctaccagcactacgagaggggcaggaggaatccctcgcgggattctctggagtcagtgctcgacgctttcgagactaggctggccgagatgaacaatgacactccaatttcggataccgctaggtctgacggcgggggcacgggctcgctcaggcaggatctcaacgggctggctgctctcgtggagggcgacatcgcctgggatcgcatcgagtccattgagcctatcgagcatgacgagaagtgggtctacgatctggagattgagggcacacataactacctcacaaatggggtcgtctctcataattccattgtggggacagccacgttcgatcagtactggagcgtgcgcacctctaagcggacttcaggaacagtgaccgtgaccgatcacttccgcgcctgggcgaaccggggcctgaacctcggcacaatagaccaaattacattgtgcgtggagggttaccaaagctctggatcagccaacatcacccagaacaccttctctcagggctcttcttccggcagttcgggtggctcatccggctccacaacgactactcgcatcgagtgtgagaacatgtccttgtccggaccctacgttagcaggatcaccaatccctttaatggtattgcgctgtacgccaacggagacacagcccgcgctaccgttaacttccccgcaagtcgcaactacaatttccgcctgcggggttgcggcaacaacaataatcttgcccgtgtggacctgaggatcgacggacggaccgtcgggaccttttattaccagggcacatacccctgggaggccccaattgacaatgtttatgtcagtgcggggagtcatacagtcgaaatcactgttactgcggataacggcacatgggacgtgtatgccgactacctggtgatacagtga

SEQ ID NO: 2713 - DNA, 2628 bp, Artificial Sequence
  Synthetic Construct, AS-27 intein modified protein encoding nucleic acids
atgcaaacaagcattactctgacatccaacgcatccggtacgtttgacggttactattacgaactctggaaggatactggcaatacaacaatgacggtctacactcaaggtcgcttttcctgccagtggtcgaacatcaataacgcgttgtttaggaccgggaagaaatacaaccagaattggcagtctcttggcacaatccggatcacgtactctgcgacttacaacccaaacgggaactcctacttgtgtatctatggctggtctaccaacccattggtcgagttctacatcgttgagtcctgggggaactggagaccgcctggtgccacgtccctgggccaagtgacaatcgatggcgggacctacgacatctataggacgacacgcgtcaaccagccttgcctgactgcggattcggacgttctcgttaggtcggagaatggggatattgagcgccagacggtggactctctcttctcggacgggcaggtggtcctcgcggacggcgataccgacatcgctgtttctaaggagacaccgactgtgctctcactggacgaggcgactgagagggtgagcgagcaggagtcgaccctcgtctctgagaggccactgagggacgatgagagcgtccgcaccatcgagacgtcgaggggcgctgtcaccgttacggacgatcacccaatgtacatcaggcaggacggcgaagtgactgtccggcctgcttccgacattgaggctgggaccgatctcgtggctgctaggaggccaccagacacgatggtcgagccatcagatgagacggttctgtcctgggagacattcgctgccgattgcgacaagcattctaagctctacggcgtcgactgcgggacagagctggctgctcagagggctgcgcgcgatgagtcccagactgctttcgctgagcgctacggctcgtacgggtctgctgtgggcaagtacgagaggggggagaaggacgttccggtgtggctcctgggcgagctcgacatcaggccagatcggattcacgggctgaactacgagacgtcgttcgagaatccattccctctggagtggtccccagagctggctcaggtcatcggctgcctcctgggcgacgggagcattcaccggaacgacgatgagaatgttgtggacgtgcgctaccataacacagatgaggctctcatcgagcgcttcgccagggacatcgagcgcctgttcgatattgagccaacagtcactgacaggcctggcagggagagccaccataagaggaagtaccaggtcgatgttccatcggctgtcggcagggtgctcgtctgcgttctggaggccgtgacggagaacggcacaccagggctcccagacgcggtccggcctgctttcgttggcgccctgttcgacgatgagggccacatctcccgcgaggggaaggcgttcattagcaatacagaccatactctcctgaccggcgtcggggagatgctcgctgagatgggcatcgagaccaagctcgcgccagaccagcacaagctgcatattaggggcaggaggaacctggagcagttcctggaccggatccctattgcgagcgatgagaagttctaccgcggcctcgatgctctggacgcctacgatgtgaccacgaggaaggctgagctcctggaggcgatcaggcaggagccaaagacctcggctgctctcgctcagactctgggcgtgaccagggggtccgtcaataagtacctcagggagctgcgggagtccggccacatcgagaagcagattgaggggtcaaaccggtccctcgacgagaatcgcacggttcagtatgtggcggctgatttcgagggctccgtgtacgctacgctgaggggggagccgtccagcgtgacagtcgaggacgttgagaggcgggagtacgacggccccgtgtacgatctgacggtttcagagaatgctccaaacttcgctgtcaatgggggggctgtggttcataactcttccattgtggggacagccacgttcgatcagtactggagcgtgcgcacctctaagcggacttcaggaacagtgaccgtgaccgatcacttccgcgcctgggcgaaccggggcctgaacctcggcacaatagaccaaattacattgtgcgtggagggttaccaaagctctggatcagccaacatcacccagaacaccttctctcagggctcttcttccggcagttcgggtggctcatccggctccacaacgactactcgcatcgagtgtgagaacatgtccttgtccggaccctacgttagcaggatcaccaatccctttaatggtattgcgctgtacgccaacggagacacagcccgcgctaccgttaacttccccgcaagtcgcaactacaatttccgcctgcggggttgcggcaacaacaataatcttgcccgtgtggacctgaggatcgacggacggaccgtcgggaccttttattaccagggcacatacccctgggaggccccaattgacaatgtttatgtcagtgcggggagtcatacagtcgaaatcactgttactgcggataacggcacatgggacgtgtatgccgactacctggtgatacagtga

SEQ ID NO: 2714 - DNA, 1560 bp, Artificial Sequence
  Synthetic Construct, AS-28 intein modified protein encoding nucleic acids
atgcaaacaagcattactctgacatccaacgcatccggtacgtttgacggttactattacgaactctggaaggatactggcaatacaacaatgacggtctacactcaaggtcgcttttcctgccagtggtcgaacatcaataacgcgttgtttaggaccgggaagaaatacaaccagaattggcagtctcttggcacaatccggatcacgtactctgcgacttacaacccaaacgggaactcctacttgtgtatctatggctggtctaccaacccattggtcgagttctacatcgttgagtcctgggggaactggagaccgcctggtgccacgtccctgggccaagtgacaatcgatggcgggacctacgacatctataggacgacacgcgtcaaccagccttgcgtgcggggggacactacggtcgctctcgctgacgggtcggagcgggagattcgggatctcgtggaggctaatctggatgaccctcggccagttgacgatggggtgtgggacggcgtggatgtcgctgttccttccctcgctgctgacggcaggctggttcagcgcagggcgacaaaagtgtggaagcgggaggctccggagacaatgtaccgggtccgcactgctgctggccacaggctcaccgtcacgccatcgcatcctctgttcgtggctgggtctcacggcccagacgccgtcaggacggaggacctggaggttgggcagctggtgggcgtcgccccggacggcgatgggtcgggccaggtcgctccagacggcggggttatcagggatgctcagccagctccagtgggcgacgctgagaccgtcgcctggtccgcgatcgagagcattacggaggtcgagccggatgaggagtgggtgtacgatctggaggtggagggcactcattcatacctcacggatggggtcgtttcacacaactccattgtggggacagccacgttcgatcagtactggagcgtgcgcacctctaagcggacttcaggaacagtgaccgtgaccgatcacttccgcgcctgggcgaaccggggcctgaacctcggcacaatagaccaaattacattgtgcgtggagggttaccaaagctctggatcagccaacatcacccagaacaccttctctcagggctcttcttccggcagttcgggtggctcatccggctccacaacgactactcgcatcgagtgtgagaacatgtccttgtccggaccctacgttagcaggatcaccaatccctttaatggtattgcgctgtacgccaacggagacacagcccgcgctaccgttaacttccccgcaagtcgcaactacaatttccgcctgcggggttgcggcaacaacaataatcttgcccgtgtggacctgaggatcgacggacggaccgtcgggaccttttattaccagggcacatacccctgggaggccccaattgacaatgtttatgtcagtgcggggagtcatacagtcgaaatcactgttactgcggataacggcacatgggacgtgtatgccgactacctggtgatacagtga

SEQ ID NO: 2715 - DNA, 2325 bp, Artificial Sequence
  Synthetic Construct, AS-29 intein modified protein encoding nucleic acids
atgcaaacaagcattactctgacatccaacgcatccggtacgtttgacggttactattacgaactctggaaggatactggcaatacaacaatgacggtctacactcaaggtcgcttttcctgccagtggtcgaacatcaataacgcgttgtttaggaccgggaagaaatacaaccagaattggcagtctcttggcacaatccggatcacgtactctgcgacttacaacccaaacgggaactcctacttgtgtatctatggctggtctaccaacccattggtcgagttctacatcgttgagtcctgggggaactggagaccgcctggtgccacgtccctgggccaagtgacaatcgatggcgggacctacgacatctataggacgacacgcgtcaaccagccttcagttacgggggacaggccagtggtcgttagggatccggggggcacagttcgcattctcccaattgaggatctcttcgctagggggaccacggagtcagaggtcctcatcgctgctgacggcgatgtggtcgcttccgctacaccaggcaagactaggagggctctcgacgggtgggatgctctgtccgtgaacgaggacggcgaggctgagtggcagccaatcgcgcaggctattcggcacaacaccgacaagcctgttgtgaatctccagcataagttcggcgagtcaacaactacccgcgaccactcctacgtcgttccaggcgaggatgggctgacgacagtttccccagacgatgtggctgagccttaccgcgtcagcggcgttccagacgtggagcccgtcgagcaggtggatgtctacgaggttctcaggggctacgagagggagtacgaggacggcaggtcggtggggtctgataactcaatcacaaagaggaagcagattcacgcggacgatgagtatgtgtggttcggccatgagcaccatagggacgttgattcgaccgttaaggtgaagcggttcgtggacatcgattctgaggacggcgctgctctgattaggctcctgggggcctacgtcccagagggctccgccagcaccggggagactgcgaccagcaagttcggcgcttcgctcgctgagtctgacagggagtggctcgctcagctgcagagggattacagccggctgttcgagaatactaccgctggcatcattacatcggacaggagggctgagaggactgtggagtaccagacggacacaggcggggcttcggtcacctacaacgatgagacgctcaagctgcagatgatgaatgagctcgcggctgtgttcttcagggagttcgctggccagacgagcagggggaagcggatcccgtcgttcgtcttccacctgcccgaggagaagcaggacctcttcctgaccctcctggtggagggcgatgggagccgcgagttcccaaggtacacggaggcctacgcgcagcggaacttcgacttcgagacgacatctcgcgagctcgctgctggcctgtcaatgctcctgacgcagagggggcagaagcattctctcaagtaccgggactccaaggatagctacactatccgcacctgctccacgtacagggagggcagggacccagtcctgaccgaggctgaccacgatggctacgtgtacgacctctcagtggaggagaatgagaacttcgtggatggggttgggggcatcgtgctgcataattccattgtggggacagccacgttcgatcagtactggagcgtgcgcacctctaagcggacttcaggaacagtgaccgtgaccgatcacttccgcgcctgggcgaaccggggcctgaacctcggcacaatagaccaaattacattgtgcgtggagggttaccaaagctctggatcagccaacatcacccagaacaccttctctcagggctcttcttccggcagttcgggtggctcatccggctccacaacgactactcgcatcgagtgtgagaacatgtccttgtccggaccctacgttagcaggatcaccaatccctttaatggtattgcgctgtacgccaacggagacacagcccgcgctaccgttaacttccccgcaagtcgcaactacaatttccgcctgcggggttgcggcaacaacaataatcttgcccgtgtggacctgaggatcgacggacggaccgtcgggaccttttattaccagggcacatacccctgggaggccccaattgacaatgtttatgtcagtgcggggagtcatacagtcgaaatcactgttactgcggataacggcacatgggacgtgtatgccgactacctggtgatacagtga

SEQ ID NO: 2716 - DNA, 1659 bp, Artificial Sequence
  Synthetic Construct, AS-30 intein modified protein encoding nucleic acids
atgcaaacaagcattactctgacatccaacgcatccggtacgtttgacggttactattacgaactctggaaggatactggcaatacaacaatgacggtctacactcaaggtcgcttttcctgccagtggtcgaacatcaataacgcgttgtttaggaccgggaagaaatacaaccagaattggcagtctcttggcacaatccggatcacgtactctgcgacttacaacccaaacgggaactcctacttgtgtatctatggctggtctaccaacccattggtcgagttctacatcgttgagtcctgggggaactggagaccgcctggtgccacgtccctgggccaagtgacaatcgatggcgggacctacgacatctataggacgacacgcgtcaaccagccttgcttctcgggggatacggagatcgctctcgcttcgggggattctattactttcgagtcgctggtggacgcttacgagcggggggagacacactactgctacactatcggcgacgatgggcggatccgcattgaggagattatgaacccgcgggtgacccaggaggacgctgctctcctggccgttacgctcgataatggcgaggtcatcaggtgcacacccgaccatgagttcatgctccgggatggcaactactgcgaggcgcagaatctgaccgacgggcagagcctcatgccactgtacaggaccacgacagagatgactgagactaccgagacgacagagactaccgggacagctgagatggtgaagcagccgttcgcccagaacaattgggagtccgtcagccagctcgctaaccgctacaatcgcaggcacacgacaactgaccatatcgttgagacgcagcagattcagtcacagcagcagtcccagatcgagaccgtccagatttctgagagggcggacgttcacaaccataccgtgatctcggtcgagtctctgaccgagacggctgatgtctacgatctggaggttccagttactcataatttcgctctcgcttccggggttttcgttcataattccattgtggggacagccacgttcgatcagtactggagcgtgcgcacctctaagcggacttcaggaacagtgaccgtgaccgatcacttccgcgcctgggcgaaccggggcctgaacctcggcacaatagaccaaattacattgtgcgtggagggttaccaaagctctggatcagccaacatcacccagaacaccttctctcagggctcttcttccggcagttcgggtggctcatccggctccacaacgactactcgcatcgagtgtgagaacatgtccttgtccggaccctacgttagcaggatcaccaatccctttaatggtattgcgctgtacgccaacggagacacagcccgcgctaccgttaacttccccgcaagtcgcaactacaatttccgcctgcggggttgcggcaacaacaataatcttgcccgtgtggacctgaggatcgacggacggaccgtcgggaccttttattaccagggcacatacccctgggaggccccaattgacaatgtttatgtcagtgcggggagtcatacagtcgaaatcactgttactgcggataacggcacatgggacgtgtatgccgactacctggtgatacagtga

SEQ ID NO: 2717 - DNA, 1641 bp, Artificial Sequence
  Synthetic Construct, AS-31 intein modified protein encoding nucleic acids
atgcaaacaagcattactctgacatccaacgcatccggtacgtttgacggttactattacgaactctggaaggatactggcaatacaacaatgacggtctacactcaaggtcgcttttcctgccagtggtcgaacatcaataacgcgttgtttaggaccgggaagaaatacaaccagaattggcagtctcttggcacaatccggatcacgtactctgcgacttacaacccaaacgggaactcctacttgtgtatctatggctggtctaccaacccattggtcgagttctacatcgttgagtcctgggggaactggagaccgcctggtgccacgtccctgggccaagtgacaatcgatggcgggacctacgacatctataggacgacacgcgtcaaccagccttgcgtttcgggggagacagacatcgctctcgtggagggcaagaccgctactatcggggagctcgtggagtcggcgctgacagacccaaagccggttgacgatggcgtgtgggacaccgcggatttcaccgtgacgtcggctatcgagacgggcgagctcattgagcgggacgtcacacgcgtttggaagaggcagtcccccgagacgatgcggcagatccagattgctggcgggaggagcgtgacagtcactccatcgcaccccgttttcgtggagcataatgggtcttacaccgctaggagggctgactccctgagcgctggcgagtcagtggctatcgctgacgatgtcgccgactcacacccgatttccgtcgataacactgcgaataccctcaacccaaggtcgatgtctacgcctggcatcaccacggacggcgggctgtacaggacagggtccgatggcgggattgtccatgccgaggttggcaaggaggacgttactgattgcctcacaactgacaggatcaccgctgtgaagaccgtcacgccaacagctgagtgggtctacgatctggaggtggagggcacacacgcctacctcacaaacggggttctctcacacaactccattgtggggacagccacgttcgatcagtactggagcgtgcgcacctctaagcggacttcaggaacagtgaccgtgaccgatcacttccgcgcctgggcgaaccggggcctgaacctcggcacaatagaccaaattacattgtgcgtggagggttaccaaagctctggatcagccaacatcacccagaacaccttctctcagggctcttcttccggcagttcgggtggctcatccggctccacaacgactactcgcatcgagtgtgagaacatgtccttgtccggaccctacgttagcaggatcaccaatccctttaatggtattgcgctgtacgccaacggagacacagcccgcgctaccgttaacttccccgcaagtcgcaactacaatttccgcctgcggggttgcggcaacaacaataatcttgcccgtgtggacctgaggatcgacggacggaccgtcgggaccttttattaccagggcacatacccctgggaggccccaattgacaatgtttatgtcagtgcggggagtcatacagtcgaaatcactgttactgcggataacggcacatgggacgtgtatgccgactacctggtgatacagtga

SEQ ID NO: 2718 - DNA, 2730 bp, Artificial Sequence
  Synthetic Construct, AS-32 intein modified protein encoding nucleic acids
atgcaaacaagcattactctgacatccaacgcatccggtacgtttgacggttactattacgaactctggaaggatactggcaatacaacaatgacggtctacactcaaggtcgcttttcctgccagtggtcgaacatcaataacgcgttgtttaggaccgggaagaaatacaaccagaattggcagtctcttggcacaatccggatcacgtactctgcgacttacaacccaaacgggaactcctacttgtgtatctatggctggtctaccaacccattggtcgagttctacatcgttgagtcctgggggaactggagaccgcctggtgccacgtccctgggccaagtgacaatcgatggcgggacctacgacatctataggacgacacgcgtcaaccagccttcataccatcctaggtcggaggtcctgctcgctgacgggcagcggattgacatcggcactttcgtggattcgcgcattgagaagaataacgccaatgttatcgacggcattaactgcgagatcctgccggtggacgatattgatgtttacaccgtggacacagatactgggtccgctagcacggtttccattgacagggtgagccggcacccagctccatccgagttcatccgcgtgaagttcagcaacggcaggtcggttctcgtgaccccggagcatcccatgttcatcgacgatgggtcagagaccaagacggtccaggctaatgctctgagcggcggggagttcgttccagctcctcaccatctcccaggcgtgaacaccgacgcgtccagcgtctccgacgatatcaatgatgttagcaccattaggacgcacgtgaggtcccgggcgcgcgctaaggctgaggtcgaggttcgcgctacggacggcgagttcaagctcatcgatgccgcgcagaccctgggcatcattacggctgtggggaaggtgagcgtcgacgctccagagcggggcatcattgtcgacatggatcgcacagttgactcgtctaaggattcgatcaacaatgtcctggggtctgttattccttcaaacgacaatgattctatcactagggtccaggacacaggctcgactgggaaccagtggaggtggtctgtgaataccttcatcgagcggatgatcgagattgctccagctgtcacggctgacaggccaaacaggagggtgcctgatgctgtcctcggcgggagcgaggctgtggtccagcagttcctgacaggcgtgatcattgctgccgggcggatcctcgacgagactatccgcatctacgcttcatccaacgagctcgcctgcgactacgccgatgcgttcctcaggctgggcatcaccgcttccgtcgaggacgggccagctgagatcgcggctcagaccgtgatcaagtgcgacagcgattacgagcgcgcgtgcggcatgttcgacatcagctcgtctaggaccacgccctccgatacatcatcccagaacaatcagagctcggtcaccgcccagaacgaggacacgcaccagacaactagccatgagatcctcccgtcgggcattgcggatgagctgcagagcatcaggcagctcctgaacattcccgcctcggagcagctggcgtctatcacggctggcgacgatgggatcgcgctctcgattgctagggccgagatcaacctcctgcgggaccacattgagacactgcgcatggatactgagaatgtcagcattggccgcgacgattgcgttacaccgactatctcttcatccagcaagtacaagtacgcgaagaactcaatcacctccgacgagaatctccagctgttcggccagtcacaggcccagctgtccgagaggacaaagaccacggagtcgtcttcaatctcggcgtctactgacctcgtgtctatcccagctaacatttcagagaataggctcgtggctgctacacagaggctggacgaggtcgagactcgctgcaaccggcgctaccacagggtcatcgccgttgacacggtgtccaatgccggccctcatgcgtgcgagtgggtctacgatattactgtggagcctaccaacactttcatttcttccggggtcgttctgcataactccattgtggggacagccacgttcgatcagtactggagcgtgcgcacctctaagcggacttcaggaacagtgaccgtgaccgatcacttccgcgcctgggcgaaccggggcctgaacctcggcacaatagaccaaattacattgtgcgtggagggttaccaaagctctggatcagccaacatcacccagaacaccttctctcagggctcttcttccggcagttcgggtggctcatccggctccacaacgactactcgcatcgagtgtgagaacatgtccttgtccggaccctacgttagcaggatcaccaatccctttaatggtattgcgctgtacgccaacggagacacagcccgcgctaccgttaacttccccgcaagtcgcaactacaatttccgcctgcggggttgcggcaacaacaataatcttgcccgtgtggacctgaggatcgacggacggaccgtcgggaccttttattaccagggcacatacccctgggaggccccaattgacaatgtttatgtcagtgcggggagtcatacagtcgaaatcactgttactgcggataacggcacatgggacgtgtatgccgactacctggtgatacagtga

SEQ ID NO: 2719 - DNA, 2088 bp, Artificial Sequence
  Synthetic Construct, AS-33 intein modified protein encoding nucleic acids
atgcaaacaagcattactctgacatccaacgcatccggtacgtttgacggttactattacgaactctggaaggatactggcaatacaacaatgacggtctacactcaaggtcgcttttcctgccagtggtcgaacatcaataacgcgttgtttaggaccgggaagaaatacaaccagaattggcagtctcttggcacaatccggatcacgtactctgcgacttacaacccaaacgggaactcctacttgtgtatctatggctggtctaccaacccattggtcgagttctacatcgttgagtcctgggggaactggagaccgcctggtgccacgtccctgggccaagtgacaatcgatggcgggacctacgacatctataggacgacacgcgtcaaccagccttgcttcactcctgatacaaatgttctgacgcctaatggggttcgcaatattcgggatctcacggtcggggattcggtttactcgctgaacccggagaccatgcagatggagatcaagccggtgacacagactcacgagtaccccgactaccagggcgacctcatcgatattcagacaaacgagatcgatttccgcgtcactccaaatcataggatgctggttgaggctaccggcacggacaccacgtccaccaacgactacgatttcatcgaggccgggaatctcgatatttccagccggtacgagctgcctcacggctggtccgttgaccatacggatagcctcggggcctacatcgacctgattaccctcctgagggagcagtcagacacgtacaacgtcctctccgatggcgggatgacaactgctgctacggctgacatcaatcacaacaatgtcacccgcagggttgactctgatacgttcgtgtcactgattggctggtatgtggctacagggcgggtctcgcgcactcagaacggctctgacagggtctacctccagctgtcccagacaaatactaaggcgcggacccagctcacgatgctcctggacgagctgggcgtggactggcaggctgataacgagaagatccacttcgtgtctcatgtctggacggagctcttcgacaccacgtgcggccgcacagagaagaacaagcacatcccggagctgattttcgacgcttcagcctcccagaagagggcgttcttcgatgctatcattaacggcagcggggtcaagaatgacgattcgtaccagtaccacacctcgtctgaggacctcagggacgatatcctccggctgtgcgttcatatcggcattgtggcgcggtacgactacatcaacgatgagtcctggcgcattgagtgcaccgagacggccaatcccgacttcacactgactcatagcggcaggcagtcgacagctgaggatggggtttactgcgtgactgtggcggataatcagactctgctcgccgggaggaatggcaccttccagtggacaggcaactccattgtggggacagccacgttcgatcagtactggagcgtgcgcacctctaagcggacttcaggaacagtgaccgtgaccgatcacttccgcgcctgggcgaaccggggcctgaacctcggcacaatagaccaaattacattgtgcgtggagggttaccaaagctctggatcagccaacatcacccagaacaccttctctcagggctcttcttccggcagttcgggtggctcatccggctccacaacgactactcgcatcgagtgtgagaacatgtccttgtccggaccctacgttagcaggatcaccaatccctttaatggtattgcgctgtacgccaacggagacacagcccgcgctaccgttaacttccccgcaagtcgcaactacaatttccgcctgcggggttgcggcaacaacaataatcttgcccgtgtggacctgaggatcgacggacggaccgtcgggaccttttattaccagggcacatacccctgggaggccccaattgacaatgtttatgtcagtgcggggagtcatacagtcgaaatcactgttactgcggataacggcacatgggacgtgtatgccgactacctggtgatacagtga

SEQ ID NO: 2720 - DNA, 2601 bp, Artificial Sequence
  Synthetic Construct, AS-34 intein modified protein encoding nucleic acids
atgcaaacaagcattactctgacatccaacgcatccggtacgtttgacggttactattacgaactctggaaggatactggcaatacaacaatgacggtctacactcaaggtcgcttttcctgccagtggtcgaacatcaataacgcgttgtttaggaccgggaagaaatacaaccagaattggcagtctcttggcacaatccggatcacgtactctgcgacttacaacccaaacgggaactcctacttgtgtatctatggctggtctaccaacccattggtcgagttctacatcgttgagtcctgggggaactggagaccgcctggtgccacgtccctgggccaagtgacaatcgatggcgggacctacgacatctataggacgacacgcgtcaaccagccttgcttccatcctgagactaagatttggttcagggacacagacaatgagtggcatcatgagactattcagactttcgtggaggaccgcctggacgatccagagatcgatgcggttggcacgctcgtgcaggaggtcgacgataacacagaccgggagatctctgtgccttcaattgacgataatggcaacgagcgcctgcagtcagttactgctgtgtccaagcacagggccccaaatcatctcgtgcagatcgagaccattagcggcagggagatcacaattactcctgaccacgagatgcatatcttcgagcagggcaacctggtgtcgaagcaggcttctaagatcacgtcaggggagtacgccgtcatcccgaagcgcctccagacgatttccccatccagccacacacctcagcatgatctcctgagggagttcctcacgcgggatgagctgacagccgacaggctcatcattcacacgtctgacccagtccggctctgcaaccgcgttttccctgaggaggtgacatcatgcaaggatgcggttgagatcatgcagaatactgcttgccatctggacaagaacaaggagaccctcatcggctggctgggcgaggggcgcattccggtcgctctcctgagggggttcgttgagacggacgaggcgctcctgatgagcatccccgacgatgttcagattggcctgaggggggagaaggtgcgcatcgacaggcacattggcttcacggaggagctcacatcgctcctgggctactacgctgctgctgggatcgtgcatacccagacgaatcccatttcctacgagagcgcgcagcaggagcagtcgaggatcaccttctacaacattgatacacagactcagaccgacctcctgaatgccctgaactctgtcttcgagatcgagccgattcagtacaacctggacggcgagatcctcggcgtgccaggggagctcattaggagggtcttcgatactgtcttcgacgttgggacccagccatcccacaagcggatcccccaggctctgttcgatgcctcagagtcccacatcacgagctacctgcgctgcttcttctccactcatgacagcctcaccacggataccagggacatcagcgctacaactgtgtcgcgggagttcaaggaggacatcattgctgctctcaggaggctgggcatcacagctgaggtcaccacgcagcagagcaggtcggtgccagaggtcctcccagactggtacgcgatcgacgatattacgcaccatgacgctgataattccctcaacctgacacggtcctacgtgatctctattgcgtcgtctgatgctgttaccctgcagagggacaggcaggctcaggagcagatcaagtacgacgcgcagggcctcatcgccaacaataacgcgattcaccagagcaggcaagtgactgatggcgggaggaaggactacatcactgagccgatcaccgacattgagtatgtggacgcggatatcgactacacctactgcctcactgtttcggagactcactcactcatcgttaatgatctctctcagaagcagtccattgtggggacagccacgttcgatcagtactggagcgtgcgcacctctaagcggacttcaggaacagtgaccgtgaccgatcacttccgcgcctgggcgaaccggggcctgaacctcggcacaatagaccaaattacattgtgcgtggagggttaccaaagctctggatcagccaacatcacccagaacaccttctctcagggctcttcttccggcagttcgggtggctcatccggctccacaacgactactcgcatcgagtgtgagaacatgtccttgtccggaccctacgttagcaggatcaccaatccctttaatggtattgcgctgtacgccaacggagacacagcccgcgctaccgttaacttccccgcaagtcgcaactacaatttccgcctgcggggttgcggcaacaacaataatcttgcccgtgtggacctgaggatcgacggacggaccgtcgggaccttttattaccagggcacatacccctgggaggccccaattgacaatgtttatgtcagtgcggggagtcatacagtcgaaatcactgttactgcggataacggcacatgggacgtgtatgccgactacctggtgatacagtga

SEQ ID NO: 2721 - DNA, 2646 bp, Artificial Sequence
  Synthetic Construct, AS-35 intein modified protein encoding nucleic acids
atgcaaacaagcattactctgacatccaacgcatccggtacgtttgacggttactattacgaactctggaaggatactggcaatacaacaatgacggtctacactcaaggtcgcttttcctgccagtggtcgaacatcaataacgcgttgtttaggaccgggaagaaatacaaccagaattggcagtctcttggcacaatccggatcacgtactctgcgacttacaacccaaacgggaactcctacttgtgtatctatggctggtctaccaacccattggtcgagttctacatcgttgagtcctgggggaactggagaccgcctggtgccacgtccctgggccaagtgacaatcgatggcgggacctacgacatctataggacgacacgcgtcaaccagccttcggtcgctgcggactcgcggctggtcgctgtttcgccggatgacaagatcgttttcactactattgaggatttctggaagaagctgaacacgccaatcgagcgcaatgggaagttccggaagcgcacatgcgtctctgagggctggcagacttacgctttcgacgagaaccacgaggcctcactgaggcctatcgagaaggcgattcggtacaccgctgatgagtctgagcagctcaggaggatcaccacgcagctcggcaggtcgctggacattacggatgagcactctctgttccgctacgacgatggcatcgaggaggtggctggggacgatctgaccgctggcgacatcattgtcgcgccgaggaccctcgatgttgaggtgacgcagacaactctcgacctgtccgagtacatccacgataacgagaggtgcccaagcgagcagaccggctcgggggagctcaatctggcctccaagagcgcgatctcggactctaggaacaaggagaccccgggcgtgacgcataatatcctcccccagcggagcaagttcaccgacgagatgaccacgctctcaccaacggctgttggcgggctggagtccgagcagaacgagaccctcagggtcggcgagagcacgggggccatcgagaggtacattaatgtggacgattcgttcggctggctcctggggcagttcatcgcgcagaggtcaatttccacagacgctctgaccatgacggtccacactgccgcggagaagcatgccgagcggatcgttgcgaccagcgactcggtgttcgggattaagccaacggtgaactccatcgagcgcggctacgagattgtgttcccttccgtcttcgacacaatcgtcagcggcctcactgcgaaggagcagagcgagcccgagcaggacgtggatcacacacatactgacgagatcggcattccggagtgcatcctgcacgcccccgacgatattgtcctctccttcctgcaggggttcatcctcgcggagaacgctcagcggaagggcaatgctgcctccgaggccagcgagatggtctctgagtcagagacaactgttaccctggagacgccatcggtcggcgttaaggacgggctcgtgttcctgtgccacaggctcggggtcatcacggatatttcggagaagtctggcgaggagtacagcgttcatttcgaggagtctcgctacacagtgtcaatcgccacagagggcaagactaaccccctcgaccagatcctgaatggggagaggccaacaatgcctgagggcgtgagcgtcccagttccagatgctctcctgactatccacgagtcaattgccaactccccacatatcgaccaggtcattcctgataccgtggtccagcaggagacagtttccctggagactctgcagagcctcctgaccggcctgtcgacggtggacctcccagctcagctggaggctaagcgcgacgagctcacactcctgactgagggcgatctctcttacctgagggtggagtcagtcgagtgcgttgactacgatggctacctgtacgatctccaggttgggggggagccagttttcacagctaattggctctacgctcataattccattgtggggacagccacgttcgatcagtactggagcgtgcgcacctctaagcggacttcaggaacagtgaccgtgaccgatcacttccgcgcctgggcgaaccggggcctgaacctcggcacaatagaccaaattacattgtgcgtggagggttaccaaagctctggatcagccaacatcacccagaacaccttctctcagggctcttcttccggcagttcgggtggctcatccggctccacaacgactactcgcatcgagtgtgagaacatgtccttgtccggaccctacgttagcaggatcaccaatccctttaatggtattgcgctgtacgccaacggagacacagcccgcgctaccgttaacttccccgcaagtcgcaactacaatttccgcctgcggggttgcggcaacaacaataatcttgcccgtgtggacctgaggatcgacggacggaccgtcgggaccttttattaccagggcacatacccctgggaggccccaattgacaatgtttatgtcagtgcggggagtcatacagtcgaaatcactgttactgcggataacggcacatgggacgtgtatgccgactacctggtgatacagtga

SEQ ID NO: 2722 - DNA, 2238 bp, Artificial Sequence
  Synthetic Construct, AS-36 intein modified protein encoding nucleic acids
atgcaaacaagcattactctgacatccaacgcatccggtacgtttgacggttactattacgaactctggaaggatactggcaatacaacaatgacggtctacactcaaggtcgcttttcctgccagtggtcgaacatcaataacgcgttgtttaggaccgggaagaaatacaaccagaattggcagtctcttggcacaatccggatcacgtactctgcgacttacaacccaaacgggaactcctacttgtgtatctatggctggtctaccaacccattggtcgagttctacatcgttgagtcctgggggaactggagaccgcctggtgccacgtccctgggccaagtgacaatcgatggcgggacctacgacatctataggacgacacgcgtcaaccagccttgcctcactgcggactcaacagtcatgctcaaggagaaggggatggtctcggtctcggaggtggagacaggggatcagatcgctcagcgctccgacacaggcttccagtacaagccggtggaggagactcacgcgtacgagaacgctgagacactcactgtcaccctgacgaacggctgctctatccgcgggaccccgaatcacaggctcatggtcgacgatgagtggacgcgcatcgacgagattcagcccgatcaggaggttcattacacactcggctggctgagggagactaaccagtccccgcccaagctccactctcagtcacataccacggtgaatcagacagctgactccatcagcccggattccagcgagcccattgagctgtcggagtctgagaacgcggacacgggcaacaggcacaattctgctgttgccgtgaagcagtcacggacacagactcagctgatcagcgacgaggtggtctcgcggccagagcacaccaggaggcctgatcagctctccgaggagctggctgagctcctgggcctctggatcgacacggggctgtggcatcagagcggcgtccagttcaacgttgagcgcgagaatatcgcggagtacattgaccagctctcacagcagctgttcgataccccagctgctatctccgacacggatggcacctacacggtggacattacagatcataagctcaaggagtggtggaaggctaacttcggcgggaagccagacggcactcagtcgtcttacgtcccacagatgatcaaggaggcccctacaaatgttattgaggcgttcctgagggggtgcttcactgctgagggcgggctcaggaaggacatgaggccacggctgtgcacctcatccgaggatagcatcgacgatattgcggtcctcatgatgggcctggggtaccctgtggagaagtcggtcatcaggaacgctgacggcgagccgtactactcggttatgcccgctaccgacgatgggctctctgccttcctgcacgacgtgggcttcatcgatgagcggcgcgagatcgggctctccaacattgagagctcggatagccgggccctgaacaatacccataagatcgaggttgagtcaattgtggagtccccacctgcgacggtctacgacattacagtggcggataatcatgagtacgttacagatggcatcatttcacacaactccattgtggggacagccacgttcgatcagtactggagcgtgcgcacctctaagcggacttcaggaacagtgaccgtgaccgatcacttccgcgcctgggcgaaccggggcctgaacctcggcacaatagaccaaattacattgtgcgtggagggttaccaaagctctggatcagccaacatcacccagaacaccttctctcagggctcttcttccggcagttcgggtggctcatccggctccacaacgactactcgcatcgagtgtgagaacatgtccttgtccggaccctacgttagcaggatcaccaatccctttaatggtattgcgctgtacgccaacggagacacagcccgcgctaccgttaacttccccgcaagtcgcaactacaatttccgcctgcggggttgcggcaacaacaataatcttgcccgtgtggacctgaggatcgacggacggaccgtcgggaccttttattaccagggcacatacccctgggaggccccaattgacaatgtttatgtcagtgcggggagtcatacagtcgaaatcactgttactgcggataacggcacatgggacgtgtatgccgactacctggtgatacagtga

SEQ ID NO: 2723 - DNA, 2328 bp, Artificial Sequence
  Synthetic Construct, AS-37 intein modified protein encoding nucleic acids
atgcaaacaagcattactctgacatccaacgcatccggtacgtttgacggttactattacgaactctggaaggatactggcaatacaacaatgacggtctacactcaaggtcgcttttcctgccagtggtcgaacatcaataacgcgttgtttaggaccgggaagaaatacaaccagaattggcagtctcttggcacaatccggatcacgtactctgcgacttacaacccaaacgggaactcctacttgtgtatctatggctggtctaccaacccattggtcgagttctacatcgttgagtcctgggggaactggagaccgcctggtgccacgtccctgggccaagtgacaatcgatggcgggacctacgacatctataggacgacacgcgtcaaccagccttgcgtggaggagaatagcctggtttctaccgatgaggggctgcggcctatcaaggatctggacaatactactgcggagttcgagcagtgggacgagatcgatgtcggcgttaccacggacggcgggaccaagacggctacagctgtttacgataacggcttcgccaatgtgcgccagatccagaccgagagcgggttcaacattgctgctaccccaaatcaccggttccgcacgctgtccagcgacggcacttacacctggaaggaggctggcaagttcgagtccggggaccgcgtgatcctgcagaggaacaccttcgatgctggctcccgcgtgtccctggaggctaatgagagggctgacgatgcccaggacacaactgagggcccagagctgccagggaggatgacgtccgagctggccgagttcctcggctacttcatgggcagcgggtacatctcggacgagacccatgcttccgtggatctggtggtcgacagcgatgccacggagctcaactcatacctgtccaatctcggcgagcagctcttcaggattaccccggccgtcgagtctcaggagatgtcacaggttctgtccttccgggactgccacctcagccgctacttcgaggataacggctggaagaagacggacacaggccataatggggatgcttcggctgctttcgtcccagagcagatcctggagggcgacgagcaggttgtgaacggcttcctcaggggggtgttcgaggcgattgggacggtctcggagaagatcgagattctgaccacgtctacaactctggctgaccagctccagagcctcctgctctcgctgggccacgtgttcacccgggatagcacgaagctcgtcgagacaaacaattaccatgacgatcagctgaggcagaggctctgcggcgctactaggagggaggacgagcggttcatgaacgagatcgggtcactcattgagccagatgagctgaacctctccacacgcgcggacaagaatgatacttacccttcgtctgttatcgaccacgtgcagacactggacggctacgattcagtgtccgagagcctcaagtctcgcattaaccagtcacaggtcgacgggacggttagcaggaagctgatcaaggatattgaggcggagactgctgagaccgtctcgatcgccgaccatgagctcacaggcttctacgcggctactgtggagtctgtcacggaggacacagcgtacactaaggatatttcagttccaagcaacaacacatacatcgccgacgggttcgttactcataattccattgtggggacagccacgttcgatcagtactggagcgtgcgcacctctaagcggacttcaggaacagtgaccgtgaccgatcacttccgcgcctgggcgaaccggggcctgaacctcggcacaatagaccaaattacattgtgcgtggagggttaccaaagctctggatcagccaacatcacccagaacaccttctctcagggctcttcttccggcagttcgggtggctcatccggctccacaacgactactcgcatcgagtgtgagaacatgtccttgtccggaccctacgttagcaggatcaccaatccctttaatggtattgcgctgtacgccaacggagacacagcccgcgctaccgttaacttccccgcaagtcgcaactacaatttccgcctgcggggttgcggcaacaacaataatcttgcccgtgtggacctgaggatcgacggacggaccgtcgggaccttttattaccagggcacatacccctgggaggccccaattgacaatgtttatgtcagtgcggggagtcatacagtcgaaatcactgttactgcggataacggcacatgggacgtgtatgccgactacctggtgatacagtga

SEQ ID NO: 2724 - DNA, 1656 bp, Artificial Sequence
  Synthetic Construct, AS-38 intein modified protein encoding nucleic acids
atgcaaacaagcattactctgacatccaacgcatccggtacgtttgacggttactattacgaactctggaaggatactggcaatacaacaatgacggtctacactcaaggtcgcttttcctgccagtggtcgaacatcaataacgcgttgtttaggaccgggaagaaatacaaccagaattggcagtctcttggcacaatccggatcacgtactctgcgacttacaacccaaacgggaactcctacttgtgtatctatggctggtctaccaacccattggtcgagttctacatcgttgagtcctgggggaactggagaccgcctggtgccacgtccctgggccaagtgacaatcgatggcgggacctacgacatctataggacgacacgcgtcaaccagccttctattgaggctgatgagtcaatcgttattaggcgggacggggagactgagctgacggagatcgggtcgttcgtggacactattctggccgcggacaaccaggagacccggatcacggatggccacgagattgcgctcgctccgaatgggctggaggttccctccctcgacaccgatgagcagatcaggtggaagcacattgaggcggtgagccggcatgcttcgccagacgagatcctcctgattgagctggagtcaggcaggtccatcagggctaccaaggctcactccttcgtcacgaggagggacggcgatgttctcccagtggctggcgagacactggtggtcggggacgtcctccctactgttggcagctacgatcatgcgtcggggtctatctcagtgccgctgcagtcccagagcgtcgctgctgacggcgggaccgttgagcccaacacaaatatcactgccaacgcggagcgcgattcggcctctattacctctgcgggcatcattgggtcggctacgtgggagaggatctccagcattgagacagtggcgccggagtacgagtatgtgtacgatctctctgtttccgggctggagactttcactacgggggagggggtcgttactcataattccattgtggggacagccacgttcgatcagtactggagcgtgcgcacctctaagcggacttcaggaacagtgaccgtgaccgatcacttccgcgcctgggcgaaccggggcctgaacctcggcacaatagaccaaattacattgtgcgtggagggttaccaaagctctggatcagccaacatcacccagaacaccttctctcagggctcttcttccggcagttcgggtggctcatccggctccacaacgactactcgcatcgagtgtgagaacatgtccttgtccggaccctacgttagcaggatcaccaatccctttaatggtattgcgctgtacgccaacggagacacagcccgcgctaccgttaacttccccgcaagtcgcaactacaatttccgcctgcggggttgcggcaacaacaataatcttgcccgtgtggacctgaggatcgacggacggaccgtcgggaccttttattaccagggcacatacccctgggaggccccaattgacaatgtttatgtcagtgcggggagtcatacagtcgaaatcactgttactgcggataacggcacatgggacgtgtatgccgactacctggtgatacagtga

SEQ ID NO: 2725 - DNA, 2298 bp, Artificial Sequence
  Synthetic Construct, AS-39 intein modified protein encoding nucleic acids
atgcaaacaagcattactctgacatccaacgcatccggtacgtttgacggttactattacgaactctggaaggatactggcaatacaacaatgacggtctacactcaaggtcgcttttcctgccagtggtcgaacatcaataacgcgttgtttaggaccgggaagaaatacaaccagaattggcagtctcttggcacaatccggatcacgtactctgcgacttacaacccaaacgggaactcctacttgtgtatctatggctggtctaccaacccattggtcgagttctacatcgttgagtcctgggggaactggagaccgcctggtgccacgtccctgggccaagtgacaatcgatggcgggacctacgacatctataggacgacacgcgtcaaccagccttgcctcactgcggggacaagggttctgcgggctgatacgggggcggagactactatgggggagctgttcgcgctgcaggctagggacgttccggtgtggtcactcgacgagtccctgcgctacgtccgcaggcacctcactagggttttcccaaccggggtgaagccagtcttccggctgaggactgctagcggcaagactgtccgcgctaccgctaaccatccattcctcacctacgatgggtggaagcctctcggcgagctgtcggtggctgacaggctggcggttccgaggcacgtgccagctccagagagggtggcttcatggacggacgatcaggtcctcctgctcggccatctcatcggcgatgggtccttcgtcaagaggcagccactccgctacgctagcgttgacgaggctaacctgtcggctgtgacggaggctgctgctaatgccttctccattgtcgcggttcgggacgagtacgctgctgctaggtgcaccacgctcaggctgccagctccttacaggctgacccacggcaggaggaatccactcgctgcttggctggacgagctcggcctgttcgggctcaggagctacgagaagttcgtcccgcaggaggttttccacctgcccaagaggcagatcgctctcttcctgcggcatctctgggcgactgatggctctgtgacgctgacaaggcagtcacgcggcgggaggatctactacgcctcgacatctctccagctgattcaggacgtctccaggctgctcctgcggttcggcattagcacgagggtgcggacaactaccccaaagggggaccacaggcctggctacacactcgatgtttctggcgtggacgatcagaggcggttcctgcaggagatcggcgtccatggggccaggggcgctaccgctgacaggctcctggaggtcatcagggatgtctccgcgaacacgaatgtcgacacagttcccaggcaggtttgggacgatgtgcgcaggctcctggtggagaaggagatgacgcacagggagttcgctgctgctatggggacatcgttcggcgggtccagcctctggaagcatgctccatctcgcgagaggctcggcagggtggcccaggtcctggactcggccgagctcgatgttctggcggtgaacgacgtcctgtgggatgaggtggtcgcgatcgagcctgacggcgaggagcaggtctacgatgctactgttctcggggggcacaacttcgtggcggatggcattgctgttcataattccattgtggggacagccacgttcgatcagtactggagcgtgcgcacctctaagcggacttcaggaacagtgaccgtgaccgatcacttccgcgcctgggcgaaccggggcctgaacctcggcacaatagaccaaattacattgtgcgtggagggttaccaaagctctggatcagccaacatcacccagaacaccttctctcagggctcttcttccggcagttcgggtggctcatccggctccacaacgactactcgcatcgagtgtgagaacatgtccttgtccggaccctacgttagcaggatcaccaatccctttaatggtattgcgctgtacgccaacggagacacagcccgcgctaccgttaacttccccgcaagtcgcaactacaatttccgcctgcggggttgcggcaacaacaataatcttgcccgtgtggacctgaggatcgacggacggaccgtcgggaccttttattaccagggcacatacccctgggaggccccaattgacaatgtttatgtcagtgcggggagtcatacagtcgaaatcactgttactgcggataacggcacatgggacgtgtatgccgactacctggtgatacagtga

SEQ ID NO: 2726 - DNA, 2154 bp, Artificial Sequence
  Synthetic Construct, AS-40 intein modified protein encoding nucleic acids
atgcaaacaagcattactctgacatccaacgcatccggtacgtttgacggttactattacgaactctggaaggatactggcaatacaacaatgacggtctacactcaaggtcgcttttcctgccagtggtcgaacatcaataacgcgttgtttaggaccgggaagaaatacaaccagaattggcagtctcttggcacaatccggatcacgtactctgcgacttacaacccaaacgggaactcctacttgtgtatctatggctggtctaccaacccattggtcgagttctacatcgttgagtcctgggggaactggagaccgcctggtgccacgtccctgggccaagtgacaatcgatggcgggacctacgacatctataggacgacacgcgtcaaccagccttgcgttacggctgacacatgggttatgacggcctcgggggctaggcaggttcgggatctcattgacaggccattcgaggcggtcgtggacggcgagtgccacccaacagagtcccgcggcttcttcttcactggggataagcctgtgctcaggctgtcgacggctgagggccacacactcaggctgactgcgaaccatccggttctcagggtgtccaagatgaccaggcagctgcgggagacggagtgggttaaggctggcgagctcaggccacacgacaagatcgtcctccacgatcatagggctctgccatcctgggacggcgctcataccgaggctgagggctacctgatcgggctcctgattggcgggggcaccctcacgagggacaaggctatcctgtctatttgggatgctgctgctccaaaggtggctaacgggggcggctcagtcccagctgctggcgtcgccggggttatgagggctgctgagctcgctgctcggaccctgccacaccgcacggacttcaatggctggcagaccacgatggagggcaggggggagtaccacatggctacaggcgccctccatactctcgctctggagctcggcctgacaccaggggataagcgcctcactgcgcctctggagacaacttccagcgctttccacaggggcctcctgagggggatgttcgacgccgatggctcggttcaggggtctcagaggaagggcgtgtccatcaggctcccacagaccgacctcgggaacctgcagacggtccagaggatgctcctgaggctgggcgttgctagcaccattcatcagaataggaggccaggcgggaccaaggtcctcccagatggcgagggcggggctaaggggcactcatgccaggccgcgcatgagctgatcatttccggcgagaatgtggtcaggtacgctgagcggatcggcttcgccgactcggataagatggacaggctcaccgctctcctgcagaggtacaggcacacgaggcatgctgagaggttcatcgcgacagtgcagagcctggaggacgatggcatggaggccgtctacgatgttacagtggcggacgttcatgctttcgatgctaatgggctctacgttcataattccattgtggggacagccacgttcgatcagtactggagcgtgcgcacctctaagcggacttcaggaacagtgaccgtgaccgatcacttccgcgcctgggcgaaccggggcctgaacctcggcacaatagaccaaattacattgtgcgtggagggttaccaaagctctggatcagccaacatcacccagaacaccttctctcagggctcttcttccggcagttcgggtggctcatccggctccacaacgactactcgcatcgagtgtgagaacatgtccttgtccggaccctacgttagcaggatcaccaatccctttaatggtattgcgctgtacgccaacggagacacagcccgcgctaccgttaacttccccgcaagtcgcaactacaatttccgcctgcggggttgcggcaacaacaataatcttgcccgtgtggacctgaggatcgacggacggaccgtcgggaccttttattaccagggcacatacccctgggaggccccaattgacaatgtttatgtcagtgcggggagtcatacagtcgaaatcactgttactgcggataacggcacatgggacgtgtatgccgactacctggtgatacagtga

SEQ ID NO: 2727 - DNA, 1509 bp, Artificial Sequence
  Synthetic Construct, AS-41 intein modified protein encoding nucleic acids
atgcaaacaagcattactctgacatccaacgcatccggtacgtttgacggttactattacgaactctggaaggatactggcaatacaacaatgacggtctacactcaaggtcgcttttcctgccagtggtcgaacatcaataacgcgttgtttaggaccgggaagaaatacaaccagaattggcagtctcttggcacaatccggatcacgtactctgcgacttacaacccaaacgggaactcctacttgtgtatctatggctggtctaccaacccattggtcgagttctacatcgttgagtcctgggggaactggagaccgcctggtgccacgtccctgggccaagtgacaatcgatggcgggacctacgacatctataggacgacacgcgtcaaccagccttgcttcgcgggggacactgagattactgtttcggacgggcggcgctggatgtcgctccctattaggcagttcgttactgagaatttcgacatctcaaagccgggcctcgatcacgttgggacattctactccgacccaaggcagccattctacgtccgctcgattgattctcagggcaagacaagcctcaagcgggtgacttccgtcagcgttcacagggctccagctcatctggtccggttcgctaccaggagggggagggtcctcaccgttacgcctgaccatgcgatgctggtgtgggacacggattacctccgcaagatcaaggctctggaggtggctgtcggcgacagggttccagtggaggagggcgggctcgtggtcgctgatgaggttgtgtctagggagacggtgcaggctctggacgatcgggtctactgcctcactgtggcggagaatcatactctcgttgctaatggcatcttctgcgggcagtccattgtggggacagccacgttcgatcagtactggagcgtgcgcacctctaagcggacttcaggaacagtgaccgtgaccgatcacttccgcgcctgggcgaaccggggcctgaacctcggcacaatagaccaaattacattgtgcgtggagggttaccaaagctctggatcagccaacatcacccagaacaccttctctcagggctcttcttccggcagttcgggtggctcatccggctccacaacgactactcgcatcgagtgtgagaacatgtccttgtccggaccctacgttagcaggatcaccaatccctttaatggtattgcgctgtacgccaacggagacacagcccgcgctaccgttaacttccccgcaagtcgcaactacaatttccgcctgcggggttgcggcaacaacaataatcttgcccgtgtggacctgaggatcgacggacggaccgtcgggaccttttattaccagggcacatacccctgggaggccccaattgacaatgtttatgtcagtgcggggagtcatacagtcgaaatcactgttactgcggataacggcacatgggacgtgtatgccgactacctggtgatacagtga

SEQ ID NO: 2728 - DNA, 1824 bp, Artificial Sequence
  Synthetic Construct, AS-42 intein modified protein encoding nucleic acids
atgcaaacaagcattactctgacatccaacgcatccggtacgtttgacggttactattacgaactctggaaggatactggcaatacaacaatgacggtctacactcaaggtcgcttttcctgccagtggtcgaacatcaataacgcgttgtttaggaccgggaagaaatacaaccagaattggcagtctcttggcacaatccggatcacgtactctgcgacttacaacccaaacgggaactcctacttgtgtatctatggctggtctaccaacccattggtcgagttctacatcgttgagtcctgggggaactggagaccgcctggtgccacgtccctgggccaagtgacaatcgatggcgggacctacgacatctataggacgacacgcgtcaaccagccttgcttcgctgcgggcactctcatcaagacaccaaaggggcctgttcctattgagcagattcagtcgggggatctcgttttcaatgcgatcggcattggggtggtcgagggcatcgtgtgccagcagaagcagaccattacgctggagctgtctgacggcacatcaatcgtctgcactcacgatcatccattcttctgccctcgcggctgggtcgctgctggcgacctggaggttggctccgggctgttcagccacgaggatctccgcaggctgtggtcgggcggggcttctctcggcctggagtccgggtccagcgacggcaggggggctgttcgctcgtctgaggtgctcctgaggatcctcagggaggaggctcgcgagccagatgctggctactgcgggccagccgaggacgtgcgcaacgcgtctaccgatagggctcatgctgagggcgcttggtggcagtggcaggctgacccgattgcgtcagatgaggctgctaggtccgctggcaggagggtcgctgaccgcgttagggacgaggataggagggaggctaggccagagccaaccgctgtcctcctgcaggacaggcactgcgagccactggctaacgatcggaataggagcggcagggagcattcatcccggggcacgggggaggctgagggccagcggcagggggacgtgccatgctcggtccgcgttgtgagcatctcgcgcgaggagaggggcgggcctgaggcggtgtacaacctcagggtttcagggcatccaagctacttcgctgggggggttctcgttcataattccattgtggggacagccacgttcgatcagtactggagcgtgcgcacctctaagcggacttcaggaacagtgaccgtgaccgatcacttccgcgcctgggcgaaccggggcctgaacctcggcacaatagaccaaattacattgtgcgtggagggttaccaaagctctggatcagccaacatcacccagaacaccttctctcagggctcttcttccggcagttcgggtggctcatccggctccacaacgactactcgcatcgagtgtgagaacatgtccttgtccggaccctacgttagcaggatcaccaatccctttaatggtattgcgctgtacgccaacggagacacagcccgcgctaccgttaacttccccgcaagtcgcaactacaatttccgcctgcggggttgcggcaacaacaataatcttgcccgtgtggacctgaggatcgacggacggaccgtcgggaccttttattaccagggcacatacccctgggaggccccaattgacaatgtttatgtcagtgcggggagtcatacagtcgaaatcactgttactgcggataacggcacatgggacgtgtatgccgactacctggtgatacagtga

SEQ ID NO: 2729 - DNA, 1509 bp, Artificial Sequence
  Synthetic Construct, AS-43 intein modified protein encoding nucleic acids
atgcaaacaagcattactctgacatccaacgcatccggtacgtttgacggttactattacgaactctggaaggatactggcaatacaacaatgacggtctacactcaaggtcgcttttcctgccagtggtcgaacatcaataacgcgttgtttaggaccgggaagaaatacaaccagaattggcagtctcttggcacaatccggatcacgtactctgcgacttacaacccaaacgggaactcctacttgtgtatctatggctggtctaccaacccattggtcgagttctacatcgttgagtcctgggggaactggagaccgcctggtgccacgtccctgggccaagtgacaatcgatggcgggacctacgacatctataggacgacacgcgtcaaccagccttgcttccatggggacacactcattgagatctacgctgacggcattctggaggagattccgatcaggcggttcgttctggagcatctggatctctcgcaggctggcgtggacgctctggggacgttctacgctgatccggtccggccagctcacgtgcgctccgtcgacacaggcgggatcccacacctccgcaagattacttccgttagcgtgcataaggcccctgcgaacctgatccagttctcgacctctaggggcaagaatctcctggtgacgccggatcatgctatgctcgtttgggacgtgtcctacctccgcaagatcagggccctggaggtcaagattggcgacgctgtcccagtttgggagtcaggggtggtcatctccgacaggatcgtcagcattgattacgttccctgcgaggacgagcgggtgtactgcctcactgtggatagggatcataatgttgtgggcaatggcatcttcactgggcagtccattgtggggacagccacgttcgatcagtactggagcgtgcgcacctctaagcggacttcaggaacagtgaccgtgaccgatcacttccgcgcctgggcgaaccggggcctgaacctcggcacaatagaccaaattacattgtgcgtggagggttaccaaagctctggatcagccaacatcacccagaacaccttctctcagggctcttcttccggcagttcgggtggctcatccggctccacaacgactactcgcatcgagtgtgagaacatgtccttgtccggaccctacgttagcaggatcaccaatccctttaatggtattgcgctgtacgccaacggagacacagcccgcgctaccgttaacttccccgcaagtcgcaactacaatttccgcctgcggggttgcggcaacaacaataatcttgcccgtgtggacctgaggatcgacggacggaccgtcgggaccttttattaccagggcacatacccctgggaggccccaattgacaatgtttatgtcagtgcggggagtcatacagtcgaaatcactgttactgcggataacggcacatgggacgtgtatgccgactacctggtgatacagtga

SEQ ID NO: 2730 - DNA, 2511 bp, Artificial Sequence
  Synthetic Construct, AS-44 intein modified protein encoding nucleic acids
atgcaaacaagcattactctgacatccaacgcatccggtacgtttgacggttactattacgaactctggaaggatactggcaatacaacaatgacggtctacactcaaggtcgcttttcctgccagtggtcgaacatcaataacgcgttgtttaggaccgggaagaaatacaaccagaattggcagtctcttggcacaatccggatcacgtactctgcgacttacaacccaaacgggaactcctacttgtgtatctatggctggtctaccaacccattggtcgagttctacatcgttgagtcctgggggaactggagaccgcctggtgccacgtccctgggccaagtgacaatcgatggcgggacctacgacatctataggacgacacgcgtcaaccagccttgcctgcaccctgacacatacgttattctccctgacgggcgcatgaagaagatttcggagattgatgaggatgaggttctctcagtcaacttcgaggacctgaagctctacaataagaagatcaagaagttcaagcacaaggctccgaagatcctctacaagattaagaccgcgttctccgagctcatcaccacgggcgagcataagctgttcgtggtcgagaacgggaagatcgtcgagaagtgcgttaaggacctcaatggcagcgagctgatcggggttgtgaggaagctgaactactcgttcaacgacaatgtcgagttcaaggatgtctacgttgagcgccactacaagctcgacgagacaatcaggaacaagctgcgcaaggtgagggagaagctgggcctcactcggaaggatgtggagaagctctgcggggtcaaggagatctacattgttaagatcgagacaggcaagctggagtcaattgaggaggagcggctgaagaagctctgctccctgtacgggatcaacttcgaggagatcatctaccgcgacaacctccactacactaatccagtcaagttccctaagacaccgactcccgagctgatgcagatcattggctacatcattggcgacgggcatttcccctcgaatcggatgctgcgcctcaaggatgagcgcaaggaggtcctggaggagtacaaccagctgttcaagacggtgttcaacctggagggcaatatcaagaagggcgacgggaactactacatcctggagatcaacagcaagtacctgatcgattggttcagggagaacattccggagctcttcaacaagacaggcaatgagaggactcccgagttcgtgttccggctcaacaatgacctggtcgcttcttacctgcggggcatcttcgatgccgaggggtacattcgcgccgaggcgaagcagatcggcattgggatgacatcaaagtgcttcatcaaggagattcagttcctcctgctcaggttcggcatcctcgcctcctacagcaagattaagcggaaggaggagaactggaacaatacccataagctgctcatctcggacaagaagtctttcgagctgttcaagaagtacatcggcttcacggcgaaggataagatggagaagctggaggctatcctgaacaagatgaagggcctcaatttccgctacatctccattccactgaccaagaaggagatcagggagttcgtgggcgtccctctgaagacgattaagaacggggacaattactgcaccgattacacgatcgagaagatcattgaggagctcaactccaagggcctgtacgacaaggccgagtacctcaagcgcttcctggacgcggatatcgtttggacgaagttcaagattgaggaggtggagagcgatgttgagtatgtgtacgatctggaggtggaggactaccacaacttcattggcaatctcatcatcaaccacaactccattgtggggacagccacgttcgatcagtactggagcgtgcgcacctctaagcggacttcaggaacagtgaccgtgaccgatcacttccgcgcctgggcgaaccggggcctgaacctcggcacaatagaccaaattacattgtgcgtggagggttaccaaagctctggatcagccaacatcacccagaacaccttctctcagggctcttcttccggcagttcgggtggctcatccggctccacaacgactactcgcatcgagtgtgagaacatgtccttgtccggaccctacgttagcaggatcaccaatccctttaatggtattgcgctgtacgccaacggagacacagcccgcgctaccgttaacttccccgcaagtcgcaactacaatttccgcctgcggggttgcggcaacaacaataatcttgcccgtgtggacctgaggatcgacggacggaccgtcgggaccttttattaccagggcacatacccctgggaggccccaattgacaatgtttatgtcagtgcggggagtcatacagtcgaaatcactgttactgcggataacggcacatgggacgtgtatgccgactacctggtgatacagtga

SEQ ID NO: 2731 - DNA, 2517 bp, Artificial Sequence
  Synthetic Construct, AS-45 intein modified protein encoding nucleic acids
atgcaaacaagcattactctgacatccaacgcatccggtacgtttgacggttactattacgaactctggaaggatactggcaatacaacaatgacggtctacactcaaggtcgcttttcctgccagtggtcgaacatcaataacgcgttgtttaggaccgggaagaaatacaaccagaattggcagtctcttggcacaatccggatcacgtactctgcgacttacaacccaaacgggaactcctacttgtgtatctatggctggtctaccaacccattggtcgagttctacatcgttgagtcctgggggaactggagaccgcctggtgccacgtccctgggccaagtgacaatcgatggcgggacctacgacatctataggacgacacgcgtcaaccagccttgcctcaacgctaacactgagattctgcaggagtcggggttccgcaagattacggagctgaataaggatgagaaggttttcgcgctgtgcggcaaggagatcaagccagtcgacgggtggaaggttcacaagacgcctcagcatgagtacaacatcgtggtcaagacagtcaatggcctggagattaccacgacaccaaaccacatcttcctcgttaaggagaatggctcgctgaaggagaaggaggccaaggacctgaaggttggggattacgttgcgacggtggaccggattcgcgtgaaggagaaggacatcgatctctctaacggcgacctgtacttcattgggtacttcatcggcgatgggtacacaggcgtgatcgagaagaacacgctcaaggctacaccggatctggccttcaaccccaagtacccgcccaatttcgacgattcggagctccacaagaagtacttcctgaagtgccggatttcaaagggcgtcgctcattacatctactccaagaagctccgcaagattttcaacaagctcaatatgctgaccaaggacaacaagaatatcgatgcgttctgcaacctcccgctggacaagctcgcctacctgatcgcgggcctcttcgactccgatgggtacatctacctgaaccggaagaatattgagttctactcgatctctgagaagctcgtggagcagctgcagttcgtcctcctgcggttcggcattcactccagcatccgcaagaagaagaccaagaccatggtgtccccaactaacgggaaggagtacaagtgcaaggacatctacgtcctcaccatccgcgatttcatgagcattaagaggttctacgagaacatccctctccgccatgaggagaagcgcaggaagctggaggagatcattaagaataaggagatcggccagattccgtctgagttcgttgcgctgaggttcacccccatcgctaagatttggtgcgactgcggcttctcagtggatctcactatgttcaagccgcgcaccaagaggcagcgggagctgaacaagaagagggtgaagctcctgttcgagctcctggacggcaagaagctcatcacgaactacaaggagtactacagcaagaggaagaatccctacttcgatttcattgtccgggagaagatcaacggcaacaattactacagcctcaatgagaaggggagggttctgatgtcgctcctgaacaagcacatcaaggacaaggagaatctggaggagatgtacaacttcctcgtgaatctggagaagtgcccaatttgcggcaagcctatccataaggagatgaggtactcctggaagaaggagtgctacgacggggatatctactgggaccggatcaaggagattaagaagatcaaggtcaacgacaagtacgcctacgatatcgagctgccagatgacgggtctaattcacactacatcgttgctaacggcttcatcgtgcataactccattgtggggacagccacgttcgatcagtactggagcgtgcgcacctctaagcggacttcaggaacagtgaccgtgaccgatcacttccgcgcctgggcgaaccggggcctgaacctcggcacaatagaccaaattacattgtgcgtggagggttaccaaagctctggatcagccaacatcacccagaacaccttctctcagggctcttcttccggcagttcgggtggctcatccggctccacaacgactactcgcatcgagtgtgagaacatgtccttgtccggaccctacgttagcaggatcaccaatccctttaatggtattgcgctgtacgccaacggagacacagcccgcgctaccgttaacttccccgcaagtcgcaactacaatttccgcctgcggggttgcggcaacaacaataatcttgcccgtgtggacctgaggatcgacggacggaccgtcgggaccttttattaccagggcacatacccctgggaggccccaattgacaatgtttatgtcagtgcggggagtcatacagtcgaaatcactgttactgcggataacggcacatgggacgtgtatgccgactacctggtgatacagtga

SEQ ID NO: 2732 - DNA, 2190 bp, Artificial Sequence
  Synthetic Construct, AS-46 intein modified protein encoding nucleic acids
atgcaaacaagcattactctgacatccaacgcatccggtacgtttgacggttactattacgaactctggaaggatactggcaatacaacaatgacggtctacactcaaggtcgcttttcctgccagtggtcgaacatcaataacgcgttgtttaggaccgggaagaaatacaaccagaattggcagtctcttggcacaatccggatcacgtactctgcgacttacaacccaaacgggaactcctacttgtgtatctatggctggtctaccaacccattggtcgagttctacatcgttgagtcctgggggaactggagaccgcctggtgccacgtccctgggccaagtgacaatcgatggcgggacctacgacatctataggacgacacgcgtcaaccagccttgcgttccgcctgacactctgctcatcctggagaatgggttcaagcgcatcgtggacattaaggtcggggacaaggtcctgacgcacgagaaccggttcaagaaggttgagaaggtgtacaagcgcaggtacatcggcgacatcattaagattaaggtgcgctacttcccagaggagatcattctcaccccagagcaccctgtctacgctatcaagacggagaagaggtgcgatggctctcatgggatctgcaagttcaactgcctcacacagtacactaatccttcatgcaagaagcggtaccgcaagtacaagagggagtggatcattgccaaggacctgaaggtcggcgatgtgatcgtctacccgattcccaacagggttcgggacatcaagtacctctccctggataagtacctcagcaatatcaagagggagttctgccgctcccgcatcccggagaagattgaggtctctgaggagttctgccgcctcgttggctacttcctgtccgaggggtactgcttcagggacggcatcgggttcgctctgggcgagaacgagaagaagatcattgacgatatcgagtacctcatgaagaagattttcaatctgaagcccaagatccgcgacgatggccgctcagaggggatcgagctcaagtactactcccgggtgctgcgcgacttcttcggcgatatgttctactgcggggacgagaagcgggcctggaacaaggcgctcccaaatgagttcctctacctgcctaagaacaagcagctgcagatcttcattggctggtggaggggcgataagggggtcaccacgtcggagattctgatgaaccagctcaggctgatcagcctccggctgggcttcatcattaccttctcgaagcacgttccgaagaatcccaagatcggcgacagggaggtcatcaagtaccatgctaggtggcagggccgcgtgtccatcctcgacgagaagattgtcgatgagctcaagaacgaggacatcaagctgccgaagaaggatgttcgctacggctggatcaaggggaattacctgtacgctcccatcattaggatcggccgggagtactacgacgggttcgtctacaatctggaggtggaggatgactcttcatacgttacagtctcaggcactctgcacaactccattgtggggacagccacgttcgatcagtactggagcgtgcgcacctctaagcggacttcaggaacagtgaccgtgaccgatcacttccgcgcctgggcgaaccggggcctgaacctcggcacaatagaccaaattacattgtgcgtggagggttaccaaagctctggatcagccaacatcacccagaacaccttctctcagggctcttcttccggcagttcgggtggctcatccggctccacaacgactactcgcatcgagtgtgagaacatgtccttgtccggaccctacgttagcaggatcaccaatccctttaatggtattgcgctgtacgccaacggagacacagcccgcgctaccgttaacttccccgcaagtcgcaactacaatttccgcctgcggggttgcggcaacaacaataatcttgcccgtgtggacctgaggatcgacggacggaccgtcgggaccttttattaccagggcacatacccctgggaggccccaattgacaatgtttatgtcagtgcggggagtcatacagtcgaaatcactgttactgcggataacggcacatgggacgtgtatgccgactacctggtgatacagtga

SEQ ID NO: 2733 - DNA, 2652 bp, Artificial Sequence
  Synthetic Construct, AS-47 intein modified protein encoding nucleic acids
atgcaaacaagcattactctgacatccaacgcatccggtacgtttgacggttactattacgaactctggaaggatactggcaatacaacaatgacggtctacactcaaggtcgcttttcctgccagtggtcgaacatcaataacgcgttgtttaggaccgggaagaaatacaaccagaattggcagtctcttggcacaatccggatcacgtactctgcgacttacaacccaaacgggaactcctacttgtgtatctatggctggtctaccaacccattggtcgagttctacatcgttgagtcctgggggaactggagaccgcctggtgccacgtccctgggccaagtgacaatcgatggcgggacctacgacatctataggacgacacgcgtcaaccagccttgcctgatgccgcatgagaaggtgctgacggagtacggggagattaagattgaggacctgttcaagatcgggaaggagatcgtggagaaggacgagctcaaggagatcaggaagctgaatattaaggtgcacactctcaacgagaatggcgagatcaagatcattaacgccccatacgtgtggaagctcaagcataaggggaagatgatcaaggtcaagctgaagaactggcactcgatcaccacgacaccggagcatcccttcctgaccaacaatggctggatcaaggcggagaatattaagaaggggatgtatgtggctatccctcgcaagatctacggcaacgaggacttcgagaagttcatcgagttcattaattccaagatcctcacgaacgagctgattgtgaaggtcaatgagaaggacctcaagaacgttgagctgccgtcaacaaagatctacaagaagcagaagaacgtgttccgctccgaggatatcattgagcacaacctcaatatcgagaagatttcgttctctccacggatccaccgctgcggcaagccacagcattacatcaagctccctaagtctctgaacgagtggaaggccatcttctacttcgctggcgtgatgttcggcgacgggtgcgtcgatcggatcgcgaacaatgacgaggaggtcttcaacaagctgaagtcactcaacaatctgggcatcgaggttgagaggattaagcggaagtccagctacgagatcattttcaagaacgggaagaatgctctcatcaacctcctgaagattctgttcgattacccgtctgagaagaagtcacataacatcaagattccgcagatcctctacattgctcccaaggagctggtggccgagttcatcaagggctacttcgacgccgatggctacgtgaatctccgccagaacaggatcgaggttatttcagcgtccaaggagttcatcgagggcctgtccattctcctgctccgcttcgagatcacttccaagatctacgagattaagaagagctacaaggagaccaagaagaagtactaccagctcaacatcgtcggcaagaggaacctgaagaatttcaagaacatcgggttctccattaagtacaaggaggagaacctgaataagatcattgagaagagcaggaagtcggagaagtaccccatcaacaaggacatgaagcgcctcaggattctgttcggcatgacgcggaatgaggttaacgtgagctactacgccaagtacgagaacgggaaggagatcccatcgtacgagattgtgaagaagttcctcaattctctgaagcctaagaacctcgataagaagatcaaggttctggagggcaaggagcgcgacgtgaattacctcaaggctttcgagagcgatggcctgatcgagaacgggaggctcaccaagctgggcagggaggccctcaatatctggaagaaccacgagttcgggaaggagaatatcgactacatgaagtcgctgatcgagaacattgcgttcgtcgaggttgaggatgtcgagatcattgactacgatggctacgtttacgatctcacaacagagactcataacttcattgctaatggcatcgtggttcataattccattgtggggacagccacgttcgatcagtactggagcgtgcgcacctctaagcggacttcaggaacagtgaccgtgaccgatcacttccgcgcctgggcgaaccggggcctgaacctcggcacaatagaccaaattacattgtgcgtggagggttaccaaagctctggatcagccaacatcacccagaacaccttctctcagggctcttcttccggcagttcgggtggctcatccggctccacaacgactactcgcatcgagtgtgagaacatgtccttgtccggaccctacgttagcaggatcaccaatccctttaatggtattgcgctgtacgccaacggagacacagcccgcgctaccgttaacttccccgcaagtcgcaactacaatttccgcctgcggggttgcggcaacaacaataatcttgcccgtgtggacctgaggatcgacggacggaccgtcgggaccttttattaccagggcacatacccctgggaggccccaattgacaatgtttatgtcagtgcggggagtcatacagtcgaaatcactgttactgcggataacggcacatgggacgtgtatgccgactacctggtgatacagtga

SEQ ID NO: 2734 - DNA, 1518 bp, Artificial Sequence
  Synthetic Construct, AS-48 intein modified protein encoding nucleic acids
atgcaaacaagcattactctgacatccaacgcatccggtacgtttgacggttactattacgaactctggaaggatactggcaatacaacaatgacggtctacactcaaggtcgcttttcctgccagtggtcgaacatcaataacgcgttgtttaggaccgggaagaaatacaaccagaattggcagtctcttggcacaatccggatcacgtactctgcgacttacaacccaaacgggaactcctacttgtgtatctatggctggtctaccaacccattggtcgagttctacatcgttgagtcctgggggaactggagaccgcctggtgccacgtccctgggccaagtgacaatcgatggcgggacctacgacatctataggacgacacgcgtcaaccagcctgctctcgcctacgatgagcctatctacctctcggatggcaacattatcaatatcggggagttcgtggataagttcttcaagaagtacaagaacagcatcaagaaggaggacaatggcttcgggtggatcgatattggcaacgagaatatctacattaagtccttcaacaagctcagcctgatcattgaggacaagcggatcctccgcgtctggcgcaagaagtactcggggaagctgatcaagattaccacgaagaaccgcagggagatcacactcactcacgatcatccggtttacatctctaagaccggcgaggtgctggagattaatgccgagatggtgaaggtcggggactacatctacattcccaagaacaataccatcaacctcgatgaggttattaaggtggagacggtcgactacaatggccacatctacgatctgactgtggaggataatcatacttacattgctggcaagaatgagggcttcgctgtttccaactccattgtggggacagccacgttcgatcagtactggagcgtgcgcacctctaagcggacttcaggaacagtgaccgtgaccgatcacttccgcgcctgggcgaaccggggcctgaacctcggcacaatagaccaaattacattgtgcgtggagggttaccaaagctctggatcagccaacatcacccagaacaccttctctcagggctcttcttccggcagttcgggtggctcatccggctccacaacgactactcgcatcgagtgtgagaacatgtccttgtccggaccctacgttagcaggatcaccaatccctttaatggtattgcgctgtacgccaacggagacacagcccgcgctaccgttaacttccccgcaagtcgcaactacaatttccgcctgcggggttgcggcaacaacaataatcttgcccgtgtggacctgaggatcgacggacggaccgtcgggaccttttattaccagggcacatacccctgggaggccccaattgacaatgtttatgtcagtgcggggagtcatacagtcgaaatcactgttactgcggataacggcacatgggacgtgtatgccgactacctggtgatacagtga

SEQ ID NO: 2735 - DNA, 2250 bp, Artificial Sequence
  Synthetic Construct, AS-49 intein modified protein encoding nucleic acids
atgcaaacaagcattactctgacatccaacgcatccggtacgtttgacggttactattacgaactctggaaggatactggcaatacaacaatgacggtctacactcaaggtcgcttttcctgccagtggtcgaacatcaataacgcgttgtttaggaccgggaagaaatacaaccagaattggcagtctcttggcacaatccggatcacgtactctgcgacttacaacccaaacgggaactcctacttgtgtatctatggctggtctaccaacccattggtcgagttctacatcgttgagtcctgggggaactggagaccgcctggtgccacgtccctgggccaagtgacaatcgatggcgggacctacgacatctataggacgacacgcgtcaaccagccttgcattgagggggacgctaagattctgacggatcgggggttcctgaagatgaaggaggtttacaagctcgtgaagaatggggagaagctcaaggtcctcggcctgaatgctgagacactgaagactgagtggaaggagatcattgacgctcagaagagggaggctaggcgctacgagatcggcgtgtaccgcaagaataagaacaccaaggacacgatcaagattacaccggatcacaagttccccgtgttcgtcaacggcgagctcagcaaggtgcagctgtgcgacatcattgataacaatctctcagtcctgtccatcgactacattccaatgatcgaggagaagtacgagtccctcgctgaggtcatgtacctcggcggggctgtcctgagcgatggccatatcgttcggaggaacgggaagccaattcgggtccgcttcacacagaaggacactgaggagaagaaggatttcatcgagaaggttaagggcgacgtgaagctcatcggcgggaatttcatcgagatttcgaaccgcaacaatgtcatcgagtaccagacctctaggaagattccgtcagagatcctgggcttcattgaggttaatattaacacaatccccctctacgccactaaggacgagatcgccgatctgattgcgggcttcgttgacggcgatgggtgcctctccgggaagaggagggtggagatctaccagaactccagccacattaagaagatcgagggcctcatcgtcgggctctacaggctgggcatcattccgaggctgcggtacaagcggtcgtctaccgcgacgatctacttcaacaacaacctggagaccatcctgcagcgcacgcgcaggattaagctcgacaagctgaaggagttcaagaagccagtggaggacaagaagctgatcgatatttcgcagatcctccctgagctgaaggagttcgactacaagggctacctctacaagacctacaaggagaagctgttcatcgggattaacaagctggaggagtacctgtctaagatcgacaaggatggcattgagcgcatcaagcagaagatcaagctcctgaaggagagcgacatctactcgatcaggattaagaaggtcggcgaggattacggggaggtctacaatatcacggttaaggcggagaacgagttcaatcataactacgtggtttggactaagcattacacacctatcgtggttttcaactccattgtggggacagccacgttcgatcagtactggagcgtgcgcacctctaagcggacttcaggaacagtgaccgtgaccgatcacttccgcgcctgggcgaaccggggcctgaacctcggcacaatagaccaaattacattgtgcgtggagggttaccaaagctctggatcagccaacatcacccagaacaccttctctcagggctcttcttccggcagttcgggtggctcatccggctccacaacgactactcgcatcgagtgtgagaacatgtccttgtccggaccctacgttagcaggatcaccaatccctttaatggtattgcgctgtacgccaacggagacacagcccgcgctaccgttaacttccccgcaagtcgcaactacaatttccgcctgcggggttgcggcaacaacaataatcttgcccgtgtggacctgaggatcgacggacggaccgtcgggaccttttattaccagggcacatacccctgggaggccccaattgacaatgtttatgtcagtgcggggagtcatacagtcgaaatcactgttactgcggataacggcacatgggacgtgtatgccgactacctggtgatacagtga

SEQ ID NO: 2736 - DNA, 2121 bp, Artificial Sequence
  Synthetic Construct, AS-50 intein modified protein encoding nucleic acids
atgcaaacaagcattactctgacatccaacgcatccggtacgtttgacggttactattacgaactctggaaggatactggcaatacaacaatgacggtctacactcaaggtcgcttttcctgccagtggtcgaacatcaataacgcgttgtttaggaccgggaagaaatacaaccagaattggcagtctcttggcacaatccggatcacgtactctgcgacttacaacccaaacgggaactcctacttgtgtatctatggctggtctaccaacccattggtcgagttctacatcgttgagtcctgggggaactggagaccgcctggtgccacgtccctgggccaagtgacaatcgatggcgggacctacgacatctataggacgacacgcgtcaaccagccttgccatccaaaggggacaaaggtcgtggtcaagggcaagggcatcgtgaatattgaggacgttaaggaggggaattacgttctcggcatcgacggctggcagaaggttaagaaggtctggaagtacgagtacgagggcgagctcattaacgttaatgggctgaagtgcacaccgaaccacaagatccccctccgctacaagattaagcataagaagatcaacaagaacgattacctggtgagggacatctacgcgaagtcgctcctgaccaagttcaagggcgaggggaagctcatcctgtgcaaggacttcgagacgattggcaactacgagaagtacatcaatgacatggatgaggacttcatcctcaagtccgagctgatcggcattctcctggctgaggggcacctcctgaggagggatatcgagtacttcgactccagccggggcaagaagcgcattagccatcagtaccgcgtggagatcacggtcaacgaggatgagaaggacttcatcgagaagattaagtacatcttcaagaagctcttcaactacgagctctacgtgcgccgcaagaagggcaccaaggccattacgctcgggtgcgcgaagaaggatatctacctcaagattgaggagatcctgaagaacaaggagaagtacctcccgaatgccatcctgcgggggttcttcgagggcgacggctacgtgaacacagttaggcgggctgtggtcgttaatcagggcactaacaattacgataagattaagttcatcgccagcctcctggacaggctcggcatcaagtacagcttctacacatactcgtacgaggagagggggaagaagctgaagcgctacgtgatcgagattttctctaagggcgacctcattaagttctcaatcctgatttcgttcatctctcgcaggaagaacaatctcctgaacgagatcattaggcagaagactctgtacaagatcggcgattacgggttctacgacctcgacgatgtgtgcgtctcactggagtcctacaagggcgaggtgtacgatctcactctggagggcaggccttactacttcgccaatggcatcctcactcataattccattgtggggacagccacgttcgatcagtactggagcgtgcgcacctctaagcggacttcaggaacagtgaccgtgaccgatcacttccgcgcctgggcgaaccggggcctgaacctcggcacaatagaccaaattacattgtgcgtggagggttaccaaagctctggatcagccaacatcacccagaacaccttctctcagggctcttcttccggcagttcgggtggctcatccggctccacaacgactactcgcatcgagtgtgagaacatgtccttgtccggaccctacgttagcaggatcaccaatccctttaatggtattgcgctgtacgccaacggagacacagcccgcgctaccgttaacttccccgcaagtcgcaactacaatttccgcctgcggggttgcggcaacaacaataatcttgcccgtgtggacctgaggatcgacggacggaccgtcgggaccttttattaccagggcacatacccctgggaggccccaattgacaatgtttatgtcagtgcggggagtcatacagtcgaaatcactgttactgcggataacggcacatgggacgtgtatgccgactacctggtgatacagtga

SEQ ID NO: 2737 - DNA, 2442 bp, Artificial Sequence
  Synthetic Construct, AS-51 intein modified protein encoding nucleic acids
atgcaaacaagcattactctgacatccaacgcatccggtacgtttgacggttactattacgaactctggaaggatactggcaatacaacaatgacggtctacactcaaggtcgcttttcctgccagtggtcgaacatcaataacgcgttgtttaggaccgggaagaaatacaaccagaattggcagtctcttggcacaatccggatcacgtactctgcgacttacaacccaaacgggaactcctacttgtgtatctatggctggtctaccaacccattggtcgagttctacatcgttgagtcctgggggaactggagaccgcctggtgccacgtccctgggccaagtgacaatcgatggcgggacctacgacatctataggacgacacgcgtcaaccagcctagcattctccctgacgagtacctgactattattgaggaggatggcattaaggtcgtgaagatcggggagtacattgatgatctcatgcgcaagcacaaggacaagatcaagttctcgggcatctctgagattctggagacaaagaacctcaagactttctccttcgataagatcacgaagaagtgcgagattaagaaggtgaaggcgctgatcaggcacccatacttcggcaaggcttacaagatcaagctccggtctggccgcaccattaaggtcacgagggggcattcactgttcaagtacgagaacgggaagatcgtcgaggttaagggcgacgatgtgcggttcggggacctgatcgtggtcccaaagaagctcacctgcgtcgataaggaggttgtgatcaacattcctaagcggctgatcaatgctgacgaggaggagatcaaggatctcgtcattaccaagcacaaggacaaggccttcttcgttaagctcaagaagacgctggaggatatcgagaacaataagctcaaggtcatcttcgacgattgcattctctacctgaaggagctcggcctgatcgactacaacatcattaagaagattaataaggttgacatcaagattctggatgaggagaagttcaaggcctacaagaagtacttcgacaccgtcatcgagcatggcaacttcaagaaggggcgctgcaatattcagtacatcaagattaaggactacatcgcgaacattcccgacaaggagttcgaggattgcgagatcggcgcctactcggggaagattaatgcgctcctgaagctcgacgagaagctggctaagttcctcggcttcttcgtgacacgcgggaggctgaagaagcagaagctcaagggcgagactgtctacgagatctcagtttacaagtccctcccggagtaccagaaggagatcgctgagacattcaaggaggtcttcggcgccgggtccatggttaaggacaaagtgactatggataacaagatcgtgtacctcgtcctgaagtacattttcaagtgcggcgacaaggataagaagcacatccccgaggagctcttcctggcctccgagagcgtgatcaagagcttcctggacggcttcctcaaggccaagaagaacagccataaggggacctcgacgttcatggcgaaggatgagaagtacctcaaccagctgatgatcctcttcaatctggttggcattccgacaaggttcactcccgtgaagaacaagggctacaagctcaccctgaatccgaagtacgggacggtgaaggacctcatgctggatgaggtcaaggagatcgaggcgttcgagtacagcggctacgtctacgatctctctgtggaggataatgagaacttcctcgtcaacaacatctacgctcataattccattgtggggacagccacgttcgatcagtactggagcgtgcgcacctctaagcggacttcaggaacagtgaccgtgaccgatcacttccgcgcctgggcgaaccggggcctgaacctcggcacaatagaccaaattacattgtgcgtggagggttaccaaagctctggatcagccaacatcacccagaacaccttctctcagggctcttcttccggcagttcgggtggctcatccggctccacaacgactactcgcatcgagtgtgagaacatgtccttgtccggaccctacgttagcaggatcaccaatccctttaatggtattgcgctgtacgccaacggagacacagcccgcgctaccgttaacttccccgcaagtcgcaactacaatttccgcctgcggggttgcggcaacaacaataatcttgcccgtgtggacctgaggatcgacggacggaccgtcgggaccttttattaccagggcacatacccctgggaggccccaattgacaatgtttatgtcagtgcggggagtcatacagtcgaaatcactgttactgcggataacggcacatgggacgtgtatgccgactacctggtgatacagtga

SEQ ID NO: 2738 - DNA, 2658 bp, Artificial Sequence
  Synthetic Construct, AS-52 intein modified protein encoding nucleic acids
atgcaaacaagcattactctgacatccaacgcatccggtacgtttgacggttactattacgaactctggaaggatactggcaatacaacaatgacggtctacactcaaggtcgcttttcctgccagtggtcgaacatcaataacgcgttgtttaggaccgggaagaaatacaaccagaattggcagtctcttggcacaatccggatcacgtactctgcgacttacaacccaaacgggaactcctacttgtgtatctatggctggtctaccaacccattggtcgagttctacatcgttgagtcctgggggaactggagaccgcctggtgccacgtccctgggccaagtgacaatcgatggcgggacctacgacatctataggacgacacgcgtcaaccagccttgcctgacgggggacactaaggtcatcgtgaatggggagattcgggagatcggggaggttattgaggagatttctaacgggaagttcggcgtgacactcactaacaatctcaaggtcctgggcatcgacgaggatgggaagattcgcgagttcgacgtgcagtatgtgtacaaggataagaccaacacgctcatcaagattaagacaaagatgggcagggagctgaaggttaccacgtaccacccgctcctgatcaatcataagaacggcgagattaagtgggagaaggcggagaacctcaaggtcggggacaagctggctacgccccgctacatcctcttcaatgagagcgattacaacgaggagctcgctgagtggctgggctacttcatcggcgacgggcacgccgataaggagtcgaataagatcacattcactaacggggacgagaagctgcggaagcgcttcgccgagctcaccgagaagctgttcaaggatgcgaagatcaaggagcgcattcataaggacaggacgccagatatctacgtcaactccaaggaggcggttgagttcatcgacaagctcggcctgagggggaagaaggctgataaggtgcggatccctaaggagattatgcgctcagacgctctcagggcgttcctgagggcttacttcgactgcgatggcgggatcgagaagcactccattgttctcagcaccgcttcgaaggagatggccgaggacctggtgtacgctctcctgaggttcggcatcattgccaagctgcgggagaaggtcaacaagaacaataacaaggtttactaccatatcgtgatttccaactcctccaacctccgcaccttcctggacaacatcggcttctctcaggagaggaagctcaagaagctcctggagatcattaaggatgagaatccgaacctggacgtgatcacgattgataaggagaagatccggtacattagggaccggctcaaggtcaagctgacacgcgacatcgagaaggataattggtcctacaacaagtgcaggaagatcactcaggagctcctgaaggagatctactaccggctggaggagctgaaggagatcgagaaggccctggaggagaacatcctgattgactgggatgaggtggccgagcgcaggaaggagatcgcggagaagacaggcattcgctccgaccgcatcctggagtacattcgggggaagcgcaagccaagcctcaagaactacatcaagattgccaatactctgggcaagaacatcgagaagatcattgacgcgatgcggatcttcgctaagaagtactcgtcttacgcggagatcggcaagatgctgaatatgtggaactcatccatcaagatctacctggagtctaatacccaggagatcgagaagctggaggagattaggaagacggagctcaagctggtcaaggagatcctcaacgacgagaagctgatcgattctattggctacgtcctcttcctggcgtcaaatgagatctactgggacgagatcgttgagattgagcagctcaacggggagttcaccatctacgatctgcatgttccacgctaccacaacttcattgggggcaacctgcctactattctccacaactccattgtggggacagccacgttcgatcagtactggagcgtgcgcacctctaagcggacttcaggaacagtgaccgtgaccgatcacttccgcgcctgggcgaaccggggcctgaacctcggcacaatagaccaaattacattgtgcgtggagggttaccaaagctctggatcagccaacatcacccagaacaccttctctcagggctcttcttccggcagttcgggtggctcatccggctccacaacgactactcgcatcgagtgtgagaacatgtccttgtccggaccctacgttagcaggatcaccaatccctttaatggtattgcgctgtacgccaacggagacacagcccgcgctaccgttaacttccccgcaagtcgcaactacaatttccgcctgcggggttgcggcaacaacaataatcttgcccgtgtggacctgaggatcgacggacggaccgtcgggaccttttattaccagggcacatacccctgggaggccccaattgacaatgtttatgtcagtgcggggagtcatacagtcgaaatcactgttactgcggataacggcacatgggacgtgtatgccgactacctggtgatacagtga

SEQ ID NO: 2739 - DNA, 2322 bp, Artificial Sequence
  Synthetic Construct, AS-53 intein modified protein encoding nucleic acids
atgcaaacaagcattactctgacatccaacgcatccggtacgtttgacggttactattacgaactctggaaggatactggcaatacaacaatgacggtctacactcaaggtcgcttttcctgccagtggtcgaacatcaataacgcgttgtttaggaccgggaagaaatacaaccagaattggcagtctcttggcacaatccggatcacgtactctgcgacttacaacccaaacgggaactcctacttgtgtatctatggctggtctaccaacccattggtcgagttctacatcgttgagtcctgggggaactggagaccgcctggtgccacgtccctgggccaagtgacaatcgatggcgggacctacgacatctataggacgacacgcgtcaaccagccttcggtctctaaggacacacctattctcgtgaagattgatggcaaggttaagcgcactactttcgaggagctggacaagatctacttcgagaccaacgacgagaatgagatgtacaagaaggtggacaacctggaggtgctgacagtcgatgagaatttccgggttcgctggaggaaggtgtcgactatcattaggcacaaggtcgacaagatcctccggattaagttcgagggcgggtacattgagctgacgggcaaccattccatcatgatgctcgatgagaatgggctggtggccaagaaggcgagcgacatcaaggtcggcgattgcttcctctcgttcgtcgcgaacatcgagggcgagaaggaccggctcgatctgaaggagttcgagccaaaggacatcacctcccgcgtcaagatcattaacgacttcgatatcgacgaggatacggcttggatgctcggcctctacgtggctgagggcgctgttgggttcaagggcaagacctcaggccaggttatctacacgctcgggtcccacgagcatgacctcatcaacaagctgaatgacattgtggataagaagggcttcagcaagtacgagaatttcacaggctcggggttcgaccggaagcgcctgtctgcgaagcagatccgcattctcaacactcagctggctaggttcgtggaggagaacttctacgacggcaatgggcgcagggctaggaacaagcggatcccggatatcattttcgagctcaaggagaatctgagggtcgagttcctcaaggggctggctgacggcgattccagcgggaactggcgcgaggtggtcaggatttcgtctaagtctgacaatctcctgatcgatacagtgtggctcgccaggatctcaggcattgagtcatccattttcgagaacgaggcgcggctgatctggaagggcgggatgaagtggaagaagtctaatctcctgccggccgagcccatcattaagatgatcaagaagctggagaacaagattaacggcaattggcggtacatcctccgccaccagctgtacgagggcaagaagcgcgtctccaaggacaagatcaagcagattctggagatggtcaacgttgagaagctgtccgacaaggagaaggaggtttacgatctcctgaagaagctgagcaagaccgagctctacgcgctggttgtgaaggagatcgagatcattgactacaacgatttcgtctacgacgtctctgttccaaacaatgagatgttcttcgctggcaatgttccaattctgctccacaactccattgtggggacagccacgttcgatcagtactggagcgtgcgcacctctaagcggacttcaggaacagtgaccgtgaccgatcacttccgcgcctgggcgaaccggggcctgaacctcggcacaatagaccaaattacattgtgcgtggagggttaccaaagctctggatcagccaacatcacccagaacaccttctctcagggctcttcttccggcagttcgggtggctcatccggctccacaacgactactcgcatcgagtgtgagaacatgtccttgtccggaccctacgttagcaggatcaccaatccctttaatggtattgcgctgtacgccaacggagacacagcccgcgctaccgttaacttccccgcaagtcgcaactacaatttccgcctgcggggttgcggcaacaacaataatcttgcccgtgtggacctgaggatcgacggacggaccgtcgggaccttttattaccagggcacatacccctgggaggccccaattgacaatgtttatgtcagtgcggggagtcatacagtcgaaatcactgttactgcggataacggcacatgggacgtgtatgccgactacctggtgatacagtga

SEQ ID NO: 2740 - DNA, 2643 bp, Artificial Sequence
  Synthetic Construct, AS-54 intein modified protein encoding nucleic acids
atgcaaacaagcattactctgacatccaacgcatccggtacgtttgacggttactattacgaactctggaaggatactggcaatacaacaatgacggtctacactcaaggtcgcttttcctgccagtggtcgaacatcaataacgcgttgtttaggaccgggaagaaatacaaccagaattggcagtctcttggcacaatccggatcacgtactctgcgacttacaacccaaacgggaactcctacttgtgtatctatggctggtctaccaacccattggtcgagttctacatcgttgagtcctgggggaactggagaccgcctggtgccacgtccctgggccaagtgacaatcgatggcgggacctacgacatctataggacgacacgcgtcaaccagccttgcctgacgggggacgctaagattactctgcctgacgagcgggagatcaagattgaggatttcattaagatgttcgaggagcgcaagctgaagcacgtcctcaacaggaatggggaggacctggtgctcgctggcgtcaagttcaactccaagatcgttaatcacaaggtgtacaggctggtcctggagagcgggagggagatcgaggctaccggcgaccataagttcctgacgagggatggctggaaggaggtgtacgagctcaaggaggacgatgaggttctggtgtacccggctctggagggcgttgggttcgaggtggacgagcgcaggatcattggcctgaacgagttctacgagttcctcacaaattacgagatcaagctggggtacaagccactcggcaaggcgaagtcatacaaggagctgattactcgcgacaaggagaagatcctctctagggtcctggagctctccgataagtactccaagagcgagatccggcgcaagattgaggaggagttcggcatcaagatttctctgaccacgatcaagaacctcattaatgggaagatcgacggcttcgccctgaagtatgtgcgcaagatcaaggagctcggctgggatgagatcacctacgacgatgagaaggctgggatcttcgccaggctcctgggcttcatcattggcgacgggcacctgtcgaagtctaaggagggccggatcctgattacagctactattaacgagctggaggggatcaagaaggatctggagaagctcggcatcaaggcctcgaacatcattgagaaggacattgagcataagctcgatgggagggagatcaagggcaagacctctttcatctacattaacaataaggccttctacctcctgctcaacttctggggggtcgagattggcaataagacgatcaacgggtacaatattccaaagtggatcaagtacggcaacaagttcgttaagagggagttcctgaggggcctcttcggggctgacggcacaaagccttacatcaagaagtacaacatcaatgggattaagctgggcattcgggtggagaacatctccaaggataagactctggagttcttcgaggaggtcaagaagatgctggaggagttcgaggtcgagagctacattaaggtttcgaagatcgacaacaagaatctgaccgagctcatcgtcaaggccaacaataagaactacctgaagtacctctcaaggatctcctacgcgtacgagaaggacaatttcgctaggctggtgggcgagtacctccggatcaaggaggcgtacaaggacatcattctgaaggagatcgccgagaacgcgctcaaggaggccgatggcgagaagagcctgagggagctcgctaggaagtacaacgtcccggttgacttcatcattaatcagctgaaggggaaggatatcggcctcccccgcaacttcatgacgttcgaggagttcctcaaggagaaggtggtcgacggcaagtatgtgtccgagcggatcattaagaaggagtgcatcggctaccgcgatgtgtacgacattacttgccacaaggatccttctttcattgctaacggcttcgtctctcataactccattgtggggacagccacgttcgatcagtactggagcgtgcgcacctctaagcggacttcaggaacagtgaccgtgaccgatcacttccgcgcctgggcgaaccggggcctgaacctcggcacaatagaccaaattacattgtgcgtggagggttaccaaagctctggatcagccaacatcacccagaacaccttctctcagggctcttcttccggcagttcgggtggctcatccggctccacaacgactactcgcatcgagtgtgagaacatgtccttgtccggaccctacgttagcaggatcaccaatccctttaatggtattgcgctgtacgccaacggagacacagcccgcgctaccgttaacttccccgcaagtcgcaactacaatttccgcctgcggggttgcggcaacaacaataatcttgcccgtgtggacctgaggatcgacggacggaccgtcgggaccttttattaccagggcacatacccctgggaggccccaattgacaatgtttatgtcagtgcggggagtcatacagtcgaaatcactgttactgcggataacggcacatgggacgtgtatgccgactacctggtgatacagtga

SEQ ID NO: 2741 - DNA, 2496 bp, Artificial Sequence
  Synthetic Construct, AS-55 intein modified protein encoding nucleic acids
atgcaaacaagcattactctgacatccaacgcatccggtacgtttgacggttactattacgaactctggaaggatactggcaatacaacaatgacggtctacactcaaggtcgcttttcctgccagtggtcgaacatcaataacgcgttgtttaggaccgggaagaaatacaaccagaattggcagtctcttggcacaatccggatcacgtactctgcgacttacaacccaaacgggaactcctacttgtgtatctatggctggtctaccaacccattggtcgagttctacatcgttgagtcctgggggaactggagaccgcctggtgccacgtccctgggccaagtgacaatcgatggcgggacctacgacatctataggacgacacgcgtcaaccagccttgcctgacaccggacacatacgtggttctcggggacgggcggattgagactattgaggacatcgtgaatgctaaggagcgcaacgtgctctccctggacctcgataacctcagcatcaagattgacacggcgatcaagttctggaagctgcgctacaacggcaatctgagcaagatcacactctcgaacaattacgagctcaaggctactccggaccactgcctcctggtgctgagggataaccagctcaagtggatccccgccaaggacattaaggagaacgattacatcgcgatgccgttcaattacaaggtcgagcggaagcccatctccctcctgaacctcctgaagtacctggacatcacagatgttctcattgagttcgacgagaactccactatcttcgagaagattgccgagtacatccgcaacaatattaagacctcaacgaagtacaagtacctcaggaaccgcagggtcccgctgaagtacctcatcgagtggaatttcgacctggatgagattgagaaggaggctaagtacatctacaagtccgttgccgggaccaagaagatccccctgttcaagctcgacgagaggttctggtacttcgctggcctggtcctcggcgacgggtcgatccaggattctaagatccggattgcccagaccccactgaaggacgtgaagagcattctcgatgagacgttccctttcctgcacaactggatctcgggcaatcaggtcatcatttctaacccaatcattgccgagatcctggagaagctcggcatgaggaacgggaagctcaatggcatcattttctcactgcctgagtcctacatcaacgccctcattgcggggtacttcgacaccgatggctgcttctcgctcctgtacgacaagaaggcgaagaagcacaacctgcgcatggtcctcacgtcaaagcggcgcgatgttctggagaagatcgggatctacctcaactccatcggcattctgaatacactccataagtctagggaggtgtactcactcatcatttccaacaagagcctggagactttcaaggagaagatcgcgaagtacctgaagattcggaaggaggctttcatcaacggctacaagacatacaagaaggagcatgaggagcgcttcgagtgcgacctcctgccagttaaggaggtgttcaagaagctcaccttcgagaagggccggaaggagatcctgaaggactccaagatccacattgagaactggtacaaggagaagaccaacaatatcccgagggagaagctgaagacggttctccggtacgcgaacaatagcgagcataaggagttcctggagaagatcgtgaacggggacatttcgttcgtgcgcgtcaagaaggtggagaatatcccgtacgatggctacgtctacgatctctctatcaagcataatcagaacttcatctctaatggggtcatttcacacaactccattgtggggacagccacgttcgatcagtactggagcgtgcgcacctctaagcggacttcaggaacagtgaccgtgaccgatcacttccgcgcctgggcgaaccggggcctgaacctcggcacaatagaccaaattacattgtgcgtggagggttaccaaagctctggatcagccaacatcacccagaacaccttctctcagggctcttcttccggcagttcgggtggctcatccggctccacaacgactactcgcatcgagtgtgagaacatgtccttgtccggaccctacgttagcaggatcaccaatccctttaatggtattgcgctgtacgccaacggagacacagcccgcgctaccgttaacttccccgcaagtcgcaactacaatttccgcctgcggggttgcggcaacaacaataatcttgcccgtgtggacctgaggatcgacggacggaccgtcgggaccttttattaccagggcacatacccctgggaggccccaattgacaatgtttatgtcagtgcggggagtcatacagtcgaaatcactgttactgcggataacggcacatgggacgtgtatgccgactacctggtgatacagtga

SEQ ID NO: 2742 - DNA, 2373 bp, Artificial Sequence
  Synthetic Construct, AS-56 intein modified protein encoding nucleic acids
atgcaaacaagcattactctgacatccaacgcatccggtacgtttgacggttactattacgaactctggaaggatactggcaatacaacaatgacggtctacactcaaggtcgcttttcctgccagtggtcgaacatcaataacgcgttgtttaggaccgggaagaaatacaaccagaattggcagtctcttggcacaatccggatcacgtactctgcgacttacaacccaaacgggaactcctacttgtgtatctatggctggtctaccaacccattggtcgagttctacatcgttgagtcctgggggaactggagaccgcctggtgccacgtccctgggccaagtgacaatcgatggcgggacctacgacatctataggacgacacgcgtcaaccagccttcgctggggcgggatgagctgattttcattaaggagggggacaagctgaaggtttgcaagatcggggaggctattgatgagttcatggagaagtacaaggataagatcattgttgatggggacacggagatcctgtacctcgacggcattgctgaggtgtacaccatctccgtgaacgtcaagacggggaaggccgagttcaagagggtctacgcgatcagccgccacaagccgaggggcaaggtctacaaggttatcggcaaggacgggacctctatcattgttacggaggatcactcactcttcaactacgacgagaacggcaatctggtttgcgtgaagccgcgccagatgaagcatatcattaggaacttcaacaatccctacgatgtggagtaccggatcggcgactacattgagacaaattaccagaggactgattccaagtacaacagccggcagaatgacattcccgagaagctcaagatcacaaaggagctgtgccagttcctgggcctcttcgtcgcggaggggtcatacatcactaacggcatctccattaccacgaaggacgatgacatcgctaagttcattgagcggttcgtgaaggagcagatcaacgagaatattgccgtcaagcgctacgaggattcggtgcggttcgtcaacaaggggttctaccgcttcctcaaggagcacatcaatggcaaggcgattaacaagaatagcccggagttcatcctgaagggcgacaaggagatgaagctggctttcctcggcgggctgatctcgggcgatggctacgtgtccaaggacggccgcgtgcagatctacacaacttccgagcagctcctggggcagctccatctcctgctcagcgacctgggcatgatctactcgattacaaagatcaaggaggagggcgagaagatcgagattaagcggaacgagatcgtccgcaattacaagctctacgttatcgagattgccaagaactgcaccgaggacctgaagccctacgtgatccccaagtacaagaaggagaggatcaagccagcgaactacgatcagctcccttacgactaccggatcattaaggagcacctgcgcaagatcaccgataagaagccatacaacgactacgcctggaagtccaacaatcgcaagctgaagctcaacacgctggagaagatcgagcagctcaatccacatctgagggaggagattaacaagttcaagctgaatatccctttcgagattaaggagatcaaggagattgactacaacggctacgtctacgatctctcagtggaggataatgagaacttcatcacagctacaggcatcctctgccacaactccattgtggggacagccacgttcgatcagtactggagcgtgcgcacctctaagcggacttcaggaacagtgaccgtgaccgatcacttccgcgcctgggcgaaccggggcctgaacctcggcacaatagaccaaattacattgtgcgtggagggttaccaaagctctggatcagccaacatcacccagaacaccttctctcagggctcttcttccggcagttcgggtggctcatccggctccacaacgactactcgcatcgagtgtgagaacatgtccttgtccggaccctacgttagcaggatcaccaatccctttaatggtattgcgctgtacgccaacggagacacagcccgcgctaccgttaacttccccgcaagtcgcaactacaatttccgcctgcggggttgcggcaacaacaataatcttgcccgtgtggacctgaggatcgacggacggaccgtcgggaccttttattaccagggcacatacccctgggaggccccaattgacaatgtttatgtcagtgcggggagtcatacagtcgaaatcactgttactgcggataacggcacatgggacgtgtatgccgactacctggtgatacagtga

SEQ ID NO: 2743 - DNA, 2613 bp, Artificial Sequence
  Synthetic Construct, AS-57 intein modified protein encoding nucleic acids
atgcaaacaagcattactctgacatccaacgcatccggtacgtttgacggttactattacgaactctggaaggatactggcaatacaacaatgacggtctacactcaaggtcgcttttcctgccagtggtcgaacatcaataacgcgttgtttaggaccgggaagaaatacaaccagaattggcagtctcttggcacaatccggatcacgtactctgcgacttacaacccaaacgggaactcctacttgtgtatctatggctggtctaccaacccattggtcgagttctacatcgttgagtcctgggggaactggagaccgcctggtgccacgtccctgggccaagtgacaatcgatggcgggacctacgacatctataggacgacacgcgtcaaccagccttcgctcccttacgatgagaagatcctcattttcgagaataacgagtacaagctggtcaagatcggggagttcgtggagaagtacctcaaccgctacaaggacagggccatcacctacggcgataacaatatcgaggtgtacattaaggacgagaatatctacgccccatcgttcgacaaggatggcaagatcgtcctgaagcctatcacgcacgcgattcggcatcgcgggaaggagatctacgagattgagctggagtcgggcaagaaggttagggtgaccggggaccactctgtgttcacgatcaacgacaatctggatgtggtcgaggtcaaggctagcgacctcaaggttggcgatttcatcattacaccgaagatcattccctcaatctccaaggacaagatctacctctcggagatcgtcaagaacaaggacaagtactacgttaagatcaaggatcacatcaagttcattgaggagcatgaggagatcctcaaggagtcctacaaggagtacaagactaagtggaaggacctgaagccggttctcaagaagaagaacgcgttccggctcgatctgatcgaggacctggtcgataaggagaagatcgagaagatttcttacggccacgctaactacatcaacaataagattaagctcgacgagaagttcggctacctgatcggggccttcctctcagagggccattggaacgacaagtgcgtggagatttccagcaccaacaaggagttcatcgagaatctggtcgagatcattgaggagattctcggcaaggacgcgtactacatcacagtgaagggggacaagcgcaggtacaaggacctctacgtgatcggcctcaacaagactgtcgctatgatcttcgagtccctcgggctgaacaagctgtcgtctaataaggagatcccgagcattctcctgtcgaatgagacgttcctgaagggcctcatcaaggggtacattgacggcgatgggtcaatctacgtcgacgagtctaagcgggattactcaatccgcctgtacaccacgtccgagacactccgcgacactctctgcctggcgctcaagatcctgggcattaactaccggctctccatcgacaagaagagcaaggttaacgagaattggcgcgattgctacgtgatcaagattaccggcaaggagaacattgagaagctcctggacgtcgagatcaagaacaatggcgggaaggatgttatcccgaagattgccgagaagttcaaggagatcattaaccagtactcccagagggagtggaaggagcggttcggcattgacgtgaacaatctgcatatctgggaggatctcaagaagggctacatgagcaggtaccgggcgaagaaggttctcaacattatgaagaatgtgaaggagatcgaggagaagtacggcaggctcctggacaagatcgggcagctgattgacaacgatctcctgttcgagcgcatcaagagcattagggtgctcgacgagatccccgagtatgtgtacgatatttccgtggagggcacagagaacttcattgggggggagggcttcatttgcctgcataattccattgtggggacagccacgttcgatcagtactggagcgtgcgcacctctaagcggacttcaggaacagtgaccgtgaccgatcacttccgcgcctgggcgaaccggggcctgaacctcggcacaatagaccaaattacattgtgcgtggagggttaccaaagctctggatcagccaacatcacccagaacaccttctctcagggctcttcttccggcagttcgggtggctcatccggctccacaacgactactcgcatcgagtgtgagaacatgtccttgtccggaccctacgttagcaggatcaccaatccctttaatggtattgcgctgtacgccaacggagacacagcccgcgctaccgttaacttccccgcaagtcgcaactacaatttccgcctgcggggttgcggcaacaacaataatcttgcccgtgtggacctgaggatcgacggacggaccgtcgggaccttttattaccagggcacatacccctgggaggccccaattgacaatgtttatgtcagtgcggggagtcatacagtcgaaatcactgttactgcggataacggcacatgggacgtgtatgccgactacctggtgatacagtga

SEQ ID NO: 2744 - DNA, 2370 bp, Artificial Sequence
  Synthetic Construct, AS-58 intein modified protein encoding nucleic acids
atgcaaacaagcattactctgacatccaacgcatccggtacgtttgacggttactattacgaactctggaaggatactggcaatacaacaatgacggtctacactcaaggtcgcttttcctgccagtggtcgaacatcaataacgcgttgtttaggaccgggaagaaatacaaccagaattggcagtctcttggcacaatccggatcacgtactctgcgacttacaacccaaacgggaactcctacttgtgtatctatggctggtctaccaacccattggtcgagttctacatcgttgagtcctgggggaactggagaccgcctggtgccacgtccctgggccaagtgacaatcgatggcgggacctacgacatctataggacgacacgcgtcaaccagccttgcgtggacggggatactacagtgctgctggacggcaagctcatcaagatcaaggatctggaggacaagtggaaggacgtgaaggtcctcacatcggacgatctgaacccgaagctcacttccctgagcaagtactggaagctcaatgctgacgagtacgggaagaagatctacaagattaagaccgagctgggccgggagatcattgcgacggaggatcaccccttctacaccacgaacggccgcaagaggtgcggggagctcaaagtgggcgacgaggtcatcatctacccgaacgatttccccatgttcgaggacgataatagggttattgtggacgaggagaagatcaagaaggtcatcaacaacattggcgggacctacaagaacaagatcattaatgagctgaaggacaggaagctcatcccgctgacgtacaacgatcagaaggctagcattctcgcccggatcgttggccacgtgatgggcgacgggtctctcatcatcaacaacaagaactcccgcgtggtcttccgcggcgacattgaggatctcaagaccatcaaggaggacctcaaggagctgggctacgatggggaggagatcaagctgcatgagggggagaccgagatcacggactacaacggcaagaagcgcatcattaagggcaaggggtacagcttcgaggtgaggaagaagtcgctctgcatcctcctgaaggctctgggctgcgtcggcggggacaagacaaagaagatgtacggcattccaaactggatcaagactgcgcctaagtacatcaagaaggagttcctctcggcttacttcggctctgagctgacaactccgaagatccgcaaccacggcacctcattcaaggagctctccttcaagatcgcgaagattgaggagatcttcgacgaggataggttcattaaggacatcaaggagatgctcaaggagttcggcatcgagctgaaggtcagggttgaggaggggaacctccggaaggatggctacaagacaaaggtctacgtggcctccatctacaaccataaggagttcttcggccggatcgggtacacctacgcgaataagaaggagacgctggcccgctacgcgtacgagtacctcctgacgaaggagaagtacctcaaggaccgcaacatcaagaagctggagaacaatacaaagttcattactttcgataagttcatcaaggagaagtgcctgaagaatggcttcgttaaggagaagattgtcagcatcgaggagaccaaggtcgactacgtttacgatattactactatttcagagactcataacttcattgctaatggcttcctcacgggcaactccattgtggggacagccacgttcgatcagtactggagcgtgcgcacctctaagcggacttcaggaacagtgaccgtgaccgatcacttccgcgcctgggcgaaccggggcctgaacctcggcacaatagaccaaattacattgtgcgtggagggttaccaaagctctggatcagccaacatcacccagaacaccttctctcagggctcttcttccggcagttcgggtggctcatccggctccacaacgactactcgcatcgagtgtgagaacatgtccttgtccggaccctacgttagcaggatcaccaatccctttaatggtattgcgctgtacgccaacggagacacagcccgcgctaccgttaacttccccgcaagtcgcaactacaatttccgcctgcggggttgcggcaacaacaataatcttgcccgtgtggacctgaggatcgacggacggaccgtcgggaccttttattaccagggcacatacccctgggaggccccaattgacaatgtttatgtcagtgcggggagtcatacagtcgaaatcactgttactgcggataacggcacatgggacgtgtatgccgactacctggtgatacagtga

SEQ ID NO: 2745 - DNA, 2427 bp, Artificial Sequence
  Synthetic Construct, AS-59 intein modified protein encoding nucleic acids
atgcaaacaagcattactctgacatccaacgcatccggtacgtttgacggttactattacgaactctggaaggatactggcaatacaacaatgacggtctacactcaaggtcgcttttcctgccagtggtcgaacatcaataacgcgttgtttaggaccgggaagaaatacaaccagaattggcagtctcttggcacaatccggatcacgtactctgcgacttacaacccaaacgggaactcctacttgtgtatctatggctggtctaccaacccattggtcgagttctacatcgttgagtcctgggggaactggagaccgcctggtgccacgtccctgggccaagtgacaatcgatggcgggacctacgacatctataggacgacacgcgtcaaccagccttcgctgccatacgaggagaagattattattaaggagggggagttcattaagccagtggagatcgggaagctcgtggatgagatgattgagcgcttcggcttcgagaagatcgggaactctgaggtctgcgacctcccgatcgatatctacgccctctcactggaccaggatgagaaggtgcactggaagcggatcatttcgtgcatccgccacaagcataatggcaagctgatcaagattaagaccaagagcgggagggagattaccgcgacgccgtaccactcgttcgtcatccggaaggataacaagatcattcccgttaagggctccgagctcaagatcggggacaggattccggtggtcaagcatatccccgcgaattgcgttgaggctatcaacatttccgactacgtgagcggcaattacgttgtggataacatcaacaataagattgccccaaagatcaacggcaagtccattcctaacaatatcaagctcgactacgatttcggctacttcatcgggatctacctcgcggagggcagcgtcaccaagtacttcgttagcatctcgaatgtggacgagctcattctgaacaagatccgggccttcgcggacaagctcggcctgaactacggggagtacgataacaataacggcttcgcggagtcgcatgacatccgcatctactcctccaccctcgctgagttcctgtctaatttcggcacctcgtctaacacgaagaagatcgccgagttcgtgttcggggcgaacaaggagttcgtccggggcctcatcagggggtacttcgacggcgatgggaatgtcaacgccgacaggaaggtcattcgggttacatctaactcaaaggagctcatcgacggcatcgctattctcctggcccgcttcaatatcttcagcattaagacaaagactaagaaccagttcgtgctgatcattccccaccgctacgcgaagaagttccatgaggagatcaatttctcggtcgagaagaagaagtccgagctggagaggctggtgtcatccctgaacgacgataagacatacgactcaatcgatatgattccatccatcggcgatgctctcactaagctgggggagaaggtcgactaccctaaggttatcctcaagaagttcgagcggaagcagaagatcggcagggctaccctccagaggcacctgcgcaggatcgaggagctggctgtgaagaagggcgtcaacatcctcgccctgaaggagtactggctcctgaagaaggccgttgagtccgacgtgatctgggatgagattgtcaagatcgaggagattagctgcgacaagaagtatgtgtacgatatttctgtggaggggctggagactttcactactttcgatggggttctcactcataattccattgtggggacagccacgttcgatcagtactggagcgtgcgcacctctaagcggacttcaggaacagtgaccgtgaccgatcacttccgcgcctgggcgaaccggggcctgaacctcggcacaatagaccaaattacattgtgcgtggagggttaccaaagctctggatcagccaacatcacccagaacaccttctctcagggctcttcttccggcagttcgggtggctcatccggctccacaacgactactcgcatcgagtgtgagaacatgtccttgtccggaccctacgttagcaggatcaccaatccctttaatggtattgcgctgtacgccaacggagacacagcccgcgctaccgttaacttccccgcaagtcgcaactacaatttccgcctgcggggttgcggcaacaacaataatcttgcccgtgtggacctgaggatcgacggacggaccgtcgggaccttttattaccagggcacatacccctgggaggccccaattgacaatgtttatgtcagtgcggggagtcatacagtcgaaatcactgttactgcggataacggcacatgggacgtgtatgccgactacctggtgatacagtga

SEQ ID NO: 2746 - DNA, 2478 bp, Artificial Sequence
  Synthetic Construct, AS-60 intein modified protein encoding nucleic acids
atgcaaacaagcattactctgacatccaacgcatccggtacgtttgacggttactattacgaactctggaaggatactggcaatacaacaatgacggtctacactcaaggtcgcttttcctgccagtggtcgaacatcaataacgcgttgtttaggaccgggaagaaatacaaccagaattggcagtctcttggcacaatccggatcacgtactctgcgacttacaacccaaacgggaactcctacttgtgtatctatggctggtctaccaacccattggtcgagttctacatcgttgagtcctgggggaactggagaccgcctggtgccacgtccctgggccaagtgacaatcgatggcgggacctacgacatctataggacgacacgcgtcaaccagccttgcctgacatcaaattcaaagatcctgacagacgatggctactacattaagctggagaagctcaaggagaagctggacctgcatattaagatctacaacaccgaggagggcgagaagtccagcaatattctgttcgtgtcggagcgctacgcggatgagaagatcattcggatcaagaccgagtcggggagggtcctggagggctctaaggaccacccggtgctgacgctcaacggctacgtgcccatgggcatgctcaaggagggggacgatgtgatcgtctacccatacgagggcgtggagtacgaggagccttccgacgagatcattctcgatgaggacgatttcgcggagtacgacaagcagatcattaagtacctgaaggataggggcctcctgccgctccggatggacaacaagaatatcggcatcattgctaggctcctggggttcgccttcggcgatgggagcatcgtgaaggagaacggcgacagggagaggctctacgtggccttctacgggaagagggagaccctcatcaagattcgggaggacctggagaagctcggcatcaaggccagccgcatctactcccgcaagcgcgaggtcgagatcaggaacgcgtacggcgacgagtacacatccctgtgcgaggataattctatcaagattacttcaaaggccttcgcgctgttcatgcataagctcgggatgcccatcggcaagaagacggagcagatctacaagattccagagtggatcaagaaggcccctaagtgggttaagcggaacttcctggctggcctcttcggggctgacggctctcgcgcggtcttcaagaactacaccccgctgcccatcaatctcacgatgtcgaagtctgaggagctcaaggagaacatcctggagttcctcaatgagattaagctcctgctcgctgagttcgatatcgagtcaatgatctacgagattaagtccctggacggccgcgttagctacaggctcgccatcgtgggcgaggagtcaattaagaacttcctggggcgcatcaattacgagtactccggcgagaagaaggtcatcgggctgctcgcgtacgagtacctccgcaggaaggacatcgctaaggagattcgcaagaagtgcatcaagagggcgaaggagctgtacaagaagggcgttacagtgagcgagatgctcaagatggatgagttcaggaacgagttcatctcgaagcggctgattgagcgcgctgtctacgagaatctcgacgaggacgatgttcggatctccactaagttcccgaagttcgaggagttcatcgagaagtacggcgtcattggcgggttcgttatcgataagattaaggagatcgaggagatttcatacgactccaagctgtacgacgtgggcatcgtttcaaaggagcataacttcattgctaacagcatcgtggttcataattccattgtggggacagccacgttcgatcagtactggagcgtgcgcacctctaagcggacttcaggaacagtgaccgtgaccgatcacttccgcgcctgggcgaaccggggcctgaacctcggcacaatagaccaaattacattgtgcgtggagggttaccaaagctctggatcagccaacatcacccagaacaccttctctcagggctcttcttccggcagttcgggtggctcatccggctccacaacgactactcgcatcgagtgtgagaacatgtccttgtccggaccctacgttagcaggatcaccaatccctttaatggtattgcgctgtacgccaacggagacacagcccgcgctaccgttaacttccccgcaagtcgcaactacaatttccgcctgcggggttgcggcaacaacaataatcttgcccgtgtggacctgaggatcgacggacggaccgtcgggaccttttattaccagggcacatacccctgggaggccccaattgacaatgtttatgtcagtgcggggagtcatacagtcgaaatcactgttactgcggataacggcacatgggacgtgtatgccgactacctggtgatacagtga

SEQ ID NO: 2747 - DNA, 2019 bp, Artificial Sequence
  Synthetic Construct, AS-61 intein modified protein encoding nucleic acids
atgcaaacaagcattactctgacatccaacgcatccggtacgtttgacggttactattacgaactctggaaggatactggcaatacaacaatgacggtctacactcaaggtcgcttttcctgccagtggtcgaacatcaataacgcgttgtttaggaccgggaagaaatacaaccagaattggcagtctcttggcacaatccggatcacgtactctgcgacttacaacccaaacgggaactcctacttgtgtatctatggctggtctaccaacccattggtcgagttctacatcgttgagtcctgggggaactggagaccgcctggtgccacgtccctgggccaagtgacaatcgatggcgggacctacgacatctataggacgacacgcgtcaaccagccttcggtggactacaatgagcctattattattaaggagaatggggagattaaggtcgtgaagatcggggagctgattgacaagattattgagaactccgagaatatccgcagggagggcatcctggagattgccaagtgcaaggggatcgaggttattgcgttcaactcgaattacaagttcaagttcatgccagtttcggaggtgtctaggcaccctgtgtctgagatgttcgagatcgtggtcgagggcaacaagaaggtcagggttacacggtcccatagcgtcttcactatccgggacaatgaggttgtgccgatccgcgtggacgagctgaaggtcggggatatcctggttctcgcgaaggagctccccaacatcgaggaggacatcgagattgataagaagttctcaaagatcctgggctacatcattgctgaggggtactacgacgataagaagatcgtgctctcttacgactacaacgagaaggagttcatcaatgagaccattgattacttcaagtcactgaactccgacatcacgatctacagcaaggatctcaatatccagattgaggtgaagaacaagaagatcattaatctcctgaagaagctgcgcgtcaagaacaagaggatcccgagcatcattttcaagtcgccctacgagatcaagaagtctttcatcgacggcattttcaacgggaaggatgctaaggtgttcgtctcaaaggagctcgccgaggacgtgatcttcctcctgctccagattaaggagaacgccacaatcaataagaagtcgatcaacgatattgaggtctacgaggttcggcgcatcaccaacatctacacgaatcggaagctggagaagctcatcaactccgacttcattttcctcaagatcaaggagattaataaggtcgagccgacgagcggctacgcgtacgacctcactgttccaaatgcggagaatttcgttgctggcttcgggggcttcgtgctccacaattccattgtggggacagccacgttcgatcagtactggagcgtgcgcacctctaagcggacttcaggaacagtgaccgtgaccgatcacttccgcgcctgggcgaaccggggcctgaacctcggcacaatagaccaaattacattgtgcgtggagggttaccaaagctctggatcagccaacatcacccagaacaccttctctcagggctcttcttccggcagttcgggtggctcatccggctccacaacgactactcgcatcgagtgtgagaacatgtccttgtccggaccctacgttagcaggatcaccaatccctttaatggtattgcgctgtacgccaacggagacacagcccgcgctaccgttaacttccccgcaagtcgcaactacaatttccgcctgcggggttgcggcaacaacaataatcttgcccgtgtggacctgaggatcgacggacggaccgtcgggaccttttattaccagggcacatacccctgggaggccccaattgacaatgtttatgtcagtgcggggagtcatacagtcgaaatcactgttactgcggataacggcacatgggacgtgtatgccgactacctggtgatacagtga

SEQ ID NO: 2748 - DNA, 2376 bp, Artificial Sequence
  Synthetic Construct, AS-62 intein modified protein encoding nucleic acids
atgcaaacaagcattactctgacatccaacgcatccggtacgtttgacggttactattacgaactctggaaggatactggcaatacaacaatgacggtctacactcaaggtcgcttttcctgccagtggtcgaacatcaataacgcgttgtttaggaccgggaagaaatacaaccagaattggcagtctcttggcacaatccggatcacgtactctgcgacttacaacccaaacgggaactcctacttgtgtatctatggctggtctaccaacccattggtcgagttctacatcgttgagtcctgggggaactggagaccgcctggtgccacgtccctgggccaagtgacaatcgatggcgggacctacgacatctataggacgacacgcgtcaaccagccttgcttccatccggatgaggttctcttcattgatcgggggcgggggctggagtgcattactttcaaggagctgttcgagctggaggacaaggacaacgtgaagatcctctccttcgatggcgagaagctcagcctgaagaagctcaagctggcctccaagcgctactacaatgacgatctcatcaccctgcggttcaacctcggccgcgagatcaagattacgaaggaccacccagtggtcattctggaggatggcgagctcaagatcaagctgacatctgacgtgaaggagggggataaggtcatcctgccctacggcaacttcggggaggagagggagatcgagattgacatcctggaggagctgagcaagacagatctcattgagaaagtgtggatccacaacaaggacctggcgactaatgagttcaacatcattaagccatacctctcgaataagtaccctcatgacgtcaagaggaacggcaccatccgggctaaggacattctcccgatcaaggagattctggataagtacgggtccaagaaccggctgttcacggcgaagtcgaagtctaccacgatcccctacaagattaagatcgacaaggatttcgctcggctcattggctactacctgagcgaggggtggatctcgaaggactacggccgcaacggggttgtgcgcaagaggattggcctctgcttcgggatccacgaggaggagtacattaacgacgttaagaatatcctcaacaagctgggcatcaagtacattgagaagatcaaggatgggtcacattccattctcatctccagcaagatcctggcttacgtcttcgagaatattctgaactgcggcatcaactgctacaataagaacatcccgccccagatgttcaatgccaaggaggagatcaagtgggagttcctcaagggcctgttccgcggggacggcgggatcgtcaggctcaacaataacaagaatctgaacatcgagttcgccaccgtttctaagaagatggcgcactcactcctgattctcctgcagctcctgggcatcgtcgcttcggttaagaagtgctacaataacaagtctacaactatggcctacatcattaggattaacggcctggagcaggtcaagaagatcggcgagctgttcgggaagaagtgggagaattacaaggacattgccgagtcatacaagcggaacatcgagccgctcggctacaagaagtccgataatttcgcgatcctggaggttaaggagatcattaaggagcattactccggctacgtgtactcagtggagacagagaactcactgctcattacaagctacggcatcctcattcacaactccattgtggggacagccacgttcgatcagtactggagcgtgcgcacctctaagcggacttcaggaacagtgaccgtgaccgatcacttccgcgcctgggcgaaccggggcctgaacctcggcacaatagaccaaattacattgtgcgtggagggttaccaaagctctggatcagccaacatcacccagaacaccttctctcagggctcttcttccggcagttcgggtggctcatccggctccacaacgactactcgcatcgagtgtgagaacatgtccttgtccggaccctacgttagcaggatcaccaatccctttaatggtattgcgctgtacgccaacggagacacagcccgcgctaccgttaacttccccgcaagtcgcaactacaatttccgcctgcggggttgcggcaacaacaataatcttgcccgtgtggacctgaggatcgacggacggaccgtcgggaccttttattaccagggcacatacccctgggaggccccaattgacaatgtttatgtcagtgcggggagtcatacagtcgaaatcactgttactgcggataacggcacatgggacgtgtatgccgactacctggtgatacagtga

SEQ ID NO: 2749 - DNA, 2196 bp, Artificial Sequence
  Synthetic Construct, AS-63 intein modified protein encoding nucleic acids
atgcaaacaagcattactctgacatccaacgcatccggtacgtttgacggttactattacgaactctggaaggatactggcaatacaacaatgacggtctacactcaaggtcgcttttcctgccagtggtcgaacatcaataacgcgttgtttaggaccgggaagaaatacaaccagaattggcagtctcttggcacaatccggatcacgtactctgcgacttacaacccaaacgggaactcctacttgtgtatctatggctggtctaccaacccattggtcgagttctacatcgttgagtcctgggggaactggagaccgcctggtgccacgtccctgggccaagtgacaatcgatggcgggacctacgacatctataggacgacacgcgtcaaccagccttctattccgggggatgaggtcgtttgggccaaggtggacggggaggccaagctcattcctattgaggatctctacgagctctggaaggagggcagggatgttgaggtggctgctctcacggaggagggggtggtctggtccagcgtcgacagggttgctaggcacaggaggcggacaggcctggtgaagatcattacaaggactgggcgggaggtcatcgttacagaggaccattccgtgttcactgtccgggacggcaagattgtggatgtcccaacctcagagctctccgagggcgattggatcgtcctcccagctaggctgccagctggcgactcagatgagattgacgggatcaagattgacgaggatctcgcgttcctcctgggcctctacgtggctgaggggtccctgaccaaccagaaggacgctgtcaggatccacaataaggatcctgaggtcatcgaggagattgaccgcatcgttagggagaagggctgggaggggcggtactacgagagcgaccattcgtactggatcaagagccggaagctccgccagctgtgcgagaagctcggcactaaggccagggagaagaggctcgggccactcctgtcgctgaagcctgagctcctggctgctgctctgaggggctactacacgggcgacgggtcgttctctgtgaagccgcacggccgctctgccatcattgaggcgaccacggtctcaaagaggctcgctgatgagctcctggtggccctccagattctggacatcgtcgcgcgccgctacgagtgcgacgataccaagggctcgacgcggtaccgcgtgatgattaccaagtctgagtacatccgcacgttcgttgagaaagtgggcttcgcccagtccgagaagaacgagaggatccggaagttcctcgcggagaggaagtggacacgcggcaggtccgatattccgactgagctgatcgggagcccctacacctacgttgaggtggagtacatctctgacagggtggctgctgatggcgggctcatgaaggccgagctggagcatctgtacttcgacaagattaaggagatcgttcccctggatcgcgacgatgagtatgtgtacgacgtcgtggaggttaagctcgggcataatttcgttggggggcagggggttctgctccacaactccattgtggggacagccacgttcgatcagtactggagcgtgcgcacctctaagcggacttcaggaacagtgaccgtgaccgatcacttccgcgcctgggcgaaccggggcctgaacctcggcacaatagaccaaattacattgtgcgtggagggttaccaaagctctggatcagccaacatcacccagaacaccttctctcagggctcttcttccggcagttcgggtggctcatccggctccacaacgactactcgcatcgagtgtgagaacatgtccttgtccggaccctacgttagcaggatcaccaatccctttaatggtattgcgctgtacgccaacggagacacagcccgcgctaccgttaacttccccgcaagtcgcaactacaatttccgcctgcggggttgcggcaacaacaataatcttgcccgtgtggacctgaggatcgacggacggaccgtcgggaccttttattaccagggcacatacccctgggaggccccaattgacaatgtttatgtcagtgcggggagtcatacagtcgaaatcactgttactgcggataacggcacatgggacgtgtatgccgactacctggtgatacagtga

SEQ ID NO: 2750 - DNA, 2580 bp, Artificial Sequence
  Synthetic Construct, AS-64 intein modified protein encoding nucleic acids
atgcaaacaagcattactctgacatccaacgcatccggtacgtttgacggttactattacgaactctggaaggatactggcaatacaacaatgacggtctacactcaaggtcgcttttcctgccagtggtcgaacatcaataacgcgttgtttaggaccgggaagaaatacaaccagaattggcagtctcttggcacaatccggatcacgtactctgcgacttacaacccaaacgggaactcctacttgtgtatctatggctggtctaccaacccattggtcgagttctacatcgttgagtcctgggggaactggagaccgcctggtgccacgtccctgggccaagtgacaatcgatggcgggacctacgacatctataggacgacacgcgtcaaccagccttgcgtggcgccggagacaaagatctgcctcgctgacgggcggttcgttagggccgatgagctgttcgaggagctgaaggagcgggggcgcctggttaagtgcgacgagagcgaggaggtgtacgagctgagggagccagttggggtgtccagcctcgacaaggatgcggtggagatcgtcgagggcaagattacgcacgtgtggcgcctcaaggccgacaagctggtcgaggttgaggtgaagaacggcaggtcgatccggaccacgccagagcataagttcctggtcctcgatccttctggcgagatcgttgagaagagggccgatgagctggagatcggggactacattgtgtgcacccagaagctcgtccacgagggcatgtcggaggaggagctcaagagggaggtgttccgcaggctgggcagggacttcttcgtccatctcccggaggaggaggccgagagcgttctggagctcgcgaaggagcggggcatcaaggctctctgggagacgctggaggtggacattgaggagaactcgttctactaccagctcaggaaggggcgcatcagggccgatattctcgtcgacctggctgaggagctgggcctcgacctggctgatctgtacgacgccgtcgaggtttcatacaggtccaataccaagtccacgaagccaatcaggctcccagagccagaggacctcttctacctggcgggcctcatgttcggcgatgggtgctggaaccagctgaccaatggctccgaggccatccagggggaggtgaagcgcattgcgagcgacatgggcctggaggtgcgcgtgcgccgctacgaggggaagacagcccggatcgacttcccagagactgtgcctcgcattctggaggctctcttcgattacccaaggcggaagaaggcccaccggatccgcgtcaacgatttcctcacaagggcgcctctggactgcatcgctgagttcattcggggctacttcgacgcggatggcacagttgaggaggggcggagcgctgtttcggtgacttcggtctctcgcgagttcctggaggatctccagctcctgctccagaagttcgacgtggcttcttacctgagggagggcgatggggcttacaccctctacgtgtccggcgctaggtcactggagaggttcccagggttcagggagccagagaaggctgagaagctgaagaagctcatggagaaggcctcgtcttcagagctggagaaggtcccgatctccggcgagattctcagggaggtcaggggggacgttcccacaactcgcatgttcaactgctactcaaattacgagggcgggcaagtgggcctcaccaagtccagcctggagaaggtcatctccacgctggaggctgtcggcgttgagggggaggctctggagaggctcaaggctctggcgcgggacgatgtgtgcttcctggaggtggtccgcgttgaggaggtggagtacgacggctacgtctacgacttcacagtggaggagcatcataacttcgctgcggagggcttcgtggttcataattccattgtggggacagccacgttcgatcagtactggagcgtgcgcacctctaagcggacttcaggaacagtgaccgtgaccgatcacttccgcgcctgggcgaaccggggcctgaacctcggcacaatagaccaaattacattgtgcgtggagggttaccaaagctctggatcagccaacatcacccagaacaccttctctcagggctcttcttccggcagttcgggtggctcatccggctccacaacgactactcgcatcgagtgtgagaacatgtccttgtccggaccctacgttagcaggatcaccaatccctttaatggtattgcgctgtacgccaacggagacacagcccgcgctaccgttaacttccccgcaagtcgcaactacaatttccgcctgcggggttgcggcaacaacaataatcttgcccgtgtggacctgaggatcgacggacggaccgtcgggaccttttattaccagggcacatacccctgggaggccccaattgacaatgtttatgtcagtgcggggagtcatacagtcgaaatcactgttactgcggataacggcacatgggacgtgtatgccgactacctggtgatacagtga

SEQ ID NO: 2751 - DNA, 1929 bp, Artificial Sequence
  Synthetic Construct, AS-65 intein modified protein encoding nucleic acids
atgcaaacaagcattactctgacatccaacgcatccggtacgtttgacggttactattacgaactctggaaggatactggcaatacaacaatgacggtctacactcaaggtcgcttttcctgccagtggtcgaacatcaataacgcgttgtttaggaccgggaagaaatacaaccagaattggcagtctcttggcacaatccggatcacgtactctgcgacttacaacccaaacgggaactcctacttgtgtatctatggctggtctaccaacccattggtcgagttctacatcgttgagtcctgggggaactggagaccgcctggtgccacgtccctgggccaagtgacaatcgatggcgggacctacgacatctataggacgacacgcgtcaaccagccttcggtttcggctgatactcctattctcgttaggcgggggggggaggttctgcgggttactttcgaggatctggactcatggtacttcggcgacaggggcggggagtatgtggacgtgtctgacctggaggtcctgaccgttgaccggaacttccgcgtcacgtgggctcgcgttagcaagctgatccggcaccgcgccaggaagattctcagggtgcatctggaggacggcacaatcgagctcactgggaatcacgccgtcatggttctggatgagggcgggctcagggctgtcaaggcttcggagattgaggagggctcattcctcctgtccttcgtggcggagctggacgagcagccaacagatggcgggaccgtggtcacgtccgtcggctcggggtctcgcgtgagcgacaccacgtacgagctgccagtggaggtccgcgttgagctcctgagggagctcgccgacgatggcgtgatcgaggcgagcgaggacgtgtcggtcgatctcgcttggctggcccggatttctggcgtcgagtcacgcgttaccgacgatggggtggagctcgtctgggagacaaggactggcgacctcctgccagctgatccagtgctcaagctggtcgagcggctggagtcggacctggtcgacgacctggagtcttgggtcttcgatggcagggtgtcaaaggaggcggttcggaaggtgctgtccagcgtggacgctaagaacctcaggggggatgctaggagggcttacaggatgctccggaccctggttcgctccgacgtgcatgcggttaaggtggaggacctggatgtcatggactacgatggctacgtgtacgacgtttctgttccaggcaatgagatgttcttcgccggggaggttccagttctgctgcataattccattgtggggacagccacgttcgatcagtactggagcgtgcgcacctctaagcggacttcaggaacagtgaccgtgaccgatcacttccgcgcctgggcgaaccggggcctgaacctcggcacaatagaccaaattacattgtgcgtggagggttaccaaagctctggatcagccaacatcacccagaacaccttctctcagggctcttcttccggcagttcgggtggctcatccggctccacaacgactactcgcatcgagtgtgagaacatgtccttgtccggaccctacgttagcaggatcaccaatccctttaatggtattgcgctgtacgccaacggagacacagcccgcgctaccgttaacttccccgcaagtcgcaactacaatttccgcctgcggggttgcggcaacaacaataatcttgcccgtgtggacctgaggatcgacggacggaccgtcgggaccttttattaccagggcacatacccctgggaggccccaattgacaatgtttatgtcagtgcggggagtcatacagtcgaaatcactgttactgcggataacggcacatgggacgtgtatgccgactacctggtgatacagtga

SEQ ID NO: 2752 - DNA, 2460 bp, Artificial Sequence
  Synthetic Construct, AS-66 intein modified protein encoding nucleic acids
atgcaaacaagcattactctgacatccaacgcatccggtacgtttgacggttactattacgaactctggaaggatactggcaatacaacaatgacggtctacactcaaggtcgcttttcctgccagtggtcgaacatcaataacgcgttgtttaggaccgggaagaaatacaaccagaattggcagtctcttggcacaatccggatcacgtactctgcgacttacaacccaaacgggaactcctacttgtgtatctatggctggtctaccaacccattggtcgagttctacatcgttgagtcctgggggaactggagaccgcctggtgccacgtccctgggccaagtgacaatcgatggcgggacctacgacatctataggacgacacgcgtcaaccagccttgcctcgcgccggggacaaagattctcacggagcatggctgctgggttaaggtggaggatctccctaagatgctgaccgatcagaagctgaaggtttacgacgtggatgagggccgcgaggacgattccgagatcaagttcgtcatggagaggggcattgaggaggacgagagggctgtggtcctcgtgaccgagtcaggcctgacgatcgaggggtccgaggatcacccagtcctcacccctgagggctacgttgagctgggggagattgaggagggcgacctcgttgtggtctacccgttcgagggcgtcgagtacgaggagaaggagggcacgatcctcgacgagtccgatttcgaggacgtggatccccaggtcctcaggtacctggaggagagggacctcatcccactgaggtggagcgatccaaaagtggggacgctcgccaggattctgggcttcgcgatgggcgacgggcacctgggcgagcaggctgggcggctcaccctgtctttctacggcgacgagcgcacgctcagggagctgaagcgcgacctggagtcactgggcgtcaaggcgaacctccatgttcgcaagcgccgctacgagatcgagacagctagcggccgctacgagggggaggctacttcggttgagctgcgggtggcgtcgcgctctttcgctctcctgatggagaagctcggcatgccaagggggcggaaggtggagaccccgtacaaggtccccgattggatcaaggaggcgcctctgtgggtgaagaggaacttcctcgctgggctgttcgctgctgacggctcggttgtgaagttcaagcggtacacaccgctccccatcaatctgactcaggccaaggtcgaggagctggaggagaacctgcgggagttcatgaatgacgtggcgaagctcctgcgcgagttcggcattgagaccacgctgtacgaggtcaagagcaagaagaacgtcgtttacaagctggccatcgtgggcgaggagaatattaagcgcttcctcggcaaggtcgggtacgagtacgatccagagaagaaggtggagggcctcgctgcctacgcgtacctcaagctgaaggagcgcgtcaagaaggacaggaaggaggctgctgagacagctgctgaggtgtacgaggagacaggctccatcactaaggcccatgaggctgtcgctgacgtggtcaacaggaggttcgtggagagggttgtgtacgacggcgggatttccagcgtgcgggtcccagaggatttccctaccttcgagcggttcaaggaggagagggttctcgctggcgggttcgtgatcgaggaggtcgttgaggtcaagggcgttgagccggagtacgacaggttctacgatattggggtttgccacggggctcataacttcattgcggatggggtcgtcgttcataattccattgtggggacagccacgttcgatcagtactggagcgtgcgcacctctaagcggacttcaggaacagtgaccgtgaccgatcacttccgcgcctgggcgaaccggggcctgaacctcggcacaatagaccaaattacattgtgcgtggagggttaccaaagctctggatcagccaacatcacccagaacaccttctctcagggctcttcttccggcagttcgggtggctcatccggctccacaacgactactcgcatcgagtgtgagaacatgtccttgtccggaccctacgttagcaggatcaccaatccctttaatggtattgcgctgtacgccaacggagacacagcccgcgctaccgttaacttccccgcaagtcgcaactacaatttccgcctgcggggttgcggcaacaacaataatcttgcccgtgtggacctgaggatcgacggacggaccgtcgggaccttttattaccagggcacatacccctgggaggccccaattgacaatgtttatgtcagtgcggggagtcatacagtcgaaatcactgttactgcggataacggcacatgggacgtgtatgccgactacctggtgatacagtga

SEQ ID NO: 2753 - DNA, 2565 bp, Artificial Sequence
  Synthetic Construct, AS-67 intein modified protein encoding nucleic acids
atgcaaacaagcattactctgacatccaacgcatccggtacgtttgacggttactattacgaactctggaaggatactggcaatacaacaatgacggtctacactcaaggtcgcttttcctgccagtggtcgaacatcaataacgcgttgtttaggaccgggaagaaatacaaccagaattggcagtctcttggcacaatccggatcacgtactctgcgacttacaacccaaacgggaactcctacttgtgtatctatggctggtctaccaacccattggtcgagttctacatcgttgagtcctgggggaactggagaccgcctggtgccacgtccctgggccaagtgacaatcgatggcgggacctacgacatctataggacgacacgcgtcaaccagccttgcttcgcgcctgggacaagggttattacggcctcgggggacgtggtggagattgatgagatcgtggagcgggctgcggagacggctgtggacggcgggctgagggagggctctacagaggttactgtgggggtcaccaacgtcaggacgctggctgcttgggacggcgatctcacctctaatgacgtggtcgcggtggagaagatcgaggctccgtcacgggccgttcgcgtgaggaccaggtccggcgctgagctggttgtgagcgaggaccacaagttcctcgtggacacggaggatggcccaaggatggtcgaggctagcgagctcaagtcgggggatgagctgtactcggtgcgggagctccgcgtgtctgagaaggtcccaacatacctggagctcctgctggaggccgaggacaagttctacgtgcatcctactgaggagttcgaggaggctgtcgctgagcgctacggctccctggctgaggcttgcagggagaaggagctcccatacagggccagggaggctaaggagcgcaggtactacgagctgagcgagttcgctaggctcgctacggctgttatcgagtcggtggacgaggccacagagtacattgattacgtcactgcgggcgggcggaagcgcgttaagttctccagcccaaggccaggcaaggaggtcatgtatgtggcgggcctgatcgcttcagacgggtccgttgatacagagaggggcttcgtgatgttctcaaacactgagcgggagctgctctccgcgttcgaggagattgtcacagaggagttcggcgttgacgcctcgaagaccgagaaccagaatggggtcacgatgctgagggtcaattcccgggttctcgcgcgcgtgttcgagaggctggctgacccgaagactgtcctcaagatgccccgcgagctcgtggctgcttacctggctggctacgtcgacggcgatgggcacctgaaggatgggaagatcgtgattaccacggctgacagggagagggctggcgatctccagctgctcctgaagaggctgggggtgccaagcgtcctcagggagagggacggcgcttacgatgtcgttgtgacagggcacgacgctgctgagctcgctgaggagctcccactgaggcatcctaagaaggctgaggctgctgcttccatgtcgtctggcaggcgctcatccaggttcgaccgggtgagcaggaggttcgggaggctcctgagggaggtgcgcaggaagtacggcgtcagggcttccgatctggggagctcgtctaccatctctcagattgagtcaggcgagaggagggctacgaggaggctcgctctggagatcgtcgagaggctggaggaggtcgttggcgacgttgaggaggtgcgggagctcagggagctggctgagggcaactacgtgctggatgaggtggtcgaggtcgagacggttgagtacgagcatgagtacctctacgatgttacagtggttccagatcatactctcgtggttgagaatggcatcattacaagcaactccattgtggggacagccacgttcgatcagtactggagcgtgcgcacctctaagcggacttcaggaacagtgaccgtgaccgatcacttccgcgcctgggcgaaccggggcctgaacctcggcacaatagaccaaattacattgtgcgtggagggttaccaaagctctggatcagccaacatcacccagaacaccttctctcagggctcttcttccggcagttcgggtggctcatccggctccacaacgactactcgcatcgagtgtgagaacatgtccttgtccggaccctacgttagcaggatcaccaatccctttaatggtattgcgctgtacgccaacggagacacagcccgcgctaccgttaacttccccgcaagtcgcaactacaatttccgcctgcggggttgcggcaacaacaataatcttgcccgtgtggacctgaggatcgacggacggaccgtcgggaccttttattaccagggcacatacccctgggaggccccaattgacaatgtttatgtcagtgcggggagtcatacagtcgaaatcactgttactgcggataacggcacatgggacgtgtatgccgactacctggtgatacagtga

SEQ ID NO: 2754 - DNA, 1965 bp, Artificial Sequence
  Synthetic Construct, AS-68 intein modified protein encoding nucleic acids
atgcaaacaagcattactctgacatccaacgcatccggtacgtttgacggttactattacgaactctggaaggatactggcaatacaacaatgacggtctacactcaaggtcgcttttcctgccagtggtcgaacatcaataacgcgttgtttaggaccgggaagaaatacaaccagaattggcagtctcttggcacaatccggatcacgtactctgcgacttacaacccaaacgggaactcctacttgtgtatctatggctggtctaccaacccattggtcgagttctacatcgttgagtcctgggggaactggagaccgcctggtgccacgtccctgggccaagtgacaatcgatggcgggacctacgacatctataggacgacacgcgtcaaccagccttgctcgtggacaaacgctagggcggttacaaggcgggggttcgtgcatgtggatgatctcactactgatgatgaggtcatgtcggtcgacgatcagggcaggacaatctggcagcagattgacgaggtggtccggttcccgttcagcggcacgctctactcgctgggcgggagggagatcaacgctaccattacggccaatcaccgggttgtgggcctcaaccgcgagaagaccaagtgggttgagcatacaccaacttccctgcctggcaacaagatgtgggtgtacaccgctggcgaggggagcaatgaggactacccgctcaccgatacggagatcaggctcgctgtgtggggcctgacagactcgcacaggtctcccgatggccggtggactttctaccagtccggggagaaggcggagcaggtcaggaagctcctggctgacgctggcattgagtacagggagagggctaggaacaggggcatcaccgagattgatgggaaggtcctcaaggcgccgcccaagacgcagtacgagttctcgctcggcaaggttcaggagctggacgatctcctggacagggggaggagcgagctgccaacatggactctctccctgagccagaggcaggctaggctcttcctggaggagtacaggttcaccgacggcacggataccacgtcagctggggactcctacgtcctctacgtttgcaaggatcgcatgagggagcagctccagatgctggctgctgctaacggcctcagggcttccacaactgagtacaggccagggcattggaggctgaacatctctaatagggcgctctcaggcctgtacaagaataccgtggaggaggtcgcttacgagggggaagtgtggtgcctgcgggttccaaatggcaggttcttcattgaggatgggggcaagattcatctcacgggcaactccattgtggggacagccacgttcgatcagtactggagcgtgcgcacctctaagcggacttcaggaacagtgaccgtgaccgatcacttccgcgcctgggcgaaccggggcctgaacctcggcacaatagaccaaattacattgtgcgtggagggttaccaaagctctggatcagccaacatcacccagaacaccttctctcagggctcttcttccggcagttcgggtggctcatccggctccacaacgactactcgcatcgagtgtgagaacatgtccttgtccggaccctacgttagcaggatcaccaatccctttaatggtattgcgctgtacgccaacggagacacagcccgcgctaccgttaacttccccgcaagtcgcaactacaatttccgcctgcggggttgcggcaacaacaataatcttgcccgtgtggacctgaggatcgacggacggaccgtcgggaccttttattaccagggcacatacccctgggaggccccaattgacaatgtttatgtcagtgcggggagtcatacagtcgaaatcactgttactgcggataacggcacatgggacgtgtatgccgactacctggtgatacagtga

SEQ ID NO: 2755 - DNA, 2007 bp, Artificial Sequence
  Synthetic Construct, AS-69 intein modified protein encoding nucleic acids
atgcaaacaagcattactctgacatccaacgcatccggtacgtttgacggttactattacgaactctggaaggatactggcaatacaacaatgacggtctacactcaaggtcgcttttcctgccagtggtcgaacatcaataacgcgttgtttaggaccgggaagaaatacaaccagaattggcagtctcttggcacaatccggatcacgtactctgcgacttacaacccaaacgggaactcctacttgtgtatctatggctggtctaccaacccattggtcgagttctacatcgttgagtcctgggggaactggagaccgcctggtgccacgtccctgggccaagtgacaatcgatggcgggacctacgacatctataggacgacacgcgtcaaccagccttcgctcgcctgctctactcctattctgactacaaatgggtggtcaactatgggggctctccaggacggggatgaggtctacgcgcctgacggccagcctaccaaggtcatcaaggcccaccccattaacctcaataggccatgcttcaaggtccggttccgcgacggccaggaggtggtcacggatgcggagcatctgtggcaggtgaacgaccggaacaatggcgggagggatcgggtcatgaccacgcaggagatcgctgacgctccatggggcgggcgctacaggttccgggtcccagttaccgagcctctccagacgccagaggctgacctgccagtggatccatggctcctgggcgcttggctcggcgacggggatgcctcgatggtctctatctgctccggcagccaggacctcgattacctgatttctagggtcgagggcctcgggctgtcacacagggttaaccgctacggctcacgcgccgcttccgtctacgtgcatggcatgagggctgtgttctcggagctcgggctcctgaagaataagcacatccccgacaggtacctgaccgcttctgtcgctcagaggaggcagctcctggctggcctgatggacagcgatgggacagtttcggatcgccaagtgactattagcatgaagaacgagaggctcatgaggcaggtgctccagctggtccggtccctgggctacagggctggcttcgggagccgcatggctaggctcaatggcagggactgcgggctggtctacgtggtgcgcttccatacaggctggggggagtcgcccttcgacatgccacgcaagagggatggctgggagcaggcgacaaagacttccgttcagaacctccggctgaatgccatcgttgcggtggagcctgtcgagaccgtcccggttcgctgcattactgttgctcatgagtcttcgctctacgttgctggggaggggttcgttcctacacataattccattgtggggacagccacgttcgatcagtactggagcgtgcgcacctctaagcggacttcaggaacagtgaccgtgaccgatcacttccgcgcctgggcgaaccggggcctgaacctcggcacaatagaccaaattacattgtgcgtggagggttaccaaagctctggatcagccaacatcacccagaacaccttctctcagggctcttcttccggcagttcgggtggctcatccggctccacaacgactactcgcatcgagtgtgagaacatgtccttgtccggaccctacgttagcaggatcaccaatccctttaatggtattgcgctgtacgccaacggagacacagcccgcgctaccgttaacttccccgcaagtcgcaactacaatttccgcctgcggggttgcggcaacaacaataatcttgcccgtgtggacctgaggatcgacggacggaccgtcgggaccttttattaccagggcacatacccctgggaggccccaattgacaatgtttatgtcagtgcggggagtcatacagtcgaaatcactgttactgcggataacggcacatgggacgtgtatgccgactacctggtgatacagtga

SEQ ID NO: 2756 - DNA, 2322 bp, Artificial Sequence
  Synthetic Construct, AS-70 intein modified protein encoding nucleic acids
atgcaaacaagcattactctgacatccaacgcatccggtacgtttgacggttactattacgaactctggaaggatactggcaatacaacaatgacggtctacactcaaggtcgcttttcctgccagtggtcgaacatcaataacgcgttgtttaggaccgggaagaaatacaaccagaattggcagtctcttggcacaatccggatcacgtactctgcgacttacaacccaaacgggaactcctacttgtgtatctatggctggtctaccaacccattggtcgagttctacatcgttgagtcctgggggaactggagaccgcctggtgccacgtccctgggccaagtgacaatcgatggcgggacctacgacatctataggacgacacgcgtcaaccagccttgcgttaagaatgattcgctgattttcactgatcgggggctggtcactgcggcggagctcgctgtcggggttcctgaggagcatgcggccttcacggaggttggcgtggacacatccactgggagggcgaccacgaacgctgtgtacaatggcgggaggagcccaaccaagagggctaggctcgccctgggctacgagctggaggcgacgccagagcacccaatcagggttctcagggacgatgcgctggcttgggtgcggatggacgagctccatgtcggcgatcgcgttgctctgaggaggggctcggaagtgtgggggcgctccagcctgccagaggcgttcaggtgggtcaagcctaagtacgccgcgaacctcaagctgccaaagggcctcgtgctggacgaggtcgctgctgaggcttgcggcctcctggtctccgaggggaccctcacgaagcgcctggttacagagttcactaacgccgacgcggataatgtgggcttcatctcgcgctgggcggcttctatcggcattgacctctcaaggaacgggagcgattcgattcagtacctcctgtgctccgtggtcctcagggagtggctggcttggctcggcctggactacaccagggccgctgggaagtgcatcccgcgggcggtccgcttcggcgggagggacattatgagggcgttcctcaggggcctgttcgacggggatgcttctgtcgatcccctcaagggcgttatcgagttctgcacagcctcagagaggatggcgcgggaggtccaggttgctctcctgggcctcgggattctggcttctcgccactcaaggactgtggccggctacgagcagctgtactggcgggtgaccgtcaacgacgtggccacgttcgagagggaggtcggcttctcgtctaactggaataggctcaggctgagggaggctgtggcgcgggcagagggcaggtgccggaacccgaatgttgatacagtgcccatcaacgggctcgtcgagaggctgtacaggactgcccagaagcagctctcctggtcatcccaggagggccgcatcttcgggaattacgtgcacggcgagcatgctccaagcagggctgctctggagaggatggtccagcgctgggggtcggagtgcccaaccgagtgcctccctatcgaggccttcctggagctgcctgttgccttcctgtccgtggagagcattgaggacggcgaggcggatgtcgtggatctctcagttccagagacgcatgagttcgttgctaatggggtcgtttgccataattccattgtggggacagccacgttcgatcagtactggagcgtgcgcacctctaagcggacttcaggaacagtgaccgtgaccgatcacttccgcgcctgggcgaaccggggcctgaacctcggcacaatagaccaaattacattgtgcgtggagggttaccaaagctctggatcagccaacatcacccagaacaccttctctcagggctcttcttccggcagttcgggtggctcatccggctccacaacgactactcgcatcgagtgtgagaacatgtccttgtccggaccctacgttagcaggatcaccaatccctttaatggtattgcgctgtacgccaacggagacacagcccgcgctaccgttaacttccccgcaagtcgcaactacaatttccgcctgcggggttgcggcaacaacaataatcttgcccgtgtggacctgaggatcgacggacggaccgtcgggaccttttattaccagggcacatacccctgggaggccccaattgacaatgtttatgtcagtgcggggagtcatacagtcgaaatcactgttactgcggataacggcacatgggacgtgtatgccgactacctggtgatacagtga

SEQ ID NO: 2757 - DNA, 2289 bp, Artificial Sequence
  Synthetic Construct, AS-71 intein modified protein encoding nucleic acids
atgcaaacaagcattactctgacatccaacgcatccggtacgtttgacggttactattacgaactctggaaggatactggcaatacaacaatgacggtctacactcaaggtcgcttttcctgccagtggtcgaacatcaataacgcgttgtttaggaccgggaagaaatacaaccagaattggcagtctcttggcacaatccggatcacgtactctgcgacttacaacccaaacgggaactcctacttgtgtatctatggctggtctaccaacccattggtcgagttctacatcgttgagtcctgggggaactggagaccgcctggtgccacgtccctgggccaagtgacaatcgatggcgggacctacgacatctataggacgacacgcgtcaaccagccttgcctcccagcctcaacgcggattctcagggcggacactggcgcggagtcaactctcggggagctgctggcctcgggggagcagcctctcgtttggtccctggacgagaggatgaggatggtcgctaggccgatggttaaggtgttcccctcgggcaggaaggaggtgttcaggctgaggctcgcttctgggagggaggtcgaggctaccggcaaccacccgttcctcacggtggacgggtggatcccactggataggctcacagtcggcgacaggctggctactccaaggagcgtgccagagcccgtccacacagagaggatggccgatgcggaggtggtcctcctggctcacatgatcggcgacgggtcgtgcgtccgcaggcagcccgttcgctacgcctccattgacgagcagaatctcgctgcggtgagcgaggctgctgagcatttcggcgtgacggcggtcagggacgattacgctgctgcccgcgtcaccacgctgaggctcccagctccttacaggctgtcacgcggcaagaggaacccaattgcggcttggctcgatgagctgggcctcttcgggctgaggtcccacgagaagttcatcccacggcgcgtcttcgctctccctaatgaccaggttgccctgttcctccgccatctgtgggccacagatggctccgtgaggtgggacagcacttacaggcaggcgcgcgtctactacacatccactagcaggcggctcatcgacgatgtggcgcagctcctgctcaggctgggcgttcacgggcgcattcgcagggtgaccaagccagggtacagggacgcttggcatctcaccatcgacggcgctgataaccagacggtgttcctgagggatgtcggcgttcacggggcccggggcgacgctgctcaggtggctctggctgagctggagccactggtccggaacaccaatgttgacacggtgcctaacgaggtttggaatcaggtgcgccacctgctcgcgacaaagaacattactcatcgcgagttctcggctgccatggggtctaggttctgcggctcaaccatgtggaagaggtcgccctctcgctcaaggctcgcccgcgtcgctgctgttctggacgatgcggatatcgagatgtacgctaccaatgacgtgttctgggataagatcgtcgagattacgtctctcggcgagcaggacgtgtacgatggcactgttccaggcactcataacttcgttgctcagtctatctctgttcataattccattgtggggacagccacgttcgatcagtactggagcgtgcgcacctctaagcggacttcaggaacagtgaccgtgaccgatcacttccgcgcctgggcgaaccggggcctgaacctcggcacaatagaccaaattacattgtgcgtggagggttaccaaagctctggatcagccaacatcacccagaacaccttctctcagggctcttcttccggcagttcgggtggctcatccggctccacaacgactactcgcatcgagtgtgagaacatgtccttgtccggaccctacgttagcaggatcaccaatccctttaatggtattgcgctgtacgccaacggagacacagcccgcgctaccgttaacttccccgcaagtcgcaactacaatttccgcctgcggggttgcggcaacaacaataatcttgcccgtgtggacctgaggatcgacggacggaccgtcgggaccttttattaccagggcacatacccctgggaggccccaattgacaatgtttatgtcagtgcggggagtcatacagtcgaaatcactgttactgcggataacggcacatgggacgtgtatgccgactacctggtgatacagtga

SEQ ID NO: 2758 - DNA, 1953 bp, Artificial Sequence
  Synthetic Construct, AS-72 intein modified protein encoding nucleic acids
atgcaaacaagcattactctgacatccaacgcatccggtacgtttgacggttactattacgaactctggaaggatactggcaatacaacaatgacggtctacactcaaggtcgcttttcctgccagtggtcgaacatcaataacgcgttgtttaggaccgggaagaaatacaaccagaattggcagtctcttggcacaatccggatcacgtactctgcgacttacaacccaaacgggaactcctacttgtgtatctatggctggtctaccaacccattggtcgagttctacatcgttgagtcctgggggaactggagaccgcctggtgccacgtccctgggccaagtgacaatcgatggcgggacctacgacatctataggacgacacgcgtcaaccagccttgcttccctgcgggcacagtcgtttcggggccatcggcggaggcggctacaaggcgctggttcgagggggagctggtcgttttcactaccgctagcgggaagcagctctcgctgaccggcaaccacccagtgctcacgcgcggcgggtgggtccccgccaacctcctgaatgagggcgacgaggtggtcaggtcgacaaggccacagggcgctactccactcgttgtgcctgaccaccatcaggtgccggcgctgatcgaggatgtctgggggagcttcgctgttaatggcctccacagggtgccagctgctcctgaggacttccatggggatggccagaggggggaggtcgacatcgttggcccagatcggaccctgtggtgcggccacgacgctgctattgctcagcagcgggagcagcagttcttcacccgcaggacggagtccagcggcctcctggtggctgagtccgtcgctcagctcgttgacctgtggcaggctccacactctggctcgtctatcgggcgctcaggcctcccattcgctctgattggcgggcatggcgggggccctgtcgagaggggcctcacggttgctgctgggggctacccaggcctccatgaggccctggcggactaccggcccggcgatgctgtgctgccaccacagggggtcttcgctggctcatccgagatcgggggcgacgattgcgtgattggcaaggtcgactccacacgctgggatgctccagctctccccttcctggtggaggggagggcgggctacgctagcagggggaaggagctcttcgaccggctgactggccaggtcgagctcgatcgcatcgttattctgcggcgcgtgcagtggtccggccacgtcttctcgctcacaagctcagaggggtggcatacgggcaactcgctcatcgtctctaattccattgtggggacagccacgttcgatcagtactggagcgtgcgcacctctaagcggacttcaggaacagtgaccgtgaccgatcacttccgcgcctgggcgaaccggggcctgaacctcggcacaatagaccaaattacattgtgcgtggagggttaccaaagctctggatcagccaacatcacccagaacaccttctctcagggctcttcttccggcagttcgggtggctcatccggctccacaacgactactcgcatcgagtgtgagaacatgtccttgtccggaccctacgttagcaggatcaccaatccctttaatggtattgcgctgtacgccaacggagacacagcccgcgctaccgttaacttccccgcaagtcgcaactacaatttccgcctgcggggttgcggcaacaacaataatcttgcccgtgtggacctgaggatcgacggacggaccgtcgggaccttttattaccagggcacatacccctgggaggccccaattgacaatgtttatgtcagtgcggggagtcatacagtcgaaatcactgttactgcggataacggcacatgggacgtgtatgccgactacctggtgatacagtga

SEQ ID NO: 2759 - DNA, 2241 bp, Artificial Sequence
  Synthetic Construct, AS-73 intein modified protein encoding nucleic acids
atgcaaacaagcattactctgacatccaacgcatccggtacgtttgacggttactattacgaactctggaaggatactggcaatacaacaatgacggtctacactcaaggtcgcttttcctgccagtggtcgaacatcaataacgcgttgtttaggaccgggaagaaatacaaccagaattggcagtctcttggcacaatccggatcacgtactctgcgacttacaacccaaacgggaactcctacttgtgtatctatggctggtctaccaacccattggtcgagttctacatcgttgagtcctgggggaactggagaccgcctggtgccacgtccctgggccaagtgacaatcgatggcgggacctacgacatctataggacgacacgcgtcaaccagccttgcttccctgcgggcacaccagtggacactatcgatgggccaaagcctattgagtcgctgcgggctggggatcgggttctctcgcatgacggctcgtacgccacggtggagaagctgatcgagaacacaaatgatcagccactcgtctccattagccacttcggccataaggagcctatcaggtgcacgccggagcaccccattctggtgtggacggaccgggatgtcgagacactcatcgacggcgatggggctgacccgttcaacggcttcgtgtggctggctgctcaggacgtccatccatccgatttcattgttgctactgctccactggagacccgcgagaggagggtgttcgacctcatgaatcacgtcggcgaggggacgtacgaggaggttgacggcctgatccggaaggtgaacacagatgcgaggcatcggaataagcagcgccacaggcagggcttcgtcgctgttacccgctacgtggaggagagctacgacctcggcctgatcctcgggtggtacctcgccgagggccatgtctcgaagcgctctggggttgaggatgtgaggccaacgggcgtgcatttcacactgggggctaacgagattgagaggcacgtcgagctcggcatggccttcaagcaggtcttcggcgttgacctggtgctccacactaaccattcagatcactccaccaggatggtttgcaattctaagatcgtggctagcctcctgctctcgctggctggcacggggtactcaacaaagcggctcgcgcacgaggtcatgaccgctgacgaggatttccagaggggcctgctcgtcgggctcttccgcggcgacgggtgcaccacgacaggcgggatggtcctggacctcgttaaccaggagctgatcgatcaggtccagctgctcctgaggaggctcggcattgttagcgtggtccgcacgtacacaaaccaggctggcaatccgactgggcaggtgttcgtcccaggcctgcctgggaccaacgaggagttcatcttcgacgtggataagaacctccagaattacactggcaggaaggggaccaagcggactacctaccaggttgtgcatggccgccacgtctacgggattcgggctgttgagaggactggcgagaccccaaggcaggtctacaatctgcatgtggagggcactcatacttacactattaggggggctgtggttcataactccattgtggggacagccacgttcgatcagtactggagcgtgcgcacctctaagcggacttcaggaacagtgaccgtgaccgatcacttccgcgcctgggcgaaccggggcctgaacctcggcacaatagaccaaattacattgtgcgtggagggttaccaaagctctggatcagccaacatcacccagaacaccttctctcagggctcttcttccggcagttcgggtggctcatccggctccacaacgactactcgcatcgagtgtgagaacatgtccttgtccggaccctacgttagcaggatcaccaatccctttaatggtattgcgctgtacgccaacggagacacagcccgcgctaccgttaacttccccgcaagtcgcaactacaatttccgcctgcggggttgcggcaacaacaataatcttgcccgtgtggacctgaggatcgacggacggaccgtcgggaccttttattaccagggcacatacccctgggaggccccaattgacaatgtttatgtcagtgcggggagtcatacagtcgaaatcactgttactgcggataacggcacatgggacgtgtatgccgactacctggtgatacagtga

SEQ ID NO: 2760 - DNA, 2031 bp, Artificial Sequence
  Synthetic Construct, AS-74 intein modified protein encoding nucleic acids
atgcaaacaagcattactctgacatccaacgcatccggtacgtttgacggttactattacgaactctggaaggatactggcaatacaacaatgacggtctacactcaaggtcgcttttcctgccagtggtcgaacatcaataacgcgttgtttaggaccgggaagaaatacaaccagaattggcagtctcttggcacaatccggatcacgtactctgcgacttacaacccaaacgggaactcctacttgtgtatctatggctggtctaccaacccattggtcgagttctacatcgttgagtcctgggggaactggagaccgcctggtgccacgtccctgggccaagtgacaatcgatggcgggacctacgacatctataggacgacacgcgtcaaccagccttgcgtggacggggacacaagcgttactctcgcctcgggggatgagaagcctattcgggacatcgtggagtcaacactggaggatccgacagagatcagcgacggcttctaccaggagtcggacattgatgtgctcaccacggatggcggggctgtcgctccaggcagggctaccaaggtttggaagcggcaggctcccgagaagatgtacaggatccggacagagtccggcagggagctggaggtcactccaagccaccccctgttcgtgcagtcagagggcgggctctccccactggtcgctgacgatctcagcgagaacgacttcgtggctgtcccgagggcgctgccagctgacgatggcgacgatttcgggcagcatgtggacgatctgggctccgtcaccgctcggaagacggctgacgctgaggccgtgcgctccgaggacgccgcgacaactccagatgttatccctaacgtgggcgaccagctccgcaggattcgcacctcgctcaggctgtctcagcacgactgcggcctgccaaggtcgacgtaccagcagtacgagaggggggaccggaatccttcgcgctctaggctccagacagtcctgactgcgttcgagcggcgcatcgagcagctctccagcctgtctgacagggtggacgatggcgactcagatgccattgctgccgcgcgggacgagctcaatccatcacaggcttccctggctagcggcatggatgctaccaggacggctatcggggacgatgagaggacggaggctaggccagacggcggggcggttgctgatgctgagagggctgtggctgacgctctctgcagggcgctggctgtcgccgacgatgttgagaggctcaggtcgctggctgacggcgatatcgggtgggacaggatcgattctattgagccagtcgagcctgaggacgagtgggtttacgatctggaggtggagagcacacactcatacctctctaatgatgttgtttcgcataattccattgtggggacagccacgttcgatcagtactggagcgtgcgcacctctaagcggacttcaggaacagtgaccgtgaccgatcacttccgcgcctgggcgaaccggggcctgaacctcggcacaatagaccaaattacattgtgcgtggagggttaccaaagctctggatcagccaacatcacccagaacaccttctctcagggctcttcttccggcagttcgggtggctcatccggctccacaacgactactcgcatcgagtgtgagaacatgtccttgtccggaccctacgttagcaggatcaccaatccctttaatggtattgcgctgtacgccaacggagacacagcccgcgctaccgttaacttccccgcaagtcgcaactacaatttccgcctgcggggttgcggcaacaacaataatcttgcccgtgtggacctgaggatcgacggacggaccgtcgggaccttttattaccagggcacatacccctgggaggccccaattgacaatgtttatgtcagtgcggggagtcatacagtcgaaatcactgttactgcggataacggcacatgggacgtgtatgccgactacctggtgatacagtga

SEQ ID NO: 2761 - DNA, 2490 bp, Artificial Sequence
  Synthetic Construct, AS-75 intein modified protein encoding nucleic acids
atgcaaacaagcattactctgacatccaacgcatccggtacgtttgacggttactattacgaactctggaaggatactggcaatacaacaatgacggtctacactcaaggtcgcttttcctgccagtggtcgaacatcaataacgcgttgtttaggaccgggaagaaatacaaccagaattggcagtctcttggcacaatccggatcacgtactctgcgacttacaacccaaacgggaactcctacttgtgtatctatggctggtctaccaacccattggtcgagttctacatcgttgagtcctgggggaactggagaccgcctggtgccacgtccctgggccaagtgacaatcgatggcgggacctacgacatctataggacgacacgcgtcaaccagccttcaattcctgcggatgagcaggtcgtggttaggcgcaatggggagacggagctgacggagatcggccctctcgtggattcgctgatggattctcgcgagaccaggtcattcgacgatcacgaggtcacgctcgctccagacggcatcgaggttccctctctgtccagcgaggagaccgttgagtggaagccgattgaggaggtgtcacgccacgagacgccagacgagctcctgaggttcgagctggagtcgggcaggtctatcagggctaccaaggctcattctttcgtcacgcgccaggagaacgaggtggtcccagttgctggggaggagctggaggctggcgactggctccctgttgtggcttcgctggacgccaccgatacgcaggagacagtggacctgaggaagtacctcccggcgggcgattactggtacacttccgtgctcgccgacggcggggctgaggctgtcccaggcgggcccgaccagctgaggaacaagagggctgctctggaggctggcgagctcgctgagcacacagcttacccagtgcagggcactgtcgggctcccagagcagttccctctggacgaggagaccgggttcttcgtgggcgcttggctggctgagggcagcctcgcggatcattacgtttccatcagcaatgtggacgctgccttccagagccgcattaggtcgttcgccgagcgcttcgatctcacggtcaacgagtacgagaatgactccgggttcgcggctggctacgatatccggctgaacggcaccattctgagcgacttcctcagggctgcttgcacggacgatggcgagaagtcgatccccgggttcgctattggcgccaatgaggcgttcctcaaggggctcctgcagggctacttctccggcgatgggaacgtgggcaccaatgcgatcaggtcgtcttcaacaagcgacaggctgactgctggcgttgggctcctgctcgctaggttcgatgtgtacgccacactcggccagcaggaggactcacgcactctgagggtcccaaagaagcacgtttcccggttcgacaaccgcatcggcatggtcggggagaggggcgctgagctggaggctctcgctgagtcagctgactccgatgggccagacgctacagatcagatccctaacttcggcgatgctctggaggctgtggctgaggctgctgacatcccacagaggcaggtcaattcggccacgaagcggcagcgcattgacaggtctcggctggctaggctcgtggctgctgctgaggccgagctggacggggagcagtccgagctggatgcgctcaggcaggctgtcacaggcgacgtcgtttgggatcggatcgagtccattgagactgtggagagcgaccatgagtatgtgtacgatgtttcagtggaggggctggagactttcacaactgcggatggggtcgttactcataattccattgtggggacagccacgttcgatcagtactggagcgtgcgcacctctaagcggacttcaggaacagtgaccgtgaccgatcacttccgcgcctgggcgaaccggggcctgaacctcggcacaatagaccaaattacattgtgcgtggagggttaccaaagctctggatcagccaacatcacccagaacaccttctctcagggctcttcttccggcagttcgggtggctcatccggctccacaacgactactcgcatcgagtgtgagaacatgtccttgtccggaccctacgttagcaggatcaccaatccctttaatggtattgcgctgtacgccaacggagacacagcccgcgctaccgttaacttccccgcaagtcgcaactacaatttccgcctgcggggttgcggcaacaacaataatcttgcccgtgtggacctgaggatcgacggacggaccgtcgggaccttttattaccagggcacatacccctgggaggccccaattgacaatgtttatgtcagtgcggggagtcatacagtcgaaatcactgttactgcggataacggcacatgggacgtgtatgccgactacctggtgatacagtga

SEQ ID NO: 2762 - DNA, 1980 bp, Artificial Sequence
  Synthetic Construct, AS-76 intein modified protein encoding nucleic acids
atgcaaacaagcattactctgacatccaacgcatccggtacgtttgacggttactattacgaactctggaaggatactggcaatacaacaatgacggtctacactcaaggtcgcttttcctgccagtggtcgaacatcaataacgcgttgtttaggaccgggaagaaatacaaccagaattggcagtctcttggcacaatccggatcacgtactctgcgacttacaacccaaacgggaactcctacttgtgtatctatggctggtctaccaacccattggtcgagttctacatcgttgagtcctgggggaactggagaccgcctggtgccacgtccctgggccaagtgacaatcgatggcgggacctacgacatctataggacgacacgcgtcaaccagccttgcttcatcggggatactctcattccgctcgctgacggcaagtcttaccgcatcaaggatctcatggactgggggacggagttcatcgtttacgcgtgcaccccaacgggcaagattgtggctgctcaggctaccgctaagctcacgaggaggaacgctccactcgtgaaggtcatcctggacaatggcgaggagatcatttgcacacccgaccaccagttcatgctgcgggatgggacttacaaggaggcccagctcctgcaggcggagacatcactcatgccattctactccaagactgacaaggatggctacacactgattactcagccttactccagcaggtggcagaaggctcactggatcattgctaggtctggcctcctggggaaggtgccaaggttcgagggccagaagacgttcatccaccatcagaacttcgacgagagcgataaccgccccgagaacctggagttcatgggcaacagggaccactcggcgtaccatcgctctctggtggagaggaatcagcactggcattccgctgagttcgaggagaagagggtcgctagcctcgctcagaaggctaagacctcggagggctaccagtactacgccgagagggggacgcggaacatcttccagtacatggagcagcagccagagcacttcaagaatgcggtcgctggcaacgggaataggggcaagcagtacctcgttgagtacaacaagacagagaagggcagggggaagtcgcaggagatcgcgaaccggtactacacctgcgagatttgcggcgtcgacgttaagacgcccatcgggctgcacaaccatcggcgcaaggagcaccagtgcaatcataaggtggtcgccgtgaacctcctgaattacaccgaggatgtctactgcctcactgttccggagtaccacaacttcgctctcaaggctggggtcttcgttcataattccattgtggggacagccacgttcgatcagtactggagcgtgcgcacctctaagcggacttcaggaacagtgaccgtgaccgatcacttccgcgcctgggcgaaccggggcctgaacctcggcacaatagaccaaattacattgtgcgtggagggttaccaaagctctggatcagccaacatcacccagaacaccttctctcagggctcttcttccggcagttcgggtggctcatccggctccacaacgactactcgcatcgagtgtgagaacatgtccttgtccggaccctacgttagcaggatcaccaatccctttaatggtattgcgctgtacgccaacggagacacagcccgcgctaccgttaacttccccgcaagtcgcaactacaatttccgcctgcggggttgcggcaacaacaataatcttgcccgtgtggacctgaggatcgacggacggaccgtcgggaccttttattaccagggcacatacccctgggaggccccaattgacaatgtttatgtcagtgcggggagtcatacagtcgaaatcactgttactgcggataacggcacatgggacgtgtatgccgactacctggtgatacagtga

SEQ ID NO: 2763 - DNA, 2070 bp, Artificial Sequence
  Synthetic Construct, AS-77 intein modified protein encoding nucleic acids
atgcaaacaagcattactctgacatccaacgcatccggtacgtttgacggttactattacgaactctggaaggatactggcaatacaacaatgacggtctacactcaaggtcgcttttcctgccagtggtcgaacatcaataacgcgttgtttaggaccgggaagaaatacaaccagaattggcagtctcttggcacaatccggatcacgtactctgcgacttacaacccaaacgggaactcctacttgtgtatctatggctggtctaccaacccattggtcgagttctacatcgttgagtcctgggggaactggagaccgcctggtgccacgtccctgggccaagtgacaatcgatggcgggacctacgacatctataggacgacacgcgtcaaccagcctgctctcgctctggataccgctctccctacgccttcggggtggactactatgggggacgttcaggttggggatcagctctacgatgcgcacggcaggccaaccacggtggtcgctgctaccgaggtgctcacggggaggccttgctacgaggtcgagttctcagacggctcccgcatcgttgccgatgcgcagcatcagtggctgaccgagtctagggctgctcggaagtcacgctgggctgctgacaagcagtacaaccgcgccaggaaccagaatatcgtcgcgagcgttgtgacaactgaggctattgctgggaccctcagggtgggcgctgaccagagggccaatcacgctgtcctcacggctgatccactgtccggcagcgacgtcgatctgccaatcccaccctacgttctcggcgcttggctgggcgacgggcactcggcgtctgctaggatcacctgcgagacgccagagattcctatgtacctggaggcttgcgggctgagggtcgaccatcagggcgcgatgctctactccctgaagttcccagacggcgatccgaggggcagcgtccagggcgttctcaggaccatcggcgtgctgaacgacaagcacattccagcggattacctcagggcttccgagggccagaggagggacctcctggctgggctgatggacacagatggcactgtcgttaggggcgttgggtcgtgccagttcgctgtgacaaacaagcggctcgcggacgatgtctacgagctcgtggtctctctggggtacaagtgcggcaggaccacgaggagggtgcagggcaggagcccagagacatcgacttgccatatcctcaatttctcgacggtggacgatgtcttcaggctggagcggaagcacctcctgcataaggaggagaggccagtgacacgggctaggatcgccaggcggtacattactgccgttcgcccaattgagtccgttcctgtgaggtgcgtggaggttgataatacagagcatctctacctcgccggggagagcatgattccaactcataattccattgtggggacagccacgttcgatcagtactggagcgtgcgcacctctaagcggacttcaggaacagtgaccgtgaccgatcacttccgcgcctgggcgaaccggggcctgaacctcggcacaatagaccaaattacattgtgcgtggagggttaccaaagctctggatcagccaacatcacccagaacaccttctctcagggctcttcttccggcagttcgggtggctcatccggctccacaacgactactcgcatcgagtgtgagaacatgtccttgtccggaccctacgttagcaggatcaccaatccctttaatggtattgcgctgtacgccaacggagacacagcccgcgctaccgttaacttccccgcaagtcgcaactacaatttccgcctgcggggttgcggcaacaacaataatcttgcccgtgtggacctgaggatcgacggacggaccgtcgggaccttttattaccagggcacatacccctgggaggccccaattgacaatgtttatgtcagtgcggggagtcatacagtcgaaatcactgttactgcggataacggcacatgggacgtgtatgccgactacctggtgatacagtga

SEQ ID NO: 2764 - DNA, 2235 bp, Artificial Sequence
  Synthetic Construct, AS-78 intein modified protein encoding nucleic acids
atgcaaacaagcattactctgacatccaacgcatccggtacgtttgacggttactattacgaactctggaaggatactggcaatacaacaatgacggtctacactcaaggtcgcttttcctgccagtggtcgaacatcaataacgcgttgtttaggaccgggaagaaatacaaccagaattggcagtctcttggcacaatccggatcacgtactctgcgacttacaacccaaacgggaactcctacttgtgtatctatggctggtctaccaacccattggtcgagttctacatcgttgagtcctgggggaactggagaccgcctggtgccacgtccctgggccaagtgacaatcgatggcgggacctacgacatctataggacgacacgcgtcaaccagccttgcctccctgaggatgcgctggttcataccgctaaggggctggtccctattcgggatgttcaggtcggggatctcgttcagacaccgctcggcttccgcagggtggtcgacaagttcgatcagggcttccaggacgtgtacgagatcgagactaacgcgacctacccacgcgctacgctcaatcacaggcaggctgtcctggaggacgctaagggcgggatcgtttggaagcatattgcttcgctggaggccggcgataggctcctgcacaacaagcaggtcctcccgggcactgttacccatctgcccgcggacttcactgagagcaggccatcacactcccggaccgccaagtcgttcgttgtgcctgagctcacggctgaggtggcttggctgatcggcttcacacatggcgacggctacgtggctctcggcaggaacaagtacgataagccgtacgggcgggttgagtggtccatgaactccctggacgctgaggtcacctcccgcatccaggctaagattgatgctgctctcgctctgttcggcctctccgctgtccacagcatcacgaagggcgagaacacagctaagagcatctgctccagcattcggctggccgagtacttccaccgccatatcaagcagccaaatattcctctcactgtgccgtcattcatcctgcagggctccgtcgacattagggctgcttacctcgctggcctgatggactccgatggggctgtgaacaataggccaccacacctcatcacatcggtgtaccggtctttcattcgccaggtctcggtcgttctctcgtctctgggcatcgccgggaggctgaccacgacatacccccagaactctaattggcaggtcaagtacaacctcacgatcccggcgctgaaggagcgctacaatgctctcatttctccccattcagccaagggcgagctcaggcaggggctgaagatgtacggcttcacggttccaggggccgtgatgcgggagacgtacacatactctgagatgagggagatgggcttccaggggtcacggacagttgacgccaactacgagcgctacgtggcggaggctgacatctccctcgatattcctgtgactgtcaagggcctggggagctacgatcacgtgcagacctacgacattgaggttgatgaggctcattgcttctactgcgatggctacctcacacataattccattgtggggacagccacgttcgatcagtactggagcgtgcgcacctctaagcggacttcaggaacagtgaccgtgaccgatcacttccgcgcctgggcgaaccggggcctgaacctcggcacaatagaccaaattacattgtgcgtggagggttaccaaagctctggatcagccaacatcacccagaacaccttctctcagggctcttcttccggcagttcgggtggctcatccggctccacaacgactactcgcatcgagtgtgagaacatgtccttgtccggaccctacgttagcaggatcaccaatccctttaatggtattgcgctgtacgccaacggagacacagcccgcgctaccgttaacttccccgcaagtcgcaactacaatttccgcctgcggggttgcggcaacaacaataatcttgcccgtgtggacctgaggatcgacggacggaccgtcgggaccttttattaccagggcacatacccctgggaggccccaattgacaatgtttatgtcagtgcggggagtcatacagtcgaaatcactgttactgcggataacggcacatgggacgtgtatgccgactacctggtgatacagtga

SEQ ID NO: 2765 - DNA, 1506 bp, Artificial Sequence
  Synthetic Construct, AS-79 intein modified protein encoding nucleic acids
atgcaaacaagcattactctgacatccaacgcatccggtacgtttgacggttactattacgaactctggaaggatactggcaatacaacaatgacggtctacactcaaggtcgcttttcctgccagtggtcgaacatcaataacgcgttgtttaggaccgggaagaaatacaaccagaattggcagtctcttggcacaatccggatcacgtactctgcgacttacaacccaaacgggaactcctacttgtgtatctatggctggtctaccaacccattggtcgagttctacatcgttgagtcctgggggaactggagaccgcctggtgccacgtccctgggccaagtgacaatcgatggcgggacctacgacatctataggacgacacgcgtcaaccagccttgcgtggattacgagactgaggtcgtgctggggaatggggagcggaagaagatcggggagatcgtggagcgggctattgaggaggctgagaagaacggcaagctcgggcgggttgacgatggcttctacgctccgatcgacattgaggtctactcgctcgatctggagaccctcaaggttcggaaggcgcgggcaaatatcgcgtggaagcgcacagctccaaagaagatgatgctggtgaagactaggggcgggaagcgcattagggtcaccccgacgcaccccttcttcgttctggaggagggcaaggtggctatgaggaaggcccgggacctggaggagggcaacaagatcgccacgattgaggggctctccgtgagctgggacgaggtcgcggagatcctggagtacgagccaaaggatccttgggtctacgatctgcaggttccaggctaccacaacttcctcgctaatggcatcttcgttcataattccattgtggggacagccacgttcgatcagtactggagcgtgcgcacctctaagcggacttcaggaacagtgaccgtgaccgatcacttccgcgcctgggcgaaccggggcctgaacctcggcacaatagaccaaattacattgtgcgtggagggttaccaaagctctggatcagccaacatcacccagaacaccttctctcagggctcttcttccggcagttcgggtggctcatccggctccacaacgactactcgcatcgagtgtgagaacatgtccttgtccggaccctacgttagcaggatcaccaatccctttaatggtattgcgctgtacgccaacggagacacagcccgcgctaccgttaacttccccgcaagtcgcaactacaatttccgcctgcggggttgcggcaacaacaataatcttgcccgtgtggacctgaggatcgacggacggaccgtcgggaccttttattaccagggcacatacccctgggaggccccaattgacaatgtttatgtcagtgcggggagtcatacagtcgaaatcactgttactgcggataacggcacatgggacgtgtatgccgactacctggtgatacagtga

SEQ ID NO: 2766 - DNA, 1818 bp, Artificial Sequence
  Synthetic Construct, AS-80 intein modified protein encoding nucleic acids
atgcaaacaagcattactctgacatccaacgcatccggtacgtttgacggttactattacgaactctggaaggatactggcaatacaacaatgacggtctacactcaaggtcgcttttcctgccagtggtcgaacatcaataacgcgttgtttaggaccgggaagaaatacaaccagaattggcagtctcttggcacaatccggatcacgtactctgcgacttacaacccaaacgggaactcctacttgtgtatctatggctggtctaccaacccattggtcgagttctacatcgttgagtcctgggggaactggagaccgcctggtgccacgtccctgggccaagtgacaatcgatggcgggacctacgacatctataggacgacacgcgtcaaccagccttgcgtcgcgcctgagacactgattattactgagaatgggacaaaggagatcggggaggtcgtggagcggtggatgaaggagctgggcgagatcgagtacgacgatggcatttcgtactctccggccttcgagaaggttgcgtccctgaacggcgggaaggtgaagatgctcccggtccgcagggtttggaagctgaggagcccaggcaagatgatcaagattcgctcagagtccgggaagcagatcaccgtcacgccagagacaaagctcctgactatcattgacggctcgctggagtgggtggaggctcgcaagctgaagaaggggaactacgttgcggtggtcaataaggagaggagcatcgtgcctattggcgacttcctcgctaagctcctgaagttctacggggtcgagctgaacctcaatgaggctgttgagcgcgaccaggccaggaagctcctggagaccctgaagtctaagggcctctcagatgtcacgatcgagattccagagaagctccggcgcttcatcaagtgcgaccgcgtgcgctacgtggatctggttgagatgctctccagcatggagggcgagctgaaggaggaggtcatgctcctgctctccgacgtgggggatatccacgaggtcattcaggagcggctgaaggagatcggcaagattctggagagcgacgcgtcgtgggagaggatcgctgaggtggaggaggttgtgcgggatggccatgtctacgatctcacagtggagggctctcattctttcattgctaatggcttcgtggttcataactccattgtggggacagccacgttcgatcagtactggagcgtgcgcacctctaagcggacttcaggaacagtgaccgtgaccgatcacttccgcgcctgggcgaaccggggcctgaacctcggcacaatagaccaaattacattgtgcgtggagggttaccaaagctctggatcagccaacatcacccagaacaccttctctcagggctcttcttccggcagttcgggtggctcatccggctccacaacgactactcgcatcgagtgtgagaacatgtccttgtccggaccctacgttagcaggatcaccaatccctttaatggtattgcgctgtacgccaacggagacacagcccgcgctaccgttaacttccccgcaagtcgcaactacaatttccgcctgcggggttgcggcaacaacaataatcttgcccgtgtggacctgaggatcgacggacggaccgtcgggaccttttattaccagggcacatacccctgggaggccccaattgacaatgtttatgtcagtgcggggagtcatacagtcgaaatcactgttactgcggataacggcacatgggacgtgtatgccgactacctggtgatacagtga

SEQ ID NO: 2767 - DNA, 2196 bp, Artificial Sequence
  Synthetic Construct, AS-81 intein modified protein encoding nucleic acids
atgcaaacaagcattactctgacatccaacgcatccggtacgtttgacggttactattacgaactctggaaggatactggcaatacaacaatgacggtctacactcaaggtcgcttttcctgccagtggtcgaacatcaataacgcgttgtttaggaccgggaagaaatacaaccagaattggcagtctcttggcacaatccggatcacgtactctgcgacttacaacccaaacgggaactcctacttgtgtatctatggctggtctaccaacccattggtcgagttctacatcgttgagtcctgggggaactggagaccgcctggtgccacgtccctgggccaagtgacaatcgatggcgggacctacgacatctataggacgacacgcgtcaaccagccttgcctcctccctgatgagaaggtcgtggttccctcggtcgggttcgtgacactcaaggagctgttcgagacggcttccaaggtcgtggagcgcgacgatgagaaggagatcagggagctcgacgagcggattaccagcgttaacggcgatgggaagacgggcctggtcaaggcctcctacgtgtggaaggttaggcacaagggcaaggtcatccgggtcaagctcaagaattggcacggcgttacagtgactccggagcatcccttcctcaccacgaaggggtggaagagggctgaccagctgaggccaggcgattacgtcgcggttcctaggttcatccatggcaacgaggacgagaagattttcctctcctacgtgaaggtcaagaagtctggcgaggagtggaaggagtacttctacctggcgggcaggaaggggaacatcgatgtcaatctcctgttcgttgctccaaagcgctacgtggtcgagttcctccgggggtacttcgaggagcgctccgaggtcaagggcgagagcgttatcgtggaggctcgggagctggtggagcctctcagcctggctctcctgaggttcggcatcttctctaagattcaggggtcaaagctcatcgtcaccggcaagcgcaacctggaggccttcaaggactacattggcttcaaggatgagagggagaaggccctggaggaggcgatcgagaaggtgaagggctccgaggtctacccgatcttcgaggagattcgcaggctccgcctcctgttcgggttcacaagggaggagctgggctcatacgctaagtacgagaactccgaggccccgacttacgaggagctcatggagatcctggacttcattgagagggggtcccccagcctctcgaagaagatcgcgattctggagggcaagctgaaggctgagctcagggtgctggaggaggagggcctgatcaaggacgggaagctcaccccactgggcagggagctcctggaggtctggcggaaccgcgagttcgattccaaggacgtcgattacatccggaacattgcggagacgctggtgttcatccccgttgagaatgtggaggaggaggagtacgacggctacgtttacgatctcactacggagactcataacttcattgctaatggcatcctcgttcataattccattgtggggacagccacgttcgatcagtactggagcgtgcgcacctctaagcggacttcaggaacagtgaccgtgaccgatcacttccgcgcctgggcgaaccggggcctgaacctcggcacaatagaccaaattacattgtgcgtggagggttaccaaagctctggatcagccaacatcacccagaacaccttctctcagggctcttcttccggcagttcgggtggctcatccggctccacaacgactactcgcatcgagtgtgagaacatgtccttgtccggaccctacgttagcaggatcaccaatccctttaatggtattgcgctgtacgccaacggagacacagcccgcgctaccgttaacttccccgcaagtcgcaactacaatttccgcctgcggggttgcggcaacaacaataatcttgcccgtgtggacctgaggatcgacggacggaccgtcgggaccttttattaccagggcacatacccctgggaggccccaattgacaatgtttatgtcagtgcggggagtcatacagtcgaaatcactgttactgcggataacggcacatgggacgtgtatgccgactacctggtgatacagtga

SEQ ID NO: 2768 - DNA, 1602 bp, Artificial Sequence
  Synthetic Construct, AS-82 intein modified protein encoding nucleic acids
atgcaaacaagcattactctgacatccaacgcatccggtacgtttgacggttactattacgaactctggaaggatactggcaatacaacaatgacggtctacactcaaggtcgcttttcctgccagtggtcgaacatcaataacgcgttgtttaggaccgggaagaaatacaaccagaattggcagtctcttggcacaatccggatcacgtactctgcgacttacaacccaaacgggaactcctacttgtgtatctatggctggtctaccaacccattggtcgagttctacatcgttgagtcctgggggaactggagaccgcctggtgccacgtccctgggccaagtgacaatcgatggcgggacctacgacatctataggacgacacgcgtcaaccagcctgcgctctactacttctctgagattcagctccctaacggcaaggagttcatcggcaagctcgtggatgagctgttcgagaagtaccatgacaagatcggcaagtacaaggatatggagtatgtggagctcaacgaggaggacacattcgaggtcatctcaattgggccagatctgtccgctaggaggcacaaagtgactcatgtctggcggcgcaaggttaaggacggcgagaagctcgtgaagatcaggaccgctagcgggaaggagctcgtgctgacgcaggaccacccggttttcgtgctcctgggcagggacgtcgctaggagggatgctggcaacgtcaaggttggggacgagattgcggtgctcaatacgcggcccgatttctcggtcctgtctccgcccgctatgccagagctcctgtctgagcctttcaattacgagctgtccagcatcggcgacgtcgcttgggatgaggtggtcgaggttgacgagattgatgccaagggcctcggggtggagtacctgtacgatctcacagtggatatcaatcataactacgttgctaatggcattgtcgtttctaattccattgtggggacagccacgttcgatcagtactggagcgtgcgcacctctaagcggacttcaggaacagtgaccgtgaccgatcacttccgcgcctgggcgaaccggggcctgaacctcggcacaatagaccaaattacattgtgcgtggagggttaccaaagctctggatcagccaacatcacccagaacaccttctctcagggctcttcttccggcagttcgggtggctcatccggctccacaacgactactcgcatcgagtgtgagaacatgtccttgtccggaccctacgttagcaggatcaccaatccctttaatggtattgcgctgtacgccaacggagacacagcccgcgctaccgttaacttccccgcaagtcgcaactacaatttccgcctgcggggttgcggcaacaacaataatcttgcccgtgtggacctgaggatcgacggacggaccgtcgggaccttttattaccagggcacatacccctgggaggccccaattgacaatgtttatgtcagtgcggggagtcatacagtcgaaatcactgttactgcggataacggcacatgggacgtgtatgccgactacctggtgatacagtga

SEQ ID NO: 2769 - DNA, 2013 bp, Artificial Sequence
  Synthetic Construct, AS-83 intein modified protein encoding nucleic acids
atgcaaacaagcattactctgacatccaacgcatccggtacgtttgacggttactattacgaactctggaaggatactggcaatacaacaatgacggtctacactcaaggtcgcttttcctgccagtggtcgaacatcaataacgcgttgtttaggaccgggaagaaatacaaccagaattggcagtctcttggcacaatccggatcacgtactctgcgacttacaacccaaacgggaactcctacttgtgtatctatggctggtctaccaacccattggtcgagttctacatcgttgagtcctgggggaactggagaccgcctggtgccacgtccctgggccaagtgacaatcgatggcgggacctacgacatctataggacgacacgcgtcaaccagccttgcttcagcggggaggagacagtcgttattcgggagaatggggaggtcaaggtgctcaggctcaaggatttcgtggagaaggctctggagaagccaagcggcgaggggctggacggcgatgtgaaggtggtctaccacgacttccgcaacgagaatgtcgaggttctcaccaaggatggcttcacgaagctcctgtacgctaacaagaggatcgggaagcagaagctccgcagggttgtgaatctggagaaggactactggttcgctctcacccccgaccataaggtctacaccacggatggcctgaaggaggccggggagatcacagagaaggacgagctcatctctgtcccaattactgttttcgattgcgaggacgaggatctgaagaagatcggcctcctgcctctcacctcggacgatgagcggctgcgcaagatcgccacgctcatgggcattctgttcaacggcgggtctatcgacgagggcctcggggtgctcacactgaagtccgagaggagcgttatcgagaagttcgtgattaccctcaaggagctgttcggcaagttcgagtacgagatcattaaggaggagaacacaatcctgaagactagggacccgcggatcattaagttcctcgtcggcctgggggctccaattgagggcaaggatctcaagatgccatggtgggttaagctgaagccttcactcttcctggccttcctggagggcttccgggctcacatcgtggagcagctggtcgacgatccgaacaagaatctccccttcttccaggagctgtcctggtacctcggcctgttcgggatcaaggcggacattaaggttgaggaagtgggcgacaagcataagatcattttcgatgctgggcgcctcgacgtcgataagcagttcatcgagacgtgggaggacgtggaggtcacctacaacctcactacggagaagggcaatctgctcgccaatgggctcttcgttaagaactccattgtggggacagccacgttcgatcagtactggagcgtgcgcacctctaagcggacttcaggaacagtgaccgtgaccgatcacttccgcgcctgggcgaaccggggcctgaacctcggcacaatagaccaaattacattgtgcgtggagggttaccaaagctctggatcagccaacatcacccagaacaccttctctcagggctcttcttccggcagttcgggtggctcatccggctccacaacgactactcgcatcgagtgtgagaacatgtccttgtccggaccctacgttagcaggatcaccaatccctttaatggtattgcgctgtacgccaacggagacacagcccgcgctaccgttaacttccccgcaagtcgcaactacaatttccgcctgcggggttgcggcaacaacaataatcttgcccgtgtggacctgaggatcgacggacggaccgtcgggaccttttattaccagggcacatacccctgggaggccccaattgacaatgtttatgtcagtgcggggagtcatacagtcgaaatcactgttactgcggataacggcacatgggacgtgtatgccgactacctggtgatacagtga

SEQ ID NO: 2770 - DNA, 2379 bp, Artificial Sequence
  Synthetic Construct, AS-84 intein modified protein encoding nucleic acids
atgcaaacaagcattactctgacatccaacgcatccggtacgtttgacggttactattacgaactctggaaggatactggcaatacaacaatgacggtctacactcaaggtcgcttttcctgccagtggtcgaacatcaataacgcgttgtttaggaccgggaagaaatacaaccagaattggcagtctcttggcacaatccggatcacgtactctgcgacttacaacccaaacgggaactcctacttgtgtatctatggctggtctaccaacccattggtcgagttctacatcgttgagtcctgggggaactggagaccgcctggtgccacgtccctgggccaagtgacaatcgatggcgggacctacgacatctataggacgacacgcgtcaaccagccttgcttcccccctactgaggaggcggttttcaagttcggggataaggttaagatcgctactttcgaggaggtcgctaagaatttcaagttcgagcacaaggtcgagatcgacggcttcaagggggagtacagcattcccaacgacctctacgtgctgaccttcaatgatggcaaggccgagtggacccgggtcacgaagttcctccgcaggaagcacgaggggaagatccgcgtcattaagaccaagacgggcaggacgatcaggaccacgccagagcataagttcttcgtttacaaggacggggagctggtgaagaagagggctgacgagctggagccaggcgatgagctggtgctcctgtggcggttcgagtccgaggagacactcactgagatcaacctcctggaggctttcaaggacctgccacaggaggagaaggagaaggtctacgttcgggggattaaggacctcgatctgacgcctctcaaggagaagtacggcgacaaggtctactactgggcgaggcaggattcgatgccgctctctgtgttctacgagctcaacgtcgacctggataaggagttcaggctgggccgggacgctacaacttacgagctcccatctaagctgaagatcacaccttcactcgccaagctgattggctacttcgtgtcagacgggaactactccgacaaggatctccgcatcactgtgggccacgaggatgtcgagaaggagatcgttaatattctggaggagctcggcctgccatactcgttcctggagtgggaggggaagaccaagcagatcgttattggctctcgcctcctgaggctggtcttcaagcatgttttcaagatcccagagggggctccaaacaagaggctcccggagggcttcctgtccttccccttcgaggctaaggtggctctcctgagcggcctcttcaatggcgacggctacgtggtgcgcggcgagcaccatctgtcgatcgggtacgcgtccacaagcaagggcctcatcagggatattctgtacctcctggcttccctgggcattttcgcccgggtgtaccgcgtccctaaggagaagatgaagggggccaaccacgacctctacaagctgtacatcgcgggcaccgatctcgttcgcctggtggagctcctggagctcagggagggccatcgggagaagctgggcgagatcgggaatcgcaagccggcgagggtgaagaagatcgctgacttctacattgacgttgtggatgaggtcagcgaggaggagtactcgggctacgtttacgatctggaggtggagaatgaggggcatagcttcgttgctgcggatggcatcctcgtttcaaattccattgtggggacagccacgttcgatcagtactggagcgtgcgcacctctaagcggacttcaggaacagtgaccgtgaccgatcacttccgcgcctgggcgaaccggggcctgaacctcggcacaatagaccaaattacattgtgcgtggagggttaccaaagctctggatcagccaacatcacccagaacaccttctctcagggctcttcttccggcagttcgggtggctcatccggctccacaacgactactcgcatcgagtgtgagaacatgtccttgtccggaccctacgttagcaggatcaccaatccctttaatggtattgcgctgtacgccaacggagacacagcccgcgctaccgttaacttccccgcaagtcgcaactacaatttccgcctgcggggttgcggcaacaacaataatcttgcccgtgtggacctgaggatcgacggacggaccgtcgggaccttttattaccagggcacatacccctgggaggccccaattgacaatgtttatgtcagtgcggggagtcatacagtcgaaatcactgttactgcggataacggcacatgggacgtgtatgccgactacctggtgatacagtga

SEQ ID NO: 2771 - DNA, 1569 bp, Artificial Sequence
  Synthetic Construct, AS-85 intein modified protein encoding nucleic acids
atgcaaacaagcattactctgacatccaacgcatccggtacgtttgacggttactattacgaactctggaaggatactggcaatacaacaatgacggtctacactcaaggtcgcttttcctgccagtggtcgaacatcaataacgcgttgtttaggaccgggaagaaatacaaccagaattggcagtctcttggcacaatccggatcacgtactctgcgacttacaacccaaacgggaactcctacttgtgtatctatggctggtctaccaacccattggtcgagttctacatcgttgagtcctgggggaactggagaccgcctggtgccacgtccctgggccaagtgacaatcgatggcgggacctacgacatctataggacgacacgcgtcaaccagccttgcttcccaggcgatacacgcattctcgttcagattgacggggttcctcagaagattactctcagggagctctacgagctgttcgaggatgagcgctacgagaacatggtttacgtgcgcaagaagccgaagagggagatcaaggtgtacagcattgacctggagacaggcaaggtggtcctgactgacatcgaggatgtcattaaggccccagcgacggaccacctcatcaggttcgagctggaggatgggcggtctttcgagaccacggtggaccatcctgtcctcgtttacgagaacggccggttcatcgagaagcgcgctttcgaggtcaaggagggggacaaggtgctggtctcagagctggagctggttgagcagtccagctcgtctcaggataatccgaagaacgagaatctcggctccccagagcacgaccagctcctggagatcaagaacatcaagtatgtgcgcgcgaatgacgatttcgtgttctcgctcaatgctaagaagtaccacaacgtcatcatcaatgagaacatcgttacacatcagtccattgtggggacagccacgttcgatcagtactggagcgtgcgcacctctaagcggacttcaggaacagtgaccgtgaccgatcacttccgcgcctgggcgaaccggggcctgaacctcggcacaatagaccaaattacattgtgcgtggagggttaccaaagctctggatcagccaacatcacccagaacaccttctctcagggctcttcttccggcagttcgggtggctcatccggctccacaacgactactcgcatcgagtgtgagaacatgtccttgtccggaccctacgttagcaggatcaccaatccctttaatggtattgcgctgtacgccaacggagacacagcccgcgctaccgttaacttccccgcaagtcgcaactacaatttccgcctgcggggttgcggcaacaacaataatcttgcccgtgtggacctgaggatcgacggacggaccgtcgggaccttttattaccagggcacatacccctgggaggccccaattgacaatgtttatgtcagtgcggggagtcatacagtcgaaatcactgttactgcggataacggcacatgggacgtgtatgccgactacctggtgatacagtga

SEQ ID NO: 2772 - DNA, 2511 bp, Artificial Sequence
  Synthetic Construct, AS-86 intein modified protein encoding nucleic acids
atgcaaacaagcattactctgacatccaacgcatccggtacgtttgacggttactattacgaactctggaaggatactggcaatacaacaatgacggtctacactcaaggtcgcttttcctgccagtggtcgaacatcaataacgcgttgtttaggaccgggaagaaatacaaccagaattggcagtctcttggcacaatccggatcacgtactctgcgacttacaacccaaacgggaactcctacttgtgtatctatggctggtctaccaacccattggtcgagttctacatcgttgagtcctgggggaactggagaccgcctggtgccacgtccctgggccaagtgacaatcgatggcgggacctacgacatctataggacgacacgcgtcaaccagccttgcctgacgggggacgctaaggttatcgctaatggggagctgacaacgatcggggagctggtggagcgcatctcaaatggcaagctgggcccaacccccgtccggggcctcacggttctggggatcgacgaggatggcaagctcgtggagctgccagtcgagtatgtgtacaaggacaagaccagcgagctggtcaagatcaggacgaggctcggcagggagctgaaggttaccccataccaccctctcctggtgaaccgcaggaatgggaagatcgagtgggtgaaggctgaggagctgaagccaggcgacaggctcgctattccgtccttcctccccgccatgctgaacgataatcctctcgctgagtggctgggctacttcttcggcaacgggtacacagacagcgaggagcgcgtggtcttcgagtctaagtcaaaggagctcaggaagcggttcatggagctcactaggaagctgttccaggacgccgagatcaaggaggattccggcaaggtttacgtgtccagctcggaggttaagcgcctcgtgaagtcactgaacaaggattccatcccagagcaggcttggaaggggctcaggagcttcctgagggcgtacttcgactgcaatgctgagatcaaggataagatcattgtgtctacggctggcaaggagatcgccgagcagatttcatacgctctcgctggcctggggatcgtggctgaggtcgacgataaggggtcggtcatcatttctgacccggagaacgtttctaggttcctggatgagatcggcttctcagtcgaggagaagaaggaggaggctaaggccctgattaagaagtcgaccctcaacctgggcatctacgtggacaaggagctcatttcctacgtccgggagaagctcaagctgagcttctacgagaatgagacgatgtggtcgccagagaaggcccgcgagatcgcgtggaagctgatgaaggagatctactaccggctcgacgagctggagcgcttcaagaaggcgctctccaagagcgtgatcattgattggtcggaggtcgagaagaagaaggaggagatcagcgagaagacagggatctcggtgaacgagattctggagtacgccaagggcaagaggaagccgtctctggaggagtatgtgaagatcgcgaaggctctcggcgtggagctgaaggagacactggaggcgattttcactttcgggaagaagtacctgggctacgtgatctccgacgagattgagaccctggaggaggtcaggaaggaggagctcaagcggctgaaggagctcctgaacgacgagaagctgaagaagggggtcgcctacctcatcttcctggcgcagaatgagctcctgtgggatgagatcattgaggtcgagaagctcaagggcgacttcgttatctacgatctgcatgttccaaagtaccacaacttcatcgggggcaatctgccaactgttctgcataattccattgtggggacagccacgttcgatcagtactggagcgtgcgcacctctaagcggacttcaggaacagtgaccgtgaccgatcacttccgcgcctgggcgaaccggggcctgaacctcggcacaatagaccaaattacattgtgcgtggagggttaccaaagctctggatcagccaacatcacccagaacaccttctctcagggctcttcttccggcagttcgggtggctcatccggctccacaacgactactcgcatcgagtgtgagaacatgtccttgtccggaccctacgttagcaggatcaccaatccctttaatggtattgcgctgtacgccaacggagacacagcccgcgctaccgttaacttccccgcaagtcgcaactacaatttccgcctgcggggttgcggcaacaacaataatcttgcccgtgtggacctgaggatcgacggacggaccgtcgggaccttttattaccagggcacatacccctgggaggccccaattgacaatgtttatgtcagtgcggggagtcatacagtcgaaatcactgttactgcggataacggcacatgggacgtgtatgccgactacctggtgatacagtga

SEQ ID NO: 2773 - DNA, 2838 bp, Artificial Sequence
  Synthetic Construct, AS-87 intein modified protein encoding nucleic acids
atgcaaacaagcattactctgacatccaacgcatccggtacgtttgacggttactattacgaactctggaaggatactggcaatacaacaatgacggtctacactcaaggtcgcttttcctgccagtggtcgaacatcaataacgcgttgtttaggaccgggaagaaatacaaccagaattggcagtctcttggcacaatccggatcacgtactctgcgacttacaacccaaacgggaactcctacttgtgtatctatggctggtctaccaacccattggtcgagttctacatcgttgagtcctgggggaactggagaccgcctggtgccacgtccctgggccaagtgacaatcgatggcgggacctacgacatctataggacgacacgcgtcaaccagccttgcgttacaggggacacaaaggtctacacgcctgatgagcgggaggttaagattagggatttcatgaattacttcgagaatgggctgatcaaggaggtgtctaatcgcatcgggagggacacagtcattgccgcggtttccttcaacagccgcatcgtgggccacccagtctacaggctcactctggagtccgggaggatcattgaggccactggcgaccacatgttcctcacccctgaggggtggaagcagacgtacgatatcaaggagggcagcgaggtcctcgttaagccaaccctggagggcacgccttacgagccagaccccagggtcatcattgatatcaaggagttctacaacttcctggagaagatcgagcgcgagcacaacctcaagccactgaaggaggcgaagacgttcagggagctcatcacaaaggacaaggagaagattctgaggagggctctggagctgagggctgagatcgagaacggcctgaccaagcgggaggcggagatcctggagctgatttctgctgatacgtggatccctcgcgctgagctggagaagaaggccaggatctcaaggacccggctgaatcagattctccagcggctggagaagaaggggtacatcgagcggcgcattgagggccgcaagcagttcgtgcggaagatccgcaatggcaagattctccggaacgccatggacatcaagcgcattctggaggaggagttcggcatcaagatttcatacaccacggtcaagaagctcctgtccgggaacgttgatggcatggcgtaccgcatcctcaaggaggtcaaggagaagtggctggttcgctacgacgatgagaaggcggggatcctggctagggtggtcggcttcattctcggcgacgggcacctggctaggaatggccggatctggttcaactccagcaaggaggagctggagatgctggctaacgacctccggaagctcggcctgaagccgtcggagatcattgagcgcgattcgtcttcagagatccaggggcggaaggtgaagggccgcatctacatgctctacgtggacaatgctgccttccatgccctcctgaggttctggaaggtggaggtcgggaacaagaccaagaagggctacacggttccggagtggatcaagaagggcaatctcttcgtcaagagggagttcctcaggggcctgttcggggctgacggcaccaagccctgcgggaagcgctacaacttcaatggcatcaagctggagattcgggctaagaaggagtccctggagcgcacggtggagttcctgaacgacgtcgccgatctcctgagggagttcgacgttgattcgaagatcacagtgtctccgactaaggagggcttcatcattaggctcatcgtgacacccaacgacgccaattacctcaacttcctgacacgggtggggtacgcctacgcgaaggatacttacgccaggctcgtcggcgagtacatccggattaagctcgcgtacaagaacatcattctgcccggcatcgctgagaaggccattgagctggcgacagtcactaacagcacgtacgcggctaaggttctcggcgtgtcgagggacttcgttgtgaatcggctgaaggggacacagatcggcattactagggatttcatgaccttcgaggagttcatgaaggagcgggtgctgaacggctacgtgatcgagaaggtcatcaagaaggagaagctcggctacctggacgtctacgacgttacttgcgctcgggatcatagcttcatttccaatgggctcgtttctcataattccattgtggggacagccacgttcgatcagtactggagcgtgcgcacctctaagcggacttcaggaacagtgaccgtgaccgatcacttccgcgcctgggcgaaccggggcctgaacctcggcacaatagaccaaattacattgtgcgtggagggttaccaaagctctggatcagccaacatcacccagaacaccttctctcagggctcttcttccggcagttcgggtggctcatccggctccacaacgactactcgcatcgagtgtgagaacatgtccttgtccggaccctacgttagcaggatcaccaatccctttaatggtattgcgctgtacgccaacggagacacagcccgcgctaccgttaacttccccgcaagtcgcaactacaatttccgcctgcggggttgcggcaacaacaataatcttgcccgtgtggacctgaggatcgacggacggaccgtcgggaccttttattaccagggcacatacccctgggaggccccaattgacaatgtttatgtcagtgcggggagtcatacagtcgaaatcactgttactgcggataacggcacatgggacgtgtatgccgactacctggtgatacagtga

SEQ ID NO: 2774 - DNA, 2211 bp, Artificial Sequence
  Synthetic Construct, AS-88 intein modified protein encoding nucleic acids
atgcaaacaagcattactctgacatccaacgcatccggtacgtttgacggttactattacgaactctggaaggatactggcaatacaacaatgacggtctacactcaaggtcgcttttcctgccagtggtcgaacatcaataacgcgttgtttaggaccgggaagaaatacaaccagaattggcagtctcttggcacaatccggatcacgtactctgcgacttacaacccaaacgggaactcctacttgtgtatctatggctggtctaccaacccattggtcgagttctacatcgttgagtcctgggggaactggagaccgcctggtgccacgtccctgggccaagtgacaatcgatggcgggacctacgacatctataggacgacacgcgtcaaccagccttgcatcgatggcaacgctaagattattttcgagaatgagggggaggagcatctgacaactatggctgagatgtacgagcgctaccgccacctcggcgagttctacgacgagaactacaatcgctgggggattgatgtgtccagcgtcccgatctacgtgaagtccttcgacccagagacgaggagggtggtcaagggcagggtccgggccatctggaagtacgagctgggcgaggagattccgaagtacgagatccgcacacacaagggcactaagattctcaccagcccatggcatcctttcttcgtcctgacaccagacttcgaggttatcgagaagagggcggacgagctcaaagtgggcgatatcctgattggcgggatgcctgacggggaggatcacgagctcattttcgactactggctggctggcttcatcgctggcaacgggaatctcgacgattcggagagggagtacaaggcccgcgagctcctggatggcatcgagaacgggattccgcccaagatcctgaggaagggcaagaatgccgtcctctctttcatcacgggcctgttcgacgctgaggggcacgttaacgataagtcaggcattgagctcgggatggtgaataagaagctgatcgaggctgtcacacattacctcaacagcctgggcatcaaggcccgcatgagggagaagcggcgcaagaatggcatcgactacattatgcacgtggaggagtactcgtctctcctgcggttctacgagctcattggcaagcatctgcagaacaatgagaagaaggagaagctggagatcctcctgcacaagcataacggcggggcgttcgatctctcactgaacttcaatgctttcaaggagtgggcctccaggtacggcgtcgagttcaagaccaacgggaatcagatcctcgctatcattggcaacgagaaggttagcctgggccagtggcacgcgagggggcatgtgtcgaaggctgtcctggttaagatgctccggaagctgtacgaggttactaagaacgacgaggtgaaggagatgctccacctgatcgagtccctggaggttgtgaaggagatcaccattacgaacgagcccaagaccttctacgatctgacagtggataagtaccagaactacctcgccggggagaatggcatgattttcgtgcataattccattgtggggacagccacgttcgatcagtactggagcgtgcgcacctctaagcggacttcaggaacagtgaccgtgaccgatcacttccgcgcctgggcgaaccggggcctgaacctcggcacaatagaccaaattacattgtgcgtggagggttaccaaagctctggatcagccaacatcacccagaacaccttctctcagggctcttcttccggcagttcgggtggctcatccggctccacaacgactactcgcatcgagtgtgagaacatgtccttgtccggaccctacgttagcaggatcaccaatccctttaatggtattgcgctgtacgccaacggagacacagcccgcgctaccgttaacttccccgcaagtcgcaactacaatttccgcctgcggggttgcggcaacaacaataatcttgcccgtgtggacctgaggatcgacggacggaccgtcgggaccttttattaccagggcacatacccctgggaggccccaattgacaatgtttatgtcagtgcggggagtcatacagtcgaaatcactgttactgcggataacggcacatgggacgtgtatgccgactacctggtgatacagtga

SEQ ID NO: 2775 - DNA, 2328 bp, Artificial Sequence
  Synthetic Construct, AS-89 intein modified protein encoding nucleic acids
atgcaaacaagcattactctgacatccaacgcatccggtacgtttgacggttactattacgaactctggaaggatactggcaatacaacaatgacggtctacactcaaggtcgcttttcctgccagtggtcgaacatcaataacgcgttgtttaggaccgggaagaaatacaaccagaattggcagtctcttggcacaatccggatcacgtactctgcgacttacaacccaaacgggaactcctacttgtgtatctatggctggtctaccaacccattggtcgagttctacatcgttgagtcctgggggaactggagaccgcctggtgccacgtccctgggccaagtgacaatcgatggcgggacctacgacatctataggacgacacgcgtcaaccagccttgcttcacaggggacactcgcatcctgacggagaaggggctgattcctattgaggagatcgtgcatgagacgggcaagaagccaaaggtggtcacacacgctggcctcaaggacatcattgagacttacgataacggggagatggaggttttccgcgtgaccacggaggacggctacgagctcaaggtgaccggggaccataagttcctggtcttcgatgagaacggcaatccaacgctcaagcctctgaaggagctcaaagtgggggactacgtctacatcctggctccagagtggaagggcggggagtatgtggagctcgatacaaacatcgagctgaagggcaaggggtacaacgttaatctgccctcgaagctcgacgagaagctggcgtacctcctgggcatcatctacgctgatgggcacatccgccattacttcgagaacggcaagcgcaagaactccaagatcgagatctacctccaccaggacgagaccgagatcaaggagaaggtgaagaggtacttcaaggagatcttcggcattgagccaaaggagttcctcaaggaggagcagcataaggtcatcctggttattccttccacgaagattgtcaagttcctggagatcaacggcctcctgaaggacaagagcgagaatattcgggttccggaggctatcttccgctcccgcccatctgtgatcgctgcgttcctggctggcttcttcgacggcgatgggtcgatcgatcagaactaccggatcgccttcaagtccattagccgcgagttcatcaaggaggctcagctcctgttcctcgccctgggcatcgtgacatccattcaggagtacaacccgcccaatccaaacaataagacagtttacactctccgggtgcagactcgcgacatgaagatcaaggcgttcaacgtcctcaaggagagcgttaagctgtcgaagattatgaaggaggctatctctaagctggaggagaacggcaagaataagaagttctcattcccgttcaacgccatctaccacattaaggaccccaagatcagggcgaagattcagcgggattacaagatcctctcatacaattccaaggtgacccatagggccttcatcaacaatattctcaagctgaaggaggagctcggcctggacgatgaggaggtcaagtacttcgagatgctgagcaagctctacccaaccaagatcacgaagattgagcctctggggaaggcgcacgtctacgatctccaggttgaggatgttcatctgctcacaggcaatggcatctacacaagcaattccattgtggggacagccacgttcgatcagtactggagcgtgcgcacctctaagcggacttcaggaacagtgaccgtgaccgatcacttccgcgcctgggcgaaccggggcctgaacctcggcacaatagaccaaattacattgtgcgtggagggttaccaaagctctggatcagccaacatcacccagaacaccttctctcagggctcttcttccggcagttcgggtggctcatccggctccacaacgactactcgcatcgagtgtgagaacatgtccttgtccggaccctacgttagcaggatcaccaatccctttaatggtattgcgctgtacgccaacggagacacagcccgcgctaccgttaacttccccgcaagtcgcaactacaatttccgcctgcggggttgcggcaacaacaataatcttgcccgtgtggacctgaggatcgacggacggaccgtcgggaccttttattaccagggcacatacccctgggaggccccaattgacaatgtttatgtcagtgcggggagtcatacagtcgaaatcactgttactgcggataacggcacatgggacgtgtatgccgactacctggtgatacagtga

SEQ ID NO: 2776 - DNA, 2160 bp, Artificial Sequence
  Synthetic Construct, AS-90 intein modified protein encoding nucleic acids
atgcaaacaagcattactctgacatccaacgcatccggtacgtttgacggttactattacgaactctggaaggatactggcaatacaacaatgacggtctacactcaaggtcgcttttcctgccagtggtcgaacatcaataacgcgttgtttaggaccgggaagaaatacaaccagaattggcagtctcttggcacaatccggatcacgtactctgcgacttacaacccaaacgggaactcctacttgtgtatctatggctggtctaccaacccattggtcgagttctacatcgttgagtcctgggggaactggagaccgcctggtgccacgtccctgggccaagtgacaatcgatggcgggacctacgacatctataggacgacacgcgtcaaccagccttgcgtggtcggggagacaaggattctgacgcctgagggctacatcaaggctgaggagctgttcaagctcgccaaggagcggggcaagatggaggccatcgctgtggagggcattgctgagggcggggagccatacgcgtactctctggagatcctcctgcctggcgacaagcaggtcaagtacgagaccgttcacgggaacgctgtggaggtcgccgatccggtttcagtgcccgcctacgtgtggaaggtcggcatgaaggaggttgcccgcgtgaggacaaaggagggctacgagatcaccgccacgctcgaccataagctgatgactccggagggctggaaggagatcaaggacctgaagccaggggataagattctcctgcctaggttcgaggtggaggaggacttcggctccgagagcatcggggaggatctcgcgttcgtcctgggctggttcattggcgacgggtacctcaacgttaaggataagcgggcgtggttctacttcaatgctgagaaggaggaggagatcgcctggaagatccgcgagattctggctaagaggttcgagatcaaggccgagccacaccgctacggcaaccagattaagctcggcgtcagggggaaggcgtacgagtggctggagtccatcgttaagaccaacgagaagaggatcccggagattgtgtaccggctcaagcccaatgagattgcctcattcctcaggggcctgttctccgctgacggctacgtggacaatgatatggctatccgcctcacgtcgaagtctcgggagctcctgcgcgaggtccaggatctcctgctcctgttcggcatcctgtccaagatctacgagaggccgtacaagcgggagttcaagtacaccacgaaggacggcgaggagcgcacatacacaactgaggggtactacgagctcgtgatcgcgaactactcccggaagatcttcgctgagcgcattggcctggaggggtacaagatggagaagctcagcctggagaagatcaaggtcgacgagcccattgtcaccgttgagtcggtggagatcctcggcaagaagctggtctacgacttcactgttccagagcatcacatgtacatttccaatgggttcatgagccacaactccattgtggggacagccacgttcgatcagtactggagcgtgcgcacctctaagcggacttcaggaacagtgaccgtgaccgatcacttccgcgcctgggcgaaccggggcctgaacctcggcacaatagaccaaattacattgtgcgtggagggttaccaaagctctggatcagccaacatcacccagaacaccttctctcagggctcttcttccggcagttcgggtggctcatccggctccacaacgactactcgcatcgagtgtgagaacatgtccttgtccggaccctacgttagcaggatcaccaatccctttaatggtattgcgctgtacgccaacggagacacagcccgcgctaccgttaacttccccgcaagtcgcaactacaatttccgcctgcggggttgcggcaacaacaataatcttgcccgtgtggacctgaggatcgacggacggaccgtcgggaccttttattaccagggcacatacccctgggaggccccaattgacaatgtttatgtcagtgcggggagtcatacagtcgaaatcactgttactgcggataacggcacatgggacgtgtatgccgactacctggtgatacagtga

SEQ ID NO: 2777 - DNA, 2322 bp, Artificial Sequence
  Synthetic Construct, AS-91 intein modified protein encoding nucleic acids
atgcaaacaagcattactctgacatccaacgcatccggtacgtttgacggttactattacgaactctggaaggatactggcaatacaacaatgacggtctacactcaaggtcgcttttcctgccagtggtcgaacatcaataacgcgttgtttaggaccgggaagaaatacaaccagaattggcagtctcttggcacaatccggatcacgtactctgcgacttacaacccaaacgggaactcctacttgtgtatctatggctggtctaccaacccattggtcgagttctacatcgttgagtcctgggggaactggagaccgcctggtgccacgtccctgggccaagtgacaatcgatggcgggacctacgacatctataggacgacacgcgtcaaccagccttgcctcgcgcctgggtcaaaggtcctcacggagcatggctactggctgaaggtggaggagctgccggagaagttcaagctgcagggcgttaaggtgtacaacctggacgagggccacaacgatacaagcaatgttgctttcgtggctgagagggaggtggagactggcgagatggccgtccgcgttaccacggagtccggcaggatcattgaggggagcgaggaccatccagtcctgacccctgagggctacgtttacctcgggaacctgaaggagggcaatctcgtgattgtctacccgttcgagggggttgagtacgaggagaggaagggcgtgatcctcgacgaggatgcgttcaaggacgaggatccccaggtgctctccttcctgagggagaagggcctcgtcccactgcgctgggacgatccccgcatcgggacaattgctcggatcctgggcttcgctttcggcgacgggtacctcggggagatgggcgggaggctcacactgactttctacggcaaggaggagacgctccgggagctgaagaaggacctggagcgcctgggcatttcggccaacctctacgtgcgcgagtctatcgagacaactagcggccactcggaggggaagtccctcagcatcgagctgcgcgtcacatcgaggtctttcgcgctcttcctggagaagctcggcatgccgagggggaagaagactgagaaggcgtacagggtgccaggctggatcctggaggctcctctgtgggtcaagaggaacttcctcgctgggctgttcgctgctgacggctcgattgtcgagttcaagggcaacaccccgctccccatcaatctgacgcagtcaaagtccgacgagctcgccgagaatctggtggagttcctcggggatgtcgccaagctcctggcggagttcggcatcgagaccacgctgtacgaggttaagtccaagaagggggtgacctaccgcctctctattgtcggcgaggactcaatcaggacgttcgttgagcggatcaattacgagtacgatcccgagaagaaggtgaagggcctgattgctgccgcgtacctcaagctgaaggagaggatcgtgaaggaggcgcatgaggctgtcaaggacgatttcccaaccttcgaggagttcgctaaggagaggggctacgagggcgggttcgtcgctgagaaggtggtcaaggtcgagagggttaagcctgagtacacgaagttctacgatattggggtttaccatgaggctcacaacttcattgctaatggcatcgtcgttcacaactccattgtggggacagccacgttcgatcagtactggagcgtgcgcacctctaagcggacttcaggaacagtgaccgtgaccgatcacttccgcgcctgggcgaaccggggcctgaacctcggcacaatagaccaaattacattgtgcgtggagggttaccaaagctctggatcagccaacatcacccagaacaccttctctcagggctcttcttccggcagttcgggtggctcatccggctccacaacgactactcgcatcgagtgtgagaacatgtccttgtccggaccctacgttagcaggatcaccaatccctttaatggtattgcgctgtacgccaacggagacacagcccgcgctaccgttaacttccccgcaagtcgcaactacaatttccgcctgcggggttgcggcaacaacaataatcttgcccgtgtggacctgaggatcgacggacggaccgtcgggaccttttattaccagggcacatacccctgggaggccccaattgacaatgtttatgtcagtgcggggagtcatacagtcgaaatcactgttactgcggataacggcacatgggacgtgtatgccgactacctggtgatacagtga

SEQ ID NO: 2778 - DNA, 2301 bp, Artificial Sequence
  Synthetic Construct, AS-92 intein modified protein encoding nucleic acids
atgcaaacaagcattactctgacatccaacgcatccggtacgtttgacggttactattacgaactctggaaggatactggcaatacaacaatgacggtctacactcaaggtcgcttttcctgccagtggtcgaacatcaataacgcgttgtttaggaccgggaagaaatacaaccagaattggcagtctcttggcacaatccggatcacgtactctgcgacttacaacccaaacgggaactcctacttgtgtatctatggctggtctaccaacccattggtcgagttctacatcgttgagtcctgggggaactggagaccgcctggtgccacgtccctgggccaagtgacaatcgatggcgggacctacgacatctataggacgacacgcgtcaaccagccttgcgtggacggggacactctcgtgctgacaaaggagttcgggctcatcaagatcaaggacctctacaagattctggacggcaaggggaagaagacagtgaacggcaatgaggagtggacagagctggagaggccaatcactctgtacggctacaaggacgggaagatcgtcgagattaaggctacccacgtttacaagggcttctccgccgggatgatcgagattcggacccgcacgggccgcaagattaaggtcacgcccatccataagctcttcacaggcagggttactaagaatgggctggagatccgggaggtcatggccaaggacctcaagaagggcgatcggatcattgtggcgaagaagattgatggcggggagcgcgtgaagctgaacatccgcgtcgagcagaagaggggcaagaagatccggattccggacgtcctcgatgagaagctggccgagttcctcggctacctgatcgctgacgggaccctcaagccaaggacggtggccatctacaacaatgatgagtctctcctgcgcagggctaacgagctcgccaatgagctgttcaacattgagggcaagatcgtcaaggggcgcacagttaaggcgctcctgatccactcaaaggctctcgtggagttcttctccaagctgggcgtcccgcgcaacaagaaggccaggacttggaaggtcccgaaggagctcctgatctcagagcccgaggtggtcaaggcgttcattaaggcttacatcatgtgcgacggctactacgatgagaacaagggggagatcgagattgtgaccgctagcgaggaggctgcttacggcttctcgtacctcctggctaagctggggatctacgccatcattcgcgagaagatcattggcgacaaggtctactacagggttgtgatttccggcgagagcaacctggagaagctggggatcgagagggttggccgggggtacacgtcgtacgatatcgtcccagttgaggtggaggagctctacaacgctctgggcaggccttacgctgagctgaagagggcgggcatcgagattcataattacctctcgggggagaacatgtcttacgagatgttcaggaagttcgcgaagttcgtcggcatggaggagatcgctgagaaccacctcacccatgttctgttcgacgagatcgtggagattcggtacatctccgagggccaggaggtgtacgacgttactacggagactcataatttcattgggggcaacatgcctactctgctccacaactccattgtggggacagccacgttcgatcagtactggagcgtgcgcacctctaagcggacttcaggaacagtgaccgtgaccgatcacttccgcgcctgggcgaaccggggcctgaacctcggcacaatagaccaaattacattgtgcgtggagggttaccaaagctctggatcagccaacatcacccagaacaccttctctcagggctcttcttccggcagttcgggtggctcatccggctccacaacgactactcgcatcgagtgtgagaacatgtccttgtccggaccctacgttagcaggatcaccaatccctttaatggtattgcgctgtacgccaacggagacacagcccgcgctaccgttaacttccccgcaagtcgcaactacaatttccgcctgcggggttgcggcaacaacaataatcttgcccgtgtggacctgaggatcgacggacggaccgtcgggaccttttattaccagggcacatacccctgggaggccccaattgacaatgtttatgtcagtgcggggagtcatacagtcgaaatcactgttactgcggataacggcacatgggacgtgtatgccgactacctggtgatacagtga

SEQ ID NO: 2779 - DNA, 2961 bp, Artificial Sequence
  Synthetic Construct, AS-93 intein modified protein encoding nucleic acids
atgcaaacaagcattactctgacatccaacgcatccggtacgtttgacggttactattacgaactctggaaggatactggcaatacaacaatgacggtctacactcaaggtcgcttttcctgccagtggtcgaacatcaataacgcgttgtttaggaccgggaagaaatacaaccagaattggcagtctcttggcacaatccggatcacgtactctgcgacttacaacccaaacgggaactcctacttgtgtatctatggctggtctaccaacccattggtcgagttctacatcgttgagtcctgggggaactggagaccgcctggtgccacgtccctgggccaagtgacaatcgatggcgggacctacgacatctataggacgacacgcgtcaaccagccttgcctctcgccagatactatggttcgcactactaacggggacaagccaatcagggacatcgcggtcggggatcagctcttcgatcacgaggacaggccagtgcagtgcctcgctgctgaggctatccagacctcccggatgatgaaggttacctacacgggctacaacagcgtgtcgaagtccagcttcacatgcactccagaccacatcatgaccctcgttgcgtacggggtgaagcctttccgccattctaactcaaatagggtgacctggtggacgaggtgcgacaggacggagctgggcgctgatgctgtcgagatcaagtgggatgctgccatgcacgacctctacacagagtaccgcgagcagctgggcaggaggccaactgacgctgaggtccggaagtacctcaaggctatcaccagcacgcgcgtggtcccagattcggaggacgatgactctcagagggtcgaggagacgtaccagtcgcccgttctcattaagctcctggcgaagctgaaggctatggatgtggacgtcgatggcgaggacgagtctgttgtgctcatgctcctgcagcagcacatggaggactacctggagcacatgatcccagagcctgaggatatttccgacgaggataacgatgacctcatcattgacctggatacaaataggaagcggaagatcggcacaatttctactctgtcgtctcgcatctcagacaagactttcaggcagtccccgagcattaagtcatcccccgtgaactctcagcagcagtcacagaatgaggcttcgcagtctaccgtcccgacgtacgcctcggttctcaccgaggatgaccaccgcgagatgttcgcgccagtgcggtcaaagctggctgtccgcgaccctaagtgcaagtgccagaacctctcctgcaagggcctgaggcgcgtcagcacagttttcgagacttcggagcaggctgacctggctctggagctcctgagcggggatcactaccgcgtcgttgacccatgcgccgtgcaggatatggaggtcttcacaatgactctggaggagtaccaggctacctgcacggctcctatgacgcagcataagtccaagctgcgcctctacaggagcccgctcaggttccagccataccagggctcagtgtccccagtcccaatcgacccgttctggttcgggttctggctgggcaacgggaccaagaacaattccgagattacaagcactgatcccgaggttgaggtgtacacgcaggcgctcgtggataggctgaatagggactcgatcccaccaggcaaggctccactgaaggtctctaagtacaagatcgacattggcaccaagcacgtgtacaagggggaggagatcaagaccacgaaggtcgcccatcgcctcagggtcatgagcaccgtttcgaacctggacaagacgcactggaatccagtgcatgatggcctgagggagctcggcctcctgggggacaagtccggcgggatccctgactgctacatgaacgcggatgagaatacaaggctggctgtgctcgccggcctgattgagtcagacggctggctctcccacgggctgaactgctacggcttcgggcagtacacctacgagctcaagaagctggtcgaggacgctcggaagctggctctctcctgcggcatccagtgcaaccccattttcgagaggaagaatggcaaggatcggccagagcctgggtggttcttctacatgggcaggggggtcgagaagttccagccacatctcctgctccctcggaagcgcatgaccatcccgttcacaactagcaagaacagggacgttcggccattcgacgtggaggatgctggcgacggggagttcaggctcattgaggtttcaggggagctcttccagctcgcggataggactgtggttcataattccattgtggggacagccacgttcgatcagtactggagcgtgcgcacctctaagcggacttcaggaacagtgaccgtgaccgatcacttccgcgcctgggcgaaccggggcctgaacctcggcacaatagaccaaattacattgtgcgtggagggttaccaaagctctggatcagccaacatcacccagaacaccttctctcagggctcttcttccggcagttcgggtggctcatccggctccacaacgactactcgcatcgagtgtgagaacatgtccttgtccggaccctacgttagcaggatcaccaatccctttaatggtattgcgctgtacgccaacggagacacagcccgcgctaccgttaacttccccgcaagtcgcaactacaatttccgcctgcggggttgcggcaacaacaataatcttgcccgtgtggacctgaggatcgacggacggaccgtcgggaccttttattaccagggcacatacccctgggaggccccaattgacaatgtttatgtcagtgcggggagtcatacagtcgaaatcactgttactgcggataacggcacatgggacgtgtatgccgactacctggtgatacagtga

SEQ ID NO: 2780 - DNA, 2733 bp, Artificial Sequence
  Synthetic Construct, AS-94 intein modified protein encoding nucleic acids
atgcaaacaagcattactctgacatccaacgcatccggtacgtttgacggttactattacgaactctggaaggatactggcaatacaacaatgacggtctacactcaaggtcgcttttcctgccagtggtcgaacatcaataacgcgttgtttaggaccgggaagaaatacaaccagaattggcagtctcttggcacaatccggatcacgtactctgcgacttacaacccaaacgggaactcctacttgtgtatctatggctggtctaccaacccattggtcgagttctacatcgttgagtcctgggggaactggagaccgcctggtgccacgtccctgggccaagtgacaatcgatggcgggacctacgacatctataggacgacacgcgtcaaccagccttgcctcgctaaggggacactgctgctgcgctacgatgggacaaaggtggaggtggagaatgttcgggagggggatctgctgctgggcccagacggcgggcctaggagggcgttcaacattgtgggcgggagggaccggctctacaggatcaagatggagggcgggaaggaggatctggtggtcaccccaaatcacatcctggtcctccatcgcgagaagagggacggcgtcgataaggtttacgctaggccattcgctctcccactcctgcaggaggacgccaccgacgatggcgaggatctgtcggagatctctgcgattgagcacttcgacaccatggagatcacggctgctgacttcgcttccctcgatccgaacgagcgcaagctgtacaggctcttcacgagcccaggctacgagctgaatgggaggccagtgcccattgacccgtacttcctgggcctctggctgggggatcgctccaggaccaagtccagcatctacacgaaccacgaggaggagatccgggagttcattgcggaccatgctgccgagctcgatctgcagctcgtgtcatacgtctccaatcgcccatccctcgcggctatgaagaacggcaatcagctgcctctcaggcaccaggctaggcagacgatcaggaagcagcgcattgccgcgaagagcatcacacagccaggcggggctaggtcgtcttcataccctgccaccaacggcgggctgtccagcaatacagtgactagcctccactcgcgggagcgccatccactgtccgagtcgtctgctgccgcgacgatgaacctcctgccacgctccacaagcgtctcgacttctgttgctgcccagcctaagtcatccatgagcacattcatcactgacgctattctcccttcggagagctcgaacatctctgtcatttcagattccggcatcgagattagcaagtcttcaaagatgctgtcggaggaggaggccgacctggatctcttcgacattgattcggaggacgaggagatcgaggacctcgatgagaagaagaacgttagcaatgtggacgagttcccgaagcggcgcaggatccactacctgaggaccggctgccggacgtacggggagctctgcccaggcgaggaggaccagatcctggaggatattgttggcaggccagacgggaccacgtctgtggagtcactcctgctcgctctggaggctctggggctccatacctgcggcacgaacgacagcgggtcggataagaagcggatcccctcagtgtacatgaagaactcccgcgccgtgcgcctggctctgctcgctggcctcatcgactctggcgggtggtatgtggattcagagaacacattcggcttcagccagactgaggactctaattcaaccctgatctgggatgttgtgaccctggctaggagcctcggcttctccgtcagcacaaagcggcgcatgactcacaagccgaccaggacgcagcataaggcgcaggagttcgctcagatttcgggcaacgtcgcggagatcccatctctgctcgctagggagaggggcgttgagaggccaatctcccaggcgcacagcttcaagatcaaggacattcagctggagacagaggccactgagtgggcggggttcagggtggatcaggatcagctctacctcaggcatgacttcctcgttctgcataattccattgtggggacagccacgttcgatcagtactggagcgtgcgcacctctaagcggacttcaggaacagtgaccgtgaccgatcacttccgcgcctgggcgaaccggggcctgaacctcggcacaatagaccaaattacattgtgcgtggagggttaccaaagctctggatcagccaacatcacccagaacaccttctctcagggctcttcttccggcagttcgggtggctcatccggctccacaacgactactcgcatcgagtgtgagaacatgtccttgtccggaccctacgttagcaggatcaccaatccctttaatggtattgcgctgtacgccaacggagacacagcccgcgctaccgttaacttccccgcaagtcgcaactacaatttccgcctgcggggttgcggcaacaacaataatcttgcccgtgtggacctgaggatcgacggacggaccgtcgggaccttttattaccagggcacatacccctgggaggccccaattgacaatgtttatgtcagtgcggggagtcatacagtcgaaatcactgttactgcggataacggcacatgggacgtgtatgccgactacctggtgatacagtga

SEQ ID NO: 2781 - DNA, 1497 bp, Artificial Sequence
  Synthetic Construct, AS-95 intein modified protein encoding nucleic acids
atgcaaacaagcattactctgacatccaacgcatccggtacgtttgacggttactattacgaactctggaaggatactggcaatacaacaatgacggtctacactcaaggtcgcttttcctgccagtggtcgaacatcaataacgcgttgtttaggaccgggaagaaatacaaccagaattggcagtctcttggcacaatccggatcacgtactctgcgacttacaacccaaacgggaactcctacttgtgtatctatggctggtctaccaacccattggtcgagttctacatcgttgagtcctgggggaactggagaccgcctggtgccacgtccctgggccaagtgacaatcgatggcgggacctacgacatctataggacgacacgcgtcaaccagccttgcctcgctaaggggacaaggctgctgcgctacgatgggacagagatcaacgtggaggacgtgcgggagggggatcagctgctcgggccagacggcgagccaaggagggcgttcaacatcgtttccggcattgaccggctctaccgcgtgaagatcggcggggagaaggaggatctcgtggtcaccccgaaccacattctggtgttctacagggagggcccatccgatgggcctgagaatgcggagcggcagacagtcgagatcactgccgcggagttcgctaccctcagcacggaggagcgctccctgtacagcgcgttcacctcgccagctgtcgagaagggcgctgaggggtcagctgctcagatgcattccttcaaggttgaggacatttcgctggagtctgagaagacggagtgggccggcttcagggtggataaggatcagctctacctcaggcatgattacctcgttctgcataactccattgtggggacagccacgttcgatcagtactggagcgtgcgcacctctaagcggacttcaggaacagtgaccgtgaccgatcacttccgcgcctgggcgaaccggggcctgaacctcggcacaatagaccaaattacattgtgcgtggagggttaccaaagctctggatcagccaacatcacccagaacaccttctctcagggctcttcttccggcagttcgggtggctcatccggctccacaacgactactcgcatcgagtgtgagaacatgtccttgtccggaccctacgttagcaggatcaccaatccctttaatggtattgcgctgtacgccaacggagacacagcccgcgctaccgttaacttccccgcaagtcgcaactacaatttccgcctgcggggttgcggcaacaacaataatcttgcccgtgtggacctgaggatcgacggacggaccgtcgggaccttttattaccagggcacatacccctgggaggccccaattgacaatgtttatgtcagtgcggggagtcatacagtcgaaatcactgttactgcggataacggcacatgggacgtgtatgccgactacctggtgatacagtga

SEQ ID NO: 2782 - DNA, 2115 bp, Artificial Sequence
  Synthetic Construct, AS-96 intein modified protein encoding nucleic acids
atgcaaacaagcattactctgacatccaacgcatccggtacgtttgacggttactattacgaactctggaaggatactggcaatacaacaatgacggtctacactcaaggtcgcttttcctgccagtggtcgaacatcaataacgcgttgtttaggaccgggaagaaatacaaccagaattggcagtctcttggcacaatccggatcacgtactctgcgacttacaacccaaacgggaactcctacttgtgtatctatggctggtctaccaacccattggtcgagttctacatcgttgagtcctgggggaactggagaccgcctggtgccacgtccctgggccaagtgacaatcgatggcgggacctacgacatctataggacgacacgcgtcaaccagccttgcgtcgcgccagattcgctcgtggtcgtcaatgataaggttcaggagatcggcaagctgacagaggagtgggggcgggaggtcgggttcctggagtactccagcggcatcttctacgctccgtacctcggcagggggatttcactggacctcgttacagggaaggtgaagccgtctgtggtctcaaaagtgtggaagctgaagtcccccgaggagctcgtcaccatcaagaccattacgggcaaggagatcacagtgactccagagaccaagctcctgacgttcaacgggacactggagtggaaggaggcgggcaagatcaagcctggggattacgtgctgactgtcaagaagctccacatcaatggcaagcaggagaccctggacgagaagctcgcctacaagagggggctgagcctctcggatccactggagttcttctcctcctccgagaggactatctccgcgtacctgaagggcattttcgacaaggtcggcaggctcgttggggataccgccgttatcaaggtggacaaggatatggcgaagaggctgcagatcctcctgctcaggctcggcattgtctccagcgttgacgagacgggcaaggtcatcatcgggcgcgagtacatccagaagattctgggctacaacgtttccgttgtgacgcacgaggtcgagctcttcagggagttcatcgccgagatttccaagttctacggcacaagcgaggaggacgtctactcgtctctgcatgagaagggcgagctcgatatcgggactgtcccagttgagctgcctgagggcctccgggaggagatcaatcgcgagagggctacgtacagcgagctggtgaagatcgcccaggagattaaggacgagaagctgtacaacaagctcgcgtggatcctgtcggaggtcacggaggaggaggctaagattaaggagaaagtgaatacactcaaggtcatcctgtcatccgatctcattccggagcgcgtggagtcggtcaagatcattaagtctccgtacccctacgtgtacgatctcacagtggagggctctcattctttcattgctaatggcttcgtggttcataattccattgtggggacagccacgttcgatcagtactggagcgtgcgcacctctaagcggacttcaggaacagtgaccgtgaccgatcacttccgcgcctgggcgaaccggggcctgaacctcggcacaatagaccaaattacattgtgcgtggagggttaccaaagctctggatcagccaacatcacccagaacaccttctctcagggctcttcttccggcagttcgggtggctcatccggctccacaacgactactcgcatcgagtgtgagaacatgtccttgtccggaccctacgttagcaggatcaccaatccctttaatggtattgcgctgtacgccaacggagacacagcccgcgctaccgttaacttccccgcaagtcgcaactacaatttccgcctgcggggttgcggcaacaacaataatcttgcccgtgtggacctgaggatcgacggacggaccgtcgggaccttttattaccagggcacatacccctgggaggccccaattgacaatgtttatgtcagtgcggggagtcatacagtcgaaatcactgttactgcggataacggcacatgggacgtgtatgccgactacctggtgatacagtga

SEQ ID NO: 2783 - DNA, 2175 bp, Artificial Sequence
  Synthetic Construct, AS-97 intein modified protein encoding nucleic acids
atgcaaacaagcattactctgacatccaacgcatccggtacgtttgacggttactattacgaactctggaaggatactggcaatacaacaatgacggtctacactcaaggtcgcttttcctgccagtggtcgaacatcaataacgcgttgtttaggaccgggaagaaatacaaccagaattggcagtctcttggcacaatccggatcacgtactctgcgacttacaacccaaacgggaactcctacttgtgtatctatggctggtctaccaacccattggtcgagttctacatcgttgagtcctgggggaactggagaccgcctggtgccacgtccctgggccaagtgacaatcgatggcgggacctacgacatctataggacgacacgcgtcaaccagccttgcctgctgccggaggagaaggtcgtgctgcctgagatcgggctggttacgctgcgggagctgttcgagctggctaatgaggtcgttgtcaaggacgaggagaaggaggttcggaagctgggcaagatgctcacaggggttgatgagcgcggcaacgtgaagctcctgaatgccctctacgtgtggagggtcgcgcacaagggcgagatgatccgggttaaggtgaacgggtggtactccgtcaccgttacgccggagcatcccttcctgacgaatagggggtgggtgaaggctggcgagctcaaggagggggactacatcgctattccgcgcagggtctacggcaacgaggatctgatgaagttctcgaagatcgccaaggagctcggcattaagggggacgagaaggagttctacctggccggcgcgtctctcgatatcccgattaaggtgctcttcctggctccctccaagctggtcagcgccttcctccgcggctacttcgacgcgaagggggtggtcagggagaactacatcgaggttccactgttcgaggatctccctctcctgctcctgaggttcggcatcgtctcgcggattgagaagtctaccctcaagatctcaggcaagcgcaacctggagctgttcaggaagcacgtggggttcacggactccgagaaggctaaggccctcgatgagctgatctccaaggccaaggagagcgagaggtacccaattctggaggagctgaggaggctcggcctcctgttcgggttcacacggaacgagctgcgcatcgaggagaatccaacttacgaggtgctgatggagatcctggagcgcattgagaggggctcacctaacctggcggagaagatcgctgtcctggagggccggattaaggaggagaactacctgcgcatcctggaggaggagggcctcattgagaatgggaagctgaccgagctcggcaaggagctcctggaggtctggaggaaccgggagttcgactcgaaggacgttgattacgtgaggaacatcgtggagaatctggtcttcctccccgtcgagaaggttgagcggatcgagtacgagggctacgtctacgacgttactacggagactcataatttcgttgctaatggcatcctcgttcataattccattgtggggacagccacgttcgatcagtactggagcgtgcgcacctctaagcggacttcaggaacagtgaccgtgaccgatcacttccgcgcctgggcgaaccggggcctgaacctcggcacaatagaccaaattacattgtgcgtggagggttaccaaagctctggatcagccaacatcacccagaacaccttctctcagggctcttcttccggcagttcgggtggctcatccggctccacaacgactactcgcatcgagtgtgagaacatgtccttgtccggaccctacgttagcaggatcaccaatccctttaatggtattgcgctgtacgccaacggagacacagcccgcgctaccgttaacttccccgcaagtcgcaactacaatttccgcctgcggggttgcggcaacaacaataatcttgcccgtgtggacctgaggatcgacggacggaccgtcgggaccttttattaccagggcacatacccctgggaggccccaattgacaatgtttatgtcagtgcggggagtcatacagtcgaaatcactgttactgcggataacggcacatgggacgtgtatgccgactacctggtgatacagtga

SEQ ID NO: 2784 - DNA, 2580 bp, Artificial Sequence
  Synthetic Construct, AS-98 intein modified protein encoding nucleic acids
atgcaaacaagcattactctgacatccaacgcatccggtacgtttgacggttactattacgaactctggaaggatactggcaatacaacaatgacggtctacactcaaggtcgcttttcctgccagtggtcgaacatcaataacgcgttgtttaggaccgggaagaaatacaaccagaattggcagtctcttggcacaatccggatcacgtactctgcgacttacaacccaaacgggaactcctacttgtgtatctatggctggtctaccaacccattggtcgagttctacatcgttgagtcctgggggaactggagaccgcctggtgccacgtccctgggccaagtgacaatcgatggcgggacctacgacatctataggacgacacgcgtcaaccagcctgctctctacgatttctcggttattcagctctctaatgggcggttcgttctcatcggggatctcgtggaggagctgttcaagaagtacgccgagaagatcaagacctacaaggacctggagtacattgagctgaacgaggaggataggttcgaggtggtctcagtctccccggacctcaaggcgaataagcacgttgtgtctcgggtgtggaggaggaaggtccgcgagggggagaagctgatccgcattaagaccaggacgggcaacgagatcattctcacacgcaatcatcccctgttcgccttcagcaacggggatgtcgttaggaaggaggctgagaagctcaaagtgggcgacagggttgccgtgatgatgcggccgccctcaccacctcagactaaggcggtggtcgacccagctatctacgttaagatttccgattactacctggtgccaaacggcaaggggatgatcaaggtccctaatgacggcattccgcccgagaaggcccagtacctcctgtctgtgaactcataccccgttaagctcgtgagggaggtcgatgagaagctcagctacctggctggggtcatcctgggcgacgggtacatttccagcaatggctactacatctcggcgaccttcgacgatgaggcgtacatggacgctttcgtctccgttgtgagcgatttcatcccaaactacgtgccttccattaggaagaatggggactacacaatcgtcactgttggctctaagattttcgccgagatgctctcacggatcttcggcattccgcgcgggaggaagtccatgtgggacatccccgatgtcgttctcagcaacgacgatctgatgcgctacttcatcgccggcctcttcgacgcggatggctacgtggacgagaatggcccgagcatcgtgctggtcaccaagtcggagacggtcgccaggaagatctggtatgtgctccagcggctgggcatcatttcgacggtttctcgggtgaagtcgcgcggcttcaaggagggggagctcttccgggttatcatttctggcgtggaggatctcgctaagttcgccaagttcatcccactgaggcactcccggaagcgcgctaagctcatggagatcctgcgcacaaagaagccttacaggggcaggcgcacttacagggtcccaatctcgtctgacatgattgctccactgaggcagatgctcgggctgaccgtggctgagctctcaaagctggcctcctactacgcgggcgagaaggtcagcgagtcgctcatccgccatattgagaaggggagggtgaaggagatcaggaggtcgacgctgaagggcatcgctctcgctctgcagcagattgctaaggatgtgggcaacgaggaggcttgggtcagggctaagaggctccagctgatcgctgagggcgacgtctactgggatgaggtggtcagcgtcgaggaggttgacccgaaggagctgggcatcgagtatgtgtacgatctcacagtggaggatgatcataactacgttgctaatggcattctcgtttctaattccattgtggggacagccacgttcgatcagtactggagcgtgcgcacctctaagcggacttcaggaacagtgaccgtgaccgatcacttccgcgcctgggcgaaccggggcctgaacctcggcacaatagaccaaattacattgtgcgtggagggttaccaaagctctggatcagccaacatcacccagaacaccttctctcagggctcttcttccggcagttcgggtggctcatccggctccacaacgactactcgcatcgagtgtgagaacatgtccttgtccggaccctacgttagcaggatcaccaatccctttaatggtattgcgctgtacgccaacggagacacagcccgcgctaccgttaacttccccgcaagtcgcaactacaatttccgcctgcggggttgcggcaacaacaataatcttgcccgtgtggacctgaggatcgacggacggaccgtcgggaccttttattaccagggcacatacccctgggaggccccaattgacaatgtttatgtcagtgcggggagtcatacagtcgaaatcactgttactgcggataacggcacatgggacgtgtatgccgactacctggtgatacagtga

SEQ ID NO: 2785 - DNA, 2217 bp, Artificial Sequence
  Synthetic Construct, AS-99 intein modified protein encoding nucleic acids
atgcaaacaagcattactctgacatccaacgcatccggtacgtttgacggttactattacgaactctggaaggatactggcaatacaacaatgacggtctacactcaaggtcgcttttcctgccagtggtcgaacatcaataacgcgttgtttaggaccgggaagaaatacaaccagaattggcagtctcttggcacaatccggatcacgtactctgcgacttacaacccaaacgggaactcctacttgtgtatctatggctggtctaccaacccattggtcgagttctacatcgttgagtcctgggggaactggagaccgcctggtgccacgtccctgggccaagtgacaatcgatggcgggacctacgacatctataggacgacacgcgtcaaccagccttgcttctcgggggaggaggttattctcattgagaaggacggggagaagaaggttttcaagctgcgggagttcgtggacgggctgctgaaggaggcttctggcgaggggatggacggctcaatccgggtggtctacaaggatctccagggcgagaacatcaagattctcaccaaggatgggctggtgaagctcctctacgtgaaccgcagggaggggaagcagaagctcaggaagatcgttaatctggagaaggactactggctcgccctgaccccggagcacaaggtctacacgatcaagggcctgaaggaggcgggggagattaccaaggacgatgagatcattcgcgtcccgctcacgatcctggacggcttcgatgttgcggagaagtccattagggaggagctggagaggctgagcctcctgcccctcaactcagaggattccaggctggagaagatcgcgggcattatgggggctctcttcggctcgggcgggatcgacgagaacctcaatacactgtctttcgtgtccagcgagaagaagactatcgagcagttcgtcaaggctctcagcgagctgttcggcgagttcgactacaagatcgaggagaaggagaactccatcatcttccgcacctgcgataagcggatcgtgacattcttcgctactctgggcgccccagttggggacaagtcaaaggtgaagctcaagctgccatggtgggtcaagctcaagccttccctcttcctggccttcatggacggcctgtactcgtctaaccgcaatgataaggagatcctggagattacccagctgacggacaacgtggagacattcttcgaggagatcagctggtacctctcgttcttcggcattaaggccgaggcggaggaggacgaggagaaggataagtacagggctcggctcactctgtcatccagcatcgacaacatgctgaatttcattgagttcatcccgatttcgttctctcccgccaagagggagaagttcttcaaggagatcgagaagtacctggagtactccattcccgagaagacggaggacctgaagaagcgcgtcaagagggttaagaagggcgagcggcgcaacttcctggagtcctgggaggaggttgaggtgacctacaatgttactacggagacaggcaatctgctcgctaatgggctcttcgttaagaactccattgtggggacagccacgttcgatcagtactggagcgtgcgcacctctaagcggacttcaggaacagtgaccgtgaccgatcacttccgcgcctgggcgaaccggggcctgaacctcggcacaatagaccaaattacattgtgcgtggagggttaccaaagctctggatcagccaacatcacccagaacaccttctctcagggctcttcttccggcagttcgggtggctcatccggctccacaacgactactcgcatcgagtgtgagaacatgtccttgtccggaccctacgttagcaggatcaccaatccctttaatggtattgcgctgtacgccaacggagacacagcccgcgctaccgttaacttccccgcaagtcgcaactacaatttccgcctgcggggttgcggcaacaacaataatcttgcccgtgtggacctgaggatcgacggacggaccgtcgggaccttttattaccagggcacatacccctgggaggccccaattgacaatgtttatgtcagtgcggggagtcatacagtcgaaatcactgttactgcggataacggcacatgggacgtgtatgccgactacctggtgatacagtga

SEQ ID NO: 2786 - DNA, 2589 bp, Artificial Sequence
  Synthetic Construct, AS-100 intein modified protein encoding nucleic acids
atgcaaacaagcattactctgacatccaacgcatccggtacgtttgacggttactattacgaactctggaaggatactggcaatacaacaatgacggtctacactcaaggtcgcttttcctgccagtggtcgaacatcaataacgcgttgtttaggaccgggaagaaatacaaccagaattggcagtctcttggcacaatccggatcacgtactctgcgacttacaacccaaacgggaactcctacttgtgtatctatggctggtctaccaacccattggtcgagttctacatcgttgagtcctgggggaactggagaccgcctggtgccacgtccctgggccaagtgacaatcgatggcgggacctacgacatctataggacgacacgcgtcaaccagccttgcctcacaggggacactaaggttatcgctaatgggcagctgttcgagctgggggagctggtggagaagctctcgggcgggcggttcggcccaacgccagtgaagggcctcaaggtcctggggatcgacgaggatggcaagctccgcgagttcgaggttcagtatgtgtacaaggaccgcaccgataggctgatcaagattaagacgcagctgggccgggagctcaaggtgacaccataccaccctctcctggtcaaccgcgagaatggcgagatcaagtggattaaggccgaggagctgaagccaggggacaagctcgcgatcccgtcgttcctccccctgattaccggcgagaaccctctggctgagtggctggggtacttcatgggctctgggtacgcttacccatcgaactctgtgatcaccttcacgaatgaggaccctctcatccgccagaggttcatggagctgaccgagaagctcttcccggacgcgaagatccgggagcgcattcatgctgatggcacgcccgaggtctacgtggtctccaggaaggcttggagcctcgttaactcaatctccctcaccctgattccacgggagggctggaaggggatccggtcgttcctgcgcgcctactctgactgcaatggccggatcgagtcagatgctattgtgctctccacggacaacaatgatatggcccagcagatcgcctacgcgctggcttcgttcgggatcattgcgaagatggacggcgaggatgtcatcattagcgggtcggacaacatcgagaggttcctcaatgagattggcttctctacacagtcaaagctgaaggaggcccagaagctcatcaggaagactaacgtgcggtctgacggcctgaagatcaattacgagctcatttcatacgttaaggacaggctccggctgaacgtgaatgataagcgcaacctgagctacaggaatgcgaaggagctgtcgtgggagctcatgaaggagatctactaccggctggaggagctggagcgcctcaagaaggtcctgtccgagccgatcctcattgactggaacgaggtcgccaagaagagcgatgaggttatcgagaaggccaagattcgcgcggagaagctcctggagtacatcaagggcgagaggaagccctccttcaaggagtacatcgagattgccaaggttctggggatcaacgtggagaggacaatcgaggctatgaagattttcgccaagaggtactccagctacgcggagatcggccggaagctggggacttggaacttcaatgtgaagacaatcctggagtccgacactgtcgataacgttgagatcctggagaagatccgcaagattgagctggagctgatcgaggagattctgagcgacgggaagctcaaggagggcatcgcgtacctgattttcctcttccagaacgagctctactgggatgagatcaccgaggtcaaggagctgaggggcgacttcatcatctacgatctgcacgttccaggctaccacaacttcattgcgggcaacatgccaacagtcgttcataactccattgtggggacagccacgttcgatcagtactggagcgtgcgcacctctaagcggacttcaggaacagtgaccgtgaccgatcacttccgcgcctgggcgaaccggggcctgaacctcggcacaatagaccaaattacattgtgcgtggagggttaccaaagctctggatcagccaacatcacccagaacaccttctctcagggctcttcttccggcagttcgggtggctcatccggctccacaacgactactcgcatcgagtgtgagaacatgtccttgtccggaccctacgttagcaggatcaccaatccctttaatggtattgcgctgtacgccaacggagacacagcccgcgctaccgttaacttccccgcaagtcgcaactacaatttccgcctgcggggttgcggcaacaacaataatcttgcccgtgtggacctgaggatcgacggacggaccgtcgggaccttttattaccagggcacatacccctgggaggccccaattgacaatgtttatgtcagtgcggggagtcatacagtcgaaatcactgttactgcggataacggcacatgggacgtgtatgccgactacctggtgatacagtga

SEQ ID NO: 2787 - DNA, 2133 bp, Artificial Sequence
  Synthetic Construct, AS-101 intein modified protein encoding nucleic acids
atgcaaacaagcattactctgacatccaacgcatccggtacgtttgacggttactattacgaactctggaaggatactggcaatacaacaatgacggtctacactcaaggtcgcttttcctgccagtggtcgaacatcaataacgcgttgtttaggaccgggaagaaatacaaccagaattggcagtctcttggcacaatccggatcacgtactctgcgacttacaacccaaacgggaactcctacttgtgtatctatggctggtctaccaacccattggtcgagttctacatcgttgagtcctgggggaactggagaccgcctggtgccacgtccctgggccaagtgacaatcgatggcgggacctacgacatctataggacgacacgcgtcaaccagccttgcctgcatcctgacactctcattctcacatcacagggggttcgcaagatcaaggagctctcgcgggagggggaggttttcgctctcgacttcaacctgaagctctccaaggcgaagtacaggctcctggagcgggacgctgatgagcagatgtacaaggtgaccctcctggacggcacggagctgtacctcacagccgatcacccagtgctcgtctacagggagggcaatctggctttcgttcctgccgacaagctccgggagacggatcatgtggtcctggtgctcaacaagtctgctcgggacaattacggcttcctcgatctcctgctggagattactgactcacaggaggattacgccatcctggagaacggcgagaccctgtcgctccactctctgaagatgctcgtggagcgcggggagatcaaggacattgcggttgtgggcttctcgcataacaatttcgggaaggtcatgctcagggatgagctgtggtacctcatcggctacctggctgggaagggcggggagatcaagggcaacggggtcgttatttccagcaggacgaaggagatcgtcggcctgacaaagagcctcaacatcgacctgattgagaccgaggaggggatcgtgctctcaaataagtccttcgtccggctgctccacctgatccattacacgccgcgcgtccccgaggtttacggcatcattaacaatacagagtggctcaaggccttcctggcgggctactacgacgccactctgctggaggggctgaccctggaggctctctacaagatcaaggtctacctgcagctgctcggcatccgcgcgaagattgaggacaacaagctcaaggttcacctggaggatctccagcggttccgcgagctgctcggcaagttcagccgccgcaagctctacgtggagacttcgcaggttccggtgttcaccgacttcgatgagcgctcctacgacttcccaaggatcctgggcggggatatctacatcattggcatcaagagcattgagaagttccattacaaggggaaggtctacgatctcgtcgtggagaactaccacaacttcattgctaatggcattgctgtgcataattccattgtggggacagccacgttcgatcagtactggagcgtgcgcacctctaagcggacttcaggaacagtgaccgtgaccgatcacttccgcgcctgggcgaaccggggcctgaacctcggcacaatagaccaaattacattgtgcgtggagggttaccaaagctctggatcagccaacatcacccagaacaccttctctcagggctcttcttccggcagttcgggtggctcatccggctccacaacgactactcgcatcgagtgtgagaacatgtccttgtccggaccctacgttagcaggatcaccaatccctttaatggtattgcgctgtacgccaacggagacacagcccgcgctaccgttaacttccccgcaagtcgcaactacaatttccgcctgcggggttgcggcaacaacaataatcttgcccgtgtggacctgaggatcgacggacggaccgtcgggaccttttattaccagggcacatacccctgggaggccccaattgacaatgtttatgtcagtgcggggagtcatacagtcgaaatcactgttactgcggataacggcacatgggacgtgtatgccgactacctggtgatacagtga

SEQ ID NO: 2788 - DNA, 1794 bp, Artificial Sequence
  Synthetic Construct, AS-102 intein modified protein encoding nucleic acids
atgcaaacaagcattactctgacatccaacgcatccggtacgtttgacggttactattacgaactctggaaggatactggcaatacaacaatgacggtctacactcaaggtcgcttttcctgccagtggtcgaacatcaataacgcgttgtttaggaccgggaagaaatacaaccagaattggcagtctcttggcacaatccggatcacgtactctgcgacttacaacccaaacgggaactcctacttgtgtatctatggctggtctaccaacccattggtcgagttctacatcgttgagtcctgggggaactggagaccgcctggtgccacgtccctgggccaagtgacaatcgatggcgggacctacgacatctataggacgacacgcgtcaaccagccttgcgtcgcgcctgatactctcattaacacagacaacgggcgggtggagatcggcaagttcgtggaggagtggatgaaggaggtcggggagatttcggaggagggcatctcttacgccccgtgcttccgcaaggtcgagaccttcaaggacgggaagattgttgagagcccaatccgcagggtgtggaagctccgggctcctaagaagctggtgcgcattaagacagagaacggccgcagcatcgccctcacaagggagactaagctcctgactatcaatgatggcgagctgtcgtgggtcgaggctggggaggtgaaggtcggcacctacgttgggacggtgaagtcagagaaggacgtgattccaggcgctgggaagaccatcagggatgtctccaagctctacaacatggagatggaggtcaaggactacctgacgagggaggaggttcggaaggcgattgagaagctggaggagatcatgaacccgatgaatatcaagattcccggcgtgcaggagtcctacgaggagctcctgcggaagctggagaccacgaacgatgagcgggttcgcaatgagacactcatcctcctgtccgacgtgagcgatgcccacgagctggcgaaggagaagatcgagaagattaaggagatcgtgaactccgaggtccattgggagaaggtcaccgaggttggcgaggtggacggggtcgagtatgtgtacgatctcacagtggagggctctcataatttcgttgctaatggcttcatcgttcataattccattgtggggacagccacgttcgatcagtactggagcgtgcgcacctctaagcggacttcaggaacagtgaccgtgaccgatcacttccgcgcctgggcgaaccggggcctgaacctcggcacaatagaccaaattacattgtgcgtggagggttaccaaagctctggatcagccaacatcacccagaacaccttctctcagggctcttcttccggcagttcgggtggctcatccggctccacaacgactactcgcatcgagtgtgagaacatgtccttgtccggaccctacgttagcaggatcaccaatccctttaatggtattgcgctgtacgccaacggagacacagcccgcgctaccgttaacttccccgcaagtcgcaactacaatttccgcctgcggggttgcggcaacaacaataatcttgcccgtgtggacctgaggatcgacggacggaccgtcgggaccttttattaccagggcacatacccctgggaggccccaattgacaatgtttatgtcagtgcggggagtcatacagtcgaaatcactgttactgcggataacggcacatgggacgtgtatgccgactacctggtgatacagtga

SEQ ID NO: 2789 - DNA, 2346 bp, Artificial Sequence
  Synthetic Construct, AS-103 intein modified protein encoding nucleic acids
atgcaaacaagcattactctgacatccaacgcatccggtacgtttgacggttactattacgaactctggaaggatactggcaatacaacaatgacggtctacactcaaggtcgcttttcctgccagtggtcgaacatcaataacgcgttgtttaggaccgggaagaaatacaaccagaattggcagtctcttggcacaatccggatcacgtactctgcgacttacaacccaaacgggaactcctacttgtgtatctatggctggtctaccaacccattggtcgagttctacatcgttgagtcctgggggaactggagaccgcctggtgccacgtccctgggccaagtgacaatcgatggcgggacctacgacatctataggacgacacgcgtcaaccagccttgcctgctgccggaggagcgggttattctgcctgactacgggcctattactctggaggagctcttcaatatgacaaaggagacagtgttcaaggacgaggagaaggaggtccggaagctcggcatccgcatgccagtggctggcgtcgatgggcgggtgcgcctgctggagggcccctacgtttggaaggtgcgctacaaggggaagatgctcagggtcaagctgaaggactggcacagcgtggctgtcacaccagagcatcccttcctcaccacgcggggctgggtgcgcgctgaccagctgaagcccggggattacgttgccgtgccaaagatcctccctgggaaggacgataaggagaagttcctccagtatgtgcacgagaagctgaagggcaaggttcatattaagctgccgtccagcgacgaggagtgggagacattcttctacttcgccggcactatcttcgggcgcgagaactcggtgaatccagagggcctcacccacgaggtcaaggctctcctggagctcttcaaggttctgttcgagtacccgagggaggtcctccgggttctgttcatggccccggtgcgctacgtggcgaacttcctccgcggcttcttcgacattaacggctacgtcaatggggaggagctgagggtcgaggttaggggggctccacatgaggttctggaggagctctccctgatcctcctgaggctgggcatcgtgtccaagatctaccctacgagcctggctatttcgggcaggaggaacctggagctgttccggcgctacatcgggttctcggagaagcagaaggccaaggagctggagggcatcattaggcggtctgagaactcagagtcctacccaattttcgaggagctgcgcaggatcaggctcctgttcggcttcacccgggcggagctctcgtctacgatcccactgtactctaagtacgagtcaaaggaggctccttcatacgagatcctcatgaagattctgaatacaatcgagaaggggtctaaggacctcaacaagaagatcactattctggagggcagggtgcgggatcacgagtacattgaggagttcaagcgcgagggcctgatcaaggacgggaagctcaccgagctgggcaaggagctcctggaggtctggcgcaacagggagttcgactccagggatgtcaactacctccggaatatcattgagaacttcgttttcctgccggtggagaagatcgaggagttcgagtacgatggctacgtctacgacgttactacagagactcataatttcattgctaatggcatcctcgttcataattccattgtggggacagccacgttcgatcagtactggagcgtgcgcacctctaagcggacttcaggaacagtgaccgtgaccgatcacttccgcgcctgggcgaaccggggcctgaacctcggcacaatagaccaaattacattgtgcgtggagggttaccaaagctctggatcagccaacatcacccagaacaccttctctcagggctcttcttccggcagttcgggtggctcatccggctccacaacgactactcgcatcgagtgtgagaacatgtccttgtccggaccctacgttagcaggatcaccaatccctttaatggtattgcgctgtacgccaacggagacacagcccgcgctaccgttaacttccccgcaagtcgcaactacaatttccgcctgcggggttgcggcaacaacaataatcttgcccgtgtggacctgaggatcgacggacggaccgtcgggaccttttattaccagggcacatacccctgggaggccccaattgacaatgtttatgtcagtgcggggagtcatacagtcgaaatcactgttactgcggataacggcacatgggacgtgtatgccgactacctggtgatacagtga

SEQ ID NO: 2790 - DNA, 2439 bp, Artificial Sequence
  Synthetic Construct, AS-104 intein modified protein encoding nucleic acids
atgcaaacaagcattactctgacatccaacgcatccggtacgtttgacggttactattacgaactctggaaggatactggcaatacaacaatgacggtctacactcaaggtcgcttttcctgccagtggtcgaacatcaataacgcgttgtttaggaccgggaagaaatacaaccagaattggcagtctcttggcacaatccggatcacgtactctgcgacttacaacccaaacgggaactcctacttgtgtatctatggctggtctaccaacccattggtcgagttctacatcgttgagtcctgggggaactggagaccgcctggtgccacgtccctgggccaagtgacaatcgatggcgggacctacgacatctataggacgacacgcgtcaaccagccttgcgtttcgggggactctaaggtcctgacggagaaggggccagtggagattcggcatctcaattcgggcatgatcgtgggcatcaatggcttcaagagcaggttcgtcaagttccaggagctgcaccaggtcaagtaccaggagtacggggttaagatccggacccagctcggcttcgaggtgaagtgcaccagggagcatcggttcctcacgattgacaagaacggcgagctgcgctgggttgaggcttggaggctcaaggagggcgattacgtggggatcattcgcaagctgccgtctcccaactcaaaggttctcatcctggacttcctcccggagtcgacgtacctctggctgaataaggagttcctcaagaagctgaaggtctctatcaaggagaagttcgggtcaattaagaactacgccaaggagcggggcttcaattccagctacctggtgaagcagctcaacgggctgtccccattccgctggggcaggctcagggttatcctgaatgatgtgtcgatcgagatttctcgggacgatatcgagcgcattacatcacgcaggggcaagtactccctcccaccagagctgactcctggcatcgctaggctcctggggttctggatggctagcggctcgctcaaccgcaataccctgatcttctactcgcaggacaagaagattctggagcgctacgaggatctgtgcaagcgcgagttcagggtcaaggggcggatcaaggcccaggacaagggcacgtacatcctggagattccctcgtctctcctgtctttcgtcttcaagaacctcgcgcgcccaaagctggaggttccaccgatcatctacatcctgcctgagaagcacaaggaggagttcctcgctggctacttcgacggcaacgggttcatcaagattgagaatgggaggatccattccctcggcttcttcgccttcaaccgcaagttcgcggaggggatcagggatattctcctgcagctcggcatcctgtcatccattaatgagcagacattcgaggtgagcatcattgagggcgagaagttcctgaagatcgtcaactcctggcgcagcaattactacaaggagtgggaggacgtgatcccgaacctggagaagaggctgaaggagattgaggagaagctcggctaccccgggacttacaatcggcgcgagatcaggcggtccgagctcaaggcgatcattaagctgtacgagaaggtggctcgggagaggggcctgaacgacgtcctcaaggagctgagctacctcaaggagctgtcggagggcgacatcttcttcgataggatcaccagcattgagccagtgtacctcgatgtcgcgtacggcatcatcaactcagagacaggcaactacgtggttaatggcttcgtttcaaagaactccattgtggggacagccacgttcgatcagtactggagcgtgcgcacctctaagcggacttcaggaacagtgaccgtgaccgatcacttccgcgcctgggcgaaccggggcctgaacctcggcacaatagaccaaattacattgtgcgtggagggttaccaaagctctggatcagccaacatcacccagaacaccttctctcagggctcttcttccggcagttcgggtggctcatccggctccacaacgactactcgcatcgagtgtgagaacatgtccttgtccggaccctacgttagcaggatcaccaatccctttaatggtattgcgctgtacgccaacggagacacagcccgcgctaccgttaacttccccgcaagtcgcaactacaatttccgcctgcggggttgcggcaacaacaataatcttgcccgtgtggacctgaggatcgacggacggaccgtcgggaccttttattaccagggcacatacccctgggaggccccaattgacaatgtttatgtcagtgcggggagtcatacagtcgaaatcactgttactgcggataacggcacatgggacgtgtatgccgactacctggtgatacagtga

SEQ ID NO: 2791 - DNA, 2436 bp, Artificial Sequence
  Synthetic Construct, AS-105 intein modified protein encoding nucleic acids
atgcaaacaagcattactctgacatccaacgcatccggtacgtttgacggttactattacgaactctggaaggatactggcaatacaacaatgacggtctacactcaaggtcgcttttcctgccagtggtcgaacatcaataacgcgttgtttaggaccgggaagaaatacaaccagaattggcagtctcttggcacaatccggatcacgtactctgcgacttacaacccaaacgggaactcctacttgtgtatctatggctggtctaccaacccattggtcgagttctacatcgttgagtcctgggggaactggagaccgcctggtgccacgtccctgggccaagtgacaatcgatggcgggacctacgacatctataggacgacacgcgtcaaccagccttgcttctcaggggaggaggttattatcgtggagaagggcaaggaccgcaaggtcgttaagctgcgggagttcgtggaggacgctctcaaggagccatccggcgaggggatggacggcgatatcaaggtgacatacaaggacctgcgcggcgaggatgtcaggattctcactaaggacgggttcgtgaagctcctctacgtgaacaagcgcgagggcaagcagaagctcaggaagatcgtcaatctggacaaggattactggctcgccgttacacctgaccacaaggtgttcacttctgagggcctgaaggaggcgggggagatcacggagaaggacgagatcattagggtcccactcgttatcctggatggccctaagattgcctcaacatacggcgaggacgggaagttcgacgattacatccgctggaagaagtactacgagaagactggcaacgggtacaagcgcgccgcgaaggagctgaatatcaaggagagcaccctcaggtggtggacgcagggcgctaagccaaactcgctgaagatgatcgaggagctggagaagctgaatctcctgcctctgacctctgaggactcacggctggagaaggtcgccatcattctcggcgcgctgttctcagacgggaacatcgatcgcaacttcaataccctctccttcatctccagcgagcggaaggccattgagcgcttcgtggagacgctcaaggagctgttcggcgagttcaactacgagatcagggataatcatgagtccctcggcaagagcattctgttccggacctgggaccgcaggatcattcgcttcttcgtcgcgctgggcgctccggttgggaacaagacgaaggtgaagctggagctgccgtggtggatcaagctgaagccctcgctcttcctggccttcatggacggcctctactcgggcgatgggtctgtcccaaggttcgctcgctacgaggagggcatcaagttcaacgggaccttcgagattgctcagctgacggacgatgtggagaagaagctccccttcttcgaggagatcgcttggtacctctccttcttcggcattaaggccaaggttagggtggacaagacaggggataagtacaaggttcggctgatcttctcacagtccattgacaacgtgctcaatttcctggagttcatcccgattagcctctcgcccgctaagagggagaagttcctgcgggaggtcgagtcctacctcgctgctgttccagagtcgtctctggctggcaggatcgaggagctcagggagcacttcaaccggatcaagaagggcgagcggcgcagcttcattgagacctgggaggtggtcaatgtgacctacaatgttactacggagacaggcaatctgctcgctaatgggctcttcgttaagaattccattgtggggacagccacgttcgatcagtactggagcgtgcgcacctctaagcggacttcaggaacagtgaccgtgaccgatcacttccgcgcctgggcgaaccggggcctgaacctcggcacaatagaccaaattacattgtgcgtggagggttaccaaagctctggatcagccaacatcacccagaacaccttctctcagggctcttcttccggcagttcgggtggctcatccggctccacaacgactactcgcatcgagtgtgagaacatgtccttgtccggaccctacgttagcaggatcaccaatccctttaatggtattgcgctgtacgccaacggagacacagcccgcgctaccgttaacttccccgcaagtcgcaactacaatttccgcctgcggggttgcggcaacaacaataatcttgcccgtgtggacctgaggatcgacggacggaccgtcgggaccttttattaccagggcacatacccctgggaggccccaattgacaatgtttatgtcagtgcggggagtcatacagtcgaaatcactgttactgcggataacggcacatgggacgtgtatgccgactacctggtgatacagtga

SEQ ID NO: 2792 - DNA, 2394 bp, Artificial Sequence
  Synthetic Construct, AS-106 intein modified protein encoding nucleic acids
atgcaaacaagcattactctgacatccaacgcatccggtacgtttgacggttactattacgaactctggaaggatactggcaatacaacaatgacggtctacactcaaggtcgcttttcctgccagtggtcgaacatcaataacgcgttgtttaggaccgggaagaaatacaaccagaattggcagtctcttggcacaatccggatcacgtactctgcgacttacaacccaaacgggaactcctacttgtgtatctatggctggtctaccaacccattggtcgagttctacatcgttgagtcctgggggaactggagaccgcctggtgccacgtccctgggccaagtgacaatcgatggcgggacctacgacatctataggacgacacgcgtcaaccagccttctatcctccctgatgagtggctgcctatcgtggagaatgagaaggttcggttcgttaagatcggggatttcattgatcgggagatcgaggagaacgccgagcgcgttaagagggacggcgagaccgagatcctggaggtgaaggatctcaaggccctgtccttcaatcgcgagacgaagaagagcgagctcaagaaggtcaaggcgctgatccgccacaggtactccggcaaggtgtacagcattaagctcaagtcggggcgcaggatcaagattacctcaggccattccctgttcagcgtcaagaacggcaagctcgttaaggtgcggggggacgagctcaagccaggcgatctggtggtcgttccaggccgcctcaagctgcctgagtcgaagcaggtgctcaacctggtcgagctcctgctcaagctgccagaggaggagacgtctaacatcgtcatgatgattcctgttaaggggcgcaagaatttcttcaagggcatgctcaagacactgtactggatcttcggcgagggggagaggccaaggactgctggcaggtacctcaagcacctggagaggctcggctacgtgaagctcaagaggaggggctgcgaggttctcgactgggagtccctgaagaggtaccggaagctgtacgagacactcatcaagaacctgaagtacaacggcaatagccgcgcttacatggtggagttcaattctctcagggacgtggtctcactgatgccgatcgaggagctcaaggagtggatcattggcgagccgagggggccaaagatcggcactttcattgatgtcgacgattcgttcgcgaagctgctcgggtactacatctccagcggcgacgtggagaaggatagggtcaagttccactccaaggaccagaacgtgctggaggatatcgccaagctcgcggagaagctgttcgggaaggtgaggaggggcagggggtacattgaggtcagcggcaagatctcgcatgctattttcagggtcctcgctgaggggaagcggatcccggagttcattttcaccagccccatggacatcaaggtggcgttcctgaagggcctcaacgggaatgctgaggagctgaccttctcgacgaagtctgagctgctcgtcaaccagctcatcctgctcctcaactccattggggtgtcagatatcaagattgagcatgagaagggcgtctacagggtttacatcaacaagaaggagtcgtctaatggcgacatcgttctggattcagtggagtccattgaggttgagaagtacgagggctacgtgtacgacctctctgtggaggataatgagaatttcctcgtgggcttcgggctgctctacgctcataattccattgtggggacagccacgttcgatcagtactggagcgtgcgcacctctaagcggacttcaggaacagtgaccgtgaccgatcacttccgcgcctgggcgaaccggggcctgaacctcggcacaatagaccaaattacattgtgcgtggagggttaccaaagctctggatcagccaacatcacccagaacaccttctctcagggctcttcttccggcagttcgggtggctcatccggctccacaacgactactcgcatcgagtgtgagaacatgtccttgtccggaccctacgttagcaggatcaccaatccctttaatggtattgcgctgtacgccaacggagacacagcccgcgctaccgttaacttccccgcaagtcgcaactacaatttccgcctgcggggttgcggcaacaacaataatcttgcccgtgtggacctgaggatcgacggacggaccgtcgggaccttttattaccagggcacatacccctgggaggccccaattgacaatgtttatgtcagtgcggggagtcatacagtcgaaatcactgttactgcggataacggcacatgggacgtgtatgccgactacctggtgatacagtga

SEQ ID NO: 2793 - DNA, 1530 bp, Artificial Sequence
  Synthetic Construct, AS-107 intein modified protein encoding nucleic acids
atgcaaacaagcattactctgacatccaacgcatccggtacgtttgacggttactattacgaactctggaaggatactggcaatacaacaatgacggtctacactcaaggtcgcttttcctgccagtggtcgaacatcaataacgcgttgtttaggaccgggaagaaatacaaccagaattggcagtctcttggcacaatccggatcacgtactctgcgacttacaacccaaacgggaactcctacttgtgtatctatggctggtctaccaacccattggtcgagttctacatcgttgagtcctgggggaactggagaccgcctggtgccacgtccctgggccaagtgacaatcgatggcgggacctacgacatctataggacgacacgcgtcaaccagccttgcttcgctagggatacggaggtttactacgagaatgacacagttccgcacatggagtcaatcgaggagatgtactcaaagtacgcttccatgaacggcgagctcccgttcgacaatgggtacgcggtcccactcgataacgtgttcgtctacaccctggacatcgctagcggcgagattaagaagacgcgcgcctcgtacatctacagggagaaggtggagaagctcatcgagattaagctgtccagcggctactcactcaaggttacaccatcccacccagtgctcctgttccgggatgggctgcagtgggtgccagctgctgaggtcaagcctggcgacgtggtcgttggggtccgcgaggaggttctcaggaggcggatcatttccaagggcgagctggagttccatgaggtttcgtctgtgaggatcattgattacaacaattgggtctacgatctcgtcattccagagactcataacttcattgctccaaatgggctcgtgctccacaactccattgtggggacagccacgttcgatcagtactggagcgtgcgcacctctaagcggacttcaggaacagtgaccgtgaccgatcacttccgcgcctgggcgaaccggggcctgaacctcggcacaatagaccaaattacattgtgcgtggagggttaccaaagctctggatcagccaacatcacccagaacaccttctctcagggctcttcttccggcagttcgggtggctcatccggctccacaacgactactcgcatcgagtgtgagaacatgtccttgtccggaccctacgttagcaggatcaccaatccctttaatggtattgcgctgtacgccaacggagacacagcccgcgctaccgttaacttccccgcaagtcgcaactacaatttccgcctgcggggttgcggcaacaacaataatcttgcccgtgtggacctgaggatcgacggacggaccgtcgggaccttttattaccagggcacatacccctgggaggccccaattgacaatgtttatgtcagtgcggggagtcatacagtcgaaatcactgttactgcggataacggcacatgggacgtgtatgccgactacctggtgatacagtga

SEQ ID NO: 2794 - DNA, 2244 bp, Artificial Sequence
  Synthetic Construct, AS-108 intein modified protein encoding nucleic acids
atgcaaacaagcattactctgacatccaacgcatccggtacgtttgacggttactattacgaactctggaaggatactggcaatacaacaatgacggtctacactcaaggtcgcttttcctgccagtggtcgaacatcaataacgcgttgtttaggaccgggaagaaatacaaccagaattggcagtctcttggcacaatccggatcacgtactctgcgacttacaacccaaacgggaactcctacttgtgtatctatggctggtctaccaacccattggtcgagttctacatcgttgagtcctgggggaactggagaccgcctggtgccacgtccctgggccaagtgacaatcgatggcgggacctacgacatctataggacgacacgcgtcaaccagccttgcgttaccccagacacgctggtttcgctctcggacgggcggattattgagatcagggaggcggtggagaactcggaggagtcgctgctcgggatcaacggcctgaagccgaaggaggccaaggcgctcaagttctgggagatcgactgggatgggccgatcaaggtcatcaagctgaagaatggccacgagatcaaggctaccccagaccatgggctcctggttatgagggatgggaagatcggctgggtgtcggctaagaacattcgggagggcgactacgtcgccttcatctacaatctcgggcaccgcggcgggaagaagtacacgctcccccagctcctgaaggagctgggcatctccgagtacgagaactccagctcgcaggagctcaacaatcgcgagcaggagatggactccaagcagatcagcattgagctggatgagaggttctggtacatcttcggcgtgattctcggcaaggggaccctgaagggggacaaggtggtcatcttccagaaggatgtcaagccggttattgaggaggcgctgcccttcgtccggatcttcgagtcggctgaccacatcggcttctctcatctcattctggctgaggtcttccgcaggctcggcgttggggagggcaagctccactccctggtgttcggcctgagggaggagtacatcaacgctatgattgccgggtacttcgacgctagcggcaccttcctcaggagggctgtcctgacgagcaagcgcggcgatatcctcaggatgctgtcggtgtacctctaccagatcggcattgtcaacaatctgaggagggacgagcatgctggcgtgtgggagctcatcatttctgatctggagaagttccgcgagaagatctacccttacctcaggattaagaagtcacagttcgacaaggtctactctatttcaaagaacgagggcgatttcctcccggttgcgtctatcttccggaagctgaagttccgcgacggcttcaagaatcggatcctcgacgaggagattccacgcgatgaggtggcgaaggtcctggagtacgctgaggactcacctgagaaggagttcctcaactccctggttgaggccagggtgacatgggttcgggtggagaagatcgaggagaggcattacactggcaagctctacgacttcacaactactacagagaacttcatttccaatggcatcgtctcacacaactccattgtggggacagccacgttcgatcagtactggagcgtgcgcacctctaagcggacttcaggaacagtgaccgtgaccgatcacttccgcgcctgggcgaaccggggcctgaacctcggcacaatagaccaaattacattgtgcgtggagggttaccaaagctctggatcagccaacatcacccagaacaccttctctcagggctcttcttccggcagttcgggtggctcatccggctccacaacgactactcgcatcgagtgtgagaacatgtccttgtccggaccctacgttagcaggatcaccaatccctttaatggtattgcgctgtacgccaacggagacacagcccgcgctaccgttaacttccccgcaagtcgcaactacaatttccgcctgcggggttgcggcaacaacaataatcttgcccgtgtggacctgaggatcgacggacggaccgtcgggaccttttattaccagggcacatacccctgggaggccccaattgacaatgtttatgtcagtgcggggagtcatacagtcgaaatcactgttactgcggataacggcacatgggacgtgtatgccgactacctggtgatacagtga

SEQ ID NO: 2795 - DNA, 2184 bp, Artificial Sequence
  Synthetic Construct, AS-109 intein modified protein encoding nucleic acids
atgcaaacaagcattactctgacatccaacgcatccggtacgtttgacggttactattacgaactctggaaggatactggcaatacaacaatgacggtctacactcaaggtcgcttttcctgccagtggtcgaacatcaataacgcgttgtttaggaccgggaagaaatacaaccagaattggcagtctcttggcacaatccggatcacgtactctgcgacttacaacccaaacgggaactcctacttgtgtatctatggctggtctaccaacccattggtcgagttctacatcgttgagtcctgggggaactggagaccgcctggtgccacgtccctgggccaagtgacaatcgatggcgggacctacgacatctataggacgacacgcgtcaaccagccttgcctcgcgcctgggacaagggtcctgactgagcatggctactggctgaagattgaggagatgcctgagaagttcaagctgcagcggctccgcgtctacaacatcgaggagggccacaatgacttcagcaaggtggtcttcgtggctgagagggaggtcggctcggaggagaaggctatccgcattgtcacagagtccgggaaggttatcgagggcagcgaggaccatccagtgctcactcctgagggctacgtgtacctgaggaacgtgaaggagggcgattacatcctggtgtacccgttcgagggggtcccctacgaggagaagaagggcgtcattctcgacgagtccgctttcgagggcgaggatccgcaggttgtgaagttcctgcgcgagaggaacctcatcccactgcagtggaaggaccctaaagtgggcatcctcgctcggattctggggttcgctctcgcgaatggctacatcagcgagaacgataatctcaccttccacggcaaggaggaggtcctgagggaggttcggaaggacctggaggagctgggcatcgaggcgattgtcgctgaggaggataagctcaaggttacgtctagggagttcgctttcctcctggagaagctggggatggcccacgactcaatcccggagtggatcattgagggccccctctggattaagaggaacttcctcgctggcctgttcggggctaatggctcgatcgttgagttcaagggcgacgtgccgctgcccattaccctcacgcattcgcgggagctcctgaacgatgtctctcgcatcctggagggcttcaaggtgagggccaagattaagatggggaagaatggctcataccagctcgtcatcgaggacgaggattccattcgcaacttcctggggaggatcaattacgagtacgacccagagaagaaggccaggggcctcattgcttacgcctacctgaagttcaaggagctcatgaaggggaacctgatgaccttcgaggagttcgcccgggacaggggctacgagggcgggttcgtggcggagaaggtcatcgaggttaagagcgtgaagccggagtacgataagttctacgatattggggtctaccactcagctcataatttcattgctaatggcatcgtcgttcataactccattgtggggacagccacgttcgatcagtactggagcgtgcgcacctctaagcggacttcaggaacagtgaccgtgaccgatcacttccgcgcctgggcgaaccggggcctgaacctcggcacaatagaccaaattacattgtgcgtggagggttaccaaagctctggatcagccaacatcacccagaacaccttctctcagggctcttcttccggcagttcgggtggctcatccggctccacaacgactactcgcatcgagtgtgagaacatgtccttgtccggaccctacgttagcaggatcaccaatccctttaatggtattgcgctgtacgccaacggagacacagcccgcgctaccgttaacttccccgcaagtcgcaactacaatttccgcctgcggggttgcggcaacaacaataatcttgcccgtgtggacctgaggatcgacggacggaccgtcgggaccttttattaccagggcacatacccctgggaggccccaattgacaatgtttatgtcagtgcggggagtcatacagtcgaaatcactgttactgcggataacggcacatgggacgtgtatgccgactacctggtgatacagtga

SEQ ID NO: 2796 - DNA, 2142 bp, Artificial Sequence
  Synthetic Construct, AS-110 intein modified protein encoding nucleic acids
atgcaaacaagcattactctgacatccaacgcatccggtacgtttgacggttactattacgaactctggaaggatactggcaatacaacaatgacggtctacactcaaggtcgcttttcctgccagtggtcgaacatcaataacgcgttgtttaggaccgggaagaaatacaaccagaattggcagtctcttggcacaatccggatcacgtactctgcgacttacaacccaaacgggaactcctacttgtgtatctatggctggtctaccaacccattggtcgagttctacatcgttgagtcctgggggaactggagaccgcctggtgccacgtccctgggccaagtgacaatcgatggcgggacctacgacatctataggacgacacgcgtcaaccagccttgcgtggacggggacacactggtgctgacaaaggagttcgggctcatcaagatcaaggagctctacgagaagctggacggcaaggggcgcaagattgtggagggcaacgaggagtggaccgagctggagaagccaatcacggtctacggctacaaggacgggaagatcgttgagattaaggccacccacgtttacaagggcgtgtccagcgggatggtcgagatcaggacccggacgggccggaagatcaaggtgacgccgattcaccgcctgttcacaggcagggtcactaaggacgggctgatcctcaaggaggtcatggctatgcatgttaagcccggcgataggatcgccgtggtcaagaagattgacggcggggagtacatcaagctcgattcgtctaacgtgggcgagatcaaggtcccggagattctcaatgaggagctggcggagttcctcggctacctgatggctaacggcacactgaagtcggggatcattgagatctactgcgacgatgagtctctcctggagagggtgaactccctgtccctcaagctgttcggcgtcggcgggcggattgtccagaaggttgacgggaaggcgctcgtgatccagagcaagccactggtcgacgttctcaggaggctgggcgtccctgaggataagaaggttgagaactggaaggtgccgcgggagctcctgctcagcccatcgaacgttgtgcgcgccttcgttaatgcgtacattaagggcaaggaggaggtcgagatcaccctcgcttccgaggagggggcttacgagctcagctacctgttcgctaagctgggcatctacgtgacaatttctaagtcaggggagtactacaaggtgcgcgtctcgcggaggggcaacctcgacactatcccagttgaagtgaatgggatgccaaaggtgctgccttacgaggatttcaggaagttcgccaagtccatcggcctggaggaggtcgcggagaatcacctgcagcatatcattttcgacgaggtcatcgatgtcaggtacattccggagccccaggaggtgtacgatgttactacagagactcataatttcgtggggggcaacatgccaactctgctccacaattccattgtggggacagccacgttcgatcagtactggagcgtgcgcacctctaagcggacttcaggaacagtgaccgtgaccgatcacttccgcgcctgggcgaaccggggcctgaacctcggcacaatagaccaaattacattgtgcgtggagggttaccaaagctctggatcagccaacatcacccagaacaccttctctcagggctcttcttccggcagttcgggtggctcatccggctccacaacgactactcgcatcgagtgtgagaacatgtccttgtccggaccctacgttagcaggatcaccaatccctttaatggtattgcgctgtacgccaacggagacacagcccgcgctaccgttaacttccccgcaagtcgcaactacaatttccgcctgcggggttgcggcaacaacaataatcttgcccgtgtggacctgaggatcgacggacggaccgtcgggaccttttattaccagggcacatacccctgggaggccccaattgacaatgtttatgtcagtgcggggagtcatacagtcgaaatcactgttactgcggataacggcacatgggacgtgtatgccgactacctggtgatacagtga

SEQ ID NO: 2797 - DNA, 2136 bp, Artificial Sequence
  Synthetic Construct, AS-111 intein modified protein encoding nucleic acids
atgcaaacaagcattactctgacatccaacgcatccggtacgtttgacggttactattacgaactctggaaggatactggcaatacaacaatgacggtctacactcaaggtcgcttttcctgccagtggtcgaacatcaataacgcgttgtttaggaccgggaagaaatacaaccagaattggcagtctcttggcacaatccggatcacgtactctgcgacttacaacccaaacgggaactcctacttgtgtatctatggctggtctaccaacccattggtcgagttctacatcgttgagtcctgggggaactggagaccgcctggtgccacgtccctgggccaagtgacaatcgatggcgggacctacgacatctataggacgacacgcgtcaaccagccttgcgttaccgctgacacaaggctcgctacacagcatgggctggtccctatcgggtggctgcaggctaatgggggggctctggactgcacggtggacaggagggctctgggcgaggataggagggggacagttactcgcgccgctgtgccagcgttcctcagcgctggccaggctgaggtcttcaaggttaccacggccgagggctaccagatcaaggccacagcgtggcacgagttctacactgctaggggcaagctcaagctgtcggagctcaaggctggggacgagctgtgggtccagtccggcaaggggcagttcggcgctcagggcagcggggctctcggcctcctgatcgggctgattaccggcgacgggcatttcacgaaccgcggcaaggatgagcaggctgccgttatctccctgtggggcgaggagaggcagctcgctgacgatatcgccggctctgtcaatgccctcattgctgggacctcactggctccgcgcgactacctcgtgaagccagttgctgtggccgagcggaacatggtcttcattcgctcaaccatgctcgtcagggttctggatggctacgggttcaatggcgagacgaagctggaggtgccagaggtggtctggaggggctccgaggcttgcatgaggggctacctccaggggctgttccagacagacggcactgtgaacgtctccagcaattcccagagctgctcggtgcggctgtcgtcttcacaccgccctctcctgcaggatgttcaggtgctcctggcgaacttcggcgtcttctcgcgcatccatgagaggagggaggctggcccaaggtctctcccagacgggcagggcgggcagagggattacctgtgccagacacagcacgagctcatcgtggacggcgagtctcgcgaggcgttcatgagggagattgggttcctcctgcccgctaagcgggagaagtacgacgcttgggtcgccgataaggcgctcgttaagacccagaggttcgcggctaccatcacggcgattgagccagctggcgtggagcctgtctacgatactactcagccagacggcaacacagtcatcttcaatgggctcgttacggggcagtccattgtggggacagccacgttcgatcagtactggagcgtgcgcacctctaagcggacttcaggaacagtgaccgtgaccgatcacttccgcgcctgggcgaaccggggcctgaacctcggcacaatagaccaaattacattgtgcgtggagggttaccaaagctctggatcagccaacatcacccagaacaccttctctcagggctcttcttccggcagttcgggtggctcatccggctccacaacgactactcgcatcgagtgtgagaacatgtccttgtccggaccctacgttagcaggatcaccaatccctttaatggtattgcgctgtacgccaacggagacacagcccgcgctaccgttaacttccccgcaagtcgcaactacaatttccgcctgcggggttgcggcaacaacaataatcttgcccgtgtggacctgaggatcgacggacggaccgtcgggaccttttattaccagggcacatacccctgggaggccccaattgacaatgtttatgtcagtgcggggagtcatacagtcgaaatcactgttactgcggataacggcacatgggacgtgtatgccgactacctggtgatacagtga

SEQ ID NO: 2798 - DNA, 2382 bp, Artificial Sequence
  Synthetic Construct, AS-112 intein modified protein encoding nucleic acids
atgcaaacaagcattactctgacatccaacgcatccggtacgtttgacggttactattacgaactctggaaggatactggcaatacaacaatgacggtctacactcaaggtcgcttttcctgccagtggtcgaacatcaataacgcgttgtttaggaccgggaagaaatacaaccagaattggcagtctcttggcacaatccggatcacgtactctgcgacttacaacccaaacgggaactcctacttgtgtatctatggctggtctaccaacccattggtcgagttctacatcgttgagtcctgggggaactggagaccgcctggtgccacgtccctgggccaagtgacaatcgatggcgggacctacgacatctataggacgacacgcgtcaaccagccttgcctctctgcggatcatgaggttctcacatctacagggtggaaggctctccccgctattaaggatgcggatcaggttatgacgctggacctccagacgggcacacagcagtggaactcggtgcaggctaccacgaggttcgcgcgggagggctcactctacaggctgaagtccgacgatatggatgcggtctgcaacgagtctcaccgctggtacctcaatactaaggaccagccaacaacttacaccgctttcaccacgcagcagatgctggataaccagctcgtggctctgcgcaactcctccggcaaggctacggaccagtggaaccacgagtccgggacaactacccacacgaaccataatatccctacagtcggccataacgggaatgttatgttcagctggccagactgcccatggctcccacgcgagttcgtcgctgatgaggcgtgcaacctcgactggtgcaggttcatcggcctcgtgatgggcgacgggtcgattgatcatgtcacggacgctcagggccaggagcactacagcatccagattcatcagagggctgggaacccagcttcgaacgctaatacagaggatgtcctggagaggctggctgctaagctgccaaatttcgtggtccacccatcctgcgttagcggcgcggaggagaagcatacttggaccatcaaccaccgggacatgtaccatttcttcctccccatgatgcgcggcccacagtcctacgaccctctggataacgccatgtgcaggacctaccaggctccagattaccaggccctctcgcggtctgacaatgagcctatcattccagtgccagctgactggaagaccggcaactggtggcacctgcgcaggtggatcaattacccatggctcttctcgctggcccagtctcaggcgagggctatgattaagggcatggctgccgcgaacggggattggtcactctccctgaaggctaggctggacaccggcgattctggggttgtgagggttttcagcaattcgatccccctcatgcacgacatgtcagtgctgggcctcctggccgatactcgcgtgaacattggcgtcgaccataagaaggggcagatgcagctccaggtccctgttaccatgccggcgctcctggcttggtgcatctctttctcattcgcgaactccgacctggctgtggctgctccaaagcctgaggcgtacgataatccgaggcacgacggcttcgtttactgcctcacggtgcccaacgggaatttcctggcccggcgcacagtcgagtacagcgataatgataagattcaggaggtcattgatgctgctcagaagcctttcttcacaggcaactccattgtggggacagccacgttcgatcagtactggagcgtgcgcacctctaagcggacttcaggaacagtgaccgtgaccgatcacttccgcgcctgggcgaaccggggcctgaacctcggcacaatagaccaaattacattgtgcgtggagggttaccaaagctctggatcagccaacatcacccagaacaccttctctcagggctcttcttccggcagttcgggtggctcatccggctccacaacgactactcgcatcgagtgtgagaacatgtccttgtccggaccctacgttagcaggatcaccaatccctttaatggtattgcgctgtacgccaacggagacacagcccgcgctaccgttaacttccccgcaagtcgcaactacaatttccgcctgcggggttgcggcaacaacaataatcttgcccgtgtggacctgaggatcgacggacggaccgtcgggaccttttattaccagggcacatacccctgggaggccccaattgacaatgtttatgtcagtgcggggagtcatacagtcgaaatcactgttactgcggataacggcacatgggacgtgtatgccgactacctggtgatacagtga

SEQ ID NO: 2799 - DNA, 2154 bp, Artificial Sequence
  Synthetic Construct, AS-113 intein modified protein encoding nucleic acids
atgcaaacaagcattactctgacatccaacgcatccggtacgtttgacggttactattacgaactctggaaggatactggcaatacaacaatgacggtctacactcaaggtcgcttttcctgccagtggtcgaacatcaataacgcgttgtttaggaccgggaagaaatacaaccagaattggcagtctcttggcacaatccggatcacgtactctgcgacttacaacccaaacgggaactcctacttgtgtatctatggctggtctaccaacccattggtcgagttctacatcgttgagtcctgggggaactggagaccgcctggtgccacgtccctgggccaagtgacaatcgatggcgggacctacgacatctataggacgacacgcgtcaaccagccttgcgttactgcggatacatgggttatgactacggcggggccggctcaggtttcggagctgacggggcggtctttctcggctgtcgttgacggcaaggcctacgcggtgacatccgatgggttcttcaggactggccacaagccagtcctcgctctgaggaccagggagggccctgctctccgcctgacggctgaccatagggttcgcagggtggctaggaggaccaggtacacgctggaggctgagtggaccgaggctgggcagctgcagccaggcgacgagatcctcctgcacgatcatagggctctcggcgggtgggagggggctggcacacacgctgaggggtacctcctgggcctcctgatcggggacggcactctcaagtccgataaggctgtcattagcgtttgggctccagagctgaaggtggctggcgggggcgctgtcgcctacgcgcagaccggcgccgggggcatcgttcaggccgcggaggctgctgctgctacgctctcccacagggtcgacttccggggcttccagaggtcgatttctgggaggggcgaggctaggatggcttctggcgccgtgcggcacctggctcatgagatggggatgaggccaggccataagacaatcaccacggccatggagaaggcgtccagcgtcttcactgaggggctcctgaggggcctcttcgacgctgatgggagcgttcagggctcgcaggagaagggcgtgagcctcaggctgtcacagtccgatctctcgctcctgcagaccgctcagaggatgctcctgaggctgggcatcgcctccacgatctacccgaacaggcggctcgctcaggctaggccactgccagacggcagggggggcctgcgcgtctacgagacagcgtcacagcacgagctcgttatctccgctgataatctgaggatctacgccgagcggattgggttcgccgacacggataaggctgacaggctcgatcaggctctgggctcttacaaccggtcactcaatcgggagcgcttcacagtgactgtcgagtcgctgaccgaggagggctctgaggacgtgttcgatgttactgtggcggatattcatgctttcgatgctaacgggctctacgttcataactccattgtggggacagccacgttcgatcagtactggagcgtgcgcacctctaagcggacttcaggaacagtgaccgtgaccgatcacttccgcgcctgggcgaaccggggcctgaacctcggcacaatagaccaaattacattgtgcgtggagggttaccaaagctctggatcagccaacatcacccagaacaccttctctcagggctcttcttccggcagttcgggtggctcatccggctccacaacgactactcgcatcgagtgtgagaacatgtccttgtccggaccctacgttagcaggatcaccaatccctttaatggtattgcgctgtacgccaacggagacacagcccgcgctaccgttaacttccccgcaagtcgcaactacaatttccgcctgcggggttgcggcaacaacaataatcttgcccgtgtggacctgaggatcgacggacggaccgtcgggaccttttattaccagggcacatacccctgggaggccccaattgacaatgtttatgtcagtgcggggagtcatacagtcgaaatcactgttactgcggataacggcacatgggacgtgtatgccgactacctggtgatacagtga

SEQ ID NO: 2800 - DNA, 2112 bp, Artificial Sequence
  Synthetic Construct, AS-114 intein modified protein encoding nucleic acids
atgcaaacaagcattactctgacatccaacgcatccggtacgtttgacggttactattacgaactctggaaggatactggcaatacaacaatgacggtctacactcaaggtcgcttttcctgccagtggtcgaacatcaataacgcgttgtttaggaccgggaagaaatacaaccagaattggcagtctcttggcacaatccggatcacgtactctgcgacttacaacccaaacgggaactcctacttgtgtatctatggctggtctaccaacccattggtcgagttctacatcgttgagtcctgggggaactggagaccgcctggtgccacgtccctgggccaagtgacaatcgatggcgggacctacgacatctataggacgacacgcgtcaaccagcctgcgggggttctctcgtcaaagattaagattcctgggggctggaagactatgggcaatattcgggtcggggatgaggtcgttacgccagacggcgggacagctaaggtcctcgctgttcacccacagggcgtgactaaggtggtcagggtccatttcaaggacggccggtacacagacgtctcgcccgatcacctctggaaggttcgcaggcaccattggtgcaacgataaggccatggcgaagctgactcgcgaggaggtggaggagagggtgtggagggtcatcaccacgaacgagctcaaggactacattggcctgagcacgaaggtttacgtgcagctcatcgagccggagaggaatgcggataagccattcaagattcacccttacgttctgggcgtgctcctgggcgacgggtgcatctcccagaaggctgtcgatattaccaagccataccagcagctcttcgacaaggtgcagagcctcctgcctgagcacctggagtgcgtctggaggccaaacaggaagggcgacggggagcccaagaccttcggcatccgcttcaaggatcggcgctccgagcagcacatcaattggcatattcgggacggcctgaaggagctcggcctgtacgggatgcgctcttggggcaaggtcatccccgaggagtacctccacgggtcagctaagcagaggctggagctcctgcagggcctcctggacaccgatgggacggttgataagcataagtcagtgtccttctccagctcgtctaagctcctgagcctcggcgtccagtacctcgttaggtcgctgggcgggatggctaggctgcaggagcgcacaccacactacactcataatggcgagaagagggaggggcggaccgactaccgggtctacatccgctacccgaggcccgaggagctcttcacgctggatcacaagagggagcgggcggtgtcccaccagcatacagagactctccgcctgcaggtcacccatatcgaggagaggcctgacgaggagacgcagtgcattactattgatcatccagatcatctctacattacggacgacttcatcgttactcacaactccattgtggggacagccacgttcgatcagtactggagcgtgcgcacctctaagcggacttcaggaacagtgaccgtgaccgatcacttccgcgcctgggcgaaccggggcctgaacctcggcacaatagaccaaattacattgtgcgtggagggttaccaaagctctggatcagccaacatcacccagaacaccttctctcagggctcttcttccggcagttcgggtggctcatccggctccacaacgactactcgcatcgagtgtgagaacatgtccttgtccggaccctacgttagcaggatcaccaatccctttaatggtattgcgctgtacgccaacggagacacagcccgcgctaccgttaacttccccgcaagtcgcaactacaatttccgcctgcggggttgcggcaacaacaataatcttgcccgtgtggacctgaggatcgacggacggaccgtcgggaccttttattaccagggcacatacccctgggaggccccaattgacaatgtttatgtcagtgcggggagtcatacagtcgaaatcactgttactgcggataacggcacatgggacgtgtatgccgactacctggtgatacagtga

SEQ ID NO: 2801 - DNA, 2361 bp, Artificial Sequence
  Synthetic Construct, AS-115 intein modified protein encoding nucleic acids
atgcaaacaagcattactctgacatccaacgcatccggtacgtttgacggttactattacgaactctggaaggatactggcaatacaacaatgacggtctacactcaaggtcgcttttcctgccagtggtcgaacatcaataacgcgttgtttaggaccgggaagaaatacaaccagaattggcagtctcttggcacaatccggatcacgtactctgcgacttacaacccaaacgggaactcctacttgtgtatctatggctggtctaccaacccattggtcgagttctacatcgttgagtcctgggggaactggagaccgcctggtgccacgtccctgggccaagtgacaatcgatggcgggacctacgacatctataggacgacacgcgtcaaccagccttgcttcgctaaggggacaaaggttctcatggctaacggggatgacaagaatattgaggacatcgcggtcggggaggaggttctcgggaaggacggcctcccacgcgaggtggtcgctctgcctcgggggagggagacaatgtacgaggtcagcgagaagactcagcacagggcggagaccgttttcggcacggcctcgtacacatgcaacgcgactcacaagctcgtgctgcagaccaatcagagggttaacatcacgaatcatgtgctccggggcgagtctcagacctcagttacgtacttccagatgaagaccgctgtggctgacgggagggagattgagctcccaaagctgtgcacgaagtccttccagcactccagccatggccgggagaacgcttggaagaaggccgaggtcttcgcgtccacaatcagccgcgaccccattgattggactgcggaggctcgcgacatctctaggctcggctaccacgtgcgcagggctaccaggcagctctggagcccagttctggtggagaaggaggtcctggctcctatgatcgccaagcggggcttcgatgagtccattgcgccgtacatggcttacctcgtggggctgtgggtcggcgacgggtactccgatagggccacattcagcatcgacattcaggatgtggagatccacgagaggattaaggacttcgcctcacatgctggcctgactccaaggatcgcttgctacaagaagtccagggatgctaccatttcactccacaactccgagacgcggggcaagaatgtccgccagaacctgaatacggggaacctcctgtggtcgctcctggctgagatctgcggcaagaaggagaatgagatgctcttcaagctggtgccaagcttcctccgctcagagtccatcgcggtccgggagtacttcatttctggcctggtcgactcagatgggcacgttaagcgcgacgaggctgataagtgctacagcgccacagtgaagactatctaccctgccgtccgggacggcctcgtcagcgttgcgcgctcgctggggattcagacaagcgtgtcggtcgaggaggccaaggaggtcaactcggttaagcatcaggagtcttacgccatctacatggccaactcctccgctctcgactcggtgctgtctaagtgcgctgctccaaggaagcgggctgaggagcccgtttgcgtgaacagggagccgcacccctacacgttccacatggtcgagaaggaggaggacgatttctacggcatcactctctcagaggactcggatcatcagttcctgctctctaatctcgctctcgttcataattccattgtggggacagccacgttcgatcagtactggagcgtgcgcacctctaagcggacttcaggaacagtgaccgtgaccgatcacttccgcgcctgggcgaaccggggcctgaacctcggcacaatagaccaaattacattgtgcgtggagggttaccaaagctctggatcagccaacatcacccagaacaccttctctcagggctcttcttccggcagttcgggtggctcatccggctccacaacgactactcgcatcgagtgtgagaacatgtccttgtccggaccctacgttagcaggatcaccaatccctttaatggtattgcgctgtacgccaacggagacacagcccgcgctaccgttaacttccccgcaagtcgcaactacaatttccgcctgcggggttgcggcaacaacaataatcttgcccgtgtggacctgaggatcgacggacggaccgtcgggaccttttattaccagggcacatacccctgggaggccccaattgacaatgtttatgtcagtgcggggagtcatacagtcgaaatcactgttactgcggataacggcacatgggacgtgtatgccgactacctggtgatacagtga

SEQ ID NO: 2802 - DNA, 2298 bp, Artificial Sequence
  Synthetic Construct, AS-116 intein modified protein encoding nucleic acids
atgcaaacaagcattactctgacatccaacgcatccggtacgtttgacggttactattacgaactctggaaggatactggcaatacaacaatgacggtctacactcaaggtcgcttttcctgccagtggtcgaacatcaataacgcgttgtttaggaccgggaagaaatacaaccagaattggcagtctcttggcacaatccggatcacgtactctgcgacttacaacccaaacgggaactcctacttgtgtatctatggctggtctaccaacccattggtcgagttctacatcgttgagtcctgggggaactggagaccgcctggtgccacgtccctgggccaagtgacaatcgatggcgggacctacgacatctataggacgacacgcgtcaaccagccttgcctcgcgggggacactctcattacactggctgacgggcggcgggttcctattcgggagctggtctcgcagcagaatttctcggtctgggcgctgaacccgcagacgtacaggctggagagggctcgggtctcccgggccttctgcacaggcatcaagcccgtttacaggctgaccacgaggctcgggaggagcattagggctactgctaatcaccgcttcctgaccccacagggctggaagagggtggacgagctccagcctggggattacctggctctcccaaggaggatccccacggccagcacaccaactctgaccgaggctgagctcgctctcctgggccacctgatcggcgacgggtgcactctccctcaccatgtgattcagtacacctctagggacgctgatctggctacgctcgtcgctcatctggccacaaaggtcttcggctcaaaggttaccccgcagatccgcaaggagctcaggtggtaccaggtgtacctgagggctgctaggccactcgctcctggcaagcgcaacccgatcagcgactggctgagggatctcggcattttcgggctgcggtcgtacgagaagaaggtccccgcgctcctgttctgccagacgtccgaggccatcgcgacattcctgaggcacctctgggctactgacggctgcattcagatgaggagggggaagaagccatacccagctgtgtactacgcgacctccagctaccagctcgcgagggatgtccagtcgctcctgctccgcctgggcatcaacgccaggctcaagaccgttgctcagggcgagaaggggagggtgcagtaccatgtgaaggtctccggcagggaggacctgctcaggttcgtggagaagattggcgctgtcggggctaggcagagggctgctctggcctcggtttacgactacctctctgtgcggacgggcaacccaaatcgcgatatcattcctgtggctctgtggtacgagctcgtccgcgaggccatgtaccagaggggcatctcgcaccggcagctgcatgcgaacctcgggatggcttacggcgggatgacactgttccggcagaatctctctcgggctcgcgccctgaggctcgctgaggctgctgcctgcccagagctgaggcagctcgctcagtcagacgtctactgggatccgatcgtttccattgagcccgacggcgttgaggaggtgttcgatctcactgttccagggccacataacttcgttgctaatgacatcattgctcataattccattgtggggacagccacgttcgatcagtactggagcgtgcgcacctctaagcggacttcaggaacagtgaccgtgaccgatcacttccgcgcctgggcgaaccggggcctgaacctcggcacaatagaccaaattacattgtgcgtggagggttaccaaagctctggatcagccaacatcacccagaacaccttctctcagggctcttcttccggcagttcgggtggctcatccggctccacaacgactactcgcatcgagtgtgagaacatgtccttgtccggaccctacgttagcaggatcaccaatccctttaatggtattgcgctgtacgccaacggagacacagcccgcgctaccgttaacttccccgcaagtcgcaactacaatttccgcctgcggggttgcggcaacaacaataatcttgcccgtgtggacctgaggatcgacggacggaccgtcgggaccttttattaccagggcacatacccctgggaggccccaattgacaatgtttatgtcagtgcggggagtcatacagtcgaaatcactgttactgcggataacggcacatgggacgtgtatgccgactacctggtgatacagtga

SEQ ID NO: 2803 - DNA, 2130 bp, Artificial Sequence
  Synthetic Construct, AS-117 intein modified protein encoding nucleic acids
atgcaaacaagcattactctgacatccaacgcatccggtacgtttgacggttactattacgaactctggaaggatactggcaatacaacaatgacggtctacactcaaggtcgcttttcctgccagtggtcgaacatcaataacgcgttgtttaggaccgggaagaaatacaaccagaattggcagtctcttggcacaatccggatcacgtactctgcgacttacaacccaaacgggaactcctacttgtgtatctatggctggtctaccaacccattggtcgagttctacatcgttgagtcctgggggaactggagaccgcctggtgccacgtccctgggccaagtgacaatcgatggcgggacctacgacatctataggacgacacgcgtcaaccagccttgcgttacggcggagacatgggttatgacggatgagggggctaggcaggtctcggctctgctggatcggcctttcagggcggtcgtgaacggcatcgcctacgattcaggcgagcacgggttcttctgcaccggcctcaagccagtgaagaggctgtccaccgcttgcgggaggcacctcaggctgacggctgaccatctggtccggaaggtggtcggcaagacgaggtggaggcaggaggttgagtgggtgccagctggcgacctcaggcctggggatgaggtgaagctgcacgaccatcgcaccgcgatgattcagacgaggcctgaggatgagaggggctacctcctggggctcctgatcggcgacggggttattcgcgacgataagacactcatctccgtgtggccacaggaggagtgcattggcgctcagccactggggcaccccgtcatgcataaggttgaggctctcctgagggacctcccacacagggctgatttcgctggctggcagaaggtcgagggcaggggggagtacaggatcggcacagctgctctcactgctctggctgctgagtacggcctcacacgcgggaggaagaccatcacgccggagattgagggcgctgagactgctggcttcggggctgctgtcctcaggggcctgttcgacgctgatggcagcgttcagggggctcaggagaagggcgtgtccgtcaggctcgctcagagcgacctggctctcctgcaggctgctcagaggatgctcgctaggctgggcatgaacgctgtgatctacgagaatcgcagggaggcgggcagggctttcctgccagacgggaagggcgggcaggctcacttcgagaccaaggcgcagcatgagctcgtcatctcgggcgagaacctggcgacataccaggagcggattgggttcactgatgtggctaaggctaggaggctcgctgtcgctctgtcgggctacaagagggccctcaatcgggagcgcttctctgccgttgtggcggacgtcgttgacgatggcatggcggaggtgttcgatgttcaggttccaggggttaatgctttcgatgctaatggcttctacgttcacaactccattgtggggacagccacgttcgatcagtactggagcgtgcgcacctctaagcggacttcaggaacagtgaccgtgaccgatcacttccgcgcctgggcgaaccggggcctgaacctcggcacaatagaccaaattacattgtgcgtggagggttaccaaagctctggatcagccaacatcacccagaacaccttctctcagggctcttcttccggcagttcgggtggctcatccggctccacaacgactactcgcatcgagtgtgagaacatgtccttgtccggaccctacgttagcaggatcaccaatccctttaatggtattgcgctgtacgccaacggagacacagcccgcgctaccgttaacttccccgcaagtcgcaactacaatttccgcctgcggggttgcggcaacaacaataatcttgcccgtgtggacctgaggatcgacggacggaccgtcgggaccttttattaccagggcacatacccctgggaggccccaattgacaatgtttatgtcagtgcggggagtcatacagtcgaaatcactgttactgcggataacggcacatgggacgtgtatgccgactacctggtgatacagtga

SEQ ID NO: 2804 - DNA, 2058 bp, Artificial Sequence
  Synthetic Construct, AS-118 intein modified protein encoding nucleic acids
atgcaaacaagcattactctgacatccaacgcatccggtacgtttgacggttactattacgaactctggaaggatactggcaatacaacaatgacggtctacactcaaggtcgcttttcctgccagtggtcgaacatcaataacgcgttgtttaggaccgggaagaaatacaaccagaattggcagtctcttggcacaatccggatcacgtactctgcgacttacaacccaaacgggaactcctacttgtgtatctatggctggtctaccaacccattggtcgagttctacatcgttgagtcctgggggaactggagaccgcctggtgccacgtccctgggccaagtgacaatcgatggcgggacctacgacatctataggacgacacgcgtcaaccagccttgcctcaagcgggggacagaggtcattatgttcgatgggacaactaagaaggtggaggacgttatcgtgggggacgttctcatggggccagacagcacccctaggaacgtgctctcgctgggcagggggagggagatgatgtacgaggtgaagccacggaagggcgagtcctacacggtcaatgagtcacacatcctctccctgcgcaccacgacaggcattgcgaaggggtcctggcctgacaacacagtcttcgatatcagcgttcgggactggctcaagctgccaaagtatgtgactggccctaatgggtacctcaagggctggagggtgccagtcgatttcccaaggaaggagcaggacgaggctctcctgccaccatacctgatgggcctctggctgggcgacgggacttccagctcgggcgctatcacctcgggggagaatgagaaggagattagggcttacctggagtcttacgctgctaggaacggcatgcagatcaggaaggaggggctgacttggtctatttcacacggcaacaccgggcacaagaagcatggcttcacgcatgcgctcaagagcgctggggtgctgaacaataagcacatcccgcataactacaagtgcggcgataggaggcagaggctggagctcctggctggcctcctggactctgatgggtactgcgatctctcaaaggctggcttcgactggatttccgttagcgagaggctggccgacgatttctgctacctctgccggtcgctgggcttcgctgcctacaagaagaagacctgcaagcgctgcgcgaacacagacgtctggggcgattacttcagggtttcggtgtctggggacttctccgaggtgccattcgtcaggggcaggcatcagaatctccccaagcgcaacatcaataagaacgttctgaacgtgggcatcgagtccattacccccgtcggcgttgacgattacttcgggttcacaattgatggggattcaaggttcctcctcggggatttcacagttactcataatacctccattgtggggacagccacgttcgatcagtactggagcgtgcgcacctctaagcggacttcaggaacagtgaccgtgaccgatcacttccgcgcctgggcgaaccggggcctgaacctcggcacaatagaccaaattacattgtgcgtggagggttaccaaagctctggatcagccaacatcacccagaacaccttctctcagggctcttcttccggcagttcgggtggctcatccggctccacaacgactactcgcatcgagtgtgagaacatgtccttgtccggaccctacgttagcaggatcaccaatccctttaatggtattgcgctgtacgccaacggagacacagcccgcgctaccgttaacttccccgcaagtcgcaactacaatttccgcctgcggggttgcggcaacaacaataatcttgcccgtgtggacctgaggatcgacggacggaccgtcgggaccttttattaccagggcacatacccctgggaggccccaattgacaatgtttatgtcagtgcggggagtcatacagtcgaaatcactgttactgcggataacggcacatgggacgtgtatgccgactacctggtgatacagtga

SEQ ID NO: 2805 - DNA, 2028 bp, Artificial Sequence
  Synthetic Construct, AS-119 intein modified protein encoding nucleic acids
atgcaaacaagcattactctgacatccaacgcatccggtacgtttgacggttactattacgaactctggaaggatactggcaatacaacaatgacggtctacactcaaggtcgcttttcctgccagtggtcgaacatcaataacgcgttgtttaggaccgggaagaaatacaaccagaattggcagtctcttggcacaatccggatcacgtactctgcgacttacaacccaaacgggaactcctacttgtgtatctatggctggtctaccaacccattggtcgagttctacatcgttgagtcctgggggaactggagaccgcctggtgccacgtccctgggccaagtgacaatcgatggcgggacctacgacatctataggacgacacgcgtcaaccagcctgctcagccgctggattcgctcgttctcgcgcctacggggttccgccgcatgggggatctcagggagggggatgaggtcgtggtccctaacggcgagatcgcgctgattgacggggtcttcccacagggcgtcagggacgtttggcggatcgtgctgagcgatggctccagcgtcgagtgcgacgatgagcacctctggattgtcggcacatcgtgcgggtggcataggggccagactccgaaggtcatgaccacgcgcgagatcaggctcgacacattcaaggccaacggctcctccaagtggtatgtgccagctgctaccccagtcgacctggggccagatgttggcctgccactcgacccttacctcttcggcctcctgctcggcgatgggtccttccgccacaatctgaggctcagcaccgtcgacgatgagatcagggacgctgctgctgatgctgtggctccggactgccggctggtgcccgtcaccggctcgcgctgcgattacacgatccagctcaagcagcggtctggcggggttcgcaacccagtgattcaggctctgaggaggctggacctctgggggaagacctcccacggcaagttcatccctgaggatttcaagaacacgtctattaagaataggctgtcactgctccaggggctgctcgacacagatggcactgttcatgccgacgggatgtcagtgtccctcaggagcgcttcgctgaggctcgctgaggacgtcgcttggctggttcgctctctcggcgggagggctcgggtcctcccagagaaggctgccttccatgtttcagtggctctgccagacgagtacgctcctttccggctctcccgcaaggctgatcgcgtgaggccaaggcccaagtacaatacgttccggaggggcatccgcgctgtggagtatgtgggcaggaagccggctcagtgcatttctgttgggcatccttcacatgcttacgttacggataatttcactgttactcataattccattgtggggacagccacgttcgatcagtactggagcgtgcgcacctctaagcggacttcaggaacagtgaccgtgaccgatcacttccgcgcctgggcgaaccggggcctgaacctcggcacaatagaccaaattacattgtgcgtggagggttaccaaagctctggatcagccaacatcacccagaacaccttctctcagggctcttcttccggcagttcgggtggctcatccggctccacaacgactactcgcatcgagtgtgagaacatgtccttgtccggaccctacgttagcaggatcaccaatccctttaatggtattgcgctgtacgccaacggagacacagcccgcgctaccgttaacttccccgcaagtcgcaactacaatttccgcctgcggggttgcggcaacaacaataatcttgcccgtgtggacctgaggatcgacggacggaccgtcgggaccttttattaccagggcacatacccctgggaggccccaattgacaatgtttatgtcagtgcggggagtcatacagtcgaaatcactgttactgcggataacggcacatgggacgtgtatgccgactacctggtgatacagtga

SEQ ID NO: 2806 - DNA, 2511 bp, Artificial Sequence
  Synthetic Construct, AS-120 intein modified protein encoding nucleic acids
atgcaaacaagcattactctgacatccaacgcatccggtacgtttgacggttactattacgaactctggaaggatactggcaatacaacaatgacggtctacactcaaggtcgcttttcctgccagtggtcgaacatcaataacgcgttgtttaggaccgggaagaaatacaaccagaattggcagtctcttggcacaatccggatcacgtactctgcgacttacaacccaaacgggaactcctacttgtgtatctatggctggtctaccaacccattggtcgagttctacatcgttgagtcctgggggaactggagaccgcctggtgccacgtccctgggccaagtgacaatcgatggcgggacctacgacatctataggacgacacgcgtcaaccagccttgcttcgctaaggggacacaggttatgatggcggacgggtcggacaagtcgattgaggatattcagctcggggagaatgttatgggcaaggacggcacaccaaggactgtgatctccctcccccgcgggaaggagacaatgtacgaggtctgccactccagcaccaagggcaccacgaaggacacgctgatgaactacgtgtgcagcgggaatcataagatcgtcatgcagacaccacagcagatcggcattactgagcacggcattgacgggaagacctacacgagcgtctcgtacttcgctctcagggattcgcagcacggctaccctatcgttaagaagctgacgaagtctttcgagcatcagcagcacggcgggaaggagcagaccctcatcacggttaacaatttcgtgtcgtctctgaagtcggagccgattaactgggacgtggaggccaagcattacgagtccctcggccactacgtcaagaagtgcagctaccagctgatcaacccggttttccatcagagcggcaagctcgcccaggagattgcgtcgctgaattactctaaggacaaggctcccctcctggcctggctcatcggcttctgggtgggcaacggggctatgcgccactctcagttcgtggtcgagtcacaggacattgagctcgtcaacaggatccaggatattgcgggcctcctgaatctgtccgcgacaactgcttgctactactctggctcaaaggacgatgaggccaagctcgcgaagctgaactcatccagcgctgagggcttcgaggacgacctggaggggaatccaagcgtgaaggagctcgcggacatggataggctgtccgagagcaagacagcgactctgcctaccgctttcggcgtcgagaacatcgacgagctcatcatttcactgggcgaggggaggggcaacgggaatgtcttcgcccaggttatcggctctttcgggattgacctcgctgacaaggatacactggttactaagatcgcccatgagctcgctggcgacgccttcgaggtgagggagcagttcgtggctggcctggtcgatgctgctggctacgtgcgcaaggacgtgtacgatcacgcgtcagaggctaccatctccacggagtcgaagtctaccgtcctcggcctggttaagattgccaggtccctggggatcaagattaccgtgacgtcagacgattccgacgatagcgacgagcacgatcatgcgcactgcggccatgaccacgggtcgtcttcatcctacacagccgtcatgactggggatgcgctcacgaacagcatgcggttctgcgcgatcggccgcaatagggttgctgccaaggagttcatgcgccaggctgtgcccttctacttcagcctggagaagaagtcggaggacgattactacggcatcacagttccagataatacggataagcagtacctgctctcttctatggctctcgttcataattccattgtggggacagccacgttcgatcagtactggagcgtgcgcacctctaagcggacttcaggaacagtgaccgtgaccgatcacttccgcgcctgggcgaaccggggcctgaacctcggcacaatagaccaaattacattgtgcgtggagggttaccaaagctctggatcagccaacatcacccagaacaccttctctcagggctcttcttccggcagttcgggtggctcatccggctccacaacgactactcgcatcgagtgtgagaacatgtccttgtccggaccctacgttagcaggatcaccaatccctttaatggtattgcgctgtacgccaacggagacacagcccgcgctaccgttaacttccccgcaagtcgcaactacaatttccgcctgcggggttgcggcaacaacaataatcttgcccgtgtggacctgaggatcgacggacggaccgtcgggaccttttattaccagggcacatacccctgggaggccccaattgacaatgtttatgtcagtgcggggagtcatacagtcgaaatcactgttactgcggataacggcacatgggacgtgtatgccgactacctggtgatacagtga

SEQ ID NO: 2807 - DNA, 2454 bp, Artificial Sequence
  Synthetic Construct, AS-121 intein modified protein encoding nucleic acids
atgcaaacaagcattactctgacatccaacgcatccggtacgtttgacggttactattacgaactctggaaggatactggcaatacaacaatgacggtctacactcaaggtcgcttttcctgccagtggtcgaacatcaataacgcgttgtttaggaccgggaagaaatacaaccagaattggcagtctcttggcacaatccggatcacgtactctgcgacttacaacccaaacgggaactcctacttgtgtatctatggctggtctaccaacccattggtcgagttctacatcgttgagtcctgggggaactggagaccgcctggtgccacgtccctgggccaagtgacaatcgatggcgggacctacgacatctataggacgacacgcgtcaaccagccttcagtctcttacgatacgccagtcctcatcagggaccctattaacaagatccatctcgtgaagatcggggagttcattgataagttctacgaggagggcgaggagaggacggctaagcacgtgaatgggtactacgtcctctcccatgacggcttccaggtggtctggaagccgatcaagtatgtgctgcggcaccgcacaaacgagatctacgagatcatctacgagggcgggggcaagctggaggctaccggctcgcattctgttttcgtgctcgacccggatacgctggatatcgtcgagaagcccgttatgctcctgaataagggggagtacctggtttctttcaacggcgtgaaggagaataaggaccaccagacaatcgacctcattgatctggtttcggactacaacgatgtctacgttgataatatcccatctgagctcaagaagcatactgggggcaggaacccaatccctctcaagcagtacatgatcctgaggaagcgggtcattacaaagaagaacaatagcctcatcaagctgcgcaggtcgaagtacactctcccgattcggctcgtgctggacgagaagctcgccttcctgttcggggcctacatcgctaacggctgcgtcaaggagaggagggacaagctgatctgcttcaccttcggcaagtccgccaagaacatcgcggataaggtcatgaatattatgtacgagaagttcaacatcaagccattcattgacgatagggggacatacatcatctacgagtaccctcacactctcctggcgatcattttcgagaagctcctgggccgcaagctggaggagaagaagatgccagagatcctgtggtccagccctaagagcgtgattcgcgcgttcttcgagggcctcagggcttactcccagcgcaccctgaggaggaggtacacgagctacaccacggctaacaagaatctcgcctaccagctcctgtggctggctaggttcgctggcttctactcggtcctcaaggaggagaaggaggccgggaagaacaatggcaagacgtactaccatgtgatcgtctacctggaccagtcttacaggaagccgaacgcgtcagagcgggttccggtgaagcccatcctcaagctgattaagtacacaaagccaaggactatgccaccagagctcgcttacatcaagaggcgggagttcatttcaaggaagaccgcgctcaaggctctggagtggatccgcagggacggctcattcacggatttctcccgcgagtacctcaggaagatcgagtccctgattaacggggacatcattgtcctgaagatcaaggatgttcgcaagaagcagtacaagggctacgtgtacgacatttcagttccaattacggaggctttcttcgggggcaacattccaatcctgctccacaactccattgtggggacagccacgttcgatcagtactggagcgtgcgcacctctaagcggacttcaggaacagtgaccgtgaccgatcacttccgcgcctgggcgaaccggggcctgaacctcggcacaatagaccaaattacattgtgcgtggagggttaccaaagctctggatcagccaacatcacccagaacaccttctctcagggctcttcttccggcagttcgggtggctcatccggctccacaacgactactcgcatcgagtgtgagaacatgtccttgtccggaccctacgttagcaggatcaccaatccctttaatggtattgcgctgtacgccaacggagacacagcccgcgctaccgttaacttccccgcaagtcgcaactacaatttccgcctgcggggttgcggcaacaacaataatcttgcccgtgtggacctgaggatcgacggacggaccgtcgggaccttttattaccagggcacatacccctgggaggccccaattgacaatgtttatgtcagtgcggggagtcatacagtcgaaatcactgttactgcggataacggcacatgggacgtgtatgccgactacctggtgatacagtga

SEQ ID NO: 2808 - DNA, 2064 bp, Artificial Sequence
  Synthetic Construct, AS-122 intein modified protein encoding nucleic acids
atgcaaacaagcattactctgacatccaacgcatccggtacgtttgacggttactattacgaactctggaaggatactggcaatacaacaatgacggtctacactcaaggtcgcttttcctgccagtggtcgaacatcaataacgcgttgtttaggaccgggaagaaatacaaccagaattggcagtctcttggcacaatccggatcacgtactctgcgacttacaacccaaacgggaactcctacttgtgtatctatggctggtctaccaacccattggtcgagttctacatcgttgagtcctgggggaactggagaccgcctggtgccacgtccctgggccaagtgacaatcgatggcgggacctacgacatctataggacgacacgcgtcaaccagccttcataccataaggatttcaagattatgctcgctgacgggcgcaaggttcgcatcggggatctcgtggatgagctgatcggcaagaatagggagaaggttatcaagggcaaggacacagagattctgttcgtggacgatctcttcctcctgtcgtacaatatgcggtctggggagcaggttctggtgaaggctgatcgggtgagccgccacaaggctccagaccagttcatcaagctgcgcttctcgaacggcgctgagatcattgtcaccccggagcatcccgttctcatcattaacaatggcaagatcaagaccgttagggcggatacggtgcggaaggggaccctgacgatcggcgtgctcgggcacaagatcattaaggaggtcaacgaggacgatatcattaacaatatccgcaggaagattgtgctggacaaggagctcccgtacatccacgctaagaatatttcagaggccgtcgagatgcgggaccagctgatgtccatcgatattcccaccttcatcgttaagcataagaacgagattcgcctgtacccatccggcccttgcagcctcaggaggctcctgctcatgcacggggtcgaggaggtggtcttctcggacgagctgctctacgagatcatgaattgccatctctacccggccacctggtacgagctgctctactccatgggcctgacgaagatcgccaaggagctcaacgtgtacgacttcgagattctggcgggcatcattaagaaggtggagaaggaggtcatcatgctctctcaggtcctggggctccgcaacgagacacagactgagctgctccatctgaagtcaaggcgggagctgctcatcaggctcaaggacaagctggatatgctccgcaagaggctgaaggacctggaggaggccctcggcaaggatgccgtgatcaggatgattacagacgtcgaggttatcaagaacactgactccgattgggtctacgacattactattgagccttaccacctcttcgtttcggatgggctcattctgcataactccattgtggggacagccacgttcgatcagtactggagcgtgcgcacctctaagcggacttcaggaacagtgaccgtgaccgatcacttccgcgcctgggcgaaccggggcctgaacctcggcacaatagaccaaattacattgtgcgtggagggttaccaaagctctggatcagccaacatcacccagaacaccttctctcagggctcttcttccggcagttcgggtggctcatccggctccacaacgactactcgcatcgagtgtgagaacatgtccttgtccggaccctacgttagcaggatcaccaatccctttaatggtattgcgctgtacgccaacggagacacagcccgcgctaccgttaacttccccgcaagtcgcaactacaatttccgcctgcggggttgcggcaacaacaataatcttgcccgtgtggacctgaggatcgacggacggaccgtcgggaccttttattaccagggcacatacccctgggaggccccaattgacaatgtttatgtcagtgcggggagtcatacagtcgaaatcactgttactgcggataacggcacatgggacgtgtatgccgactacctggtgatacagtga

SEQ ID NO: 2809 - DNA, 2046 bp, Artificial Sequence
  Synthetic Construct, AS-123 intein modified protein encoding nucleic acids
atgcaaacaagcattactctgacatccaacgcatccggtacgtttgacggttactattacgaactctggaaggatactggcaatacaacaatgacggtctacactcaaggtcgcttttcctgccagtggtcgaacatcaataacgcgttgtttaggaccgggaagaaatacaaccagaattggcagtctcttggcacaatccggatcacgtactctgcgacttacaacccaaacgggaactcctacttgtgtatctatggctggtctaccaacccattggtcgagttctacatcgttgagtcctgggggaactggagaccgcctggtgccacgtccctgggccaagtgacaatcgatggcgggacctacgacatctataggacgacacgcgtcaaccagccttgcctcgggaaggggacaccggttatgatgtacgatgggcggacaaagccagtggagaaggtggaggtcggggacaggctcatgggggacgatggcagcccaaggacggtgcagtcgctggccagggggagggagcagatgtactgggtccgccagaagaggggcatggactacagggttaacgagagccacatcctctcgctgaagaagtctaggagggagggcgcccgcgacagggggtcaatcgcggatatttccgtccgcgactacctggatcagtctgacaagtggaaggacgataacaagggcttcaaggtggctgctgagttcccagaccagccagtccccctcgatccttacttcctcggcctgtggctcggcgatgggaagtccgacaatgctaggatctacaccacggacgaggaggtcatcacgggcctgcaggagattgccgagaagcggggggacacaatttcagtgtccgatgagcatcggcgctgcccagcctacctcgtcaagtctggcgacaggggcggggctatggctaccagggagtcagttcagggcgctctgagggctctcggcgtgctgggggacaagcacatccctcatctgtacctcggcaactccagggggaagcggctcaggctcctggctggcctgattgacagcgatggccacctcaatgacgggcatggcgggacgtacgagatcacacagtccagcgagcagctggcgagggacattaagttcctctgcgatactctgggctaccggacatcgctcactcagaagaccgctcgcatctcgtctaccggctacgagtccgaggttcacagggtgcggttcaacgggaatgttgacgagattccggtgcgggtcgagcgcaagaaggcttccccatggactgatgtcagggactggcggatgaccggcatcgatgtcgagcccgacggcgttggggattacttcggcttcactctggatggcaatgggcgcttcctcctcggggatggcactgttactcataattccattgtggggacagccacgttcgatcagtactggagcgtgcgcacctctaagcggacttcaggaacagtgaccgtgaccgatcacttccgcgcctgggcgaaccggggcctgaacctcggcacaatagaccaaattacattgtgcgtggagggttaccaaagctctggatcagccaacatcacccagaacaccttctctcagggctcttcttccggcagttcgggtggctcatccggctccacaacgactactcgcatcgagtgtgagaacatgtccttgtccggaccctacgttagcaggatcaccaatccctttaatggtattgcgctgtacgccaacggagacacagcccgcgctaccgttaacttccccgcaagtcgcaactacaatttccgcctgcggggttgcggcaacaacaataatcttgcccgtgtggacctgaggatcgacggacggaccgtcgggaccttttattaccagggcacatacccctgggaggccccaattgacaatgtttatgtcagtgcggggagtcatacagtcgaaatcactgttactgcggataacggcacatgggacgtgtatgccgactacctggtgatacagtga

SEQ ID NO: 2810 - DNA, 2088 bp, Artificial Sequence
  Synthetic Construct, AS-124 intein modified protein encoding nucleic acids
atgcaaacaagcattactctgacatccaacgcatccggtacgtttgacggttactattacgaactctggaaggatactggcaatacaacaatgacggtctacactcaaggtcgcttttcctgccagtggtcgaacatcaataacgcgttgtttaggaccgggaagaaatacaaccagaattggcagtctcttggcacaatccggatcacgtactctgcgacttacaacccaaacgggaactcctacttgtgtatctatggctggtctaccaacccattggtcgagttctacatcgttgagtcctgggggaactggagaccgcctggtgccacgtccctgggccaagtgacaatcgatggcgggacctacgacatctataggacgacacgcgtcaaccagccttgcttcgatcctgagacagaggtcgtgacagtggacggcattaggcatgtggaggagattgaggtcggggatagggtttactcgctgaacccagacacgggcgctgtcgagatcaagcccgttaccgcgacgcagagccagcattacgctggcccgatggtggagattaagaaccagcataccgacttcctggtcacgcccaatcaccgcttcctcacacagaggttcacttcgggcgagtacacagatctggagtgggagactgctggcgacatgctcggggatcgcatccgcaggaggctcccatcactgaggtccctccctgctacacaggagaggccaggccctatctcactgtccgctgtgtgcgacaggctcgctatcgagcacaagactggcccacgcgggattaaggagctgaggaggcaggctaggtggcagcctgaggagtacgagctcacagattggctgaggatcctcggctggttcgccacagaggggactctgtacaagtctaaggcgaggcagtacgagaacggcaatgtgcggggggtctcataccagaccacgctctgccagaagaacgacatcggccgctccgagattgcgacgctcctgaacaggaccgggatcacgtactccagcgaccagaatgatcatagcttctgctcgaaggttctgtacgagattctggaggctgagtgcggcagcgactcgttctctaagcacctgccaccatggatcttccagctggggccaaaggacctcaagattgtcttcgataccctcatgcagggcgactccgctgctaacggggatcggttcacaacttcgtctaatcagctggccgaggacttcatcaggctcgctatgcacattggcaggagggctttccacatgccgaacgatgggtctcacaggatccaggttaataccgtgaggggccagcggccgacgattaagcccaagcatcggcagcaggtcgactacgatggcatgatccactgcctgaccgtggcggataatcatactgtgctcgctggcaggaataggaagttcaattggactgggcagtccattgtggggacagccacgttcgatcagtactggagcgtgcgcacctctaagcggacttcaggaacagtgaccgtgaccgatcacttccgcgcctgggcgaaccggggcctgaacctcggcacaatagaccaaattacattgtgcgtggagggttaccaaagctctggatcagccaacatcacccagaacaccttctctcagggctcttcttccggcagttcgggtggctcatccggctccacaacgactactcgcatcgagtgtgagaacatgtccttgtccggaccctacgttagcaggatcaccaatccctttaatggtattgcgctgtacgccaacggagacacagcccgcgctaccgttaacttccccgcaagtcgcaactacaatttccgcctgcggggttgcggcaacaacaataatcttgcccgtgtggacctgaggatcgacggacggaccgtcgggaccttttattaccagggcacatacccctgggaggccccaattgacaatgtttatgtcagtgcggggagtcatacagtcgaaatcactgttactgcggataacggcacatgggacgtgtatgccgactacctggtgatacagtga

SEQ ID NO: 2811 - DNA, 2301 bp, Artificial Sequence
  Synthetic Construct, AS-125 intein modified protein encoding nucleic acids
atgcaaacaagcattactctgacatccaacgcatccggtacgtttgacggttactattacgaactctggaaggatactggcaatacaacaatgacggtctacactcaaggtcgcttttcctgccagtggtcgaacatcaataacgcgttgtttaggaccgggaagaaatacaaccagaattggcagtctcttggcacaatccggatcacgtactctgcgacttacaacccaaacgggaactcctacttgtgtatctatggctggtctaccaacccattggtcgagttctacatcgttgagtcctgggggaactggagaccgcctggtgccacgtccctgggccaagtgacaatcgatggcgggacctacgacatctataggacgacacgcgtcaaccagccttgcatttcgggggatagcctcattagcctcgcctcaacgggcaagcgggtttcaatcaaggatctgctggatgagaaggatttcgagatctgggcgattaacgagcagaccatgaagctggagtctgctaaggtttcacgcgtgttctgcaccggcaagaagctggtgtacatcctcaagacgcggctggggcgcaccattaaggctacggccaaccacaggttcctcacgatcgacggctggaagcggctggatgagctgtcactcaaggagcatatcgccctcccaaggaagctggagtccagctcgctgcagctcatgtccgacgaggagctcggcctcctggggcacctgatcggcgatgggtgcaccctgcctaggcatgccatccagtacacgagcaacaagattgagctcgcggagaaggtggtcgagctggcgaaggctgtcttcggcgaccagatcaatccgaggatttcccaggagcggcagtggtaccaggtttacatcccggcgagctaccggctcacacacaacaagaagaatcccatcactaagtggctggagaacctcgacgtcttcggcctgcgcagctacgagaagttcgtgccgaatcaggtcttcgagcagccacagagggctatcgcgattttcctgcgccatctctggtcgacagacgggtgcgttaagctcatcgtggagaagtcttcacgccccgttgcttactacgccacttccagcgagaagctggctaaggacgtgcagtccctcctgctcaagctcggcatcaacgcgcgcctgtcaaagatttcccagaacggcaaggggagggataattaccacgtgacaatcactggccaggccgacctccagatcttcgtcgatcagattggggctgttgacaaggataagcaggcctccgtcgaggagatcaagacacacattgcgcagcatcaggctaacactaatagggacgtgatcccaaagcagatttggaagacatacgtcctgcctcagatccagattaagggcatcaccacgcgcgatctccagatgaggctgggcaacgcttactgcgggacggctctctacaagcacaatctgtcgcgcgagagggctgctaagatcgctaccattacgcagtctccggagatcgagaagctctcgcagtctgacatctactgggatagcatcgtgtcgattacagagactggcgtcgaggaggttttcgatctcactgttccagggccacataacttcgttgctaatgacatcatcgtgcataattccattgtggggacagccacgttcgatcagtactggagcgtgcgcacctctaagcggacttcaggaacagtgaccgtgaccgatcacttccgcgcctgggcgaaccggggcctgaacctcggcacaatagaccaaattacattgtgcgtggagggttaccaaagctctggatcagccaacatcacccagaacaccttctctcagggctcttcttccggcagttcgggtggctcatccggctccacaacgactactcgcatcgagtgtgagaacatgtccttgtccggaccctacgttagcaggatcaccaatccctttaatggtattgcgctgtacgccaacggagacacagcccgcgctaccgttaacttccccgcaagtcgcaactacaatttccgcctgcggggttgcggcaacaacaataatcttgcccgtgtggacctgaggatcgacggacggaccgtcgggaccttttattaccagggcacatacccctgggaggccccaattgacaatgtttatgtcagtgcggggagtcatacagtcgaaatcactgttactgcggataacggcacatgggacgtgtatgccgactacctggtgatacagtga

SEQ ID NO: 2812 - DNA, 2319 bp, Artificial Sequence
  Synthetic Construct, AS-126 intein modified protein encoding nucleic acids
atgcaaacaagcattactctgacatccaacgcatccggtacgtttgacggttactattacgaactctggaaggatactggcaatacaacaatgacggtctacactcaaggtcgcttttcctgccagtggtcgaacatcaataacgcgttgtttaggaccgggaagaaatacaaccagaattggcagtctcttggcacaatccggatcacgtactctgcgacttacaacccaaacgggaactcctacttgtgtatctatggctggtctaccaacccattggtcgagttctacatcgttgagtcctgggggaactggagaccgcctggtgccacgtccctgggccaagtgacaatcgatggcgggacctacgacatctataggacgacacgcgtcaaccagccttgcttctcgggggatactctcgtcgcgctgacagacgggcggtcggtttctttcgagcagctcgtggaggaggagaagcagggcaagcagaatttctgctacacaatccggcacgacggctcgattggggtggagaagatcattaatgctcgcaagacaaagactaacgccaaggttatcaaggtgacactcgacaacggcgagtctatcatttgcactcccgaccacaagttcatgctgagggatgggagctacaagtgcgccatggatctcacgctggacgattcgctcatgcctctgcatcgcaagatctcgaccacggaggactctggcatcaccattgatgggtacgagatggtgtggtccccgaggtccgacagctggctcttcacgcacctggtcgccgattggtacaaccggtggcagggcatctacattgcggaggagaagcagcattgccaccataaggacttcaataagcgcaacaataacccggataacctcatcaggctgtctcccgagaagcacctcgccctgcaccggaagcatatttcaaagacactccaccgcccagacgtggtcgagaagtgccgcaggatccatcagtcccctgagttccggcgcaagatgtcagcgaggatgcagtccccggagactcgggctatcctcagcaagcaggctcaggcccagtggcagaatgagacctacaagctgacgatgatggagtcgtggaggtctttctacgacagcaacgaggattacaggcagcagaatgctgagcagctcaacagggctcagcaggagtactgggctcaggctgagaacaggaccgctcaggctgagcgcgttaggcagcatttcgctcagaatccgggcctgcgccagcagtactcggagaacgcggtgaagcagtggaataaccccgagctcctgaagtggcggcagaagaagacaaaggagcagtggactccagagttccgcgagaagaggagggaggctctcgctcagacctactacaggaagacgctcgccgcgctgaagcaggtcgagatcgagaacgggtacctggacatttcagcctacgattcctaccgcatcagcaccaaggacaagtccctcctgcggttcgatcgcttctgcgagaggtacttcgagaatgacgagaacctcgcgcgcgaggctgtcctgaattacaaccacaggatcgtcaacattgaggcggtttccgagacgatcgacgtttacgacattgaggttccacatacgcataacttcgctctcgcttcaggggttttcgttcataattccattgtggggacagccacgttcgatcagtactggagcgtgcgcacctctaagcggacttcaggaacagtgaccgtgaccgatcacttccgcgcctgggcgaaccggggcctgaacctcggcacaatagaccaaattacattgtgcgtggagggttaccaaagctctggatcagccaacatcacccagaacaccttctctcagggctcttcttccggcagttcgggtggctcatccggctccacaacgactactcgcatcgagtgtgagaacatgtccttgtccggaccctacgttagcaggatcaccaatccctttaatggtattgcgctgtacgccaacggagacacagcccgcgctaccgttaacttccccgcaagtcgcaactacaatttccgcctgcggggttgcggcaacaacaataatcttgcccgtgtggacctgaggatcgacggacggaccgtcgggaccttttattaccagggcacatacccctgggaggccccaattgacaatgtttatgtcagtgcggggagtcatacagtcgaaatcactgttactgcggataacggcacatgggacgtgtatgccgactacctggtgatacagtga

SEQ ID NO: 2813 - DNA, 2274 bp, Artificial Sequence
  Synthetic Construct, AS-127 intein modified protein encoding nucleic acids
atgcaaacaagcattactctgacatccaacgcatccggtacgtttgacggttactattacgaactctggaaggatactggcaatacaacaatgacggtctacactcaaggtcgcttttcctgccagtggtcgaacatcaataacgcgttgtttaggaccgggaagaaatacaaccagaattggcagtctcttggcacaatccggatcacgtactctgcgacttacaacccaaacgggaactcctacttgtgtatctatggctggtctaccaacccattggtcgagttctacatcgttgagtcctgggggaactggagaccgcctggtgccacgtccctgggccaagtgacaatcgatggcgggacctacgacatctataggacgacacgcgtcaaccagccttgcatttctatggactctatgattctgacaactgagggctacaagtcgctgcaggagattttcgagacacagggggttaaggtggacaacaaggagaaggttatcgagctgaagtacccgctcattaatcggtacggcgacgtggagtacacctcccacttcacgaagaacggggagaagccaacaaagcgcatcaagactaataagggcattgagctggttaacacatacaatcatcctctcctggtgagggaggggttcaacctgatctggaagaagagcgaggacatcgaagtgggcgatattctcgtgtcccgcgtgggcgaccaccagttcgggaacaataacactgtggagaacgaggaggaggcttacgctctgggctgcatggtcgcggattcttacctggggtcatactcccggctcagcttctcgaacgacaagaaggagatcctcgataaggtctcaaagttctggaacaccttctccaataaggaggtttactacgacacctacaaggagtccaaggggatcacgattcacctgcatgacacaaacaagactaaggagttccatgataagtacaagatcgagtacggcgtcgctaaggacaagaagatcccgaagtgcattatggagagccccgagaacatccagctggccttcgtctcgggctacctggagtgcgagtccagcatctctgagaagaacctggaggttacctctgcttcaaaggacctcctgaaggatctccagctgatcctctcgaacatcggcattgtgtctacgaataaggagaaggtggtcaagaagtacaagcacaacaagtactaccggctgatcgtcaatcgcaaggagctcattaagctcctgccgctcctgaggttcgagacgcagcagcggaagaaccagaaggagaatttcctcagcaataacacaaagatcaagtcgtcttacggcaacactattgaggggtcacgctacctcctgaagaagtacagggactccctgaatatcgataagaaggagttctccaagtacctcagccgggacaccatcacgattgatcgcctgagggaggtcatctcgctctacccggacggcgataaggagattcgcgagctgttcgagaacgttgtgaataacaatatctactaccagaaggtggagcaggtcctggagggcgagatcattcccaccttcgacgtttgcatgcctaagactcattccttcatcgccaacacaatcgtcaaccacaactccattgtggggacagccacgttcgatcagtactggagcgtgcgcacctctaagcggacttcaggaacagtgaccgtgaccgatcacttccgcgcctgggcgaaccggggcctgaacctcggcacaatagaccaaattacattgtgcgtggagggttaccaaagctctggatcagccaacatcacccagaacaccttctctcagggctcttcttccggcagttcgggtggctcatccggctccacaacgactactcgcatcgagtgtgagaacatgtccttgtccggaccctacgttagcaggatcaccaatccctttaatggtattgcgctgtacgccaacggagacacagcccgcgctaccgttaacttccccgcaagtcgcaactacaatttccgcctgcggggttgcggcaacaacaataatcttgcccgtgtggacctgaggatcgacggacggaccgtcgggaccttttattaccagggcacatacccctgggaggccccaattgacaatgtttatgtcagtgcggggagtcatacagtcgaaatcactgttactgcggataacggcacatgggacgtgtatgccgactacctggtgatacagtga

SEQ ID NO: 2814 - DNA, 2094 bp, Artificial Sequence
  Synthetic Construct, AS-128 intein modified protein encoding nucleic acids
atgcaaacaagcattactctgacatccaacgcatccggtacgtttgacggttactattacgaactctggaaggatactggcaatacaacaatgacggtctacactcaaggtcgcttttcctgccagtggtcgaacatcaataacgcgttgtttaggaccgggaagaaatacaaccagaattggcagtctcttggcacaatccggatcacgtactctgcgacttacaacccaaacgggaactcctacttgtgtatctatggctggtctaccaacccattggtcgagttctacatcgttgagtcctgggggaactggagaccgcctggtgccacgtccctgggccaagtgacaatcgatggcgggacctacgacatctataggacgacacgcgtcaaccagccttgccatcctgcggacactaaggtcatcgtgaagggcaagggcatcgttaatatctcggacgtgaaggagggggactacattctcggcatcgacggctggcagcgggtcaagaaggtttggaagtaccactacgagggcaagctcatcaacattaatgggctgaagtgcacgccgaaccataaggttcccgtggtcacagagaatgacaggcagactcgcatcagggattccctcgccaagagcttcctgtcgggcaaggtcaaggggaagatcattaccacgaagctcttcgagaagatcgcggagttcgagaagaacaagccgtcggaggaggagatcctcaagggcgagctgtctgggatcattctggccgagggcaccctcctgaggaaggacatcgagtacttcgattccagccgggggaagaagcgcattagccaccagtaccgggtggagatcacgattggcgagaacgagaaggagctcctggagcggatcctctacattttcgacaagctgttcggcatccgcccatcggtgaagaagaagggggataccaacgcgctcaagatcacaactgctaagaaggccgtctacctgcagatcgaggagctcctgaagaatattgagtcactctacgcccctgcggttctgcgcggcttcttcgagagggacgctaccgtgaacaagatccgctctacgattgttgtgacccagggcacgaacaataagtggaagatcgacattgtcgcgaagctcctggattccctcggcatcccatacagccgctacgagtacaagtacattgagaatgggaaggagctcacaaagcatatcctggagattactggcagggatgggctcatcctgttccagacactcgtcggcttcatttcgtctgagaagaacgaggcgctggagaaggctatcgaggttagggagatgaaccggctcaagaacaattctttctacaatctgtcaaccttcgaggtgtcatccgagtactacaagggcgaggtctacgatctcactctggagggcaatccttactacttcgccaatggcatcctcacacataattccattgtggggacagccacgttcgatcagtactggagcgtgcgcacctctaagcggacttcaggaacagtgaccgtgaccgatcacttccgcgcctgggcgaaccggggcctgaacctcggcacaatagaccaaattacattgtgcgtggagggttaccaaagctctggatcagccaacatcacccagaacaccttctctcagggctcttcttccggcagttcgggtggctcatccggctccacaacgactactcgcatcgagtgtgagaacatgtccttgtccggaccctacgttagcaggatcaccaatccctttaatggtattgcgctgtacgccaacggagacacagcccgcgctaccgttaacttccccgcaagtcgcaactacaatttccgcctgcggggttgcggcaacaacaataatcttgcccgtgtggacctgaggatcgacggacggaccgtcgggaccttttattaccagggcacatacccctgggaggccccaattgacaatgtttatgtcagtgcggggagtcatacagtcgaaatcactgttactgcggataacggcacatgggacgtgtatgccgactacctggtgatacagtga

SEQ ID NO: 2815 - DNA, 2628 bp, Artificial Sequence
  Synthetic Construct, AS-129 intein modified protein encoding nucleic acids
atgcaaacaagcattactctgacatccaacgcatccggtacgtttgacggttactattacgaactctggaaggatactggcaatacaacaatgacggtctacactcaaggtcgcttttcctgccagtggtcgaacatcaataacgcgttgtttaggaccgggaagaaatacaaccagaattggcagtctcttggcacaatccggatcacgtactctgcgacttacaacccaaacgggaactcctacttgtgtatctatggctggtctaccaacccattggtcgagttctacatcgttgagtcctgggggaactggagaccgcctggtgccacgtccctgggccaagtgacaatcgatggcgggacctacgacatctataggacgacacgcgtcaaccagccttctatcctgcctaacgagtggctgcccatcatcgagaacggggaggtgaagttcgtgaagatcggggagttcattgatcgctacatggaggagcagaaggacaaggtgcgcacagtcgataacactgaggttctggaggtggacaatatcttcgccttctccctgaacaaggagtctaagaagtcagagatcaagaaggtgaaggccctcattcgccacaagtacaagggcgaggcgtacgaggtcgagctcaactccggccgcaagatccacattacaagggggcattctctcttcactatcaggaacggcaagatcaaggagatttggggcgaggaggttaaggtcggggacctcatcattgttccgaagaaggtgaagctgaatgagaaggaggctgtgatcaacattccagagctgatctctaagctccctgacgaggatacagccgacgtggtcatgaccacgcccgtcaagggcaggaagaatttcttcaaggggatgctccggaccctgaagtggatcttcggcgaggagtcaaagcggattcgcacgttcaacaggtacctcttccatctggaggagctcggcttcgtgaagctcctgccgaggggctacgaggtcaccgactgggagggcctgaagaggtaccggcagctgtacgagaagctcgtgaagaatctgcgctacaacggcaataagcgggagtacctggttcgcttcaacgacatcaaggattcagtgtcctgcttcccccgcaaggagctggaggagtggaagatcggcacaaggaaggggttccgcaggaagtgcattctcaaggttgacgaggatttcggcaagttcctggggtactacgtctcggagggctacgctggggctcagaagaacaagactggcgggatgagctactcggtcaagctctacaacgagaatccaaacgttctgaaggacatgaagaatatcgcggagaagttcttcggcaaggtccgggttgggaagaactgcgtggatattcctaagaagatggcttacctcctggctaagagcctgtgcggcgtcaccgctgagaacaagaggatcccgtcgatcattttcgactccagcgagcccgtgaggtgggcgttcctcagggcttacttcgtcggcgacggggatattcacccatccaagcgcctcaggctgtccacgaagagcgagctcctggccaatcagctcgtcttcctcctgaactcactgggcgtttcgtctatcaagattggcttcgactccggggtctaccgggtttacatcaacgaggatctgcctttcctccagacctcccgccagaagaatacgtactacccgaacctcatccccaaggaggtgctggaggagattttcggccgcaagttccagaagaacatcacgttcgagaagttcaaggagctcgcggacagcgggaagctggataagaggaaggtgaagctcctggacttcctcctgaatggcgacatcgtcctcgatcgggtgaagaacgtcgagaagcgcgagtacgagggctacgtgtacgatctctcagtggaggataatgagaatttcctcgtgggcttcggcctgctctacgctcataattccattgtggggacagccacgttcgatcagtactggagcgtgcgcacctctaagcggacttcaggaacagtgaccgtgaccgatcacttccgcgcctgggcgaaccggggcctgaacctcggcacaatagaccaaattacattgtgcgtggagggttaccaaagctctggatcagccaacatcacccagaacaccttctctcagggctcttcttccggcagttcgggtggctcatccggctccacaacgactactcgcatcgagtgtgagaacatgtccttgtccggaccctacgttagcaggatcaccaatccctttaatggtattgcgctgtacgccaacggagacacagcccgcgctaccgttaacttccccgcaagtcgcaactacaatttccgcctgcggggttgcggcaacaacaataatcttgcccgtgtggacctgaggatcgacggacggaccgtcgggaccttttattaccagggcacatacccctgggaggccccaattgacaatgtttatgtcagtgcggggagtcatacagtcgaaatcactgttactgcggataacggcacatgggacgtgtatgccgactacctggtgatacagtga

SEQ ID NO: 2816 - DNA, 6972 bp, Artificial Sequence
  Synthetic Construct, AS-130 intein modified protein encoding nucleic acids
atgcaaacaagcattactctgacatccaacgcatccggtacgtttgacggttactattacgaactctggaaggatactggcaatacaacaatgacggtctacactcaaggtcgcttttcctgccagtggtcgaacatcaataacgcgttgtttaggaccgggaagaaatacaaccagaattggcagtctcttggcacaatccggatcacgtactctgcgacttacaacccaaacgggaactcctacttgtgtatctatggctggtctaccaacccattggtcgagttctacatcgttgagtcctgggggaactggagaccgcctggtgccacgtccctgggccaagtgacaatcgatggcgggacctacgacatctataggacgacacgcgtcaaccagccttgcgcggcctacgatactctcgtgctgcagaaggacgggtcgctggttacgctggcggaggtttacaagcggcaggagattgagctgctcacactgggcaagaacagcaagttctacctcactaagccatcggccttcattgacgatggcatcaagcctattttccgcgtcaccacgaagctcgggaggttcgtggagacaactatcacccacccgttcctgaccgtgaacggctggaagcccctcagcaagctgcaggtcggggagaagattgccgtgccccgcaggctcaacattttcgggaatgagaccatctcggagtctaagttctccagcctgatcaacttcgacaatctctacctgttcccgctcgtgttccagctggagcggtcgcagctcgcgctgttcattcgctacctcttcagcctggatggctgggtgaagatctaccagaacaagatcgtctgcttcgggtactcaaccgtgtccgagaagctgatcaggcagattcagcacatcctcctgcggttcggcattgtctccgggatcgagaagttcgaggagaagcggacggagaagatcaaggtggtcaaggaggtgaagagccagcggtcgcaccgcgaggagttcacattcgctacttaccgcaactgctactgcgacggcaagtggcacctcaccattacggatgccctctcccagaagaacctgatggaggacatcggcgggttcgatagcaagaacttctacctgttcgacctcctgcagccgcacaacagcggcaatcaggagctggagaaccatctgatcttctgggatgagctcgttaatgtgctggcgaagttcgccgcgtctaagaaccagtcactcaagaatcgcaccgctaaggggaagtcccccaagaacagcgagaatctgaccacgacagagacgatttgcaggaagaacatcctcgccaacatggagaatctgccgagcgacaaccagaatttcgattcggagaagctcgacctgtctcagccccacaactcagggaaccaggagctggagaatcatctgatcttctgggacgagctcgtcaatgttctggccaagttcgcgacctcgaagaaccagtctctcaagaataggactaccaagcggaactcaccgaagaactccgagaatctgacgacaactgagaccatctgcaggaagaacattctggcgaacatggagaatctgccctctgataaccagaatttcgactcagagaagctcgatctgccgcagccccacaactccgggaatcaagaactggagaatcatctgatcttctgggacgaactcgtgaatgtcctggctaagttcgctgccagcaagaaccagtcgctcaagaatcgcaccacgaagaggaactctccaaagaactcagagaatctgacaactaccgagaccatttgccggaagaacattctggctaatatggagaatctgccttctgacaatcagaatttcgatagcgagaagctcgacctgccacagcctcataattccgggaatcaagagctggagaatcatctgatcttctgggacgaattagttaacgtgctggctaagttcgccacatccaagaaccagagcctcaagaaccggacgacaaagcgcaactcgccgaagaactctgagaatctgactaccacggagactatttgccgcaagaacattctggctaacatggagaatctgccatcggacaatcagaatttcgactctgagaagctcgatctgtcccagcctcacaacagcggcactcaggaactggagaaccatctgatcttctgggacgaactagtcaacgtcctcgccaagttcgcggcttcaaagaaccagtccctcaagaatcggacagcgaaggggaagagcccgaagaactcggagaatctgaccaccaccgagaccatctgccgcaagaacatcctcgcgaacatggaaaatctgccgtcagataatcagaatttcgattccgagaagctcgacctgtcgcagccccacaactctgggaatcaggaactggagaatcatctgatcttctgggacgaactggtgaacgtcctggcgaagttcgctacctctaagaaccagtccctgaagaataggacgacaaagcggaactccccgaagaacagcgaaaatctgaccactacggagaccatttgcaggaagaacattctcgcgaatatggagaatctgcccagcgataatcagaacttcgactcggagaagctggatctgcctcagccccacaactctggcaaccaagaactggagaaccatctgatcttctgggacgaacttgttaacgtgctggccaagttcgcgacatcgaagaaccaatccctgaaaaatcgcacaactaagaggaactcaccaaagaactccgaaaatctgactaccacagagactatttgccggaagaacatcctggccaatatggagaatctgccgtctgacaaccagaacttcgactccgagaagctggacctgccacagcctcacaacagcgggaatcaggagctggagaatcatctgatcttctgggacgaactagtaaacgttctggctaagttcgccactagcaagaaccaatccctcaagaatcggactaccaagcgcaactctccgaagaactcagaaaatctgaccaccactgagactatctgcaggaagaacatcctggcgaatatggaaaatctgccctccgataatcagaatttcgactccgagaagctcgatctgcctcagccgcataactctgggaatcaggagctggagaaccatctgatcttctgggacgaactagtgaatgtgctcgccaagttcgctacctccaagaaccaatccttaaagaataggaccacgaagcggaactcgccaaagaactctgaaaatctgaccacaaccgagaccatttgccgcaagaacatcctggccaacatggaaaatctgccttcggataatcagaacttcgattccgaaaaactggacctgccgcagccgcataattccgggaatcaggagctggagaaccatctgatcttctgggacgaactagttaatgtcctggccaagttcgcgacgtcaaagaaccagagcctgaagaatcgcacgacaaagaggaacagccctaagaactcggaaaatctgaccacaacggagacaatctgtaggaagaacattctggcaaatatggagaatctgccatcagacaatcagaacttcgacagcgagaagctcgatctgtcacagcctcacaactccggcacacaagaactggagaaccatctgatcttctgggacgaactagtaaatgttctcgccaagttcgcggcctctaagaaccaaagcctgaaaaatcggacaactaagcgcaactcccctaagaacagcgaaaatctgacaacgacagagacaatctgccgcaagaacattctcgcaaacatggaaaatctgccatctgataatcagaacttcgatagcgaaaaactggacctgccacagccacacaactccggcacgcaagaactggagaatcatctgatcttctgggacgaactagtaaacgtactggccaagttcgctgcgtcgaagaaccagtccttaaaaaaccgcaccactaagcggaactcacctaagaactccgaaaatctgaccacgactgagactatatgtaggaagaacatcttagccaacatggaaaatctgcccagcgacaatcaaaactttgactccgagaagctggatctgccgcagccgcataactccgggaatcaggagctggagaaccatctgatcttctgggacgaactagtaaacgtcctggctaagttcgccgctagcaagaaccagtccctgaaaaacaggactaccaagaggaactctcctaagaactcagaaaatctgactaccactgaaactatctgtcgcaagaacatcctggctaatatggaaaatctgccgtcggataaccagaacttcgattccgagaaactggacctgcctcagccgcacaattctggcaaccaagagctggagaaccatctgatcttctgggacgaactagtaaacgtgctcgccaagttcgccacctccaagaaccagtccctgaaaaataggaccacaaagcgcaactcgcctaagaactctgaaaatctgacaaccacggagacaatctgcaggaagaacatactcgcgaacatggagaatctgccttcggacaaccagaacttcgattcagagaagctggatctgccccagccgcataattccggcaaccaggaactggagaatcatctgatcttctgggacgaactagtaaacgtattagcgaagttcgctacctcaaagaaccaaagcctcaaaaataggacggccaaggggaagagccctaagaactcggagaatctgactaccactgagactatatgtcggaagaacatcctcgcaaacatggagaatctgcccagcgataaccagaatttcgattctgagaagctggacctgccgcagcctcataattctggtaaccaagagctggagaatcatctgatcttctgggacgaactagtaaacgtactagccaagttcgcgacctctaagaaccagagcctgaaaaaccgcaccaccaagcggaactccccaaagaacagcgaaaatctgactactaccgagacgatatgtcgcaagaacattctcgctaatatggaaaatctgccatcggacaaccaaaacttcgactccgaaaaactcgatctgccgcagccgcacaattccggtaaccaggagctggagaaccatctgatcttctgggacgaactagtaaacgtactcgctaagttcgccacttcgaagaaccagtcccttaaaaacaggaccaccaagaggaactcacccaagaactccgaaaatctgacgaccaccgaaaccatctgtaggaagaacatactggctaatatggaaaatctgccttctgacaaccagaatttcgacagtgaaaaactggacctgccccagccgcataactctggtaaccaagagctggagaatcatctgatcttctgggacgaactagtaaacgtacttgcgaagttcgctacaagcaagaaccagtccctcaaaaatcgcactgccaaggggaagtctccgaagaactcagagaatctgaccacgaccgagactatttgtaggaagaacatcctggccaacatggagaatctgcccagtgacaatcaaaactttgatagcgaaaaactggatctgccgcagccacacaactccgggaatcaggagctggagaaccacctgatcttctgggatgaactggttaacgttctcgcgaagttcgccacttccaagaaccagtccctcaaaaacaggaccactaagcgcaactcgccaaagaactctgagaatctgacgaccacagagacgatatgccgcaagaacattttagcgaatatggaaaatctgcccagcgacaatcagaactttgactccgaaaagctggacctgcctcagcctcataattctggaaaccaagaactggagaaccacctgatcttctgggacgaactagtaaacgtactagcaaagttcgccacctcaaagaaccagagcctgaaaaatcgcaccacaaagcggaacagcccaaagaactcggaaaatctgactactactgagacgatttgtcgcaagaacattttggcgaatatggagaatctgccaagcgataatcaaaacttcgattctgaaaaactcgatctgcctcagccacataattccggcacccaggagctggagaactccgacatcttctgggataagattgtgtccatcgagccggtcggggagaagcaggtgtacgatctcactgttccagagactcataacttcgttgctaatgatatttgcctccataattccattgtggggacagccacgttcgatcagtactggagcgtgcgcacctctaagcggacttcaggaacagtgaccgtgaccgatcacttccgcgcctgggcgaaccggggcctgaacctcggcacaatagaccaaattacattgtgcgtggagggttaccaaagctctggatcagccaacatcacccagaacaccttctctcagggctcttcttccggcagttcgggtggctcatccggctccacaacgactactcgcatcgagtgtgagaacatgtccttgtccggaccctacgttagcaggatcaccaatccctttaatggtattgcgctgtacgccaacggagacacagcccgcgctaccgttaacttccccgcaagtcgcaactacaatttccgcctgcggggttgcggcaacaacaataatcttgcccgtgtggacctgaggatcgacggacggaccgtcgggaccttttattaccagggcacatacccctgggaggccccaattgacaatgtttatgtcagtgcggggagtcatacagtcgaaatcactgttactgcggataacggcacatgggacgtgtatgccgactacctggtgatacagtga

SEQ ID NO: 2817 - DNA, 2298 bp, Artificial Sequence
  Synthetic Construct, AS-131 intein modified protein encoding nucleic acids
atgcaaacaagcattactctgacatccaacgcatccggtacgtttgacggttactattacgaactctggaaggatactggcaatacaacaatgacggtctacactcaaggtcgcttttcctgccagtggtcgaacatcaataacgcgttgtttaggaccgggaagaaatacaaccagaattggcagtctcttggcacaatccggatcacgtactctgcgacttacaacccaaacgggaactcctacttgtgtatctatggctggtctaccaacccattggtcgagttctacatcgttgagtcctgggggaactggagaccgcctggtgccacgtccctgggccaagtgacaatcgatggcgggacctacgacatctataggacgacacgcgtcaaccagccttgcctctcggggtctacaaaggtcattgacgctgctacggggaatctcttctcgctcaaggagatcgccgctcagcctgagtactggctctcgcgcaaggtcttctctctcgacctgaagtcacagcaggtggtccagcagccaatcaccgagattcaccctaatggcgtgagggatgtctggcagatcaccacgaggaccaacaggaaggtgtgcgctacggacgatcatctcttctacacagtcctgggctggaagccgctcaaggacttcagcgttggcgatcgcctcgggctgccgaataagatccccattaactacaggtcccagatctccgacagcaaggtgaagttcacggcgtacctcattggcgaggggtacctgtacacaaattcgttctcttgctcatacttctgcaactccgacggggagctcatcgcggatttctacggctgcgctgaggagctgttcgggtccagcgctccaatcgagaagcagctccacctgggcaataagtccgtgatctacgtgcggatcggcctcatttccgggctgaagaactgggtcgactcctacctccagtgcgcgaatagccgcgtgcaggagatccccaactggattttctccctcagccagtcgcagctccagctgttcctcggcatcctgtggtctacgtcagggatcttcgacgagacaattggctacacttactactcgtctaacagcgaggtcctggttaggcaggtccagcatctgttcctccggctgggcatcgtttccctcttcaacgtcaataaggttaagggccagggggagctggacgtgtcctacgttgtggaggtccgcgggagggaggatatgctgaagttctacaagctcatcaagccgtacctgtcatcctacaagcagggcctctgcgagagctgctacctggtcattaagtaccagcagtcgtaccagttcaagtacttcctcactcccgacttcttcgatctgatcgtgaaggctaagaaggccagctcgatgaccagggctctcggcgtttgcggcggggagatctcttcagtgtggaacttccagaatacatctaaccggtccctgagcttcgacaagttcaacaatttctcgactgtcctcgcggatgaggagctgaccgccatcgcgaactcggacgtgttctgggatgagatcatttctatcgagtacattggcaaggaggaggtgttcgatctcactattccagagactcataacttcattgctaatgacttcatcgtgcataattccattgtggggacagccacgttcgatcagtactggagcgtgcgcacctctaagcggacttcaggaacagtgaccgtgaccgatcacttccgcgcctgggcgaaccggggcctgaacctcggcacaatagaccaaattacattgtgcgtggagggttaccaaagctctggatcagccaacatcacccagaacaccttctctcagggctcttcttccggcagttcgggtggctcatccggctccacaacgactactcgcatcgagtgtgagaacatgtccttgtccggaccctacgttagcaggatcaccaatccctttaatggtattgcgctgtacgccaacggagacacagcccgcgctaccgttaacttccccgcaagtcgcaactacaatttccgcctgcggggttgcggcaacaacaataatcttgcccgtgtggacctgaggatcgacggacggaccgtcgggaccttttattaccagggcacatacccctgggaggccccaattgacaatgtttatgtcagtgcggggagtcatacagtcgaaatcactgttactgcggataacggcacatgggacgtgtatgccgactacctggtgatacagtga

SEQ ID NO: 2818 - DNA, 1425 bp, Artificial Sequence
  Synthetic Construct, AS-132 intein modified protein encoding nucleic acids
atgcaaacaagcattactctgacatccaacgcatccggtacgtttgacggttactattacgaactctggaaggatactggcaatacaacaatgacggtctacactcaaggtcgcttttcctgccagtggtcgaacatcaataacgcgttgtttaggaccgggaagaaatacaaccagaattggcagtctcttggcacaatccggatcacgtactctgcgacttacaacccaaacgggaactcctacttgtgtatctatggctggtctaccaacccattggtcgagttctacatcgttgagtcctgggggaactggagaccgcctggtgccacgtccctgggccaagtgacaatcgatggcgggacctacgacatctataggacgacacgcgtcaaccagccttgcctgacttacgagacagagattatgacagtggagtacgggccgctgcctatcgggaagatcgtggagtaccgcattgagtgcacggtgtacacagtcgacaagaacggctacatctacactcagccgattgcccagtggcacaatcgcggcatgcaggaggtctacgagtactccctggaggatgggaccgttatcagggcgacgccggagcataagttcatgaccgaggacggccagatgctgcccatcgatgagattttcgagcggaacctcgacctgaagtgcctcgggaccctggagatggttaagattgtgagccgcaagctcgctaagacggagaatgtgtacgatattggggttacaaaggatcacaacttcgtgctcgctaatgggctcattgcttccaactccattgtggggacagccacgttcgatcagtactggagcgtgcgcacctctaagcggacttcaggaacagtgaccgtgaccgatcacttccgcgcctgggcgaaccggggcctgaacctcggcacaatagaccaaattacattgtgcgtggagggttaccaaagctctggatcagccaacatcacccagaacaccttctctcagggctcttcttccggcagttcgggtggctcatccggctccacaacgactactcgcatcgagtgtgagaacatgtccttgtccggaccctacgttagcaggatcaccaatccctttaatggtattgcgctgtacgccaacggagacacagcccgcgctaccgttaacttccccgcaagtcgcaactacaatttccgcctgcggggttgcggcaacaacaataatcttgcccgtgtggacctgaggatcgacggacggaccgtcgggaccttttattaccagggcacatacccctgggaggccccaattgacaatgtttatgtcagtgcggggagtcatacagtcgaaatcactgttactgcggataacggcacatgggacgtgtatgccgactacctggtgatacagtga

SEQ ID NO: 2819 - DNA, 2304 bp, Artificial Sequence
  Synthetic Construct, AS-133 intein modified protein encoding nucleic acids
atgcaaacaagcattactctgacatccaacgcatccggtacgtttgacggttactattacgaactctggaaggatactggcaatacaacaatgacggtctacactcaaggtcgcttttcctgccagtggtcgaacatcaataacgcgttgtttaggaccgggaagaaatacaaccagaattggcagtctcttggcacaatccggatcacgtactctgcgacttacaacccaaacgggaactcctacttgtgtatctatggctggtctaccaacccattggtcgagttctacatcgttgagtcctgggggaactggagaccgcctggtgccacgtccctgggccaagtgacaatcgatggcgggacctacgacatctataggacgacacgcgtcaaccagccttcgctgacgggggatcagaaggtcctctactacatcgctaagaagctctactacgagacattcgctgagtgctacgaccgcattaacggcgacatctccagcgttagcgtgccatgcttcgatgagaactaccagacagtgattaagcctatctcggccatttggaagcaccatgtgaagaagaagggcttcaagattaagatcacttgggggaagcagattaagatcacagaggaccacagcctgttcactaggaacgagaacaataagccgcaggcggttttcggcaatgagatcaaggtcggcgatgagattgggatcccctcctacatctccttcctggagcagccgctggagcccttccatattaccgacaagattctcatccaggaggagatctacgtggagtcagaggacacgatctcctacattgagaagtacggcgataagatgcgggagtacctcctggcgaagtcgctgtctccgtcacagttctactccattctcaagacatacgaggctaagaaccagatcccgtggcacctgtggaagtacctggagctgcccctctccgagaaggacaaggtctgctacctcagcaagaaggccattaagaactggatcgataatgtcgaggagctcctgtggttcctgggcttctacgttgccaggggctcactgatcaagaacgaggtggtcctcaagggcgagccatcccagctggagaaggtcatcgagctcattgagaggatcttcgagtacaagagcgagatcaatgactcgggctacatttcgatcaagtctaagattctcgttgatctgatcggctacgggctcaacttcgggaatcaggagaaggacattccaaactggatcctgcagctccctgagcagcagctcatccggttcctgaagggcttcgtggctgggaacaacctggagaaccagctgaatttctacctggagttcaagacggactctcagctggtggcggagaagctggtcctcatcctgtcgaagttcggcctcgtcgctgacgtttctgagatcgaggttaacgaggaggatattgccaagatctaccgcatcattatcgagggcctggaggacaagaacatccataatctctctaaggtggagcagaagatttcagctctgaccacgggcgatatcgcttgggggaagattgagtccatcgaggagttcgagatcgacgattacgtctacgacttctctgttccaaactacgagaacttcatcgggggctcttacaatgttttcgctcataactccattgtggggacagccacgttcgatcagtactggagcgtgcgcacctctaagcggacttcaggaacagtgaccgtgaccgatcacttccgcgcctgggcgaaccggggcctgaacctcggcacaatagaccaaattacattgtgcgtggagggttaccaaagctctggatcagccaacatcacccagaacaccttctctcagggctcttcttccggcagttcgggtggctcatccggctccacaacgactactcgcatcgagtgtgagaacatgtccttgtccggaccctacgttagcaggatcaccaatccctttaatggtattgcgctgtacgccaacggagacacagcccgcgctaccgttaacttccccgcaagtcgcaactacaatttccgcctgcggggttgcggcaacaacaataatcttgcccgtgtggacctgaggatcgacggacggaccgtcgggaccttttattaccagggcacatacccctgggaggccccaattgacaatgtttatgtcagtgcggggagtcatacagtcgaaatcactgttactgcggataacggcacatgggacgtgtatgccgactacctggtgatacagtga

SEQ ID NO: 2820 - DNA, 1983 bp, Artificial Sequence
  Synthetic Construct, AS-134 intein modified protein encoding nucleic acids
atgcaaacaagcattactctgacatccaacgcatccggtacgtttgacggttactattacgaactctggaaggatactggcaatacaacaatgacggtctacactcaaggtcgcttttcctgccagtggtcgaacatcaataacgcgttgtttaggaccgggaagaaatacaaccagaattggcagtctcttggcacaatccggatcacgtactctgcgacttacaacccaaacgggaactcctacttgtgtatctatggctggtctaccaacccattggtcgagttctacatcgttgagtcctgggggaactggagaccgcctggtgccacgtccctgggccaagtgacaatcgatggcgggacctacgacatctataggacgacacgcgtcaaccagccttgcgtttcgggggatacgctgctgattacaagggactctattcataagattaaggatgtcgtggggcagaagattgagatttggaatggcaagaactggtctcaggtcatcccgctgaagacagggaaggacaggaagctctaccgggttcgcttcggcgacgggtcgtacctggatgttaccgagtaccaccgcttcttcgtgaaggacaggttcggcaagaagtacgaggaggtgcagaccaaggatctcctgacgcactccaagtacgccctggacgtcgagccattcatcattgattaccatgacggcgattcgatcaacctctcttacgcttacacactgggggctgctctcggcaatgggactatcgaccagaactctaatggcaagattagggtgtactcacataaggccgagctgatcttcgcgggcaacaagtccctggagcggcagtacaattacctcccgagcttcgtggacgtcattgatctcggcttctcgggggagctcctgaggaggctgcagaccgagcccgacgctctcaacacgatcgcctcatggaataagtccgctatcctggccttcattgcgggcctcgctgacacagatgggagcgagactaagggcaacgggatcaagatttccgtgagcgactacgagagggccaagcggctgcagctcctgctcacgaagtgcggcattagggcgagcgtcaatctgatggcttcgcggggctgcaccacgaacctcggggagcgcaatcaggacctgtactacctccagatcaccgattgccgggagattccatgccagcgcctcgacacaactaaggtttgcgaggcgaagttccagggcaagtaccagaccatccagaacgtcgaggagctgcctggcctccacgatacgtactgcttcgaggagccagagttccacaagggggttttcggcaatgctctcacaggcaactccattgtggggacagccacgttcgatcagtactggagcgtgcgcacctctaagcggacttcaggaacagtgaccgtgaccgatcacttccgcgcctgggcgaaccggggcctgaacctcggcacaatagaccaaattacattgtgcgtggagggttaccaaagctctggatcagccaacatcacccagaacaccttctctcagggctcttcttccggcagttcgggtggctcatccggctccacaacgactactcgcatcgagtgtgagaacatgtccttgtccggaccctacgttagcaggatcaccaatccctttaatggtattgcgctgtacgccaacggagacacagcccgcgctaccgttaacttccccgcaagtcgcaactacaatttccgcctgcggggttgcggcaacaacaataatcttgcccgtgtggacctgaggatcgacggacggaccgtcgggaccttttattaccagggcacatacccctgggaggccccaattgacaatgtttatgtcagtgcggggagtcatacagtcgaaatcactgttactgcggataacggcacatgggacgtgtatgccgactacctggtgatacagtga

SEQ ID NO: 2821 - DNA, 2157 bp, Artificial Sequence
  Synthetic Construct, AS-135 intein modified protein encoding nucleic acids
atgcaaacaagcattactctgacatccaacgcatccggtacgtttgacggttactattacgaactctggaaggatactggcaatacaacaatgacggtctacactcaaggtcgcttttcctgccagtggtcgaacatcaataacgcgttgtttaggaccgggaagaaatacaaccagaattggcagtctcttggcacaatccggatcacgtactctgcgacttacaacccaaacgggaactcctacttgtgtatctatggctggtctaccaacccattggtcgagttctacatcgttgagtcctgggggaactggagaccgcctggtgccacgtccctgggccaagtgacaatcgatggcgggacctacgacatctataggacgacacgcgtcaaccagccttgcctggacaagacggctctgcggattttcaatcaggggctgctctacgcggatgaggtcgtgacaccgggctcgggggagacagtcggcctcgggctgacggtcaggaacggcatcggggcgtccacagccattgcgaatcagccgatggagctggttgagatcaagctcgctaacggccggaagctgcgcatgacccctaatcaccggatgtccgtgaagggcaagtggattcatgcctgcaacctcaagccggggatgctcctggactacagcatcggcgagtaccagaagcgcgaggacaccctcctgattcctctccagctggaggattacactgaggtgaacaattcgcagaccctgggccacaacggcggggtcctcaccaagaagatcatgacgccggcgtcaatgacatccgacctggcttacttcctcggctgcctgttcggcaacgggtgcatcgtccagaataagtaccaggtttgcttctaccattctcggctcgacgtgctgtacggcctccaggagaaggggaagaagctgttcggcatcaaggggtctctcaacgatttcgccaatggcaggttcgagctgtgcttcgcgtcacggcagctcttctactggctccacctgaaccagctggtcaagacgcagaagtcagaggacctggagcgcatccccctctccctgaggaggtccagcagggttactctcctgtccttcttctgcggcctgattgacaccaacggctacgtgccacaggatggcaagctcagcatcgcttcggcctcgtctgatttcattcataacctgcagcagatcggcgagtccattgggctctgcttcagcatctaccagaatacgaagggggagaacctgcagaatcagcacaacaatacatggggcctctgcctgtctcccatgctctcaaacgtggacgcgctggattacctcaaccataatagcatcaagtgccaggagggcccggtggtcatttcgaagtgcgtcctcaactactcgccctacaagatcgagtctgttaatattggcgctgtgtgcgactacagctacgatttcgccatcgagggcatcaatgataatgactcttggtactggcagggggctctcaagtctcacaactccattgtggggacagccacgttcgatcagtactggagcgtgcgcacctctaagcggacttcaggaacagtgaccgtgaccgatcacttccgcgcctgggcgaaccggggcctgaacctcggcacaatagaccaaattacattgtgcgtggagggttaccaaagctctggatcagccaacatcacccagaacaccttctctcagggctcttcttccggcagttcgggtggctcatccggctccacaacgactactcgcatcgagtgtgagaacatgtccttgtccggaccctacgttagcaggatcaccaatccctttaatggtattgcgctgtacgccaacggagacacagcccgcgctaccgttaacttccccgcaagtcgcaactacaatttccgcctgcggggttgcggcaacaacaataatcttgcccgtgtggacctgaggatcgacggacggaccgtcgggaccttttattaccagggcacatacccctgggaggccccaattgacaatgtttatgtcagtgcggggagtcatacagtcgaaatcactgttactgcggataacggcacatgggacgtgtatgccgactacctggtgatacagtga

SEQ ID NO: 2822 - DNA, 2421 bp, Artificial Sequence
  Synthetic Construct, AS-136 intein modified protein encoding nucleic acids
atgcaaacaagcattactctgacatccaacgcatccggtacgtttgacggttactattacgaactctggaaggatactggcaatacaacaatgacggtctacactcaaggtcgcttttcctgccagtggtcgaacatcaataacgcgttgtttaggaccgggaagaaatacaaccagaattggcagtctcttggcacaatccggatcacgtactctgcgacttacaacccaaacgggaactcctacttgtgtatctatggctggtctaccaacccattggtcgagttctacatcgttgagtcctgggggaactggagaccgcctggtgccacgtccctgggccaagtgacaatcgatggcgggacctacgacatctataggacgacacgcgtcaaccagccttgcgtgctgcatgacactgagatctacgtgaatggcatggttatggaggcggagcagatttggcaggcttacgcgggggaggcggagttcgacggcgaggggttctggacagagccgaacaaggagctcctggttaatagcctcgatgagaccacgggcaagatcgtgttcgcccggattcgcaggctgtaccgccagtgggttagggagaagctcaggaaggtgcggctgaaggacggctccagcatcacaattacttgcaggcacaagctcttcatccgggactcctggaagaacgatttccaagtgggcgacgatgtctgcgttcccgcgaagctgatgtgggacgggaagccagaggacccagatgtggtcaagttcgtcgcttggcaggttgctgagggctgggagagggtcaattccggcatgttcggggttagccagaagggcaaggacgtgctggaggggctcctggaggtcttctcgcggctgggcaagcgctacgatatcaagattaactgcccaaaggttgtggcgcacgggtctaagaagaattgctacgagttcagcgctcattcgctggagtacaggaagttcctggaggagaagcgctacggctgggggaagaggtcccatgagaagaccatccctctgttcattatgcaggccgacctcgattcggtgcgggtcttcctgtctaactacttcgacgcggagggctgggtgaataagaccgttcgctgcgtggagatctccacggcctcgtctcagctcatccaggagctgagcattctcctgcggcgcttcggcgtctggatgaagatctcaccgcagcagaagtgcgctaccaacggcacgggggttttctgcacatactacatcgggactttcggcgggaatagcgccaggtgcttcctccaggagatcggcttcaacgacagcgggaagcaggagaatctgaagtcgatctgcgagaagattgcggactctaacgtggagggcatcccggcttcagatattgtggccgagctcgtcgagaagacccagctcccagtcggcagcctggggatccaggaccctatctacatggacggctgccaggatttctctcccacgtcactggagaaggtcatcaactcaattgaggatatcatttccggcgctggggaggaggagtacggccagctcaagtcatccaagctgaggaacaagacactggaggcttactcgctcctgaatatcctggagctggagatctacaagactcggctccagaagctcctgaaccaggaggtgtactactgccagatcgagtccattgaggagatggagtacgagggctgggtctacgacttcgaggtttccaagtaccacaatttcgttgctaacaacatcatttgccacaattccattgtggggacagccacgttcgatcagtactggagcgtgcgcacctctaagcggacttcaggaacagtgaccgtgaccgatcacttccgcgcctgggcgaaccggggcctgaacctcggcacaatagaccaaattacattgtgcgtggagggttaccaaagctctggatcagccaacatcacccagaacaccttctctcagggctcttcttccggcagttcgggtggctcatccggctccacaacgactactcgcatcgagtgtgagaacatgtccttgtccggaccctacgttagcaggatcaccaatccctttaatggtattgcgctgtacgccaacggagacacagcccgcgctaccgttaacttccccgcaagtcgcaactacaatttccgcctgcggggttgcggcaacaacaataatcttgcccgtgtggacctgaggatcgacggacggaccgtcgggaccttttattaccagggcacatacccctgggaggccccaattgacaatgtttatgtcagtgcggggagtcatacagtcgaaatcactgttactgcggataacggcacatgggacgtgtatgccgactacctggtgatacagtga

SEQ ID NO: 2823 - DNA, 2181 bp, Artificial Sequence
  Synthetic Construct, AS-137 intein modified protein encoding nucleic acids
atgcaaacaagcattactctgacatccaacgcatccggtacgtttgacggttactattacgaactctggaaggatactggcaatacaacaatgacggtctacactcaaggtcgcttttcctgccagtggtcgaacatcaataacgcgttgtttaggaccgggaagaaatacaaccagaattggcagtctcttggcacaatccggatcacgtactctgcgacttacaacccaaacgggaactcctacttgtgtatctatggctggtctaccaacccattggtcgagttctacatcgttgagtcctgggggaactggagaccgcctggtgccacgtccctgggccaagtgacaatcgatggcgggacctacgacatctataggacgacacgcgtcaaccagccttcggttacgggggatactgaggttactattaggcggaatgggcggattgagttcgtccctattgagaagctgttcgagcgggtggatcaccgggtgggggagaaggagtactgcgtgctcggcggggtcgaggctctcacactggacaacaggggcaggctggtctggaagaaggtcccatacgttatgaggcacaagactgataagaggatctaccgggtgtggttcacaaactcctggtacctcgacgtcactgaggatcattcactcatcggctacctgaatacctccaaggttaagccagggaagccactcaaggagaggctggtggaggtcaagccagaggagctcggcgggaaggtcaagtccctgatcaccccaaaccgccctatcgccaggacgattaaggccaatcctatcgcggttaagctctgggagctgattggcctcctggtgggcgacgggaactggggcgggcagagcaattgggcgaagtactacgtgggcctctcgtgcgggctggataaggctgagatcgagcgcaaggtcctcaacccgctgagggaggcctcggttatttctaattactacgacaagtccaagaagggcgatgtctcaatcctctccaagtggctggcggggttcatggttaagtacttcaaggacgagaacggcaataaggctatcccgtctttcatgttcaacctcccccgggagtacattgaggctttcctcaggggcctgttctccgctgacgggaccgtgagcctgaggaggggcatcccggagattaggctcacgtcggttaaccgggagctgtctgatgcggtgcgcaagctcctgtggctcgttggcgtgtccaacagcctgttcaccgagacgaagcccaatcgctacctggagaaggagagcggcacccactcgatccatgtcaggattaagaacaagcaccggttcgccgaccgcatcggcttcctgattgataggaagtctacaaagctctcagagaacctgggcgggcatactaataagaagagggcgtacaagtacgacttcgatctggtgtacccgcggaagatcgaggagattacgtacgacggctacgtctacgatattgaggttgagggcacacataggttcttcgctaatggcattctcgttcataattccattgtggggacagccacgttcgatcagtactggagcgtgcgcacctctaagcggacttcaggaacagtgaccgtgaccgatcacttccgcgcctgggcgaaccggggcctgaacctcggcacaatagaccaaattacattgtgcgtggagggttaccaaagctctggatcagccaacatcacccagaacaccttctctcagggctcttcttccggcagttcgggtggctcatccggctccacaacgactactcgcatcgagtgtgagaacatgtccttgtccggaccctacgttagcaggatcaccaatccctttaatggtattgcgctgtacgccaacggagacacagcccgcgctaccgttaacttccccgcaagtcgcaactacaatttccgcctgcggggttgcggcaacaacaataatcttgcccgtgtggacctgaggatcgacggacggaccgtcgggaccttttattaccagggcacatacccctgggaggccccaattgacaatgtttatgtcagtgcggggagtcatacagtcgaaatcactgttactgcggataacggcacatgggacgtgtatgccgactacctggtgatacagtga

SEQ ID NO: 2824 - DNA, 2280 bp, Artificial Sequence
  Synthetic Construct, AS-138 intein modified protein encoding nucleic acids
atgcaaacaagcattactctgacatccaacgcatccggtacgtttgacggttactattacgaactctggaaggatactggcaatacaacaatgacggtctacactcaaggtcgcttttcctgccagtggtcgaacatcaataacgcgttgtttaggaccgggaagaaatacaaccagaattggcagtctcttggcacaatccggatcacgtactctgcgacttacaacccaaacgggaactcctacttgtgtatctatggctggtctaccaacccattggtcgagttctacatcgttgagtcctgggggaactggagaccgcctggtgccacgtccctgggccaagtgacaatcgatggcgggacctacgacatctataggacgacacgcgtcaaccagccttgcctgaccgctgatacttacgtttggacagatcgggggctggagacagtcgctgaggttttcgggcgggcggggctccctctctcatccactagcagggttaccgacgtgagggaccgggatatccgggtggtcaacgagaagggcgagctggagcaggtggctgctctcacgcataatgggaggcagccagttgtgaggatcacagtcgcttccggcaggcaggtcacggttacacggaaccaccctctgcgcgtcatgaatgacgatggcttcattgtttggagggaggctgggcagctgagggagggcgacgtgctcgtctccgctgccttcggcgctgtccaggctgcttcgggcgggggcctctctgaggacgaggctgttctcctggggtacctgaccgctgctggcagcctcgatccagctgggcatgtgtgcttcaccacgacagacatcgagacaggcgctgagttcgctgctctggctgagtggctcctggacactaccgtcactgctgttccaggggatggccaggtggcctacgtgctgtccgacccagctgctaggcacacgctcgctgagcgctacggcgtggattacgctgctgctgctcggatcccgcagtgcgtccgcactgctggcgacaagatgcagagggctttcctcgctgctctgtacaccgctgctggctggactgacaccagcgctgccgttgggctgaggacggcttcggctccactcgcgagggaggtgcagtacctcctgtacgggctgggcatcccagccgacctcgataggtctcacgggaacggccagcatccttgggctgtgaccatttcaccagctgctgctccaaggttccacactgaggtcggcttccgcaccgctcagcagtcgccacagacggggctgcatgagccaacaccacaggtggaggctatcccaaatctcacgggcctgattcacgctctcagggactcaatcggggatcgggccgagtccacagacgatccattccctgctgctagcgggggcgcttacgacagggatcaggttcgccgcgtgatcgactgggctaagaggaggactgatgaggctccagctaccgctaacgctatcctcggctacctgacgcagctcacagatgccaggtacacgtacgagccaattacagccgtcgaggacgcgggccagcagcctaccttcgacctcatggttccaaggactcatagcttcctcgccaatggcattctctcacacaactccattgtggggacagccacgttcgatcagtactggagcgtgcgcacctctaagcggacttcaggaacagtgaccgtgaccgatcacttccgcgcctgggcgaaccggggcctgaacctcggcacaatagaccaaattacattgtgcgtggagggttaccaaagctctggatcagccaacatcacccagaacaccttctctcagggctcttcttccggcagttcgggtggctcatccggctccacaacgactactcgcatcgagtgtgagaacatgtccttgtccggaccctacgttagcaggatcaccaatccctttaatggtattgcgctgtacgccaacggagacacagcccgcgctaccgttaacttccccgcaagtcgcaactacaatttccgcctgcggggttgcggcaacaacaataatcttgcccgtgtggacctgaggatcgacggacggaccgtcgggaccttttattaccagggcacatacccctgggaggccccaattgacaatgtttatgtcagtgcggggagtcatacagtcgaaatcactgttactgcggataacggcacatgggacgtgtatgccgactacctggtgatacagtga

SEQ ID NO: 2825 - DNA, 2085 bp, Artificial Sequence
  Synthetic Construct, AS-139 intein modified protein encoding nucleic acids
atgcaaacaagcattactctgacatccaacgcatccggtacgtttgacggttactattacgaactctggaaggatactggcaatacaacaatgacggtctacactcaaggtcgcttttcctgccagtggtcgaacatcaataacgcgttgtttaggaccgggaagaaatacaaccagaattggcagtctcttggcacaatccggatcacgtactctgcgacttacaacccaaacgggaactcctacttgtgtatctatggctggtctaccaacccattggtcgagttctacatcgttgagtcctgggggaactggagaccgcctggtgccacgtccctgggccaagtgacaatcgatggcgggacctacgacatctataggacgacacgcgtcaaccagccttgcatgcactacgacacactcgtgacactcgctgacggcacacaggagaagatcgggacaatcgtggaccgcaagctggacgtggaggtcctgtcgtacgatccagagaccgacaggatcgtgccaaggagggtggtcaactggttcgataatggcgccgcggaccacttcctgcagttcactgtgggcaggtctgggaagccaggcggggctcagttcaccgctacgccaaaccatctcatcaggacccctggcgggtggagggaggctggcgagctcattgctggggacagggttctggtgcacgagccacattacctcaatgagcagcagaggcaggttgtgtacggctcgctcatgggcagggggacgctggtcccagataggcacggcgggcctggcgttcacttctgcatggctcatacagccgagcaggctgcctacctggactggaaggtctccctcctgggcaacattgcccactcacgcaccgctgaggcttccgctacggtcggggttgagttcacaccgatgcccgagctcagcgagctgcatagggtcgttgatttcggcgacgggcacacccatctcacgtgggagttcctcaagcagctgacgccactcgcgctggctgtgtggtacctcgatgcgggcacactgactatccctcagtccgggactgacgatgacgccagggtgcagattgacgtcgagaccctgtcgccaggctctcggcagaggctcgtcgagtacctgagggatacccacgagctcgacgctgctgtggtccagcagggcgctgacgcgaggtctctcctggagttcacaccagctgctaccgtgcgcttcctggagctggttgcgccatacgtgcctgagtcaatgtccagcatgctcctggctcagttcaggggcaggtgcagcgtcacgccagagtactcggatccagtccagaggctcgttgctgctccagtgctggacatccaggtgaagcccggcagcacacgcaagttcgacattgaggttgagggcaatcataactacttcgtggatggggtcatggttcataattccattgtggggacagccacgttcgatcagtactggagcgtgcgcacctctaagcggacttcaggaacagtgaccgtgaccgatcacttccgcgcctgggcgaaccggggcctgaacctcggcacaatagaccaaattacattgtgcgtggagggttaccaaagctctggatcagccaacatcacccagaacaccttctctcagggctcttcttccggcagttcgggtggctcatccggctccacaacgactactcgcatcgagtgtgagaacatgtccttgtccggaccctacgttagcaggatcaccaatccctttaatggtattgcgctgtacgccaacggagacacagcccgcgctaccgttaacttccccgcaagtcgcaactacaatttccgcctgcggggttgcggcaacaacaataatcttgcccgtgtggacctgaggatcgacggacggaccgtcgggaccttttattaccagggcacatacccctgggaggccccaattgacaatgtttatgtcagtgcggggagtcatacagtcgaaatcactgttactgcggataacggcacatgggacgtgtatgccgactacctggtgatacagtga

SEQ ID NO: 2826 - DNA, 2625 bp, Artificial Sequence
  Synthetic Construct, AS-140 intein modified protein encoding nucleic acids
atgcaaacaagcattactctgacatccaacgcatccggtacgtttgacggttactattacgaactctggaaggatactggcaatacaacaatgacggtctacactcaaggtcgcttttcctgccagtggtcgaacatcaataacgcgttgtttaggaccgggaagaaatacaaccagaattggcagtctcttggcacaatccggatcacgtactctgcgacttacaacccaaacgggaactcctacttgtgtatctatggctggtctaccaacccattggtcgagttctacatcgttgagtcctgggggaactggagaccgcctggtgccacgtccctgggccaagtgacaatcgatggcgggacctacgacatctataggacgacacgcgtcaaccagccttcgctgctgcctgaggagtggattccgctcgtggagaatggcaaggttcggctgcatcgcatcggggagttcgtggacaagctcatggagaccgacagcgagctcgtcaagcgcaacggcgataccgaggtcctggaggtgcgcgggatcagggctctgtctttcgaccggaagtcaaagaaggcgcgcgtgatgccggtcaaggctgttattcggcaccgctactccggcgatgtgtacgagatcgtcctcggcagcgggaggaggattaccgtcacggaggggcattcgctcttcgcttacggcgacggggagctgagggaggtgacaggcggggagatcaaggctggcgatctcctggctgttccaaggagggtgaacctgcccgagaagaaggagcgcctgaatctcgtcgagctcctgaggaggctcccagaggaggagacaggcgacatcattctgactatccccgtgaagggcaggaagaacttcttcaaggggatgctgcggacactccgctggatttccggcgaggagaagaggccaaggactgctaggaggtacctggagcacctggagggcctgggctacgtgcgcctcaagaagatcggctacgaggttaccgacagggaggggctggagaggtacaggaagctctacgagaggctggtggaggcggtccggtacaacggcaataagcgcgagtacctcgtggagttcaacgctgttcgcgacgtgatcgccctgatgccggaggaggagctcagggattggctggtcggcaccaggaatgggttccggatgaggcccttcgtggagatcgaggaggacttcgctaagctcctgggctactacgtctcggaggggaacgccaggaagtggcggaaccagaagaatggctggtcttacacggtgaagctctacaacgagaatcagcgcgtcctcgacgatatggagtccctggcggagaggttcttcggccgcgtgaagagggggaagaactacatcgagattccaaggaagatggcttacatcattttcgagaacctctgcggcaccctggccgagaataagcgggttccagaggcgatcttcacgtcgcctgagtctgtgcgctgggccttcatcgagggctacttcattggcgacggggatgttcatccttctaagagggtgcggctgtcaacgaagtccgagctcctggtcaacggcctcgttctcctgctcaatagcctgggggtctcggccatcaagattcgccacgactcaggcgtttacagggtttacgtgaacgaggagctcccattcacagattaccgcaagaagaagaacgcgtactactcccatgtcatccctaaggagattctggaggagactttcggcaaggtgttccagcggtccgtcagctacgagaagttccgcgagctcgtgaagtccgagaagctggacggcgagaaggccaagaggatcgagtggctgctcaacggggacgtggtcctcgataaggtcctggaggttaagaagcggccatacgagggctacgtgtacgatctctctgtggaggaggatgagaacttcctcgctggcttcgggctgctctacgctcacaattccattgtggggacagccacgttcgatcagtactggagcgtgcgcacctctaagcggacttcaggaacagtgaccgtgaccgatcacttccgcgcctgggcgaaccggggcctgaacctcggcacaatagaccaaattacattgtgcgtggagggttaccaaagctctggatcagccaacatcacccagaacaccttctctcagggctcttcttccggcagttcgggtggctcatccggctccacaacgactactcgcatcgagtgtgagaacatgtccttgtccggaccctacgttagcaggatcaccaatccctttaatggtattgcgctgtacgccaacggagacacagcccgcgctaccgttaacttccccgcaagtcgcaactacaatttccgcctgcggggttgcggcaacaacaataatcttgcccgtgtggacctgaggatcgacggacggaccgtcgggaccttttattaccagggcacatacccctgggaggccccaattgacaatgtttatgtcagtgcggggagtcatacagtcgaaatcactgttactgcggataacggcacatgggacgtgtatgccgactacctggtgatacagtga

SEQ ID NO: 2827 - DNA, 2019 bp, Artificial Sequence
  Synthetic Construct, AS-141 intein modified protein encoding nucleic acids
atgcaaacaagcattactctgacatccaacgcatccggtacgtttgacggttactattacgaactctggaaggatactggcaatacaacaatgacggtctacactcaaggtcgcttttcctgccagtggtcgaacatcaataacgcgttgtttaggaccgggaagaaatacaaccagaattggcagtctcttggcacaatccggatcacgtactctgcgacttacaacccaaacgggaactcctacttgtgtatctatggctggtctaccaacccattggtcgagttctacatcgttgagtcctgggggaactggagaccgcctggtgccacgtccctgggccaagtgacaatcgatggcgggacctacgacatctataggacgacacgcgtcaaccagccttcctaccatcatgatttcgagctgctgctggctgacgggcgcaaggttaagatcggggagctggtggacaagctgattgagaagaatcgggaccgcgtcatcctgggcaaggataccgagatcctcccggttgaggacattgagctcctggcctacgatctggagaagagggagatcgttaaggtgaaggctgaccgcgtctcaaggcacaaggctccagagcgcttcatcaagctcaggttctccaatggccgggagattaccgtgacgccggagcatcccgtcatggtttgggagaacggggagatcacagagaagccagcggagaagatcactcctggcgatattgctctcggggttctgcgctacccgattcaggtggacggcaagttcaaggagaggtaccgggatatgagggaggcggaggactaccaggattacctgtactcccggggcgtggtcagcaagatcaagcgcaccgggatctacttcacggtggagaaggctaggagggctctcccgcgggagctggtcaagcccctcatcaacgctggcaagattctcagggttacacagactccaaaggagcgggcgagcttcaatcagaagctggtccgcgagaacatcattgaggggtacctccagaggatcattgagcggatggacgagctggagaggctgtcgcgcgaggatccagctaaggctctggagctcctgcctaagacccagctctactacaagtacggcatcacgtacgggaagctcaagaagctggctgaggctcgcaactcctgggctgagggcatcattcagtcggcggtggctgagcgcatctctctggccaagagggagctggaggagttcttcaagtggtggaacgcgaatgtcaacttcctgaaggtgaagtgcgtcgaggagatcaagaacgaccgctgggagtgggtgtacgacgttactgtggagcctcatcatctcttcgtttcgcatgggctcgttctgcataattccattgtggggacagccacgttcgatcagtactggagcgtgcgcacctctaagcggacttcaggaacagtgaccgtgaccgatcacttccgcgcctgggcgaaccggggcctgaacctcggcacaatagaccaaattacattgtgcgtggagggttaccaaagctctggatcagccaacatcacccagaacaccttctctcagggctcttcttccggcagttcgggtggctcatccggctccacaacgactactcgcatcgagtgtgagaacatgtccttgtccggaccctacgttagcaggatcaccaatccctttaatggtattgcgctgtacgccaacggagacacagcccgcgctaccgttaacttccccgcaagtcgcaactacaatttccgcctgcggggttgcggcaacaacaataatcttgcccgtgtggacctgaggatcgacggacggaccgtcgggaccttttattaccagggcacatacccctgggaggccccaattgacaatgtttatgtcagtgcggggagtcatacagtcgaaatcactgttactgcggataacggcacatgggacgtgtatgccgactacctggtgatacagtga

SEQ ID NO: 2828 - DNA, 2223 bp, Artificial Sequence
  Synthetic Construct, AS-142 intein modified protein encoding nucleic acids
atgcaaacaagcattactctgacatccaacgcatccggtacgtttgacggttactattacgaactctggaaggatactggcaatacaacaatgacggtctacactcaaggtcgcttttcctgccagtggtcgaacatcaataacgcgttgtttaggaccgggaagaaatacaaccagaattggcagtctcttggcacaatccggatcacgtactctgcgacttacaacccaaacgggaactcctacttgtgtatctatggctggtctaccaacccattggtcgagttctacatcgttgagtcctgggggaactggagaccgcctggtgccacgtccctgggccaagtgacaatcgatggcgggacctacgacatctataggacgacacgcgtcaaccagccttgcatgcatcctgacacatacgtggttactaagtcgggggctaagaaggtctctgagctgactgagggggatgaggtcctgacacataccggcacgttcaagaaggtcatccagccactgaggagggagcacaaggggcgcctcctggttatcaaggcctacggcaccgtgcctgtcaagattacgccggagcacatggtttgggtggtcaagcagatcaggcacaagtcccattacagcgatgggcggcaggtcatttggtgggagttcgagggcccagagtggatgacggctcaggagctgaaggagcgcctggagtccgagacagacccaaaggtgagctacatgctcctgcagccaatccctgagccgtccgtggacgcggataagattcctctgaggaaggaggtctacgttgtgaaccagcacggcaagacagacaagctccatccgtccgtgaagcggactcccgagtacctgccactcaacttcgagaccgctaggctgatcggcctctggattgctgaggggtcaacttccaagaacggcgtcatcaagttcgacatttccagcaatgaggaggatctgacggagttcatcacaggcactattaggaagtacttcccgcacgctaagatcgtcgttaaggaccatgagaggaacaggaggacggtccggttctgcaataagcgcttcgcggagtggctcagggagaacatcggccacggggctgataataagagcattccgcccctcctgctcctgaacaagaatagggaggtgcgcctgggcctcctgagggggctcatcgagggcgacggctacgtgcgcagggagtcgcagcgcagggcgaactacatcagctactcgacagtttctccctcactggcttaccagctccagctcctggtggcttcgctgggctacacctcgtctatccacaggtctattcggacagagggcatcgggaagactaggaagcccatctacgatgttaaggtgtcgggcaagtcttactactcactcctggaggagctcgggttcgaggtcccacagaggggcaacaggacctacaacgttaatcgcacgtggaagaattacctcctgctcaaggtgaggtccatcgaggaggaggagtacgagggcgacgtttacaatctggaggttgagggggatgagtcaggctctgtgggcttcatcgtgcataattccattgtggggacagccacgttcgatcagtactggagcgtgcgcacctctaagcggacttcaggaacagtgaccgtgaccgatcacttccgcgcctgggcgaaccggggcctgaacctcggcacaatagaccaaattacattgtgcgtggagggttaccaaagctctggatcagccaacatcacccagaacaccttctctcagggctcttcttccggcagttcgggtggctcatccggctccacaacgactactcgcatcgagtgtgagaacatgtccttgtccggaccctacgttagcaggatcaccaatccctttaatggtattgcgctgtacgccaacggagacacagcccgcgctaccgttaacttccccgcaagtcgcaactacaatttccgcctgcggggttgcggcaacaacaataatcttgcccgtgtggacctgaggatcgacggacggaccgtcgggaccttttattaccagggcacatacccctgggaggccccaattgacaatgtttatgtcagtgcggggagtcatacagtcgaaatcactgttactgcggataacggcacatgggacgtgtatgccgactacctggtgatacagtga

SEQ ID NO: 2829 - DNA, 2652 bp, Artificial Sequence
  Synthetic Construct, AS-143 intein modified protein encoding nucleic acids
atgcaaacaagcattactctgacatccaacgcatccggtacgtttgacggttactattacgaactctggaaggatactggcaatacaacaatgacggtctacactcaaggtcgcttttcctgccagtggtcgaacatcaataacgcgttgtttaggaccgggaagaaatacaaccagaattggcagtctcttggcacaatccggatcacgtactctgcgacttacaacccaaacgggaactcctacttgtgtatctatggctggtctaccaacccattggtcgagttctacatcgttgagtcctgggggaactggagaccgcctggtgccacgtccctgggccaagtgacaatcgatggcgggacctacgacatctataggacgacacgcgtcaaccagccttgcctgctgccggatgagaaggttattctccctgagcatgggcctattacactcaaggggctcttcgatctcgctaaggagacagtcgtggctgacaacgagaaggagatccgcaagctgggcgccaagctcaccattgtgggcgaggatgggaggctcagggtcctggagagcccatacgtttggaaggtgcggcaccgcggcaagatgctgagggtcaagctcaagaactggcactcagtgtccgtcacgccagagcatcccttcctgaccacgcggggctgggtgcgcgctgaccagctcaagccgggggattacgttgcggtgcccagggtcatccatggcaacgagtcagacgagcggttcgtctccttcgtttacgagaagctcaagaatgatgagctgatcgcgaagctccgcggcgaggtgctgtccaagatttccagcgagttcaagggggacagggcttacaaggttgagaggaacgtgttccggtgggaggacatcgagcgcctcaatctgtgggatgaggtggagagggtcgccttcaccccaaggatgcacaggagcggcaagccactgcattacgtgaagctcccaaggtcgcctgaggagtgggaggctttcttctacttcgctggcgtcatgttcggcgacgggtcccaggataagatcgccaacaatgacgtcgaggtttacgaggagctcaagaagctgtctgttctcggcgtggctgtcaagagggtggagaggacaacttcatacgagatcgagctcaccaacgggaagaatgctctcctgaggctcctgagggtgctgttcgagtacccggagcggcagaaggcgaagtccattagggttccacggatcctgttcattgctcctcgcaagtatgtgtcccgcttcctcaggggctacttcgacgcggatgggcacgtcagcctgaaggacgcgaggatcgaggttacgagcgcttcgcaggagttcctggaggatctcagcctcctgctcctgcggttcggcatcgtgtccaagatctaccgcagcgactacaccacgctcgttatctcgggccgcaggaacctcgatctgttccggcgctacattgggttctctgtcaagaataaggccgaggcgctggagaaggccatcaagaagtcaaggcggtctgagtcataccccattttcgaggagctgaagaggctccggctcctgttcggcttcacacgcactgagctcaacagcaatgtgccattctacgggaagtacgagtcggaggaggccccttcttacgagacactgatgaggatcctcgacgcgattgagaagggctcgatcaacctggataagaagattgctgtcctggaggggcgcatcagggaccataattacattaaggccttcgagaaggacggcctgatcaaggatgggaagctgactgagctcggcagggagctcctggaggtctggaggaacagggagttcgactcgtctgacgtcgattacatccggaacctggcggagaatctcgtcttcatcccggttgaggacattgaggagttcgagtacgagggctacgtttacgacgttactacagagactcataatttcgttgctaatggcatcctcgttcataattccattgtggggacagccacgttcgatcagtactggagcgtgcgcacctctaagcggacttcaggaacagtgaccgtgaccgatcacttccgcgcctgggcgaaccggggcctgaacctcggcacaatagaccaaattacattgtgcgtggagggttaccaaagctctggatcagccaacatcacccagaacaccttctctcagggctcttcttccggcagttcgggtggctcatccggctccacaacgactactcgcatcgagtgtgagaacatgtccttgtccggaccctacgttagcaggatcaccaatccctttaatggtattgcgctgtacgccaacggagacacagcccgcgctaccgttaacttccccgcaagtcgcaactacaatttccgcctgcggggttgcggcaacaacaataatcttgcccgtgtggacctgaggatcgacggacggaccgtcgggaccttttattaccagggcacatacccctgggaggccccaattgacaatgtttatgtcagtgcggggagtcatacagtcgaaatcactgttactgcggataacggcacatgggacgtgtatgccgactacctggtgatacagtga

SEQ ID NO: 2830 - DNA, 2589 bp, Artificial Sequence
  Synthetic Construct, AS-144 intein modified protein encoding nucleic acids
atgcaaacaagcattactctgacatccaacgcatccggtacgtttgacggttactattacgaactctggaaggatactggcaatacaacaatgacggtctacactcaaggtcgcttttcctgccagtggtcgaacatcaataacgcgttgtttaggaccgggaagaaatacaaccagaattggcagtctcttggcacaatccggatcacgtactctgcgacttacaacccaaacgggaactcctacttgtgtatctatggctggtctaccaacccattggtcgagttctacatcgttgagtcctgggggaactggagaccgcctggtgccacgtccctgggccaagtgacaatcgatggcgggacctacgacatctataggacgacacgcgtcaaccagccttgcgtttcgggggactcaaagatcctgacagggaaggggccagtggagatcgggcggctgaactctaacatgatcgcgggcatttggcgcttccagaccgagctggtgcggttcgaggagccacaccgcgttgagtaccgcagggagggcgtgaagatccgcacgaggctcgggttcgagattaaggccaccaaggagcataagttcctcacggtggacgagaacggcgagctgcgctgggtcgaggcttggaagctcaaggagggcaactgggtcggggtggtccggcgcctgccatctcctaatgtgaaggtctcaatcctcgacctcctgccgcccaacgcctacctcaagctgaagggcgagttcctgagggagctcaagctgtcgatccaggcgaagttcggctctattaggacatacgccaagaagaagcgctggtcagagtcctacctcgtcaagcagctgaatggcgtttacccgttcaggtgggagaggctctccgctgtgctgaaggacctcgatctgcgcatgacagagaacgacgtcgagaggatcacttccgataagggcaagtacagcctcccgatcgagttcaccccctcaatggctaggctcctgggcttctggatggctgacgggtcctggaagggcgggaccctcacgctgttctccagcgataggaagatgctggagaagtacaaggagctgtgcaaggaggagttcggcgttgtggggcggatccgcatgctcaacgagtctacatactcactggagatctctttcaatctcctgccggctattttcaagaacctgacaggcaatactgagcgcaagagcaagctcgggactttcccatccatcatctacagcctgcctgaggagcacaagagggagttcctcgcgggctacttcgacggcgatgggttcctggaggttaagggcgggagggtgtactcggctggcttctctaccttcaacaagaggttcgcggagggcatccgggacattctcctgcagctcgggatcgtgtcgtctattagggcccgggagtacgatgaggtccagaagttcaagggccgcgttatccccaagaagggggcttcatacacggtttccgtgctcggcggggagtacctgaagaggttcttcgacgccgtccgcccatggaggtcggattacgagggctgggaggggatgtacaacgagggctacagcaattcggacgtcgttcccaacctcggcaagcgcctgaggagcatcagggagaggctgggcattagcgcttaccgcatgtcgaagatggggttctacaatccagtccgcgttgagctgggcgagagggagatctccaggcggaacctcaggctcctggtggagttctacgagcgggtcgcgaaggagaagcgcgtggaggacgtcctggaggagctgagctacctcagggagctggctgagggcgacgtgttcttcgatcgcatcacgtcggtggagcctgcctacattgatgtcgcgtacggcatcatcaactcggagacagagaactacatcgtggagggcttcatttccaagaactccattgtggggacagccacgttcgatcagtactggagcgtgcgcacctctaagcggacttcaggaacagtgaccgtgaccgatcacttccgcgcctgggcgaaccggggcctgaacctcggcacaatagaccaaattacattgtgcgtggagggttaccaaagctctggatcagccaacatcacccagaacaccttctctcagggctcttcttccggcagttcgggtggctcatccggctccacaacgactactcgcatcgagtgtgagaacatgtccttgtccggaccctacgttagcaggatcaccaatccctttaatggtattgcgctgtacgccaacggagacacagcccgcgctaccgttaacttccccgcaagtcgcaactacaatttccgcctgcggggttgcggcaacaacaataatcttgcccgtgtggacctgaggatcgacggacggaccgtcgggaccttttattaccagggcacatacccctgggaggccccaattgacaatgtttatgtcagtgcggggagtcatacagtcgaaatcactgttactgcggataacggcacatgggacgtgtatgccgactacctggtgatacagtga

SEQ ID NO: 2831 - DNA, 2622 bp, Artificial Sequence
  Synthetic Construct, AS-145 intein modified protein encoding nucleic acids
atgcaaacaagcattactctgacatccaacgcatccggtacgtttgacggttactattacgaactctggaaggatactggcaatacaacaatgacggtctacactcaaggtcgcttttcctgccagtggtcgaacatcaataacgcgttgtttaggaccgggaagaaatacaaccagaattggcagtctcttggcacaatccggatcacgtactctgcgacttacaacccaaacgggaactcctacttgtgtatctatggctggtctaccaacccattggtcgagttctacatcgttgagtcctgggggaactggagaccgcctggtgccacgtccctgggccaagtgacaatcgatggcgggacctacgacatctataggacgacacgcgtcaaccagccttctattctgcctgaggagtggctgcctgttctggaggagggggaggttcatttcgttaggatcggggagctgattgaccgcatgatggaggagaacgctggcaaggtcaagagggagggggagaccgaggtcctggaggtttcaggcctggaggtgccgtccttcaaccgcaggacgaataaggcggagctgaagagggtcaaggctctcatccggcacgactactctggcaaggtgtacaccattaggctgaagtcaggccggcgcatcaagattacgtcagggcattccctgttcagcgtccggaacggcgagctcgttgaggtgaccggcgacgagctgaagccaggggatctcgtcgctgttccaaggaggctggagctgccagagaggaaccacgtcctcaatctggttgagctcctgctcggcacaccggaggaggagactctggacatcgtgatgacgattcccgtcaagggcaagaagaacttcttcaaggggatgctcaggacactgcggtggatcttcggcgaggagaagaggccaaggactgctcgcaggtacctcaggcatctggaggacctcggctacgtgcggctcaagaagatcgggtacgaggtcctggactgggatagcctcaagaattaccggcgcctgtacgaggctctcgtggagaacgtccgctacaacggcaataagagggagtacctggttgagttcaattcgatccgcgacgccgtggggattatgccgctgaaggagctcaaggagtggaagatcggcacactcaacgggttccggatgcgcaagctgattgaggtcgatgagtccctcgccaagctgctcggctactacgtgagcgaggggtacgcgcgcaagcagaggaacccgaagaatggctggtcgtactctgtcaagctgtacaatgaggaccccgaggttctggacgatatggagcggctcgcgagccgcttcttcggcaaggttaggcgggggaggaactacgtggagatccccaagaagattggctacctgctcttcgagaatatgtgcggggtgctcgctgagaacaagcgcatcccagagttcgtcttcacatcacctaagggcgttaggctggccttcctggaggggtactccagcgctatggctacctccacggagcaggagactcaggcgctgaacgagaagcgcgctctggccaatcagctcgttctgctcctgaactcggtgggcgtctctgctgtgaagctcggccacgactccggggtttacagggtgtacatcaatgaggagctgccattcgtcaagctcgataagaagaagaacgcttactacagccatgtgattcctaaggaggtcctctcggaggtcttcggcaaggttttccagaagaacgtgtccccacagaccttccggaagatggtcgaggacggcaggctggatcctgagaaggctcagaggctgtcgtggctcatcgagggggacgtggtcctcgatcgcgtcgagtctgttgacgtggaggactacgatggctacgtgtacgatctctctgtggaggataatgagaacttcctcgtgggcttcgggctcgtttacgctcataattccattgtggggacagccacgttcgatcagtactggagcgtgcgcacctctaagcggacttcaggaacagtgaccgtgaccgatcacttccgcgcctgggcgaaccggggcctgaacctcggcacaatagaccaaattacattgtgcgtggagggttaccaaagctctggatcagccaacatcacccagaacaccttctctcagggctcttcttccggcagttcgggtggctcatccggctccacaacgactactcgcatcgagtgtgagaacatgtccttgtccggaccctacgttagcaggatcaccaatccctttaatggtattgcgctgtacgccaacggagacacagcccgcgctaccgttaacttccccgcaagtcgcaactacaatttccgcctgcggggttgcggcaacaacaataatcttgcccgtgtggacctgaggatcgacggacggaccgtcgggaccttttattaccagggcacatacccctgggaggccccaattgacaatgtttatgtcagtgcggggagtcatacagtcgaaatcactgttactgcggataacggcacatgggacgtgtatgccgactacctggtgatacagtga

SEQ ID NO: 2832 - DNA, 2460 bp, Artificial Sequence
  Synthetic Construct, AS-146 intein modified protein encoding nucleic acids
atgcaaacaagcattactctgacatccaacgcatccggtacgtttgacggttactattacgaactctggaaggatactggcaatacaacaatgacggtctacactcaaggtcgcttttcctgccagtggtcgaacatcaataacgcgttgtttaggaccgggaagaaatacaaccagaattggcagtctcttggcacaatccggatcacgtactctgcgacttacaacccaaacgggaactcctacttgtgtatctatggctggtctaccaacccattggtcgagttctacatcgttgagtcctgggggaactggagaccgcctggtgccacgtccctgggccaagtgacaatcgatggcgggacctacgacatctataggacgacacgcgtcaaccagccttgcttcgctaaggacactaaggtctactacgagaatgacacactggttcatttcgagtcaattgaggacatgtaccataagtacgcttctctcgggagggaggtgccattcgacaacggctacgctgtcccactggagaccgtgtcagtctacacgttcgatccgaagacaggcgaggttaagaggacgaaggctagctacatctaccgggagaaggtggagaagctcgccgagatccgcctgtcgaacggctacctcctgaggattacactcctgcaccccgttctcgtgttccggaatggcctgcagtgggtgccagctggcatgatcaagcctggggacctcatcgtcggcattcgctcggttccagcgaacgccgcgactattgaggagtctgaggcctacttcctcgggctgttcgtggctgagggcacctcaaatcctctctccatcaccacgggctccgaggagctgaaggacttcatcgtcagcttcattgaggaccatgatgggtacacaccaactgtcgaggttcgcaggggcctctaccggatcctgttccgcaagaagacggctgagtggctcggcgagctggctacttcgaacgcctctaccaaggtggtccctgagagggtcctcaatgcgggggagtccgctatcgctgccttcctcgctggctacctggacggcgatgggtacctcactgagtctattgtggagctggtcaccaagtcacgggagctcgctgacgggctggtgttcctcctgaagcgcctgggcatcacgccgaggattagccagaagacaatcgaggggtcggtctactaccggatctacattacgggcgaggatcgcaagacattcgagaaggtcctggagaagtccaggatcaagccaggggagatgaacgagggcggggttggcaggtacccaccagctctgggcaagttcctcgggaagctgtacagcgagttcaggctccccaagcgggacaacgagactgcgtaccacatcctgaccaggtcacggaatgtgtggttcaccgagaagacgctctcccggattgaggagtacttcagggaggctctggagaagctgtcggaggctaggaaggctctggagatgggcgacaagccggagctgccattcccttggacagcgatcactaagtacgggttcacggatcgccaggtcgctaactacaggacaaggggcctcccaaagaggccagagctgaaggagaaggttgtgtccgccctcctgaaggagatcgagaggctggagggcgtggctaagctcgctctggagaccattgagctcgctaggcgcctggagttccatgaggtttccagcgtggaggtcgttgactacaatgattgggtctacgatctcgtcattccagagactcataacttcattgctccaaatgggctcgtgctccacaactccattgtggggacagccacgttcgatcagtactggagcgtgcgcacctctaagcggacttcaggaacagtgaccgtgaccgatcacttccgcgcctgggcgaaccggggcctgaacctcggcacaatagaccaaattacattgtgcgtggagggttaccaaagctctggatcagccaacatcacccagaacaccttctctcagggctcttcttccggcagttcgggtggctcatccggctccacaacgactactcgcatcgagtgtgagaacatgtccttgtccggaccctacgttagcaggatcaccaatccctttaatggtattgcgctgtacgccaacggagacacagcccgcgctaccgttaacttccccgcaagtcgcaactacaatttccgcctgcggggttgcggcaacaacaataatcttgcccgtgtggacctgaggatcgacggacggaccgtcgggaccttttattaccagggcacatacccctgggaggccccaattgacaatgtttatgtcagtgcggggagtcatacagtcgaaatcactgttactgcggataacggcacatgggacgtgtatgccgactacctggtgatacagtga

SEQ ID NO: 2833 - DNA, 2481 bp, Artificial Sequence
  Synthetic Construct, AS-147 intein modified protein encoding nucleic acids
atgcaaacaagcattactctgacatccaacgcatccggtacgtttgacggttactattacgaactctggaaggatactggcaatacaacaatgacggtctacactcaaggtcgcttttcctgccagtggtcgaacatcaataacgcgttgtttaggaccgggaagaaatacaaccagaattggcagtctcttggcacaatccggatcacgtactctgcgacttacaacccaaacgggaactcctacttgtgtatctatggctggtctaccaacccattggtcgagttctacatcgttgagtcctgggggaactggagaccgcctggtgccacgtccctgggccaagtgacaatcgatggcgggacctacgacatctataggacgacacgcgtcaaccagccttgcgttacccctgacacactcgtttcgctcgctgacgggcggattatggagatcaaggatgcggtggagaagtcggagggcaatctgctcagcgtgaacggcctgaagccgaaggaggccaaggcgctcaagttctgggagatcgactggaacgggcccctcaaggtcatcaagctgaagaatggccacgagattaaggccacgccagaccatgggctcctggtcatgagggagggcaagctggggtgggtttcggcgaagaacgtgagggagggcgactacgtcgctttcgcttacaataccggccacagggggagggatgagtacacgctcctgaagctcatgatcaagctgggcattaccgacgtgatggtcgagctcgatgaggagtacttcaacgagaaggttgcccctatcgtgagggagcggatttccacaagcactaagtacaagtacctgaggaggagggtcctcccactgtacctcctgcaggagtggggcctggacgattacgaggcccatgttaagtccctctacaggcagagggctggcagcaagccaatccccaatttcaagctcgacggcaggttctggtatgtgttcgggctcgttctgggcgacgggacactccgcgatagcaaggtgctgatctcgcagactccactcaaggacgtcaagtccgttctggaggatgtcttccctttcctcagggttttcgagaccacgaaccaggttggcttctccaactccatcatcgctgaggtgttccgcaggctcggcgctaggaaggggaagctccacccactggtcttcggcctgagggaggagtacatcaacgcgatgattgctggctacttcgacaccgatgggacgttctctatcctcaacgacaggaagggcccaaatttccgggggatcctgacatcaaagcggggcgatgtgctccgcatgctgtccgtctacctgtaccagatcggcattatgaactacctcaggagggacgagaggaccggggtgtgggatctgatcatttcaaatcgctccctggagaagttcagggagaagatctacccgtacctccggattaggcgggctcagttcgacgaggcctactctgtctacagggcctcacgcagggctttcgagggcgatctcctgccagtggcccctgtcttcggcaagctgaagttcaagaacgggacaaagaatcgcatcctcaaggagactggcattgacgtgtggaactggctgaagaggccagagggggagatcccccgcgataagctctccaaggtcctggagtacgctgaggagtcgcccgagaaggagttcctcaagtctctggtggaggcgggcgtcacctgggttaaggtgaagggggtggaggaggagctgtacacgggcaagctctacgacttcacaactactacggagaatttcctctcaaatggggctgtttctcataattccattgtggggacagccacgttcgatcagtactggagcgtgcgcacctctaagcggacttcaggaacagtgaccgtgaccgatcacttccgcgcctgggcgaaccggggcctgaacctcggcacaatagaccaaattacattgtgcgtggagggttaccaaagctctggatcagccaacatcacccagaacaccttctctcagggctcttcttccggcagttcgggtggctcatccggctccacaacgactactcgcatcgagtgtgagaacatgtccttgtccggaccctacgttagcaggatcaccaatccctttaatggtattgcgctgtacgccaacggagacacagcccgcgctaccgttaacttccccgcaagtcgcaactacaatttccgcctgcggggttgcggcaacaacaataatcttgcccgtgtggacctgaggatcgacggacggaccgtcgggaccttttattaccagggcacatacccctgggaggccccaattgacaatgtttatgtcagtgcggggagtcatacagtcgaaatcactgttactgcggataacggcacatgggacgtgtatgccgactacctggtgatacagtga

SEQ ID NO: 2834 - DNA, 2376 bp, Artificial Sequence
  Synthetic Construct, AS-148 intein modified protein encoding nucleic acids
atgcaaacaagcattactctgacatccaacgcatccggtacgtttgacggttactattacgaactctggaaggatactggcaatacaacaatgacggtctacactcaaggtcgcttttcctgccagtggtcgaacatcaataacgcgttgtttaggaccgggaagaaatacaaccagaattggcagtctcttggcacaatccggatcacgtactctgcgacttacaacccaaacgggaactcctacttgtgtatctatggctggtctaccaacccattggtcgagttctacatcgttgagtcctgggggaactggagaccgcctggtgccacgtccctgggccaagtgacaatcgatggcgggacctacgacatctataggacgacacgcgtcaaccagccttgcatcgatggcaacgctaagattattttcgagaatgacggggaggagcatattatgacaatggcggagatgtacgagcgctacaaggatctgggcgagttctacgacccggagtacaaccggtgggggatcaatgtggaggaggttccggtctacgtgaagtcattcgatccctccaccaaggagattacgaagggcaaggtgaaggtcatctggaagtacgagctcggggaggacgttcccaagtacgagatcaagacaaacaagggcactagggtcctcacctcgccatggcaccctttcttcgtcattacgcaggatctgaagatcgttgagaagcgggctgatgagctcagggagggcgacatgctggtcggcgggatgccatctgacgatgactacgagttcctcctggactactggctcgccggcttcattgcgggcgatgggagcatcgacaagtaccgctcgcacgttaagggccatgagtatgtgtacgatcggctgcgcatctacgactacaccacggagacgctcggcatcattaacgaccacctggagaagacattcgggaagaggtactccctccagagggatcggaatatccactacatcgacattaaggccaagggcattactagccattacatcgagctcctgcgcggcatcaccaacgggattccgcagcccatcctgaaggagggcaggaatgctgtgctctctttcatcacgggcctgttcgatgccgaggggcatgtcaactcaaagccaggcgtggagctcgggatggtcaataggaagctgatcgaggacattacatactacctcaacagcctgggcatcaaggcgcgcatgaggaagaagcctcggaaggatggggtggactacgtcatgcacgttgaggagtactccagcctcctgcggttctacgagctcattggcaagaacctgcagaactccgagaagcgcatcaagctggaggagctcctgtctaagcataacggcgggtcattcggcctcaccctgtccttcgaggacttcaaggcgtggtcgtctaagtacggcgtggagttcaagacgaacgggtcccagacactcgctatcattaagaatgagaaggtgagcctgggccagtggcacaggagggggagggtctcgaaggctgtcctcgttaagatgctccggaagctgtacgatacaactaagtccgaggacgtgaagcgcatgctccatctgattgagggcctggaggtggtcaaggagatcaacgtcactaatgagccaaagaccttctacgacctgactgtggagcgctaccagaactacctcgccggggagaatggcatggttttcgtgcataattccattgtggggacagccacgttcgatcagtactggagcgtgcgcacctctaagcggacttcaggaacagtgaccgtgaccgatcacttccgcgcctgggcgaaccggggcctgaacctcggcacaatagaccaaattacattgtgcgtggagggttaccaaagctctggatcagccaacatcacccagaacaccttctctcagggctcttcttccggcagttcgggtggctcatccggctccacaacgactactcgcatcgagtgtgagaacatgtccttgtccggaccctacgttagcaggatcaccaatccctttaatggtattgcgctgtacgccaacggagacacagcccgcgctaccgttaacttccccgcaagtcgcaactacaatttccgcctgcggggttgcggcaacaacaataatcttgcccgtgtggacctgaggatcgacggacggaccgtcgggaccttttattaccagggcacatacccctgggaggccccaattgacaatgtttatgtcagtgcggggagtcatacagtcgaaatcactgttactgcggataacggcacatgggacgtgtatgccgactacctggtgatacagtga

SEQ ID NO: 2835 - DNA, 2547 bp, Artificial Sequence
  Synthetic Construct, AS-149 intein modified protein encoding nucleic acids
atgcaaacaagcattactctgacatccaacgcatccggtacgtttgacggttactattacgaactctggaaggatactggcaatacaacaatgacggtctacactcaaggtcgcttttcctgccagtggtcgaacatcaataacgcgttgtttaggaccgggaagaaatacaaccagaattggcagtctcttggcacaatccggatcacgtactctgcgacttacaacccaaacgggaactcctacttgtgtatctatggctggtctaccaacccattggtcgagttctacatcgttgagtcctgggggaactggagaccgcctggtgccacgtccctgggccaagtgacaatcgatggcgggacctacgacatctataggacgacacgcgtcaaccagccttgcctgcatccggactcactcattcctacgcctcagggggttaagcgcatcaaggagctgccggagaagggggaggtcttcgctctcgacttcgatctcaagctgtcacgggcgaggtacaggctcctggagagggacgctgatgagcccatgtacaaggtgacactctccgacaggactgagctctacctgaccgcggatcacccggtcctcgtttacagggacgatcagctgatcttcgtccccgctgaggagctccgggagaacgaccaggtggtcctgttcattaatcgctcagagtactccccaaggaccgagtcgcctacgctcctgggcttcctcctggagaacgccacctctatgaaggactacatcctctacgatccagagttcggcggggtgctgaggaatcgcattaaggacgcgggcctcaagactgagatcctgtggaggttccggattcgcgagcccacctactacaagtacctccgcggcaagatgccggttcccatcgtgaggttcctcctggaggagggcgttgtgagcattgaggagctccgggaggtgttccgcgggttctcgtactctacatcactgactccaatcagcttcgagttctcggaggagttctggtacctcttcggcctggtcgctggcgacgggcacctggctaagaagggggctatcaccattccagccaaggaccgcaccgaggatacggtcaaggcggttaaggagatcgctaactccctccaggtgcctttcgccttcgacgagaagtacaagatgatcattctgcggtccaagagcctcacgaggctgttcgagctcctgggctgcccgtacgggaacaagacagagatcttcaggattccgggcgagatcatggcgaagccagagtggatggctgcgttcctcgctggctactacgacgcggatggccacatcgggacaaagccaactggcgggaagaagtcgcattctcctcagatcgtcctgacgagcaagaaccgcatggccatctacacagtcaagcagatgtggcagctcctgggcgttgggacgtacctctgggagaagaaggacaggaacggcaatttcatggcctacgagctgaaggtgtactcccgcgacgcgtggcggttctacgaggtcatgaagaaccacctccgcatcaagaggaaggacctggagcatgtgaaggaggtcgctattaggaagcggaaggcctactctcaccattactcagttctcaatgtgaagtcttgggagggcaagatcaagtccagcaacgttctgtggaagaagttcgacatgtccaatcagaccgctcacggcagggggatcagcctcgacaagctgcagcgcattgtcgattacctcaccgacacggatctgcgcaggatcgcgatgggcgatgtctacgtgctggggatcaggtccattgagaagttccattaccggggcaaggtgtacgatctcgtcgtggatcagtaccacaacttcattgctaatggggtcgtcgttcataattccattgtggggacagccacgttcgatcagtactggagcgtgcgcacctctaagcggacttcaggaacagtgaccgtgaccgatcacttccgcgcctgggcgaaccggggcctgaacctcggcacaatagaccaaattacattgtgcgtggagggttaccaaagctctggatcagccaacatcacccagaacaccttctctcagggctcttcttccggcagttcgggtggctcatccggctccacaacgactactcgcatcgagtgtgagaacatgtccttgtccggaccctacgttagcaggatcaccaatccctttaatggtattgcgctgtacgccaacggagacacagcccgcgctaccgttaacttccccgcaagtcgcaactacaatttccgcctgcggggttgcggcaacaacaataatcttgcccgtgtggacctgaggatcgacggacggaccgtcgggaccttttattaccagggcacatacccctgggaggccccaattgacaatgtttatgtcagtgcggggagtcatacagtcgaaatcactgttactgcggataacggcacatgggacgtgtatgccgactacctggtgatacagtga

SEQ ID NO: 2836 - DNA, 2283 bp, Artificial Sequence
  Synthetic Construct, AS-150 intein modified protein encoding nucleic acids
atgcaaacaagcattactctgacatccaacgcatccggtacgtttgacggttactattacgaactctggaaggatactggcaatacaacaatgacggtctacactcaaggtcgcttttcctgccagtggtcgaacatcaataacgcgttgtttaggaccgggaagaaatacaaccagaattggcagtctcttggcacaatccggatcacgtactctgcgacttacaacccaaacgggaactcctacttgtgtatctatggctggtctaccaacccattggtcgagttctacatcgttgagtcctgggggaactggagaccgcctggtgccacgtccctgggccaagtgacaatcgatggcgggacctacgacatctataggacgacacgcgtcaaccagccttgcctgcctgcgcgggctagggtcgtggattggtgcacagggcgggtcgttcgggtcggggagatcgttaggggggaggctaagggcgtctgggtggtctccctggacgaggctaggctgaggctcgttccaaggcctgttgtggctgctttcccaagcggcaaggctcaggtgtacgctctgaggaccgctacgggcagggtgctggaggcgacagctaaccacccagtctacactccagagggctggaggccactggggaccctcgctcctggcgactacgtcgctctgccaaggcatctctcgtacaggccatctctgcacctggagggccatgagctggatctcctggggttcgctctggctgagggccacctccgccatccatcgggcgtgtacctctacacctccagcgaggaggagctggctgccatggaggaggctctcagggcgttccctaatacgcggatccgcgtcgtttggaggaggggggttgctcacgtctacgtgggcagggtggacaggaggcaggaggctggcgctgtggcgttcctcaggaggatgggcctcctggggctggatgcgaagacgaagaggctcccagaggctgtcttcggcctgccaccagaggaggttgctaggttcctggggaggctctggacaggcgacggcggggtggatccaaagggcaggctgattcactacgctactgctagcaaggagctcgcttggggcgtccagcatctcctgctcaggctgggcctccagagcaggctggtggagaagcggttctcgggcgggtacaagggctacgctgtctacctgctcggcgggctggaggctgctaggaggttcgctgagacagtggggccatacctggtcggcaagcggaggcaggacctggaggctctgctcgcttcatgggagaaggctggcaggtccaccggggatgttctgccactcgcgttcctggaggaggtgagggctgctgttgctgaggtggctcagggccaggtggctgacctgctcagggaggccggcctcgcggaggggctgctctgcctgggcagggggaggagggggctctctcgcgccaccgtcggcaggctggctgccctcacggggtcactggcgctgctccggctcgcggaggctgaggtttactgggatcgcgtcgaggcggttgagccgctcggcgaggaggaggtcttcgatctcactgtggagggcactcatactttcgttgcggaggatgttatcgttcataattccattgtggggacagccacgttcgatcagtactggagcgtgcgcacctctaagcggacttcaggaacagtgaccgtgaccgatcacttccgcgcctgggcgaaccggggcctgaacctcggcacaatagaccaaattacattgtgcgtggagggttaccaaagctctggatcagccaacatcacccagaacaccttctctcagggctcttcttccggcagttcgggtggctcatccggctccacaacgactactcgcatcgagtgtgagaacatgtccttgtccggaccctacgttagcaggatcaccaatccctttaatggtattgcgctgtacgccaacggagacacagcccgcgctaccgttaacttccccgcaagtcgcaactacaatttccgcctgcggggttgcggcaacaacaataatcttgcccgtgtggacctgaggatcgacggacggaccgtcgggaccttttattaccagggcacatacccctgggaggccccaattgacaatgtttatgtcagtgcggggagtcatacagtcgaaatcactgttactgcggataacggcacatgggacgtgtatgccgactacctggtgatacagtga

SEQ ID NO: 2837 - DNA, 2328 bp, Artificial Sequence
  Synthetic Construct, AS-151 intein modified protein encoding nucleic acids
atgcaaacaagcattactctgacatccaacgcatccggtacgtttgacggttactattacgaactctggaaggatactggcaatacaacaatgacggtctacactcaaggtcgcttttcctgccagtggtcgaacatcaataacgcgttgtttaggaccgggaagaaatacaaccagaattggcagtctcttggcacaatccggatcacgtactctgcgacttacaacccaaacgggaactcctacttgtgtatctatggctggtctaccaacccattggtcgagttctacatcgttgagtcctgggggaactggagaccgcctggtgccacgtccctgggccaagtgacaatcgatggcgggacctacgacatctataggacgacacgcgtcaaccagccttgcctgcatccggacactctcgttcataccgatcgggggactctcaggctgcgggagctcgtggaccctttcaggcggggctggcagccgcacaccctgagcgttgctacggacgagggctggaggccatcgccagagggctacaacaatggggtggctccaaccctcagggtggtcctggagaacggcctggaggttcaggggacactcaatcataagctcaaggtgctgcgcgaggatggcactagggagtgggtcgagctccaggacctgaggccaggcgattgggtcatctgggttctggacgagcacaccggcacgccagtccagctcgctccactggatgagccactccatcctaacaccacgccaattcgcacacctgaggtgctgactgaggacctcgccttcctcctgggcttcttcttcggcgaggggttcgtgtcgggcgataggatcgggttctctgtccacgaggaggagccaatgcgggaggaggcgaagaggctgttccgggagctcttcggcctggagctgagggaggagaggaagccaggggaccgctcagttaccctggttgtgcggtcccgccctctggtgacgtggctccgcaagaacggcctcctgaaggggaaggcgagggagctggaggtcccgcgggctatcaggcagtccccaaggcctgttctcgctgcgttcctcaggggcctgttcgaggccgacggcacaattactgcggggtacccaatgctgacaactgcgagcaagcgcctcgctcaggatgtgatggtcctcctgggcgggctgggcattccttctaagctcctgaggtacaatccactcccaggccgcttctcaaaggctgagcattacggcgtccgggtcgttacggctaaggggctggagaggtacctggagcggatcggcgtgccaaaggggtcgcgcctggaggcgctgcacggcattaagccagacgtccgcagggagtccagctggccactgcctcatgctgagggcctcctgaagccactcctgaccgtgacggagaagggcaggaaggggtacgctagcccatacacaccactgcgcaaggacctcctgaggtacctgaggggcgagaggcagctcacagctactgggtacgccatggtcctggagaaggctcaggatctcggcctggaggctgagccattccccttcaacgagtactacgttagggtggcctccgtggagccgggcggggagatcctcacgctggatctctctgtggagggcaatcatacatacctcgccaatgggctcgtctctcataattccattgtggggacagccacgttcgatcagtactggagcgtgcgcacctctaagcggacttcaggaacagtgaccgtgaccgatcacttccgcgcctgggcgaaccggggcctgaacctcggcacaatagaccaaattacattgtgcgtggagggttaccaaagctctggatcagccaacatcacccagaacaccttctctcagggctcttcttccggcagttcgggtggctcatccggctccacaacgactactcgcatcgagtgtgagaacatgtccttgtccggaccctacgttagcaggatcaccaatccctttaatggtattgcgctgtacgccaacggagacacagcccgcgctaccgttaacttccccgcaagtcgcaactacaatttccgcctgcggggttgcggcaacaacaataatcttgcccgtgtggacctgaggatcgacggacggaccgtcgggaccttttattaccagggcacatacccctgggaggccccaattgacaatgtttatgtcagtgcggggagtcatacagtcgaaatcactgttactgcggataacggcacatgggacgtgtatgccgactacctggtgatacagtga

SEQ ID NO: 2838 - DNA, 2235 bp, Artificial Sequence
  Synthetic Construct, AS-152 intein modified protein encoding nucleic acids
atgcaaacaagcattactctgacatccaacgcatccggtacgtttgacggttactattacgaactctggaaggatactggcaatacaacaatgacggtctacactcaaggtcgcttttcctgccagtggtcgaacatcaataacgcgttgtttaggaccgggaagaaatacaaccagaattggcagtctcttggcacaatccggatcacgtactctgcgacttacaacccaaacgggaactcctacttgtgtatctatggctggtctaccaacccattggtcgagttctacatcgttgagtcctgggggaactggagaccgcctggtgccacgtccctgggccaagtgacaatcgatggcgggacctacgacatctataggacgacacgcgtcaaccagccttgcttcgtggggtctactcgcattccgacggagcgggggctggttcctattgaggagctcgctagggagggggggtctttctacctggtgactgacaacagggctccgttcggcgggaggggcgctccactcccaggccacgggaccgccgtcaggaaggccgttcgggcgttcttcacgggcgtcaagccagtggtccggctgaggacaagggagggcctggaggttaccctcacgccagatcatctcctgctcacgccagagggctacagggaggctgggaagctgaggccaggcgagaagatcctcgtccagtccggcgaggggctgttcccaaaggaggagagcctgcctgctcaggctctcgctgttgtgcacgagagggtggcgacggctggcgggaggggcgggaggggcagggctgacgtccgcgcccagtacaggaacctccccacacgctggtcaagggagctgggcgttgctctcgggtggctgctcggcgacgggtacctgagggaggatggcgtcgggttctacttctcccggaaggacttcgctgatctggcctggctcccagacctgctccgcgattggttcggccctgggacactccaggagactcgcagcaacaccttccacctgcatttcaataggatcccggctgagttcttccaggctctcggcgtgaaggctgcgcgggcaactgagaagagggtcccagagtcgctgttccgggctcctcgcgaggctgtcgttggcttcctgcaggggctcttctctgcggacggctcagttcagattaacgagaataagcaggatgctaccgtgaggctggcctccagctcgctcgctctgctccaggacgtgcagctgctcctgctcaacctgggcatcctcgggaagattcacaagaggagggaggctgctaggaaggctctcccggacggcaagggcgggctgagggagtacccagtcgctcctcagtacgagctgattctcggcggggagaatagggatcggttcgccgaggtggtcggcttcctccaggaggagaagcagagcaagctgctcgcgttcctgaggcataggccgaggggctcgtacaggaagcccttcctcgctaccgttgcttctgtggagccagctggcgaggcgcccgtgtacgatctcacagagccagttacacactcgctcattgctaatgggctcgttgctcataattccattgtggggacagccacgttcgatcagtactggagcgtgcgcacctctaagcggacttcaggaacagtgaccgtgaccgatcacttccgcgcctgggcgaaccggggcctgaacctcggcacaatagaccaaattacattgtgcgtggagggttaccaaagctctggatcagccaacatcacccagaacaccttctctcagggctcttcttccggcagttcgggtggctcatccggctccacaacgactactcgcatcgagtgtgagaacatgtccttgtccggaccctacgttagcaggatcaccaatccctttaatggtattgcgctgtacgccaacggagacacagcccgcgctaccgttaacttccccgcaagtcgcaactacaatttccgcctgcggggttgcggcaacaacaataatcttgcccgtgtggacctgaggatcgacggacggaccgtcgggaccttttattaccagggcacatacccctgggaggccccaattgacaatgtttatgtcagtgcggggagtcatacagtcgaaatcactgttactgcggataacggcacatgggacgtgtatgccgactacctggtgatacagtga

SEQ ID NO: 2839 - DNA, 1572 bp, Artificial Sequence
  Synthetic Construct, AS-153 intein modified protein encoding nucleic acids
atgcaaacaagcattactctgacatccaacgcatccggtacgtttgacggttactattacgaactctggaaggatactggcaatacaacaatgacggtctacactcaaggtcgcttttcctgccagtggtcgaacatcaataacgcgttgtttaggaccgggaagaaatacaaccagaattggcagtctcttggcacaatccggatcacgtactctgcgacttacaacccaaacgggaactcctacttgtgtatctatggctggtctaccaacccattggtcgagttctacatcgttgagtcctgggggaactggagaccgcctggtgccacgtccctgggccaagtgacaatcgatggcgggacctacgacatctataggacgacacgcgtcaaccagccttgcgtttcgggggagacgccagtctacctcgctgacggcaagacaattaagatcaaggacctctactcatctgagcgcaagaaggaggacaacatcgtcgaggctggctccggggaggagatcattcacctcaaggacccgatccagatctacagctacgttgatggcacgatcgtgcgctcccgctcccgcctcctgtacaaggggaagtccagctacctggtgcgcatcgagacaattggcgggcgctcagtgtccgtcactcccgtccataagctcttcgttctgaccgagaagggcatcgaggaggttatggcctcgaatctcaaagtgggggacatgattgctgctgtcgctgagagcgagtcggaggcccgggattgcggcatgagcgaggagtgcgtgatggaggcggaggtctacacctctctggaggctacgttcgaccgcgttaagtcaatcgcgtacgagaagggcgacttcgatgtgtacgatctgtcagttccagagtacggcaggaacttcattgggggggaggggctgctcgtgctccacaactccattgtggggacagccacgttcgatcagtactggagcgtgcgcacctctaagcggacttcaggaacagtgaccgtgaccgatcacttccgcgcctgggcgaaccggggcctgaacctcggcacaatagaccaaattacattgtgcgtggagggttaccaaagctctggatcagccaacatcacccagaacaccttctctcagggctcttcttccggcagttcgggtggctcatccggctccacaacgactactcgcatcgagtgtgagaacatgtccttgtccggaccctacgttagcaggatcaccaatccctttaatggtattgcgctgtacgccaacggagacacagcccgcgctaccgttaacttccccgcaagtcgcaactacaatttccgcctgcggggttgcggcaacaacaataatcttgcccgtgtggacctgaggatcgacggacggaccgtcgggaccttttattaccagggcacatacccctgggaggccccaattgacaatgtttatgtcagtgcggggagtcatacagtcgaaatcactgttactgcggataacggcacatgggacgtgtatgccgactacctggtgatacagtga

SEQ ID NO: 2840 - DNA, 1470 bp, Artificial Sequence
  Synthetic Construct, AS-154 intein modified protein encoding nucleic acids
atgcaaacaagcattactctgacatccaacgcatccggtacgtttgacggttactattacgaactctggaaggatactggcaatacaacaatgacggtctacactcaaggtcgcttttcctgccagtggtcgaacatcaataacgcgttgtttaggaccgggaagaaatacaaccagaattggcagtctcttggcacaatccggatcacgtactctgcgacttacaacccaaacgggaactcctacttgtgtatctatggctggtctaccaacccattggtcgagttctacatcgttgagtcctgggggaactggagaccgcctggtgccacgtccctgggccaagtgacaatcgatggcgggacctacgacatctataggacgacacgcgtcaaccagccttgcctctcaggggagactgcggttatgacggtggagtacggggctattcctattcggcggctggttcaggagcggctgatctgccaggtttactcgctcgacccacagggccacctgtacacgcagcctatcgctcagtggcatttccagggcttccgcccggtgtacgcgtaccagctggaggacgggtccacaatttgcgctactccggatcaccggttcatgaccacgagcggccagatgctgcccatcgagcagattttccgcgaggggctggagctgtggcaggtggccatcgctccaccaggcgctctcgctcaggggctgaagccggccgtccagatgtcctgcatgaagattgtgggcaggaggctcgtcgggtggcaggctgtttacgatattgggctcgccggggatcataacttcctcctcgctaatggggctattgctgctaattccattgtggggacagccacgttcgatcagtactggagcgtgcgcacctctaagcggacttcaggaacagtgaccgtgaccgatcacttccgcgcctgggcgaaccggggcctgaacctcggcacaatagaccaaattacattgtgcgtggagggttaccaaagctctggatcagccaacatcacccagaacaccttctctcagggctcttcttccggcagttcgggtggctcatccggctccacaacgactactcgcatcgagtgtgagaacatgtccttgtccggaccctacgttagcaggatcaccaatccctttaatggtattgcgctgtacgccaacggagacacagcccgcgctaccgttaacttccccgcaagtcgcaactacaatttccgcctgcggggttgcggcaacaacaataatcttgcccgtgtggacctgaggatcgacggacggaccgtcgggaccttttattaccagggcacatacccctgggaggccccaattgacaatgtttatgtcagtgcggggagtcatacagtcgaaatcactgttactgcggataacggcacatgggacgtgtatgccgactacctggtgatacagtga

SEQ ID NO: 2841 - DNA, 1935 bp, Artificial Sequence
  Synthetic Construct, AS-155 intein modified protein encoding nucleic acids
atgcaaacaagcattactctgacatccaacgcatccggtacgtttgacggttactattacgaactctggaaggatactggcaatacaacaatgacggtctacactcaaggtcgcttttcctgccagtggtcgaacatcaataacgcgttgtttaggaccgggaagaaatacaaccagaattggcagtctcttggcacaatccggatcacgtactctgcgacttacaacccaaacgggaactcctacttgtgtatctatggctggtctaccaacccattggtcgagttctacatcgttgagtcctgggggaactggagaccgcctggtgccacgtccctgggccaagtgacaatcgatggcgggacctacgacatctataggacgacacgcgtcaaccagccttgcgttaccgctgacacatgggttactaccgctgaggggccaaggcaggtggaggagctgatcggcaagaagttcacggctatcgttaacggcgaggagtgggagtccagcgaggaggggttcttcgagacagacgttaagccagtgtacaccctgaagacggctgagggcttcgagctgaggctcacggctgatcaccctgtcatgaaggttgagaggatgacacggtacaaggtggagactcagtggtccaacgctggcgacctcaagccaggggataagatcattatcaacaatcatagggacttcggcaattggagcgtcaaggggaagtacaccgagggcgaggggtacctgattggcctcctgctcggcgacgggacgatcaagaagctcaacccctggatgaaggcgatttcaaagaagatggagaaggcctccgcggatttctgcgagggcatcctgagggggctcttcgacgctgatggctctgtgcaggggaatcagtcgaagggcgtctctattcgcctggcccagtcagacgtcgagatcctcaaggcggttcagcgcattctgctcaggttcggcatcttctcgaaggtgtacatgaaccgcaggggcgagcggaaggttaagatgccggatgggaagggcggggtcaaggagtacatcaccaagccccagcacgagctcgtgatcagcaacgacaatatcctctacttcgctgagagggtcggcttctcggatgccgagaagatggagaagctggagaaggctatctggaactacaagcggaagatgaatagggagaggttcgtggctagcgtcgaggaggtggtcccagacggcgttgagaaggtgtacgacgttaagattccaggcatcaatgctttcaatgctaatggcttcgtggttcacaactccattgtggggacagccacgttcgatcagtactggagcgtgcgcacctctaagcggacttcaggaacagtgaccgtgaccgatcacttccgcgcctgggcgaaccggggcctgaacctcggcacaatagaccaaattacattgtgcgtggagggttaccaaagctctggatcagccaacatcacccagaacaccttctctcagggctcttcttccggcagttcgggtggctcatccggctccacaacgactactcgcatcgagtgtgagaacatgtccttgtccggaccctacgttagcaggatcaccaatccctttaatggtattgcgctgtacgccaacggagacacagcccgcgctaccgttaacttccccgcaagtcgcaactacaatttccgcctgcggggttgcggcaacaacaataatcttgcccgtgtggacctgaggatcgacggacggaccgtcgggaccttttattaccagggcacatacccctgggaggccccaattgacaatgtttatgtcagtgcggggagtcatacagtcgaaatcactgttactgcggataacggcacatgggacgtgtatgccgactacctggtgatacagtga

SEQ ID NO: 2842 - DNA, 2382 bp, Artificial Sequence
  Synthetic Construct, AS-156 intein modified protein encoding nucleic acids
atgcaaacaagcattactctgacatccaacgcatccggtacgtttgacggttactattacgaactctggaaggatactggcaatacaacaatgacggtctacactcaaggtcgcttttcctgccagtggtcgaacatcaataacgcgttgtttaggaccgggaagaaatacaaccagaattggcagtctcttggcacaatccggatcacgtactctgcgacttacaacccaaacgggaactcctacttgtgtatctatggctggtctaccaacccattggtcgagttctacatcgttgagtcctgggggaactggagaccgcctggtgccacgtccctgggccaagtgacaatcgatggcgggacctacgacatctataggacgacacgcgtcaaccagccttgcttcgctaaggggactgaggtcatgatgcacgacggctctgtgaaggctattgagactatcgaggcgggggaggctgttatggggaccgacggccagccaaggaaggtggtcggcctccctcgggggagggaggtcatgtacaaggtttcccagaagacggcgcaccgggtgcataagaccgacgagacgcgcgccgctccagtcgctctcttcgagtacaactgcaatgccacacacaagctggttgtgaggactcctcggagctgccgctcgatcacccgcaagatgcagggcgttgactacaacgaggtcatcttcttcgacctcaagaagaagaagctggaggacggccgcgagatcgagattgtcaaggaggtttcgaggtcttacccagctgctgagggcgctgagaaggctgctcagatggtgaaggactactacgatgccgcgcgcgggaaggagttcttcgagtggacaatcgaggcgagggatgttagggagctcggcgctcacgtgaggaaggctactcatcaggtgtacgccccagtcctgtacgagagcgacttcttcttccattacgtgaagaactcgaagttcgctctgaggtctgaggcctcaacagctctcgcctacctcctgggcctgtgggtcggcgacgggctctccgatagggctgtgctgtccgtcgacagcgaggattccagcctcctggagcgcatcactggctacgccgacattctcgatctgagcgcggagtacaaggaccgcgagatcccgaagagggcgaagaccgtctgcctctaccccaagacgatccgcggcaacgatattcgcaggaacctgaatacggacaacccggtctggaatgccatcgttgacctcggctacctgaaggatggggttaagaatgtgccctcgtacctcttctcagactccatctgccacagggaggtgttcctcgcgggcctgattgactctgatgggcatgtccggggcgacgatgggctgtcagttacaatcaagactattcacaagaccgtcatggagggcacggtggctgtcgctaggtcgctcgggctgatcgtttctgtgaacaccgaggaggcgaagattgacaagaacgatgtgaatcaccgcttcgtctacgctatctacatttcaggcggggacgctctcctgtccgtgctcgctcattgcgctgctgcgaagaagttcagggctccaccatccaatgaggtcgttcgggggctcaagaaggtcttcttcgagatggaggagctgaaggaggacgattactacggcatcacgctcgctaaggagtcagaccatcagttcctgctcgccaatcagctcgtggttcataattccattgtggggacagccacgttcgatcagtactggagcgtgcgcacctctaagcggacttcaggaacagtgaccgtgaccgatcacttccgcgcctgggcgaaccggggcctgaacctcggcacaatagaccaaattacattgtgcgtggagggttaccaaagctctggatcagccaacatcacccagaacaccttctctcagggctcttcttccggcagttcgggtggctcatccggctccacaacgactactcgcatcgagtgtgagaacatgtccttgtccggaccctacgttagcaggatcaccaatccctttaatggtattgcgctgtacgccaacggagacacagcccgcgctaccgttaacttccccgcaagtcgcaactacaatttccgcctgcggggttgcggcaacaacaataatcttgcccgtgtggacctgaggatcgacggacggaccgtcgggaccttttattaccagggcacatacccctgggaggccccaattgacaatgtttatgtcagtgcggggagtcatacagtcgaaatcactgttactgcggataacggcacatgggacgtgtatgccgactacctggtgatacagtga

SEQ ID NO: 2843 - DNA, 2364 bp, Artificial Sequence
  Synthetic Construct, AS-157 intein modified protein encoding nucleic acids
atgcaaacaagcattactctgacatccaacgcatccggtacgtttgacggttactattacgaactctggaaggatactggcaatacaacaatgacggtctacactcaaggtcgcttttcctgccagtggtcgaacatcaataacgcgttgtttaggaccgggaagaaatacaaccagaattggcagtctcttggcacaatccggatcacgtactctgcgacttacaacccaaacgggaactcctacttgtgtatctatggctggtctaccaacccattggtcgagttctacatcgttgagtcctgggggaactggagaccgcctggtgccacgtccctgggccaagtgacaatcgatggcgggacctacgacatctataggacgacacgcgtcaaccagccttgcttcgccaagggcactgaggttatgatgtcggatgggtcaattaaggaggtggagggcattgaggtcgggcaggaggtcatgggcaaggacggcaagccgcgggaggtggtcggcaccccatcggggcgcgagaagatgtacaaggtctctcacaagaccgctcacagggcccataagtccgacagcacgtcggagcggttcggcctcttcgagtacacatgcaacgccactcataagctggttgtgcgcacctctaggtcatgccggccgctcgtcaggaacatccagggcacggactacgtcgaggtttgcctcttcaatatgaccaagaagacgctggaggacggccgcgtgatcgatattgtcgaggagaccagcgatttctacccagcggtggaggggcctgagaaggctctcaggatcctgaaggagtacgctgaggccgacggcgggaaggagtacttcgagtggacaattgaggctcgcgatgtggctctcctgagcgctcaggtcaggaaggctacttaccagctgtcggcccccgtgctcctggagaacaatcacttctctcattacctcaaggactccaacagcgctgttggcaatgatacagtgcgggccctgtcctacttcctcgggctgtggatcggcgacgggatgctcaacaatgccgcgacgttctcagtcgattcccagaacgcgagcctcctgaacaggattaatgagttcgccgaggtgctcggcctgtctgcggagtacaaggactcacaggagccaaagcgggccaagaccgttaacctgtacgcgaaggctatccgcgacgagggcgtgaggaagaacctcgatacgcacaatctcctgtgggacgcgatcgtcgatctcggctacctgaaggacgattcgaagaacgttcctgggtacatttgctcggactctttccagcatcgggaggtgttcctggcgggcatcattgacagcacaggctacgtgtccgatgagaccgccacggtgaagactatcgaccagtccgtcatgacaggcactgtggctgtcgctaggtccctcgggattaacgttagcgtggacgtcgaggttgacgaggatggcgtcgatcggtcattcgtttacgccatctacatggacaggtccgatgctctcctggctgtcctggctaactgcgcttccaacaataagcagatcgaggctccaccacacggcgtgattagggagttcaataaggcttacttcgagatggaggagctggaggaggacgagtactacgggctgactctctcaaatgagtcggatcatcagttcctcctcgctaatcagctcgtcgtgcataattccattgtggggacagccacgttcgatcagtactggagcgtgcgcacctctaagcggacttcaggaacagtgaccgtgaccgatcacttccgcgcctgggcgaaccggggcctgaacctcggcacaatagaccaaattacattgtgcgtggagggttaccaaagctctggatcagccaacatcacccagaacaccttctctcagggctcttcttccggcagttcgggtggctcatccggctccacaacgactactcgcatcgagtgtgagaacatgtccttgtccggaccctacgttagcaggatcaccaatccctttaatggtattgcgctgtacgccaacggagacacagcccgcgctaccgttaacttccccgcaagtcgcaactacaatttccgcctgcggggttgcggcaacaacaataatcttgcccgtgtggacctgaggatcgacggacggaccgtcgggaccttttattaccagggcacatacccctgggaggccccaattgacaatgtttatgtcagtgcggggagtcatacagtcgaaatcactgttactgcggataacggcacatgggacgtgtatgccgactacctggtgatacagtga

SEQ ID NO: 2844 - DNA, 2052 bp, Artificial Sequence
  Synthetic Construct, AT-1 intein modified protein encoding nucleic acids
atgcaaacaagcattactctgacatccaacgcatccggtacgtttgacggttactattacgaactctggaaggatactggcaatacaacaatgacggtctacactcaaggtcgcttttcctgccagtggtcgaacatcaataacgcgttgtttaggaccgggaagaaatacaaccagaattggcagtctcttggcacaatccggatcacgtactctgcgacttacaacccaaacgggaactcctacttgtgtatctatggctggtctaccaacccattggtcgagttctacatcgttgagtcctgggggaactggagaccgcctggtgcctgcttcatcgaggggacggaggttctcactaagcgggggttcgtggatttcagggagctgcgggaggatgatctggtcgctcagtacgacatcgagaccggcgagatttcctggacgaagccatacgcttacgtcgagcgggattacgagggctccatgtaccgcctgaagcaccctaagagcaactgggaggtggtcgctaccgagggccatgagttcatcgtgaggaatctgaagacggggaaggagcggaaggagccaatcgagaaggtcaagctccacccatactccgctattcctgttgctggcaggtacacaggggaggtggaggagtacgacctctgggagctggtctcgggcaaggggatcacactcaagactaggtctgccgttaagaacaagctgaccccgatcgagaagctcctgattgtgctccaggcggacggcacaattgattcaaagcgcaatggcaagttcactgggttccagcagctgaagttcttcttctccaagtacaggaagatcaacgagttcgagaagattctcaatgagtgcgcgccgtacggcatcaagtggaagaagtacgagcgccaggacgggattgcttacacagtttactaccccaacgatctgccgatcaagcccactaagttcttcgacgagtgggtgcgcctcgatgagatcacggaggagtggattagggagttcgtggaggagctggtcaagtgggacggccatatcccgaaggatcggaacaagaagaaggtctactactacagcaccaaggagaagcgcaataaggacttcgttcaggctctctgcgctctgggcgggatgaggacggttgtgtcgcgcgagaggaacccgaaggccaagaatcccgtctaccggatctggatctacctggaggacgattacatcaacacccagacgatggtgaaggaggagttctactacaagggcaaggtctactgcgtttctgttccaaagggcaacatcgtggttaggtacaaggattctgtctgcattgctggcaacacgtccctgggccaagtgacaatcgatggcgggacctacgacatctataggacgacacgcgtcaaccagccttccattgtggggacagccacgttcgatcagtactggagcgtgcgcacctctaagcggacttcaggaacagtgaccgtgaccgatcacttccgcgcctgggcgaaccggggcctgaacctcggcacaatagaccaaattacattgtgcgtggagggttaccaaagctctggatcagccaacatcacccagaacaccttctctcagggctcttcttccggcagttcgggtggctcatccggctccacaacgactactcgcatcgagtgtgagaacatgtccttgtccggaccctacgttagcaggatcaccaatccctttaatggtattgcgctgtacgccaacggagacacagcccgcgctaccgttaacttccccgcaagtcgcaactacaatttccgcctgcggggttgcggcaacaacaataatcttgcccgtgtggacctgaggatcgacggacggaccgtcgggaccttttattaccagggcacatacccctgggaggccccaattgacaatgtttatgtcagtgcggggagtcatacagtcgaaatcactgttactgcggataacggcacatgggacgtgtatgccgactacctggtgatacagtga

SEQ ID NO: 2845 - DNA, 1473 bp, Artificial Sequence
  Synthetic Construct, AT-2 intein modified protein encoding nucleic acids
atgcaaacaagcattactctgacatccaacgcatccggtacgtttgacggttactattacgaactctggaaggatactggcaatacaacaatgacggtctacactcaaggtcgcttttcctgccagtggtcgaacatcaataacgcgttgtttaggaccgggaagaaatacaaccagaattggcagtctcttggcacaatccggatcacgtactctgcgacttacaacccaaacgggaactcctacttgtgtatctatggctggtctaccaacccattggtcgagttctacatcgttgagtcctgggggaactggagaccgcctggtgcctgccagccttactctgcgccggtttcaactcctgatgggcctattcctatcggcaagctcgtggacgctaatgcggtcggggagaaggtgttcgacgcgtcgggcgtcaccaggattgttgctaccacgtgcaacgggaggaagccagtcctccgcatcaggacatccggcgggcacgttctcgacgtgactccagatcatctggtttggcaggtggtcgaccagaccgctggcaggttcgtgccagctggccagctccgggtcggggataggctggagtggcacgacagggccaattccgatgctatggtcgctgcgttcacggctgacagcgctgctgcggctcagccaggccagatcgttgacattctcgcgatcgatgagctgggcgtgatgcctgtctacgatattcagacagagtcgggggagtacctctcagatggcattagggttcataacacgtccctgggccaagtgacaatcgatggcgggacctacgacatctataggacgacacgcgtcaaccagccttccattgtggggacagccacgttcgatcagtactggagcgtgcgcacctctaagcggacttcaggaacagtgaccgtgaccgatcacttccgcgcctgggcgaaccggggcctgaacctcggcacaatagaccaaattacattgtgcgtggagggttaccaaagctctggatcagccaacatcacccagaacaccttctctcagggctcttcttccggcagttcgggtggctcatccggctccacaacgactactcgcatcgagtgtgagaacatgtccttgtccggaccctacgttagcaggatcaccaatccctttaatggtattgcgctgtacgccaacggagacacagcccgcgctaccgttaacttccccgcaagtcgcaactacaatttccgcctgcggggttgcggcaacaacaataatcttgcccgtgtggacctgaggatcgacggacggaccgtcgggaccttttattaccagggcacatacccctgggaggccccaattgacaatgtttatgtcagtgcggggagtcatacagtcgaaatcactgttactgcggataacggcacatgggacgtgtatgccgactacctggtgatacagtga

SEQ ID NO: 2846 - DNA, 2268 bp, Artificial Sequence
  Synthetic Construct, AT-3 intein modified protein encoding nucleic acids
atgcaaacaagcattactctgacatccaacgcatccggtacgtttgacggttactattacgaactctggaaggatactggcaatacaacaatgacggtctacactcaaggtcgcttttcctgccagtggtcgaacatcaataacgcgttgtttaggaccgggaagaaatacaaccagaattggcagtctcttggcacaatccggatcacgtactctgcgacttacaacccaaacgggaactcctacttgtgtatctatggctggtctaccaacccattggtcgagttctacatcgttgagtcctgggggaactggagaccgcctggtgcctgcgttacaggggacacaagggtcctcctcgcggacgggcagcgggttcctattcgggatctcgtggggcagacgcctgaggtcatttctgtcaacgctgagggcaggctggagccagctaagaccgacctcgtgtggtccgttggggtgcgccctctcctgcaggtcaggctggcttccggcaggaccatcaggtgcacgccagagcacaggctcaggggcctgtgggattggaaggaggcccgcgacatcagggtcggggataggctgggcattgctcgggagctcccagctccaaaggtgacgaagcgctgggctgagcacgagctggtgctcctggctcatctcgtcggcgacgggtcctacattaagggccagccactgaggtacaccacggcttcagaggcgaactccgaggctgttagcagggccgctgaggctatgggctctacagtgactaggcacccaggcagggggcagtggcatcagctcgtcatctcaggcaacgggaataggtggcacccacagggcgttgggaagtggctcaagcagctgggggtgttcggccagaggagccgggagaagcacctgccacaggaggtgttccagctcgacaatgatcagctggccctcttcctgaggcatctgtgggcgacagacggctcgatcactcaggggtctgctggccgccctaggatctacttctcgacggcctctcggcacctcatccaggatgtcgctgccctcctgctccggttcgggatcgttggccgcacaaagcacattactcatggcgacggggagggctggttcacactggatatttcgggcgctgtccagcagcagaggtacctggagaagatcggggccttcggccaccaggctcataacgctaggagggctctccagcatctgaggggcctcgtcgagaacaccaatgttgacacgctgccggaggaggtgttcaattacatccgggagcgcatgagggaggaggggattacacacaggcagatggctgctctcaggggcactgcttacggcgggagcgctcatttcaccttctccccgagcagggagacgctgctctcgtacgcggacatcctcaacgatcagcggctgcgcatgctcgccaatcagcacgttttctgggaccgcgtggtctccgtggagcccgcgggcgaggaggaggtcttcgatctcacagttccgggcaatgcttgctggctcgcggatggcatcgtttcacacaacacgtccctgggccaagtgacaatcgatggcgggacctacgacatctataggacgacacgcgtcaaccagccttccattgtggggacagccacgttcgatcagtactggagcgtgcgcacctctaagcggacttcaggaacagtgaccgtgaccgatcacttccgcgcctgggcgaaccggggcctgaacctcggcacaatagaccaaattacattgtgcgtggagggttaccaaagctctggatcagccaacatcacccagaacaccttctctcagggctcttcttccggcagttcgggtggctcatccggctccacaacgactactcgcatcgagtgtgagaacatgtccttgtccggaccctacgttagcaggatcaccaatccctttaatggtattgcgctgtacgccaacggagacacagcccgcgctaccgttaacttccccgcaagtcgcaactacaatttccgcctgcggggttgcggcaacaacaataatcttgcccgtgtggacctgaggatcgacggacggaccgtcgggaccttttattaccagggcacatacccctgggaggccccaattgacaatgtttatgtcagtgcggggagtcatacagtcgaaatcactgttactgcggataacggcacatgggacgtgtatgccgactacctggtgatacagtga

SEQ ID NO: 2847 - DNA, 2829 bp, Artificial Sequence
  Synthetic Construct, AT-4 intein modified protein encoding nucleic acids
atgcaaacaagcattactctgacatccaacgcatccggtacgtttgacggttactattacgaactctggaaggatactggcaatacaacaatgacggtctacactcaaggtcgcttttcctgccagtggtcgaacatcaataacgcgttgtttaggaccgggaagaaatacaaccagaattggcagtctcttggcacaatccggatcacgtactctgcgacttacaacccaaacgggaactcctacttgtgtatctatggctggtctaccaacccattggtcgagttctacatcgttgagtcctgggggaactggagaccgcctggtgcctgcctcgccaatgggacacagctgctgcgctacgatgggacaaaggtcaacgtggaggacgtgaaggagggggatctgctgctgggcccagacggcgggccaaggagggcgttcaacgtggtctccggcaaggaccgcctgtacaggatcaagattgacggggataaggaggatctcgttgtgaccgccaaccacatcctcgtgctgcatagggcgaaggctatgaatacgtctgtctgcttcgaccggtcaaaggagcagcagggcggggctggcgagcagctggacatttccgaggtcagcgccgcggagcgctacgataccgttgagatgacggctgctgagttcgctgctctgcacccacaggagaggtcctggtacagggctatcaggtgcccaggcttcgagctccctgagcaggacgtcccagttaacccttacttcctcggcctgtggctcggggatgagtcccggaaccagagcgctatctactcgaatcacgaggaggccctgcgcgagttcctcgtgagccatgccgcggagctggacatgcacctcgtttaccatggccagtcggcgtactctaccgtgtgcaacaaggatcgcccaacgaataagaggatcggccctgccaaccagacccagacggtcaggccaaccatccggcagacacggcgcactattaggcagcagaggctggctgctgagcacgctgctgctgagtacaccacgcagagggagacagcgtccctcactccgctcctggagtcacccacatccgacaagcatggcctcctgtccagcgtcgagactccagggaggctgtcagattccgttacaactgagctccccatgagcaggtcggcctctgctatgaggtcgatcaggaccgccagcggcctctcggagttcaacgacgtgacgaatgtctcagcttccatgccggatatccagaactctggcattaagaatcaggggaggatcgctaaggtgaccaggcagcaggactctaagggcgaggtcgatttccgccagcagtactcacaggccattaaggacgatctggagctcctggagacggacatcgaggacgatgtggcgtcgtctgacgagattgaggatgtctgcgtcgttggcagcgagaacgagctcatcgggtccgagaagcaggaccagagcggcaggaggaggcagattcacaggctgaggaccgggcataggggctacggggacctctcggacgatgagcaggagcagctcctggacagcgtggtcgagcgctacgcgggcgattcgcggctgaatacactccagcaggagctgagcaagatgggcatcctcaacccagagactgggcctatcaatgacaagaagcgcattccgcaggtgttcatgcagaacagccggtcggttcgcctgtcggtgctcgctggcctcctggactctgatgggtggtacatctaccccgagaatatgttcggcttcgctcagtccgagctgtgccacaaggagctcttctgggacgttgtgacactggctaggagcctcggcttcggggtctggacaaagaagcggatgatgccggaccccactggcaagcgcatgtcaccaatgctggtggcccagatctccggcgatctggcggagattccttgcgtcctcgctcgcaagaaggccatgccgaggctgatcccccagtctcactcattcgccatcaaggacatttctctggagtcagaggcgacggagtgggctggcttcagggtggataaggatcagctctacctcaggcatgactacgtggttctgcataatacgtccctgggccaagtgacaatcgatggcgggacctacgacatctataggacgacacgcgtcaaccagccttccattgtggggacagccacgttcgatcagtactggagcgtgcgcacctctaagcggacttcaggaacagtgaccgtgaccgatcacttccgcgcctgggcgaaccggggcctgaacctcggcacaatagaccaaattacattgtgcgtggagggttaccaaagctctggatcagccaacatcacccagaacaccttctctcagggctcttcttccggcagttcgggtggctcatccggctccacaacgactactcgcatcgagtgtgagaacatgtccttgtccggaccctacgttagcaggatcaccaatccctttaatggtattgcgctgtacgccaacggagacacagcccgcgctaccgttaacttccccgcaagtcgcaactacaatttccgcctgcggggttgcggcaacaacaataatcttgcccgtgtggacctgaggatcgacggacggaccgtcgggaccttttattaccagggcacatacccctgggaggccccaattgacaatgtttatgtcagtgcggggagtcatacagtcgaaatcactgttactgcggataacggcacatgggacgtgtatgccgactacctggtgatacagtga

SEQ ID NO: 2848 - DNA, 2418 bp, Artificial Sequence
  Synthetic Construct, AT-5 intein modified protein encoding nucleic acids
atgcaaacaagcattactctgacatccaacgcatccggtacgtttgacggttactattacgaactctggaaggatactggcaatacaacaatgacggtctacactcaaggtcgcttttcctgccagtggtcgaacatcaataacgcgttgtttaggaccgggaagaaatacaaccagaattggcagtctcttggcacaatccggatcacgtactctgcgacttacaacccaaacgggaactcctacttgtgtatctatggctggtctaccaacccattggtcgagttctacatcgttgagtcctgggggaactggagaccgcctggtgcctcgctgccaccatgggagcctatcgtggtcaggcggggggatgaggttcgggttacatcaatcggggagttcgtggattctttcctggagggcgagggcgggctggacatcggcgggctcggctactacaccctgtcgctcgatacccggacgctgaagccagtctggaggaggatccgcggcgttattaagcaccggatccgcggcaggctcctgagggtcaaggcctcaaagggccgctccatcgacctgacgggctctcattcaatctacaggattagcaggggcgggggcctggaggtggtcggctccagcgacctgaggccaggcgattctctcgtgacacctgcttcagtcgagctcccagagtccgccccttcgtctattaacgctgcgagggagctgtggagccggggggtggagggcatcttcgttgtggggctcccaggcgaggctgctgggtacaggggcgtcgagcggtcgcgcggctacgacgggggccacgctatccctctggagacgctcgtggagcgctacggcgattcggtctggtctctggtttcaggcgcgaagctcgctgtttcccggggggctgctggcgaccacccagtgcccgccaccattccgctggatacggggttctacctcctgctcggcttcatcgtgtccgctggcagcgtggacgtcgaggggggccatgttacagtgactctcggcccagggagggagggctacgtgggcgatgtcgttgaggctgtcaactccactgctccaggcgctggggtccgcatttcatccggggcgaggggcatggaggttaccatcaggagccgggtgctgtcggagctgctcgctagggtgttcggcgctgggccaggccctaatcgggacatcccctctattgtcttcagggccccgaagcccatgaagcgggttttcctgaagggcctctacgctgggggcggggtcttcgaccggagctcgggcagcctgatctacgccaccgattcccgcagcctgctcaacggcctcgctctgctcctgctcaatgtgggcgctggcgggtacaggatcgactcgggggattctggcagggctctggcgctcattgtggagaatgctggcaggctcgacgctatcggcgaggtcctggagcacctcggcttccatggcgggagggaggctgttcagggggtgggcgctctggagagggctacagctgggctcgctggccaggctactgtcgctgttcagaggccagctacccgcggcgggccaggcgtggacgtcgcgggggtgacgggcctggagcacctggaggctagcacagagttcgtctacgatctctctgtggagggggatgagaacttcttcgccgggctcgggtggattctcgtgcataatacgtccctgggccaagtgacaatcgatggcgggacctacgacatctataggacgacacgcgtcaaccagccttccattgtggggacagccacgttcgatcagtactggagcgtgcgcacctctaagcggacttcaggaacagtgaccgtgaccgatcacttccgcgcctgggcgaaccggggcctgaacctcggcacaatagaccaaattacattgtgcgtggagggttaccaaagctctggatcagccaacatcacccagaacaccttctctcagggctcttcttccggcagttcgggtggctcatccggctccacaacgactactcgcatcgagtgtgagaacatgtccttgtccggaccctacgttagcaggatcaccaatccctttaatggtattgcgctgtacgccaacggagacacagcccgcgctaccgttaacttccccgcaagtcgcaactacaatttccgcctgcggggttgcggcaacaacaataatcttgcccgtgtggacctgaggatcgacggacggaccgtcgggaccttttattaccagggcacatacccctgggaggccccaattgacaatgtttatgtcagtgcggggagtcatacagtcgaaatcactgttactgcggataacggcacatgggacgtgtatgccgactacctggtgatacagtga

SEQ ID NO: 2849 - DNA, 2148 bp, Artificial Sequence
  Synthetic Construct, AT-6 intein modified protein encoding nucleic acids
atgcaaacaagcattactctgacatccaacgcatccggtacgtttgacggttactattacgaactctggaaggatactggcaatacaacaatgacggtctacactcaaggtcgcttttcctgccagtggtcgaacatcaataacgcgttgtttaggaccgggaagaaatacaaccagaattggcagtctcttggcacaatccggatcacgtactctgcgacttacaacccaaacgggaactcctacttgtgtatctatggctggtctaccaacccattggtcgagttctacatcgttgagtcctgggggaactggagaccgcctggtgcctgcttcgctcctgagacactcgtgcataccgctgatgggcctcggcctattcgggatctccagcagggggatctcgttctgggcatcagcggccgctacagggaggttacccacaagttcgtgtacaaccagacggacgctatgctcgccatccgcgtcaagcacgccgttgagccaattgaggttacagctggccatcctttctacgccatcaggggcgtgccactggagcagtcgggggagcgcaccctcaggcagctggagtccggcaagcggagcccagagtggatcgacgctggcgagctggagaggggggattacatggcccaggtcatcccatctgaggtggtccctgtcgcgggcttcgacgaggacgatgctcgcctctacgggatcctcctgggcgatgggcatctcagcaagaatggcctgcagtggggcgtctcggggcacccacagagggacgggcacatggatttcgttagggcgtacctgtccgctcggggcatccacttctgggagaccgcgagggacgagacgtacgggcagattcattgggctagcggcaggggggtccgcagggatgctaccacgggcaggatcacaggcgctggggctgcgactctccctttcgagcacgccgacctgtacgatgagcagggccggaagcgcatcgctaggcgcttctcacatctcccaaggcagcagtccctcgctctgatcaggtcgctcctggagtctgacggcggggtgtctcgcggcaaggagatctacttcacaaacacttcaaggcccctcattgagggcctgaggtaccagctcctgaggctgggcgtgccaaccgctgggcagtacagggagaggaggcaggaccacgtcggccagagggctgatgggtcgccaatcaggttcgagggcgtgtgcaaggcgtacgacctcaggattccggctgttccagaggtggctcagctggtcggctgccagccaatcgccaagcggaattggattacgtggcagggctgcgtctactccaggatccgggatgttcagccgattgcggtgaagcccttcgtcttcgatctcaaggtggagggggatgagagctacatgactacttccgggctcgctcacaacacgtccctgggccaagtgacaatcgatggcgggacctacgacatctataggacgacacgcgtcaaccagccttccattgtggggacagccacgttcgatcagtactggagcgtgcgcacctctaagcggacttcaggaacagtgaccgtgaccgatcacttccgcgcctgggcgaaccggggcctgaacctcggcacaatagaccaaattacattgtgcgtggagggttaccaaagctctggatcagccaacatcacccagaacaccttctctcagggctcttcttccggcagttcgggtggctcatccggctccacaacgactactcgcatcgagtgtgagaacatgtccttgtccggaccctacgttagcaggatcaccaatccctttaatggtattgcgctgtacgccaacggagacacagcccgcgctaccgttaacttccccgcaagtcgcaactacaatttccgcctgcggggttgcggcaacaacaataatcttgcccgtgtggacctgaggatcgacggacggaccgtcgggaccttttattaccagggcacatacccctgggaggccccaattgacaatgtttatgtcagtgcggggagtcatacagtcgaaatcactgttactgcggataacggcacatgggacgtgtatgccgactacctggtgatacagtga

SEQ ID NO: 2850 - DNA, 2478 bp, Artificial Sequence
  Synthetic Construct, AT-7 intein modified protein encoding nucleic acids
atgcaaacaagcattactctgacatccaacgcatccggtacgtttgacggttactattacgaactctggaaggatactggcaatacaacaatgacggtctacactcaaggtcgcttttcctgccagtggtcgaacatcaataacgcgttgtttaggaccgggaagaaatacaaccagaattggcagtctcttggcacaatccggatcacgtactctgcgacttacaacccaaacgggaactcctacttgtgtatctatggctggtctaccaacccattggtcgagttctacatcgttgagtcctgggggaactggagaccgcctggtgcctgcctctcgggggatactgaggtcgttctcgggaatggcatggacgtggttctgctgacggatctcgtggacggggcgtgcgtttcgacaatcgagccaaggactggcgtggtcagcccatcgctcatcgaccattacttcgccaaggatgcgacccgcgtcctcaagatcacgctggacgatggcagggttattaaggctgacccagagcaccctctgttcgctgctaaggtggatgagaccacgcgcggcctcaccgggcagtggctgagggtggaggagctcacggtcggccaccatgctctcctggtgtcgccacagcaggcttactgcacctctgagcagtggacactcactctgtcagagaaggaggtctgcaccgcttccacggctcagctcgctaagcagctgtccgagatcggcctggtcggggttccgattcccctctctaaggtgaagtcagctgccaggctgttcggcctcgtcctgtccgctggcgacttcagcgggaagctctacgtggagaaggacgaggatgttacagccgtgaacagcgacctcactgcgctgggcttctcgccagctcactgggtccggtaccaggacgatcagcagaagtggttcaagtgcgacgattcgaacggcaaggcgatctgcattaccctggtccctacggctaatgctctcctgcagaccctcggggctcacgacgctgagaagcagcatcggtactgcctcctgccaaagtggctcctggatgcccctacgtccatcaagagggagttcctcggcgctctgttcggcgggaacggggcccacatcacaatttcgtgcaatgagggcaagtgggagccgactatgtctgcgctcacacagcacactgacgctgatcatctggagagcacagttgtgtacctcaagcaggttgccactctcctgggcatgctgaacatctgctccagcgtgtcgtctgagaagcacattacagccgagaagactgggtacgcggtccacctgcatgttgacaacacggcggagaatctcgttcggttctacgagcaagtgggctaccgctactgcttcaataagacatcccagtcatccgcccccgtgcagtggatcaaggggtctctgttcttcattgagcagcaccgctcaaagtgccagcatgctttcgagctcctgcacaccggcctcgggacgaaggctgctgtctccgccgagatcaacatgccacaccataatcctagccacatgctgaacgttaaggagatcccgaccgctcccgccgacgagtacatcacgtggattgagttcaaggatcgctacgtgcataaggagtccccgcggttcgtgtgggtcaccatccacagcattgaggaggcgcccgctgagaggctctacgacttcaatacggtttcgcagaatcatagcttcttcgccaacagcatcgtctctcataatacgtccctgggccaagtgacaatcgatggcgggacctacgacatctataggacgacacgcgtcaaccagccttccattgtggggacagccacgttcgatcagtactggagcgtgcgcacctctaagcggacttcaggaacagtgaccgtgaccgatcacttccgcgcctgggcgaaccggggcctgaacctcggcacaatagaccaaattacattgtgcgtggagggttaccaaagctctggatcagccaacatcacccagaacaccttctctcagggctcttcttccggcagttcgggtggctcatccggctccacaacgactactcgcatcgagtgtgagaacatgtccttgtccggaccctacgttagcaggatcaccaatccctttaatggtattgcgctgtacgccaacggagacacagcccgcgctaccgttaacttccccgcaagtcgcaactacaatttccgcctgcggggttgcggcaacaacaataatcttgcccgtgtggacctgaggatcgacggacggaccgtcgggaccttttattaccagggcacatacccctgggaggccccaattgacaatgtttatgtcagtgcggggagtcatacagtcgaaatcactgttactgcggataacggcacatgggacgtgtatgccgactacctggtgatacagtga

SEQ ID NO: 2851 - DNA, 2271 bp, Artificial Sequence
  Synthetic Construct, AT-8 intein modified protein encoding nucleic acids
atgcaaacaagcattactctgacatccaacgcatccggtacgtttgacggttactattacgaactctggaaggatactggcaatacaacaatgacggtctacactcaaggtcgcttttcctgccagtggtcgaacatcaataacgcgttgtttaggaccgggaagaaatacaaccagaattggcagtctcttggcacaatccggatcacgtactctgcgacttacaacccaaacgggaactcctacttgtgtatctatggctggtctaccaacccattggtcgagttctacatcgttgagtcctgggggaactggagaccgcctggtgcctgcttcgggcgggatacccctctcctcatggcggacggcactactaagttcgttcaggacattaaggctctggatcagctcatgggcgacgattgcacgccgcgcatcgtccaggagaggtctctcgttcacgagtcaggggctctgtacagggtggtccccaagaacgccaatggccacgacgcgttcgtgtgcaacaaggagcatatcctcgtgatggtcaatgttaagcagccgtgggtcagccagacggttatcgacggcgtggatcagttccatgtctcggaggttgtgtgcatcgggaacattccgacagtgcgctccagcggcaatttcgcttctgctgtcgaggctacgaaggctctgccagcttggacactcctgatctgggagattagcgtgctggagtacctggcggtcgacgctgatctcaggcagcacttcatgatctacaagccagctggcgggattgagtacccaaccacgacaaacctggacatcgtgcagcacttcggcgccgagtcggttcccaacctggagcatgccgtgatgtggtgcatcggcctgtggattctcctgggggacgtcgatacagccggcaacccagttctcatcctgagcggcattgaccacctccatcctctgatcaagactctccactcgcattctcagaagctgtcaatttccttcaccaaccagctcgacgagggggtcgctgatatcagcaagccaaccatcattgccctcggcgacaagttcgggctcctgttcaagtccctgggcatcgagagcgctgagtgcattcctgatgccctcctgaggtcgtctaagctccacagggctgctctcctggctggcctggtggaggggagcaacgctttctcgatcgtcaaggacactccaaagcattgggatatttcctgcaagaacaatatgatcttcgagaatattaagaggctctcatccagcctcggcctgtgcgttgacacggtgacaccagcgactatcacccagcaggtgtccgtcaagacgctgcagatccggatttcgggccctcgcatgcactacgtgtctgagctcatcagcaacgactcgctgaagactacctctgtcgtttcaatcgattcctggctgaacgtcaagtcaaatgcctgcgagttcgagatcgagtccattggctgcggggagtacttcggcttcacagttatggggccaaactcaaggttcctcctcggggatttcacagtcacacacaacacgtccctgggccaagtgacaatcgatggcgggacctacgacatctataggacgacacgcgtcaaccagccttccattgtggggacagccacgttcgatcagtactggagcgtgcgcacctctaagcggacttcaggaacagtgaccgtgaccgatcacttccgcgcctgggcgaaccggggcctgaacctcggcacaatagaccaaattacattgtgcgtggagggttaccaaagctctggatcagccaacatcacccagaacaccttctctcagggctcttcttccggcagttcgggtggctcatccggctccacaacgactactcgcatcgagtgtgagaacatgtccttgtccggaccctacgttagcaggatcaccaatccctttaatggtattgcgctgtacgccaacggagacacagcccgcgctaccgttaacttccccgcaagtcgcaactacaatttccgcctgcggggttgcggcaacaacaataatcttgcccgtgtggacctgaggatcgacggacggaccgtcgggaccttttattaccagggcacatacccctgggaggccccaattgacaatgtttatgtcagtgcggggagtcatacagtcgaaatcactgttactgcggataacggcacatgggacgtgtatgccgactacctggtgatacagtga

SEQ ID NO: 2852 - DNA, 2169 bp, Artificial Sequence
  Synthetic Construct, AT-9 intein modified protein encoding nucleic acids
atgcaaacaagcattactctgacatccaacgcatccggtacgtttgacggttactattacgaactctggaaggatactggcaatacaacaatgacggtctacactcaaggtcgcttttcctgccagtggtcgaacatcaataacgcgttgtttaggaccgggaagaaatacaaccagaattggcagtctcttggcacaatccggatcacgtactctgcgacttacaacccaaacgggaactcctacttgtgtatctatggctggtctaccaacccattggtcgagttctacatcgttgagtcctgggggaactggagaccgcctggtgcctgcgttacgggggagacgctgctgctgacggagaatggctacgagaaggccgctgatctctacaagaagcagaacaatctgaaggttgtgatcgacaacaggacaaaggacttcgctgtggatagcaagggcaccacgatcgtcgacgctattccaatgcagctgacgaagaaggatgccgagatcttcaaggtcaagaccaagcagggctacgagattcgcgcgacggagtggcacaagttctacgttaagagggacggcgagatccagaagctgcagctcaaccagctgaagaccggggataagctcctggtccagtccgctgagggcgcttacgggaagatccatgagcccgacctcgcctacattatgggcatcattgcgggcgatgggaccatcacggagaagaccgccaagatctacctctacgacaacaagaaggtgctggagcagaaggttacggatgcggtgcacaggatcattcacaagcataaggtcgaccgggcttacaagcataatacatcactcctgccaactttcaacatggcgaatcctgagaagcaggacctcctgtacatgaactccacagttctgttcgatatcctcaagaagttcggcatgaataaggagcgcaagactagggtcccggagttcattttccaggccaacaaggagacacaggccgcgtacctgagcggcctcttccagactgacgggtgcgtgaacgcgaatcacaaggctaaggccctgaccatcgagctcacgtccattcattacgagagcctgcaggatgttcagaagctcctgctcaatatgggcgtgtacacaactatctactcgaacaataagcggtctcaggagctgctcccagacgggaagggcgggtcgaagctctacaacgtcaagcccacccacaagatctcaattcaggatcgcaactcccgcgagctgttcatgagcatcgtcgagctcaaggactacgatgtttacaagttcaacctgctcacagagactctccagccgaagtcgcgcaagcccaagcacgacttcacggccgagatcatttctatcgaggaggacggcgtggaggatgtctacgatactactcaggaggattaccactctctcatcttcaatggcatcgttacgggcaacacgtccctgggccaagtgacaatcgatggcgggacctacgacatctataggacgacacgcgtcaaccagccttccattgtggggacagccacgttcgatcagtactggagcgtgcgcacctctaagcggacttcaggaacagtgaccgtgaccgatcacttccgcgcctgggcgaaccggggcctgaacctcggcacaatagaccaaattacattgtgcgtggagggttaccaaagctctggatcagccaacatcacccagaacaccttctctcagggctcttcttccggcagttcgggtggctcatccggctccacaacgactactcgcatcgagtgtgagaacatgtccttgtccggaccctacgttagcaggatcaccaatccctttaatggtattgcgctgtacgccaacggagacacagcccgcgctaccgttaacttccccgcaagtcgcaactacaatttccgcctgcggggttgcggcaacaacaataatcttgcccgtgtggacctgaggatcgacggacggaccgtcgggaccttttattaccagggcacatacccctgggaggccccaattgacaatgtttatgtcagtgcggggagtcatacagtcgaaatcactgttactgcggataacggcacatgggacgtgtatgccgactacctggtgatacagtga

SEQ ID NO: 2853 - DNA, 2124 bp, Artificial Sequence
  Synthetic Construct, AT-10 intein modified protein encoding nucleic acids
atgcaaacaagcattactctgacatccaacgcatccggtacgtttgacggttactattacgaactctggaaggatactggcaatacaacaatgacggtctacactcaaggtcgcttttcctgccagtggtcgaacatcaataacgcgttgtttaggaccgggaagaaatacaaccagaattggcagtctcttggcacaatccggatcacgtactctgcgacttacaacccaaacgggaactcctacttgtgtatctatggctggtctaccaacccattggtcgagttctacatcgttgagtcctgggggaactggagaccgcctggtgcctgcgttaccgctgacacactcatcgctactgacagggggctggagaggatcggcaacatcgtgggggagtctaggggcatcaagtctattgacggcaagctccactgggtcgagaacatcttcccgacagggactaagcccgtttaccagctgaggaccaagtctggctaccagctgaagctcaccggggatcatgtggtcttcacggagaataggggcgacgtcaaggcttgcgagctgaggaaggacgatatggtccggctcgttggcgctccattcgggaaggagaccacgggctccacagatatcgcccagctcattgggctcctgactggcgacgggtgcatcacaactgccaacgagattgctgcttcgggcgagcagaggaggaccgcgttcctgacggtttctaaggctgagcaggagattgcggagtgggctaaccagttcatcaatacgctgaggccggagctcggcgagcacaataagtcggggtctgtgaccgagacggccaccacggcgcgggttgctgtgggctccccacgcatcctcaagcagttcgaggcgttcgctgttctggataagggcagcgtgcataagctcttcacagacaaggtgttccagctggctcagtcggagcaggctgctctcctgaggggcctgttcacagctgacgggactgtcgccaactactccgataagtcccagtacatcgctctggacgctacgagcctggagctcctgcagcaggtccagctcctgctcttcaacttcggcatcaagtccaagatctacgagaataggagggtgggcgagctcgtctccctgctcccagacgggaagggcgggatcaaggagtaccctgtgcagcagatgcacagcctcaggatctcgcggtccagccgcattctgttcgagcagcagatcggcttcatggccgagtcgaagaagtacgaggccctggcggagctcaaccgcacagtgtccacttacagggacagcgcgtacgatgctgtcgcctctctgacctactcaggcgaggaggccgttttcgatctcacggagccggagacggatcatttcattgctaatggcattggggttcataatacgtccctgggccaagtgacaatcgatggcgggacctacgacatctataggacgacacgcgtcaaccagccttccattgtggggacagccacgttcgatcagtactggagcgtgcgcacctctaagcggacttcaggaacagtgaccgtgaccgatcacttccgcgcctgggcgaaccggggcctgaacctcggcacaatagaccaaattacattgtgcgtggagggttaccaaagctctggatcagccaacatcacccagaacaccttctctcagggctcttcttccggcagttcgggtggctcatccggctccacaacgactactcgcatcgagtgtgagaacatgtccttgtccggaccctacgttagcaggatcaccaatccctttaatggtattgcgctgtacgccaacggagacacagcccgcgctaccgttaacttccccgcaagtcgcaactacaatttccgcctgcggggttgcggcaacaacaataatcttgcccgtgtggacctgaggatcgacggacggaccgtcgggaccttttattaccagggcacatacccctgggaggccccaattgacaatgtttatgtcagtgcggggagtcatacagtcgaaatcactgttactgcggataacggcacatgggacgtgtatgccgactacctggtgatacagtga

SEQ ID NO: 2854 - DNA, 1842 bp, Artificial Sequence
  Synthetic Construct, AT-11 intein modified protein encoding nucleic acids
atgcaaacaagcattactctgacatccaacgcatccggtacgtttgacggttactattacgaactctggaaggatactggcaatacaacaatgacggtctacactcaaggtcgcttttcctgccagtggtcgaacatcaataacgcgttgtttaggaccgggaagaaatacaaccagaattggcagtctcttggcacaatccggatcacgtactctgcgacttacaacccaaacgggaactcctacttgtgtatctatggctggtctaccaacccattggtcgagttctacatcgttgagtcctgggggaactggagaccgcctggtgcctgcctccatggggattcgctcatcgtgacagatcatgggctcgttcctatgcgggaggtcgtgaatcatcgccagcggctgcaggtctcagacggcgagaggcagcagacagtgtacgactggaaccggttcgccgattacccaaccgtcacgatgaggaccagggcgggcttcacactgactgggtcccacaatcatcgcatcatgctcgctgacggcacctggaggaggctggacgagctccagatcggggatcgggtgcgcattgctggcgggaccgagctgtgggctacggagccagctctcctgaggtgcaggaggccgctgcccagggtcctcgttaccgctggcgccccggccgcgaccacgtccagcccccacaggcgggggtacaggagggctgctgctgtggtcgttgacgagaagctcgctgctgctatcggcaggcgctgcgttacgcatgctgaccagcaggccctggatgcgattaggaggtcgccaaggcctcaggtggtcgcgttcctccgcgctttctgccagggcgctgggcagtcggtcgcttctggcctgaccctcacgtgcgctgacgctgatctggccacaactgtgcagctcctgctcacaaacctgggcgtcctcgcgcacaggactgacaccacggttcggattgataatggcgacgatctggagagggcttacacaactctcgccacaccgactggctggaccgacgaggttgtggcgctggagcatgggacggctgatgtctacgacatttctgttactgctactcatcgctacgctgctcagggcttcatcaaccacaacacgtccctgggccaagtgacaatcgatggcgggacctacgacatctataggacgacacgcgtcaaccagccttccattgtggggacagccacgttcgatcagtactggagcgtgcgcacctctaagcggacttcaggaacagtgaccgtgaccgatcacttccgcgcctgggcgaaccggggcctgaacctcggcacaatagaccaaattacattgtgcgtggagggttaccaaagctctggatcagccaacatcacccagaacaccttctctcagggctcttcttccggcagttcgggtggctcatccggctccacaacgactactcgcatcgagtgtgagaacatgtccttgtccggaccctacgttagcaggatcaccaatccctttaatggtattgcgctgtacgccaacggagacacagcccgcgctaccgttaacttccccgcaagtcgcaactacaatttccgcctgcggggttgcggcaacaacaataatcttgcccgtgtggacctgaggatcgacggacggaccgtcgggaccttttattaccagggcacatacccctgggaggccccaattgacaatgtttatgtcagtgcggggagtcatacagtcgaaatcactgttactgcggataacggcacatgggacgtgtatgccgactacctggtgatacagtga

SEQ ID NO: 2855 - DNA, 1452 bp, Artificial Sequence
  Synthetic Construct, AT-12 intein modified protein encoding nucleic acids
atgcaaacaagcattactctgacatccaacgcatccggtacgtttgacggttactattacgaactctggaaggatactggcaatacaacaatgacggtctacactcaaggtcgcttttcctgccagtggtcgaacatcaataacgcgttgtttaggaccgggaagaaatacaaccagaattggcagtctcttggcacaatccggatcacgtactctgcgacttacaacccaaacgggaactcctacttgtgtatctatggctggtctaccaacccattggtcgagttctacatcgttgagtcctgggggaactggagaccgcctggtgcctgcgtgacaggggacactctcatctgcctcgctgacgggcgccgcgttcctattcaggatctcgtggggcattcgccggaggttattgcggtcgacgataagggccgcctcgtttgcgctaagtcagaggtcatctggaaggtcggcgagcggtccgttttcgagatcaagctggcttccgggaggagcattaaggctaccgctgagcacaggctcctggcgttcaagggctggaggcatgttaaggacttcaaagtgggggataggctcgctattgctcaccaggtcccagagccagacaggctcctgcagcattgccagtcggacctgttctgggataggatcgtgtcgattgaggagaaggggtctgaggaggtctacgatctcacagttccaaagtacgcttcttggctcgcggatggggttgtttcacataatacgtccctgggccaagtgacaatcgatggcgggacctacgacatctataggacgacacgcgtcaaccagccttccattgtggggacagccacgttcgatcagtactggagcgtgcgcacctctaagcggacttcaggaacagtgaccgtgaccgatcacttccgcgcctgggcgaaccggggcctgaacctcggcacaatagaccaaattacattgtgcgtggagggttaccaaagctctggatcagccaacatcacccagaacaccttctctcagggctcttcttccggcagttcgggtggctcatccggctccacaacgactactcgcatcgagtgtgagaacatgtccttgtccggaccctacgttagcaggatcaccaatccctttaatggtattgcgctgtacgccaacggagacacagcccgcgctaccgttaacttccccgcaagtcgcaactacaatttccgcctgcggggttgcggcaacaacaataatcttgcccgtgtggacctgaggatcgacggacggaccgtcgggaccttttattaccagggcacatacccctgggaggccccaattgacaatgtttatgtcagtgcggggagtcatacagtcgaaatcactgttactgcggataacggcacatgggacgtgtatgccgactacctggtgatacagtga

SEQ ID NO: 2856 - DNA, 2382 bp, Artificial Sequence
  Synthetic Construct, AT-13 intein modified protein encoding nucleic acids
atgcaaacaagcattactctgacatccaacgcatccggtacgtttgacggttactattacgaactctggaaggatactggcaatacaacaatgacggtctacactcaaggtcgcttttcctgccagtggtcgaacatcaataacgcgttgtttaggaccgggaagaaatacaaccagaattggcagtctcttggcacaatccggatcacgtactctgcgacttacaacccaaacgggaactcctacttgtgtatctatggctggtctaccaacccattggtcgagttctacatcgttgagtcctgggggaactggagaccgcctggtgcctgcctgacatcggaccatacggttctcactacaaggggctggattcctatcgctgacgttactctggatgacaaggtcgctgttctcgacaacaatacgggcgagatgtcctaccagaacccacagaaggtccacaagtacgactacgagggccctatgtacgaggttaagactgccggggtcgatctgttcgttaccccaaaccataggatgtatgtgaataccacgaacaatacaactaaccagaattacaacctcgttgaggcttccagcatcttcggcaagaaggtgcggtacaagaacgacgcgatctggaataagaccgattaccagttcattctcccggagacagccactctgaccgggcacacgaacaagatctcgtctacaccggcgattcagcccgagatgaacgcttggctcacgttcttcggcctgtggatcgcgaacgggcataccacgaagattgccgagaagacagcggagaacaatcagcagaagcagcgctacaaggtcatcctgacgcaggtgaaggaggacgtctgcgatatcattgagcagacactcaacaagctgggcttcaatttcatcaggtccgggaaggactacacgattgagaacaagcagctctggagctacctgaatccgttcgacaacggcgccctcaataagtacctgcccgattgggtctgggagctctcatcccagcagtgcaagatcctcctgaacagcctctgcctgggcaattgcctgttcactaagaacgacgataccctccactacttctccaccagcgagaggttcgctaacgacgtgtcgcgcctcgctctgcatgctggcacaacttctactatccagctggaggccgcgccatcaaacctgtacgataccatcattgggctccctgttgaagtgaataccacgctgtggcgggtcatcattaaccagagctcgttctactcgtactctactgacaagtcttcagccctcaacctgagcaacaatgttgcgtgctacgtgaacgcgcagagcgctctcacactggagcagaactcgcagaagatcaataagaacactctcgtcctgaccaagaacaatgttaagtcacagacgatgcactcccagagggctgagagggtggacacggctctcctgacacagaaggagctcgataattcgctgaaccatgagatcctgattaataagaacccgggcacctctcagctggagtgcgtggtcaatcccgaggtcaacaatacgtccacaaacgataggttcgtgtactacaaggggccggtctactgcctcactgggcctaacaatgttttctacgttcagaggaatggcaaggctgtttggactggcaacacgtccctgggccaagtgacaatcgatggcgggacctacgacatctataggacgacacgcgtcaaccagccttccattgtggggacagccacgttcgatcagtactggagcgtgcgcacctctaagcggacttcaggaacagtgaccgtgaccgatcacttccgcgcctgggcgaaccggggcctgaacctcggcacaatagaccaaattacattgtgcgtggagggttaccaaagctctggatcagccaacatcacccagaacaccttctctcagggctcttcttccggcagttcgggtggctcatccggctccacaacgactactcgcatcgagtgtgagaacatgtccttgtccggaccctacgttagcaggatcaccaatccctttaatggtattgcgctgtacgccaacggagacacagcccgcgctaccgttaacttccccgcaagtcgcaactacaatttccgcctgcggggttgcggcaacaacaataatcttgcccgtgtggacctgaggatcgacggacggaccgtcgggaccttttattaccagggcacatacccctgggaggccccaattgacaatgtttatgtcagtgcggggagtcatacagtcgaaatcactgttactgcggataacggcacatgggacgtgtatgccgactacctggtgatacagtga

SEQ ID NO: 2857 - DNA, 2049 bp, Artificial Sequence
  Synthetic Construct, AT-14 intein modified protein encoding nucleic acids
atgcaaacaagcattactctgacatccaacgcatccggtacgtttgacggttactattacgaactctggaaggatactggcaatacaacaatgacggtctacactcaaggtcgcttttcctgccagtggtcgaacatcaataacgcgttgtttaggaccgggaagaaatacaaccagaattggcagtctcttggcacaatccggatcacgtactctgcgacttacaacccaaacgggaactcctacttgtgtatctatggctggtctaccaacccattggtcgagttctacatcgttgagtcctgggggaactggagaccgcctggtgcctgcgttacgggggacactctcgttttcactgacaaggggctgattgaggctcgcaagctggaggtcggcatgaaggtctggtcgggggacggctggaacgagatcaaggaggtcattaacaatggggtgaagccggtcctgaagctcaagctgaagaccggcctggagatcaaggttacggaggagcacaagatcttcacaggcgaggggtggaaggaggccaaggacctcaaggttggcgataagctctacctgccggtgtcttaccccgagctggacttccccgtcaaggaggagaacgatttctacgagttcctcggctacttcctgggcgacgggtcactctccgttagcaaccacgtgtccctgcatgtcgggaatgacaaggagctcgcgctgtacttcaaggagaaggttgagaagtacgctggcgctgcttacctgatcgagagggacgggcagtacatcattgatgtgcatcgcaaggagttcgccgagaagatcaagaagattttcggcatcgagattaccgactcgaaggagaaggatatcccgtccagcctcctggcggtgaactccgaggctatgaaggctctcctgaggggcctcttctcggctgacgggtctgtctacgatgctaatggctctatcacagttgccctgtcgtctacttcatacccactcctgcggaaggtccagatcctcctgctctcactcggcattccttccacactgactggggagaaggaccaggatgtgaagatcattaagggcaacgagtacgagaccctcccaacgtaccgcctgatcattagcggggagagggcctcgctcttcttcaataagatcggcctgattggggagaagaagaagaagttcctggagctgatggcgggcaagaccacgtactccaccctcaacaatcacctgtaccaggagatcgtgagcattgagcccgctggcgaggaggaggtcttcgatattacagctccaccaaagtacacttggattaccaatggcattctctctctggatacgtccctgggccaagtgacaatcgatggcgggacctacgacatctataggacgacacgcgtcaaccagccttccattgtggggacagccacgttcgatcagtactggagcgtgcgcacctctaagcggacttcaggaacagtgaccgtgaccgatcacttccgcgcctgggcgaaccggggcctgaacctcggcacaatagaccaaattacattgtgcgtggagggttaccaaagctctggatcagccaacatcacccagaacaccttctctcagggctcttcttccggcagttcgggtggctcatccggctccacaacgactactcgcatcgagtgtgagaacatgtccttgtccggaccctacgttagcaggatcaccaatccctttaatggtattgcgctgtacgccaacggagacacagcccgcgctaccgttaacttccccgcaagtcgcaactacaatttccgcctgcggggttgcggcaacaacaataatcttgcccgtgtggacctgaggatcgacggacggaccgtcgggaccttttattaccagggcacatacccctgggaggccccaattgacaatgtttatgtcagtgcggggagtcatacagtcgaaatcactgttactgcggataacggcacatgggacgtgtatgccgactacctggtgatacagtga

SEQ ID NO: 2858 - DNA, 1419 bp, Artificial Sequence
  Synthetic Construct, AT-15 intein modified protein encoding nucleic acids
atgcaaacaagcattactctgacatccaacgcatccggtacgtttgacggttactattacgaactctggaaggatactggcaatacaacaatgacggtctacactcaaggtcgcttttcctgccagtggtcgaacatcaataacgcgttgtttaggaccgggaagaaatacaaccagaattggcagtctcttggcacaatccggatcacgtactctgcgacttacaacccaaacgggaactcctacttgtgtatctatggctggtctaccaacccattggtcgagttctacatcgttgagtcctgggggaactggagaccgcctggtgcctgcttcgtggcgggcactatgatcctgacagtcgcggggctggtcgctattgagaatattaaggcgggggacaaggtcatcgctactaacccggagacattcgaggtggctgagaagaccgtcctggagacctacgtgcgcgagaccacggagctcctgcacctgacgatcaatggcgacgtcattaagacaactttcgagcatctcttctacgccaaggatgtcgggttcgttgaggcgaaggagctgcaggtcggcgacaagctcctggattccaaggggaacgtgctcgtggtcgaggacaagaagatcaagattaccgatgagcccgttaaggtgtacaatttccaggttgatgacttccacacataccacgttgggtgcaatggggttctcgttcataatacgtccctgggccaagtgacaatcgatggcgggacctacgacatctataggacgacacgcgtcaaccagccttccattgtggggacagccacgttcgatcagtactggagcgtgcgcacctctaagcggacttcaggaacagtgaccgtgaccgatcacttccgcgcctgggcgaaccggggcctgaacctcggcacaatagaccaaattacattgtgcgtggagggttaccaaagctctggatcagccaacatcacccagaacaccttctctcagggctcttcttccggcagttcgggtggctcatccggctccacaacgactactcgcatcgagtgtgagaacatgtccttgtccggaccctacgttagcaggatcaccaatccctttaatggtattgcgctgtacgccaacggagacacagcccgcgctaccgttaacttccccgcaagtcgcaactacaatttccgcctgcggggttgcggcaacaacaataatcttgcccgtgtggacctgaggatcgacggacggaccgtcgggaccttttattaccagggcacatacccctgggaggccccaattgacaatgtttatgtcagtgcggggagtcatacagtcgaaatcactgttactgcggataacggcacatgggacgtgtatgccgactacctggtgatacagtga

SEQ ID NO: 2859 - DNA, 2013 bp, Artificial Sequence
  Synthetic Construct, AT-16 intein modified protein encoding nucleic acids
atgcaaacaagcattactctgacatccaacgcatccggtacgtttgacggttactattacgaactctggaaggatactggcaatacaacaatgacggtctacactcaaggtcgcttttcctgccagtggtcgaacatcaataacgcgttgtttaggaccgggaagaaatacaaccagaattggcagtctcttggcacaatccggatcacgtactctgcgacttacaacccaaacgggaactcctacttgtgtatctatggctggtctaccaacccattggtcgagttctacatcgttgagtcctgggggaactggagaccgcctggtgcccagctggctctggacactcctattcctacgcctgacgggtggacaactatgggggagatcaaggcgggggacaaggttatcgatgagaagggcaggccgtgcaatgtggtcgctatctccgagattgacgatacagagcaggcctacaagatcaacttccgggacggcactagcattgtcgccggggagcgccacctctggaaggttcaggtgaccaacaatggcaggagggagaagctcctgaccacgggggagatgtaccagaagcagttcaagaccaagtcgaaggagaatcgcgcgctcttcaggatcccaattgccgacgcgttcatcctccctgagaacaagctgccgattgatccctacctgttcggctactggatcggcaacgggaatgctgtgaagccggagatcacagtcatgcgcgacgatgtcgacgaggttatcaagaacattccctacaagctccataataggtacaagcaggagggcaactcagacatcctggtttacaaggagctcaagtccattctggtgaagaacttcagggagaagcggatcccaattgagtacctcagggcttctgctcagcagcggaagcgcctcctgcagggcctgatcgactcagatgggtgcgtctccacagccaagagccaggcgatctacgttactattctcttcgagctggccaaggacgtgcaggatctcctgtggagcctcggcatcaagaacacactgaagactgctccatcggctcgctacggcatcgagaccggggagatctgctacctcattaagttcacggcgttcaatgacctggaggtgagcggcctcgataggaagctgaagagggggcgggagcgcaacatcaagacccggtcgcacttccattacatcaagtctattgagaagaccggcaagacgaagatgcgctgcatccaggttgattctccaagcaggctctacctcgctggcaagtctatgattccaacacataacacgtccctgggccaagtgacaatcgatggcgggacctacgacatctataggacgacacgcgtcaaccagccttccattgtggggacagccacgttcgatcagtactggagcgtgcgcacctctaagcggacttcaggaacagtgaccgtgaccgatcacttccgcgcctgggcgaaccggggcctgaacctcggcacaatagaccaaattacattgtgcgtggagggttaccaaagctctggatcagccaacatcacccagaacaccttctctcagggctcttcttccggcagttcgggtggctcatccggctccacaacgactactcgcatcgagtgtgagaacatgtccttgtccggaccctacgttagcaggatcaccaatccctttaatggtattgcgctgtacgccaacggagacacagcccgcgctaccgttaacttccccgcaagtcgcaactacaatttccgcctgcggggttgcggcaacaacaataatcttgcccgtgtggacctgaggatcgacggacggaccgtcgggaccttttattaccagggcacatacccctgggaggccccaattgacaatgtttatgtcagtgcggggagtcatacagtcgaaatcactgttactgcggataacggcacatgggacgtgtatgccgactacctggtgatacagtga

SEQ ID NO: 2860 - DNA, 2022 bp, Artificial Sequence
  Synthetic Construct, AT-17 intein modified protein encoding nucleic acids
atgcaaacaagcattactctgacatccaacgcatccggtacgtttgacggttactattacgaactctggaaggatactggcaatacaacaatgacggtctacactcaaggtcgcttttcctgccagtggtcgaacatcaataacgcgttgtttaggaccgggaagaaatacaaccagaattggcagtctcttggcacaatccggatcacgtactctgcgacttacaacccaaacgggaactcctacttgtgtatctatggctggtctaccaacccattggtcgagttctacatcgttgagtcctgggggaactggagaccgcctggtgcctgcgtggcgggggacactaagattctcacatcatcgggctaccatcccatcaaggacatggagggcaagcaggttcgggtttggaatggctacgagttctcggagacaatcgttcacaagactggggtgaaccagaagctcattatggtgtctctggacgatggcaccgagctcaggtgcacgccgtaccataagttctacatcgagaccgggtcgcggccagctgacaagtctcgggtcatggaggttcgcgctggcgacctggagaagggggaccgcatcattaggttcgagctgccgacaatcactgtcggcgagaccacgatgagcgacaaggaggcctacacaaagggcttcttctctgcggatgggtgcgtcattaagtcaaagtacggcgaggatgagtacaggatctcggttaagcgggaggacaagattgaggctctgacgaagtatgtggatgtgatcaagtcccacacaaaccggttccgcactcatttctacgtgccagactacgtccagaataagttcgaggtccctatcaactcaatggttaatgagaagatttcctggctcgccggcttcatggacggcgatgggtgcgttatccgctacaaggacattgagaacatgcaggcggtgtccatcaataagagcttcctgcaggatattaggctcatgctgcagaccatcggcattcactccacgatcaacaagttcatgccgaatcgcgtgatgaagatgcccgatggcaggggcgggaccgacatgtacaacggggctgagagctggaggctccagatcgactcggagggcgtccgcaagctcttcgctctggggttcacgccgcgcaggctgaagatgaacggctccaggaagcggcaccataagaccaataagttcacgcgcgtggtcagcgtgacagaccatggcgatgtcgaggacacttactgcttcaatgagccaaagaggcacatgggggtcttcaacggggtcattacggggcagacgtccctgggccaagtgacaatcgatggcgggacctacgacatctataggacgacacgcgtcaaccagccttccattgtggggacagccacgttcgatcagtactggagcgtgcgcacctctaagcggacttcaggaacagtgaccgtgaccgatcacttccgcgcctgggcgaaccggggcctgaacctcggcacaatagaccaaattacattgtgcgtggagggttaccaaagctctggatcagccaacatcacccagaacaccttctctcagggctcttcttccggcagttcgggtggctcatccggctccacaacgactactcgcatcgagtgtgagaacatgtccttgtccggaccctacgttagcaggatcaccaatccctttaatggtattgcgctgtacgccaacggagacacagcccgcgctaccgttaacttccccgcaagtcgcaactacaatttccgcctgcggggttgcggcaacaacaataatcttgcccgtgtggacctgaggatcgacggacggaccgtcgggaccttttattaccagggcacatacccctgggaggccccaattgacaatgtttatgtcagtgcggggagtcatacagtcgaaatcactgttactgcggataacggcacatgggacgtgtatgccgactacctggtgatacagtga

SEQ ID NO: 2861 - DNA, 2196 bp, Artificial Sequence
  Synthetic Construct, AT-18 intein modified protein encoding nucleic acids
atgcaaacaagcattactctgacatccaacgcatccggtacgtttgacggttactattacgaactctggaaggatactggcaatacaacaatgacggtctacactcaaggtcgcttttcctgccagtggtcgaacatcaataacgcgttgtttaggaccgggaagaaatacaaccagaattggcagtctcttggcacaatccggatcacgtactctgcgacttacaacccaaacgggaactcctacttgtgtatctatggctggtctaccaacccattggtcgagttctacatcgttgagtcctgggggaactggagaccgcctggtgcctgcttcgatggcaagacaaagattctcacaaatcaggggttcatgacgctgcggcaggtttacgagcagggctacgaggggctctcaacgctgtcactcaacaccaagacgcacaagatcgagtggaagccaattctggacaccatgaagcgccagtccgagatgatcgatatttccgttagccagactggcaggatcaccgacaacacgctgcggctcacccctgatcataagatggtcaatctcaggggcgggaagtacacaaagactgagatccaggacctcctgaagcagcaggagatgctgactgtggcccagaccatcccgagcctcggcaacaataagcaccaggaggcggacctggcttacttcctcggcgggatcattacggatggctcgatctacacatccagcactcggggggaggtccagttcatccagaaggacgttccggagaagcaggctttcatttcgaagatgaacgatctggccaattcgctctacggcaagtctttcacggcgcacatcaagcccgtgtcgtcttcatacattaggggccagaaggtcacggggcaggctacagcgtacaggctgcattccaaggctatcgcctacgacgtcaaggagcgcgagaacaatattacacagctcctgctggagaacgaggctgagctgtcttaccatttcctcggcggcgtgatcgacggcgatgggtgctaccacaagaacaggctccatatctacatttcagaggagaatctgctccaggccgtcatcattgcgtgcctgaagatgaatactgtgccgcaggtcaccaagaaccggaatatctaccacctccagattgtggagaagctggaggtcatcctccggtacacccagcgcgtcaagggcgaggttacccccaggacgatccagacacggttcttcgcgacgcgccagctgttcgagaaccaggagacaggccagatcaagctccggcaggacaacaattgcctgatttctgataagcagctccgcgagatgggcgagttcgaggagctgatcgacggggatactcgcatgcagagggttattcaagtgggcgagaagagcgacggggatgtttacaacatcaccgtggcggagcatcataactacgtcgttttcacagccaagtacacaccagtcgtcgtttgcaacacgtccctgggccaagtgacaatcgatggcgggacctacgacatctataggacgacacgcgtcaaccagccttccattgtggggacagccacgttcgatcagtactggagcgtgcgcacctctaagcggacttcaggaacagtgaccgtgaccgatcacttccgcgcctgggcgaaccggggcctgaacctcggcacaatagaccaaattacattgtgcgtggagggttaccaaagctctggatcagccaacatcacccagaacaccttctctcagggctcttcttccggcagttcgggtggctcatccggctccacaacgactactcgcatcgagtgtgagaacatgtccttgtccggaccctacgttagcaggatcaccaatccctttaatggtattgcgctgtacgccaacggagacacagcccgcgctaccgttaacttccccgcaagtcgcaactacaatttccgcctgcggggttgcggcaacaacaataatcttgcccgtgtggacctgaggatcgacggacggaccgtcgggaccttttattaccagggcacatacccctgggaggccccaattgacaatgtttatgtcagtgcggggagtcatacagtcgaaatcactgttactgcggataacggcacatgggacgtgtatgccgactacctggtgatacagtga

SEQ ID NO: 2862 - DNA, 2055 bp, Artificial Sequence
  Synthetic Construct, AT-19 intein modified protein encoding nucleic acids
atgcaaacaagcattactctgacatccaacgcatccggtacgtttgacggttactattacgaactctggaaggatactggcaatacaacaatgacggtctacactcaaggtcgcttttcctgccagtggtcgaacatcaataacgcgttgtttaggaccgggaagaaatacaaccagaattggcagtctcttggcacaatccggatcacgtactctgcgacttacaacccaaacgggaactcctacttgtgtatctatggctggtctaccaacccattggtcgagttctacatcgttgagtcctgggggaactggagaccgcctggtgcctgcgtcgcgccggagacaaagatcctcacagacagggggcagatcgccatcgctgacgtcgcgggggagaaggtcaatatttggaacgggtcggagtggtctgaggttctcgtgaagaagacaggcgagaaccagccgctcctgaaggtgcacttctcaaatggcgagtccctggactgcacttactaccacaagttccatgtccaggagaactacaaggggaaggtcaagatcgttgaggctaaggacctccaggagggcgataagctgattaagtaccggctcccactggtggagtccgagaatgacatcgatttcccttacgcctacaccagcggcttcttctcgggcgacgggtctcatgatggcatggggaagccggagattgacctctacggcgagaagaaggagctcctgcccttcgtcacggttaggaacaagtactacggcgggtcatacggcgacaagtcctggcgcatcgagagggatgaggtggccgtctacgacgatgttaaccaggaccggatcgtgtgcaagctcccgctggatattcccgcgaagttcacagttcccgtgaatggctacactatccagagcaggctggagtggctggctggcctcctggacgcggatgggacagtcgctaggaacggcgacaatgagagcctgcaggttgcgtcgacccaccagcagttcctcctggacatccgcctcatgctgcagacgctcggcgtcgactctaaggtggtcaagatggatgagatggggtacaggtcgctgccagacggcaagggcgggtaccaggattacttctgccaggcgaagtaccgcctcctgatttccagcaacggcctcttccagctgggcgagctcgggctgaagaccaacaggctccagtggaatctgagggagcctcagagggaggcttcccagttcatcagggtggagaaggtcgagctcacctgccggtacgacgatacgtactgcttctcagagccaaagaggcatctcggcatgttcaatggcatcctcacagggcagacgtccctgggccaagtgacaatcgatggcgggacctacgacatctataggacgacacgcgtcaaccagccttccattgtggggacagccacgttcgatcagtactggagcgtgcgcacctctaagcggacttcaggaacagtgaccgtgaccgatcacttccgcgcctgggcgaaccggggcctgaacctcggcacaatagaccaaattacattgtgcgtggagggttaccaaagctctggatcagccaacatcacccagaacaccttctctcagggctcttcttccggcagttcgggtggctcatccggctccacaacgactactcgcatcgagtgtgagaacatgtccttgtccggaccctacgttagcaggatcaccaatccctttaatggtattgcgctgtacgccaacggagacacagcccgcgctaccgttaacttccccgcaagtcgcaactacaatttccgcctgcggggttgcggcaacaacaataatcttgcccgtgtggacctgaggatcgacggacggaccgtcgggaccttttattaccagggcacatacccctgggaggccccaattgacaatgtttatgtcagtgcggggagtcatacagtcgaaatcactgttactgcggataacggcacatgggacgtgtatgccgactacctggtgatacagtga

SEQ ID NO: 2863 - DNA, 2835 bp, Artificial Sequence
  Synthetic Construct, AT-20 intein modified protein encoding nucleic acids
atgcaaacaagcattactctgacatccaacgcatccggtacgtttgacggttactattacgaactctggaaggatactggcaatacaacaatgacggtctacactcaaggtcgcttttcctgccagtggtcgaacatcaataacgcgttgtttaggaccgggaagaaatacaaccagaattggcagtctcttggcacaatccggatcacgtactctgcgacttacaacccaaacgggaactcctacttgtgtatctatggctggtctaccaacccattggtcgagttctacatcgttgagtcctgggggaactggagaccgcctggtgcctgcctcgcttcggacactctcgttcgcacatcggagggggacaagccagtcgctgaggtcgctatcggggactacctgctggacgctgaggacaagccagtcctctgcatgggcgctaacccttcccagaccgggcgcatgaaggagatcgcttaccaggacttcgattcgaagaagagggtgtctttcaagtgcacaccggaccaccacctggagctgacactcactgattccactccctccctcagcggcaagtcagtcacctggttctccaggtgcacgggggctcacctcagcgaggaggtgtcggaggtctacctggacaacatggtttcgatcttctacaatgatctggttgactcgacggattctgcggtggacaaggattccattcacgaggccgtggacctggcgctggaggatcactaccataggggcaactctgaccagtactcaatccatctcaatgagtacatcagccggattgccgataaggagctgcagaacgagccggagttcatccgggagtgcattcacgacgccgcgaatcgcttcgtcatcacctccagcggcaacaggaatattaagtcggagtctttcgacgataagctcctgctctcacgctccaggtcgtctacagctgacagcgattcggactacgtgatcactgacgcctccgtccactctcattcaaacaattcatccgtctacctcgcctcaccagactccatgatccctgatggcgctgccaaccgcttcgagaatattgcgtccaagctgaaggagccagtgtgcaactgcggcgggatccggaagattttccgcagcttcggcaccacggaggacgctgagctcgcttactccctgctcctgagcgagcactactacaggctggacccacggttcgtcacagatggctacactttccaggcctcggttgagcagtacgagaacatgtgctctcaggaggtgcagaatatgcacctgaagctctaccgctcacctctcaagttcgtggagagggagcataactccgctgagctgccagtcgacccatacttcctgggcctctggctgggcgatggggacagctcggggacaactatcatgaccacggatcgggagattgtggtctggctcaactcctacgtcgagcgcctgaaccagaataagccggagggctgcttccccctcaagctgaccgagcagctgatctacggcgctgggcacacgtccaagagcgggcatacaactaaggtcgacgttaggaattacaagatctcttcaggcgatgctttcgtgcggtcggggacatactggaacccgattttcgacggcctcaagaagctggggctcctgaacaataagagcgctggcatcccccaggagtacatgaactctgacgagcagaataggctctcagttattgccggcctgatggattccgacgggtgctacgtgaagagccacaacacctaccgcttcacccagctcacggaggaccataagaagatcgtctacgatctgaaggagctcgccctgagctgcggcattaacaccacgggggtcgagctctcggttaagccgctgggcttcaataagcacaagcattctaccgagtatgtggtgtacctcggcaacgggagccagaagttccaggagctcctgctcctgccacggaagaagatggagatcagcaagaagcacgtgtcgctggacgcgcgccctttcacggttagcgacgtggaggatggcgagttccgggctattgaggtttcagggggggttttccagctcgctaataggctcgtggttgctaatacgtccctgggccaagtgacaatcgatggcgggacctacgacatctataggacgacacgcgtcaaccagccttccattgtggggacagccacgttcgatcagtactggagcgtgcgcacctctaagcggacttcaggaacagtgaccgtgaccgatcacttccgcgcctgggcgaaccggggcctgaacctcggcacaatagaccaaattacattgtgcgtggagggttaccaaagctctggatcagccaacatcacccagaacaccttctctcagggctcttcttccggcagttcgggtggctcatccggctccacaacgactactcgcatcgagtgtgagaacatgtccttgtccggaccctacgttagcaggatcaccaatccctttaatggtattgcgctgtacgccaacggagacacagcccgcgctaccgttaacttccccgcaagtcgcaactacaatttccgcctgcggggttgcggcaacaacaataatcttgcccgtgtggacctgaggatcgacggacggaccgtcgggaccttttattaccagggcacatacccctgggaggccccaattgacaatgtttatgtcagtgcggggagtcatacagtcgaaatcactgttactgcggataacggcacatgggacgtgtatgccgactacctggtgatacagtga

SEQ ID NO: 2864 - DNA, 1896 bp, Artificial Sequence
  Synthetic Construct, AT-21 intein modified protein encoding nucleic acids
atgcaaacaagcattactctgacatccaacgcatccggtacgtttgacggttactattacgaactctggaaggatactggcaatacaacaatgacggtctacactcaaggtcgcttttcctgccagtggtcgaacatcaataacgcgttgtttaggaccgggaagaaatacaaccagaattggcagtctcttggcacaatccggatcacgtactctgcgacttacaacccaaacgggaactcctacttgtgtatctatggctggtctaccaacccattggtcgagttctacatcgttgagtcctgggggaactggagaccgcctggtgcctgccagccatacgacgctctcgtttcaacgccatcggggctcgttcctatcggggctctcgtggagacagacgcggtcggcatgaaggtgttcgatgcgcacggcctcacacaggtcattgctactaagagcaacggggttaaggacgtgctgaggatctggacccgcgcgggccacgctctcgacgtcacggccgatcatctggtttggaggtccacaagcgctggcgctggggctttcgtgccagctggcgctctcagggctggggacacactggagtggcataggactattgctccaggcgagggggagatcacgagccgcgagattgctgaggctgctctcgctggcaggctgcaggctgatggcttcgtcgggcgctacgctgggaccaatgcttcgctcacgatcgaggcgatgaccgttccaacgaggctctacgacgctccactgccagtggtcgctgcctacctcaggtcactgttccaggctgatggctacgtctcgcgcagggagaggtctaccctcatcggcctggacatgatttccgaggggctgatcaggggcgttcaggggctcctggctaggttcggcatcttcgccagggtgcggagggaggctgatccacgccctgacaggcacgatctctggtccctgggcattcagaacgctggggacaggcggaccttcgccgatgagatcggcttcctcgacccagtgaaggcggctaagctggaggcttccttcgaccagccaggccaggctgctaagcctgtcaagaggctccagatcgagaggattgagccgaggggcccgatgcccgtctacgacattcagacagattccggggagtacctctctgctgggctcagggttcataacacgtccctgggccaagtgacaatcgatggcgggacctacgacatctataggacgacacgcgtcaaccagccttccattgtggggacagccacgttcgatcagtactggagcgtgcgcacctctaagcggacttcaggaacagtgaccgtgaccgatcacttccgcgcctgggcgaaccggggcctgaacctcggcacaatagaccaaattacattgtgcgtggagggttaccaaagctctggatcagccaacatcacccagaacaccttctctcagggctcttcttccggcagttcgggtggctcatccggctccacaacgactactcgcatcgagtgtgagaacatgtccttgtccggaccctacgttagcaggatcaccaatccctttaatggtattgcgctgtacgccaacggagacacagcccgcgctaccgttaacttccccgcaagtcgcaactacaatttccgcctgcggggttgcggcaacaacaataatcttgcccgtgtggacctgaggatcgacggacggaccgtcgggaccttttattaccagggcacatacccctgggaggccccaattgacaatgtttatgtcagtgcggggagtcatacagtcgaaatcactgttactgcggataacggcacatgggacgtgtatgccgactacctggtgatacagtga

SEQ ID NO: 2865 - DNA, 2352 bp, Artificial Sequence
  Synthetic Construct, AT-22 intein modified protein encoding nucleic acids
atgcaaacaagcattactctgacatccaacgcatccggtacgtttgacggttactattacgaactctggaaggatactggcaatacaacaatgacggtctacactcaaggtcgcttttcctgccagtggtcgaacatcaataacgcgttgtttaggaccgggaagaaatacaaccagaattggcagtctcttggcacaatccggatcacgtactctgcgacttacaacccaaacgggaactcctacttgtgtatctatggctggtctaccaacccattggtcgagttctacatcgttgagtcctgggggaactggagaccgcctggtgcctgcgtggtcgcgggcactgaggtcacagacgctgagacaggggcggtcgttacggtcggggagctcttcgagtcgcggagggcggtcacagtccacgctctcggcgctgacagcaagctgaggccaaggcctgttactgatgtggtctggaacgggcgcaagagggtgtaccgcctcaccacggagctgggcaagtcgatcacagccactgacaaccatcctttccgcgtgctggatggctggaagaatctcggggagctgaagccaggcgacaggatcgctgctccaaggaggctggcggtcccttcggctggcacctggccgcagcacgagattgttgcgctcgctgggctcctgtctgagggcaacacgtgccatcccacaactctctacttctacgggaatgaccgggttctgatcgacgatttcgcgcgggcaattggccagttccccgatacagtcgccaaggtttacgctaggccaaacaggaggaacctggaggtgcgcgctaacacaggcagggacactcgcctgaagtcaagggcggagagggatgctgctgtggctctcctggctccaccaacgaggtccggcgctttcgtctgggctcagaggctcggcatcctggggaagaccgctacggagaagttcgtgcctcacgacgtcttccggctctgcgacagcgatctggagctcttcctgggcaggctgtgggctggcgacgggttcattgctaatgataccctcaaggtcccgttctacgctacgtccagcaggaggctcgctcaggacgtgcagcacctcctgctcaggctgggcatcgtcgggaggattcatgagaagcagttcaagtacaagggcgggctcaagcccggcttcacagtgcacctgatcggcgacggggctgctgaggccttcctcgataggattgctccacactgcctggggagggagcatgctgtcactatcctcagggagcatgttgctaccacggcgaggggcctcacctccaaggacacggttccgctggaggtgcgcgcttgggtcgacgatgggaggagggcgaggggcctcacctgggacgagctggagcagcagtcggatgtctctacacaggagttctacggcactccagctccaggcaagaaggggttccggagggctacgatcgctaagctcgctgcgttcttcggctcacagaggctggctgctgttgctgactccgatgtgttctgggacagggttgtgagcattgagtacgcgggcgtgcaggatacctacgatctcacagtggatgaggatcataatttcgttgctaatgggctcatcgttcacaatacgtccctgggccaagtgacaatcgatggcgggacctacgacatctataggacgacacgcgtcaaccagccttccattgtggggacagccacgttcgatcagtactggagcgtgcgcacctctaagcggacttcaggaacagtgaccgtgaccgatcacttccgcgcctgggcgaaccggggcctgaacctcggcacaatagaccaaattacattgtgcgtggagggttaccaaagctctggatcagccaacatcacccagaacaccttctctcagggctcttcttccggcagttcgggtggctcatccggctccacaacgactactcgcatcgagtgtgagaacatgtccttgtccggaccctacgttagcaggatcaccaatccctttaatggtattgcgctgtacgccaacggagacacagcccgcgctaccgttaacttccccgcaagtcgcaactacaatttccgcctgcggggttgcggcaacaacaataatcttgcccgtgtggacctgaggatcgacggacggaccgtcgggaccttttattaccagggcacatacccctgggaggccccaattgacaatgtttatgtcagtgcggggagtcatacagtcgaaatcactgttactgcggataacggcacatgggacgtgtatgccgactacctggtgatacagtga

SEQ ID NO: 2866 - DNA, 1875 bp, Artificial Sequence
  Synthetic Construct, AT-23 intein modified protein encoding nucleic acids
atgcaaacaagcattactctgacatccaacgcatccggtacgtttgacggttactattacgaactctggaaggatactggcaatacaacaatgacggtctacactcaaggtcgcttttcctgccagtggtcgaacatcaataacgcgttgtttaggaccgggaagaaatacaaccagaattggcagtctcttggcacaatccggatcacgtactctgcgacttacaacccaaacgggaactcctacttgtgtatctatggctggtctaccaacccattggtcgagttctacatcgttgagtcctgggggaactggagaccgcctggtgcctgccagcctgcggggacacaggtcgctaaggttattaaggaggggaggtggagggaggattcggttattgagcaggttcctattgagtcactccagccaggcgacagggtggtctccttcgggaacgcgaagatctaccgcaggggccgcgctgtgacagggattacttcccggcgccacacaggcaatctgcatagggtcgaggttggggagttccgcaccagggccacgccagagcacaggttcaccgtccggttcgacccagctaggcctaaggctggcctcctgtacctcatgaggaggggcgataggtggagggtgggcgtctgcgggatgttcaactcgcgcggcttcggggtttccgtgcggctgagccaggagaggggcgacgctgcttgggtgctcggggccttcgcgacactgactgaggctaggatcgccgagcaggttgtgagctgccggtacggcattccaaccacggtctgggagaccggcaggaatcctggggcttcgtgggctcagagggaccaggctggcatcgatgccatctaccagaggctcggcgtcgataggatccgggctggggttgacaggctcctgagggatcacggcctctctgctgggctgccactcctggctgccaacgagcccggcaatttctcgtgcaggcagtctaggcaggtggctgcttgcaacctggtgccaggcgtcatgcaggtcccagttccaacggctggcgagaggttcgagtggagggacctcaccgctacgagcttcgagagggttcatgatctggaggtgtggagcatggatgtggagagggataagcattacgttgcggatggcatcgttgtgcataacacgtccctgggccaagtgacaatcgatggcgggacctacgacatctataggacgacacgcgtcaaccagccttccattgtggggacagccacgttcgatcagtactggagcgtgcgcacctctaagcggacttcaggaacagtgaccgtgaccgatcacttccgcgcctgggcgaaccggggcctgaacctcggcacaatagaccaaattacattgtgcgtggagggttaccaaagctctggatcagccaacatcacccagaacaccttctctcagggctcttcttccggcagttcgggtggctcatccggctccacaacgactactcgcatcgagtgtgagaacatgtccttgtccggaccctacgttagcaggatcaccaatccctttaatggtattgcgctgtacgccaacggagacacagcccgcgctaccgttaacttccccgcaagtcgcaactacaatttccgcctgcggggttgcggcaacaacaataatcttgcccgtgtggacctgaggatcgacggacggaccgtcgggaccttttattaccagggcacatacccctgggaggccccaattgacaatgtttatgtcagtgcggggagtcatacagtcgaaatcactgttactgcggataacggcacatgggacgtgtatgccgactacctggtgatacagtga

SEQ ID NO: 2867 - DNA, 2250 bp, Artificial Sequence
  Synthetic Construct, AT-24 intein modified protein encoding nucleic acids
atgcaaacaagcattactctgacatccaacgcatccggtacgtttgacggttactattacgaactctggaaggatactggcaatacaacaatgacggtctacactcaaggtcgcttttcctgccagtggtcgaacatcaataacgcgttgtttaggaccgggaagaaatacaaccagaattggcagtctcttggcacaatccggatcacgtactctgcgacttacaacccaaacgggaactcctacttgtgtatctatggctggtctaccaacccattggtcgagttctacatcgttgagtcctgggggaactggagaccgcctggtgcctgcttcgctgcggggacgctgctgcatactgagcagggctacgttccggtggagcaggtcgtggcgggggtcgggacaagggtttgcacacaccagggcttccggaacatctctgagcgcttcgataatggggaggccgaggttttcagggtgaccacgcggaagggctactccgtggaggtcactgcgaaccacaagatggctcgcctcgacgagaatggcgatctcctgctcgacgagctctcacatctgcaagtgggcgacaacctgctcctgctcctggggtccaatccggtgaccgagaaggtccggctgcagtgcatcccagctggctaccgctccagcatcgagattgctcagccgcccgagctcgatgagcagctggcttacctcctgggctacgcctacggcgacgggtgcgtcggcaggggggctacatacaactacctcagcctggctgtgtcgcacacttacccgaatgtccgcgaccagctcgccgcgatcattagggagaagttcggcctgacaactaagatctactcaggctccggggcggtttggaacctcctggtgcattccgccaatctcctggattggctcaaggcgaacggcctcctgaagcagaaggctgcggacctcgccatgccagaggcgattctgcgctcgccttcgtctgtggtcggcgctttcctgtctgggtacttcgacgctgatggctgcgtgaggggcgggaagggcgggtacgggttcgattgcacgagcaaggctttcgtcggcgctgttcagctcctgctcctggccgaggggatcgtgtccaacctccacaccacggaccggagccgccagggctggcgcacaatctacaggctcaatgtctgcggcaccgagttcaagcgcaggttccagacgctgtgctgcaggtctgcgaaggttgtgcattcaccaatggtgctcggcagggatgggaccggcgggtacccacctgctctggttaggggcgcttcgtaccagagggtcgttgctgtcggcgggaagcacctcctgtacacggcgctcctgaaggtcatcgagaagacaaggactgctggcaagcaggctctcgctgagagcctgtgccagcatgtcaactacttcccggaccccatcgtcgcgattgagtcggttggcacgcagagggtttacgatattgaggtggagggcatgcatctgctcggcaatggcatctacacaagcaacacgtccctgggccaagtgacaatcgatggcgggacctacgacatctataggacgacacgcgtcaaccagccttccattgtggggacagccacgttcgatcagtactggagcgtgcgcacctctaagcggacttcaggaacagtgaccgtgaccgatcacttccgcgcctgggcgaaccggggcctgaacctcggcacaatagaccaaattacattgtgcgtggagggttaccaaagctctggatcagccaacatcacccagaacaccttctctcagggctcttcttccggcagttcgggtggctcatccggctccacaacgactactcgcatcgagtgtgagaacatgtccttgtccggaccctacgttagcaggatcaccaatccctttaatggtattgcgctgtacgccaacggagacacagcccgcgctaccgttaacttccccgcaagtcgcaactacaatttccgcctgcggggttgcggcaacaacaataatcttgcccgtgtggacctgaggatcgacggacggaccgtcgggaccttttattaccagggcacatacccctgggaggccccaattgacaatgtttatgtcagtgcggggagtcatacagtcgaaatcactgttactgcggataacggcacatgggacgtgtatgccgactacctggtgatacagtga

SEQ ID NO: 2868 - DNA, 2490 bp, Artificial Sequence
  Synthetic Construct, AT-25 intein modified protein encoding nucleic acids
atgcaaacaagcattactctgacatccaacgcatccggtacgtttgacggttactattacgaactctggaaggatactggcaatacaacaatgacggtctacactcaaggtcgcttttcctgccagtggtcgaacatcaataacgcgttgtttaggaccgggaagaaatacaaccagaattggcagtctcttggcacaatccggatcacgtactctgcgacttacaacccaaacgggaactcctacttgtgtatctatggctggtctaccaacccattggtcgagttctacatcgttgagtcctgggggaactggagaccgcctggtgcctgcctcgcctacgacgcggagatcgttcaggctgacgggggggttaagactattgagcagatcgttagggagcggcgggcgcatctcgctacggtcggcgctgactggaggctgacatggactgagccgtgcgattacgttgacgatggccacaagcccgtcttcgaggttaccacgcgcctcgggcgcaggatcgagacaactctgacacacccgttcctcactgtccatggctggcagaggctggaggacctcgctgagggcgatgctatcggggtcccaaggcagctgccagttttcggccaggagcccattagggactgcgaggtgaggctcctgggccacctgatcggggatggcgggctcaccggctcgccacccaggctgacgtctgggcaggaggcgatgacagctgacttcctggaggctgtggatgctttcggcggggtcgaggctaagccaatcagggcgtcccggaggacgcagagctgggtggtcgttggcgctgctcaggcccgcgctgctgctaggtccagcttcgcttcactggtcgacgccctcattaggaggtcccctctcaccggcagggctatcgctaggaacctgggggtggcgccagctaccctcacgtactggaggcagggcgtgaatgtccctgacgctgctatggttgggctcctggctggcgagctgggggttgatgtgggcgagctcaggccagagcctgtggctcgcaggaacgaccgcaatccactgcaggcttggctcgataggctgggcctcgctgggaagtccgctcacgagaagactgtgccagactgcgtcttccggctgcctcgcgagcagctcgctaggttcctgaaccggctcttctcgtctgacgggtgggtgacacatctggctagcggccaggggcagattggctacaccacggtctcggaggctctcgctaggcagatccagcacctcctgctccggttcggcgttctggctaagctcaggcataggtccgtgcgctaccaggacggcaggaggccagcctggcagctggatattactcacgcggagagcatcctcaccttcgctgagcagatcggcattctggggaaggagcagcggctcgcctctgttgctgcttcagtgcgcggcaggaggaggcagtcgcacacggaccatatcccctgcgagatttggcagttcatcgatagggccaggggcgagtggacatgggctgagctggctaggagggctggggtcgcttcatccaatatccacgcctacaggaggggcatgtctaggcagaggctggctgctttcgctgacgctctcggctcaagggagctgaggcagctcgcgagctcggacctgtactgggatcggatcgcctccattcgcccgctcggccataagcaggtgtacgatctcactattccagagactcataacttcattgctaatgatgtttgcgtgcataatacgtccctgggccaagtgacaatcgatggcgggacctacgacatctataggacgacacgcgtcaaccagccttccattgtggggacagccacgttcgatcagtactggagcgtgcgcacctctaagcggacttcaggaacagtgaccgtgaccgatcacttccgcgcctgggcgaaccggggcctgaacctcggcacaatagaccaaattacattgtgcgtggagggttaccaaagctctggatcagccaacatcacccagaacaccttctctcagggctcttcttccggcagttcgggtggctcatccggctccacaacgactactcgcatcgagtgtgagaacatgtccttgtccggaccctacgttagcaggatcaccaatccctttaatggtattgcgctgtacgccaacggagacacagcccgcgctaccgttaacttccccgcaagtcgcaactacaatttccgcctgcggggttgcggcaacaacaataatcttgcccgtgtggacctgaggatcgacggacggaccgtcgggaccttttattaccagggcacatacccctgggaggccccaattgacaatgtttatgtcagtgcggggagtcatacagtcgaaatcactgttactgcggataacggcacatgggacgtgtatgccgactacctggtgatacagtga

SEQ ID NO: 2869 - DNA, 2445 bp, Artificial Sequence
  Synthetic Construct, AT-26 intein modified protein encoding nucleic acids
atgcaaacaagcattactctgacatccaacgcatccggtacgtttgacggttactattacgaactctggaaggatactggcaatacaacaatgacggtctacactcaaggtcgcttttcctgccagtggtcgaacatcaataacgcgttgtttaggaccgggaagaaatacaaccagaattggcagtctcttggcacaatccggatcacgtactctgcgacttacaacccaaacgggaactcctacttgtgtatctatggctggtctaccaacccattggtcgagttctacatcgttgagtcctgggggaactggagaccgcctggtgcctgcgtgcatggggatacaagggttactctcgctgatgggcatgagcggcctattcgggaggtcgtggagtcaaatctggatgatccgaagccagtcgacgatggggtttgggataccgtggacttcgatgtcccttctctgcagtcagacggcacagttgcgactcagaacgctacgaaagtgtggaagcggaaggcgccggagacactctaccgcatcaggaccgctacgggcagggagctggatgtcacaccatcacaccctctcttcgttcagtccgacgggaggttccaggctaggaaggctgaggagctggagtctggcacccatgttgctgtgcccaggaaggtttcaactaacgcctgcaatgagctcgacgtcaccttccggcagtctcaggcccacaaccgcatcgacctcgatctgccaccacagtggacgccagagctcgctaggctgatcgggtacattgttgcggagggctacgtggagcagaggcctgataatacgggctacgtgtccatcacaaacaatgaccgggaggtgctggacgatgccaagagcgtcctggagactctcaacctgaatgtcaccgagcgctccagccacgaggggaagacggcgagggagctcctgtgcagcgctggcgagttcgtgtccttcctcgccagcctggacgagacactcctgcagtcgtctgctgagaggagggtcccgcaggatattatgagggcttccgacaacgtggtcaccgggttcattcggggctacatcgagggggagggccatgtgtcaacgtcccagcgcgagatcacagtcgcgagcatgtcgaagccgctcctggaggacgtcaggaccctcctggttacgcagggcattacagcccagctgcagccccggaacaatgggtcctacaggctcaggatctccggccagagcttccacgactacgcggagcagatcggcttcattactgcccgcaagaccgaggcttgcaggcagttcgaggggacgcatggcaacacaaatctggacattgtgccgaacctgggcccagagctcaggcgcatccgcgaggctctcgggctgactcagagcgagtgcggcctcccaaggtcgacctaccagcactacgagaggggcaggaggaatccctcgcgggattctctggagtcagtgctcgacgctttcgagactaggctggccgagatgaacaatgacactccaatttcggataccgctaggtctgacggcgggggcacgggctcgctcaggcaggatctcaacgggctggctgctctcgtggagggcgacatcgcctgggatcgcatcgagtccattgagcctatcgagcatgacgagaagtgggtctacgatctggagattgagggcacacataactacctcacaaatggggtcgtctctcataatacgtccctgggccaagtgacaatcgatggcgggacctacgacatctataggacgacacgcgtcaaccagccttccattgtggggacagccacgttcgatcagtactggagcgtgcgcacctctaagcggacttcaggaacagtgaccgtgaccgatcacttccgcgcctgggcgaaccggggcctgaacctcggcacaatagaccaaattacattgtgcgtggagggttaccaaagctctggatcagccaacatcacccagaacaccttctctcagggctcttcttccggcagttcgggtggctcatccggctccacaacgactactcgcatcgagtgtgagaacatgtccttgtccggaccctacgttagcaggatcaccaatccctttaatggtattgcgctgtacgccaacggagacacagcccgcgctaccgttaacttccccgcaagtcgcaactacaatttccgcctgcggggttgcggcaacaacaataatcttgcccgtgtggacctgaggatcgacggacggaccgtcgggaccttttattaccagggcacatacccctgggaggccccaattgacaatgtttatgtcagtgcggggagtcatacagtcgaaatcactgttactgcggataacggcacatgggacgtgtatgccgactacctggtgatacagtga

SEQ ID NO: 2870 - DNA, 2628 bp, Artificial Sequence
  Synthetic Construct, AT-27 intein modified protein encoding nucleic acids
atgcaaacaagcattactctgacatccaacgcatccggtacgtttgacggttactattacgaactctggaaggatactggcaatacaacaatgacggtctacactcaaggtcgcttttcctgccagtggtcgaacatcaataacgcgttgtttaggaccgggaagaaatacaaccagaattggcagtctcttggcacaatccggatcacgtactctgcgacttacaacccaaacgggaactcctacttgtgtatctatggctggtctaccaacccattggtcgagttctacatcgttgagtcctgggggaactggagaccgcctggtgcctgcctgactgcggattcggacgttctcgttaggtcggagaatggggatattgagcgccagacggtggactctctcttctcggacgggcaggtggtcctcgcggacggcgataccgacatcgctgtttctaaggagacaccgactgtgctctcactggacgaggcgactgagagggtgagcgagcaggagtcgaccctcgtctctgagaggccactgagggacgatgagagcgtccgcaccatcgagacgtcgaggggcgctgtcaccgttacggacgatcacccaatgtacatcaggcaggacggcgaagtgactgtccggcctgcttccgacattgaggctgggaccgatctcgtggctgctaggaggccaccagacacgatggtcgagccatcagatgagacggttctgtcctgggagacattcgctgccgattgcgacaagcattctaagctctacggcgtcgactgcgggacagagctggctgctcagagggctgcgcgcgatgagtcccagactgctttcgctgagcgctacggctcgtacgggtctgctgtgggcaagtacgagaggggggagaaggacgttccggtgtggctcctgggcgagctcgacatcaggccagatcggattcacgggctgaactacgagacgtcgttcgagaatccattccctctggagtggtccccagagctggctcaggtcatcggctgcctcctgggcgacgggagcattcaccggaacgacgatgagaatgttgtggacgtgcgctaccataacacagatgaggctctcatcgagcgcttcgccagggacatcgagcgcctgttcgatattgagccaacagtcactgacaggcctggcagggagagccaccataagaggaagtaccaggtcgatgttccatcggctgtcggcagggtgctcgtctgcgttctggaggccgtgacggagaacggcacaccagggctcccagacgcggtccggcctgctttcgttggcgccctgttcgacgatgagggccacatctcccgcgaggggaaggcgttcattagcaatacagaccatactctcctgaccggcgtcggggagatgctcgctgagatgggcatcgagaccaagctcgcgccagaccagcacaagctgcatattaggggcaggaggaacctggagcagttcctggaccggatccctattgcgagcgatgagaagttctaccgcggcctcgatgctctggacgcctacgatgtgaccacgaggaaggctgagctcctggaggcgatcaggcaggagccaaagacctcggctgctctcgctcagactctgggcgtgaccagggggtccgtcaataagtacctcagggagctgcgggagtccggccacatcgagaagcagattgaggggtcaaaccggtccctcgacgagaatcgcacggttcagtatgtggcggctgatttcgagggctccgtgtacgctacgctgaggggggagccgtccagcgtgacagtcgaggacgttgagaggcgggagtacgacggccccgtgtacgatctgacggtttcagagaatgctccaaacttcgctgtcaatgggggggctgtggttcataactctacgtccctgggccaagtgacaatcgatggcgggacctacgacatctataggacgacacgcgtcaaccagccttccattgtggggacagccacgttcgatcagtactggagcgtgcgcacctctaagcggacttcaggaacagtgaccgtgaccgatcacttccgcgcctgggcgaaccggggcctgaacctcggcacaatagaccaaattacattgtgcgtggagggttaccaaagctctggatcagccaacatcacccagaacaccttctctcagggctcttcttccggcagttcgggtggctcatccggctccacaacgactactcgcatcgagtgtgagaacatgtccttgtccggaccctacgttagcaggatcaccaatccctttaatggtattgcgctgtacgccaacggagacacagcccgcgctaccgttaacttccccgcaagtcgcaactacaatttccgcctgcggggttgcggcaacaacaataatcttgcccgtgtggacctgaggatcgacggacggaccgtcgggaccttttattaccagggcacatacccctgggaggccccaattgacaatgtttatgtcagtgcggggagtcatacagtcgaaatcactgttactgcggataacggcacatgggacgtgtatgccgactacctggtgatacagtga

SEQ ID NO: 2871 - DNA, 1560 bp, Artificial Sequence
  Synthetic Construct, AT-28 intein modified protein encoding nucleic acids
atgcaaacaagcattactctgacatccaacgcatccggtacgtttgacggttactattacgaactctggaaggatactggcaatacaacaatgacggtctacactcaaggtcgcttttcctgccagtggtcgaacatcaataacgcgttgtttaggaccgggaagaaatacaaccagaattggcagtctcttggcacaatccggatcacgtactctgcgacttacaacccaaacgggaactcctacttgtgtatctatggctggtctaccaacccattggtcgagttctacatcgttgagtcctgggggaactggagaccgcctggtgcctgcgtgcggggggacactacggtcgctctcgctgacgggtcggagcgggagattcgggatctcgtggaggctaatctggatgaccctcggccagttgacgatggggtgtgggacggcgtggatgtcgctgttccttccctcgctgctgacggcaggctggttcagcgcagggcgacaaaagtgtggaagcgggaggctccggagacaatgtaccgggtccgcactgctgctggccacaggctcaccgtcacgccatcgcatcctctgttcgtggctgggtctcacggcccagacgccgtcaggacggaggacctggaggttgggcagctggtgggcgtcgccccggacggcgatgggtcgggccaggtcgctccagacggcggggttatcagggatgctcagccagctccagtgggcgacgctgagaccgtcgcctggtccgcgatcgagagcattacggaggtcgagccggatgaggagtgggtgtacgatctggaggtggagggcactcattcatacctcacggatggggtcgtttcacacaacacgtccctgggccaagtgacaatcgatggcgggacctacgacatctataggacgacacgcgtcaaccagccttccattgtggggacagccacgttcgatcagtactggagcgtgcgcacctctaagcggacttcaggaacagtgaccgtgaccgatcacttccgcgcctgggcgaaccggggcctgaacctcggcacaatagaccaaattacattgtgcgtggagggttaccaaagctctggatcagccaacatcacccagaacaccttctctcagggctcttcttccggcagttcgggtggctcatccggctccacaacgactactcgcatcgagtgtgagaacatgtccttgtccggaccctacgttagcaggatcaccaatccctttaatggtattgcgctgtacgccaacggagacacagcccgcgctaccgttaacttccccgcaagtcgcaactacaatttccgcctgcggggttgcggcaacaacaataatcttgcccgtgtggacctgaggatcgacggacggaccgtcgggaccttttattaccagggcacatacccctgggaggccccaattgacaatgtttatgtcagtgcggggagtcatacagtcgaaatcactgttactgcggataacggcacatgggacgtgtatgccgactacctggtgatacagtga

SEQ ID NO: 2872 - DNA, 2325 bp, Artificial Sequence
  Synthetic Construct, AT-29 intein modified protein encoding nucleic acids
atgcaaacaagcattactctgacatccaacgcatccggtacgtttgacggttactattacgaactctggaaggatactggcaatacaacaatgacggtctacactcaaggtcgcttttcctgccagtggtcgaacatcaataacgcgttgtttaggaccgggaagaaatacaaccagaattggcagtctcttggcacaatccggatcacgtactctgcgacttacaacccaaacgggaactcctacttgtgtatctatggctggtctaccaacccattggtcgagttctacatcgttgagtcctgggggaactggagaccgcctggtgcctcagttacgggggacaggccagtggtcgttagggatccggggggcacagttcgcattctcccaattgaggatctcttcgctagggggaccacggagtcagaggtcctcatcgctgctgacggcgatgtggtcgcttccgctacaccaggcaagactaggagggctctcgacgggtgggatgctctgtccgtgaacgaggacggcgaggctgagtggcagccaatcgcgcaggctattcggcacaacaccgacaagcctgttgtgaatctccagcataagttcggcgagtcaacaactacccgcgaccactcctacgtcgttccaggcgaggatgggctgacgacagtttccccagacgatgtggctgagccttaccgcgtcagcggcgttccagacgtggagcccgtcgagcaggtggatgtctacgaggttctcaggggctacgagagggagtacgaggacggcaggtcggtggggtctgataactcaatcacaaagaggaagcagattcacgcggacgatgagtatgtgtggttcggccatgagcaccatagggacgttgattcgaccgttaaggtgaagcggttcgtggacatcgattctgaggacggcgctgctctgattaggctcctgggggcctacgtcccagagggctccgccagcaccggggagactgcgaccagcaagttcggcgcttcgctcgctgagtctgacagggagtggctcgctcagctgcagagggattacagccggctgttcgagaatactaccgctggcatcattacatcggacaggagggctgagaggactgtggagtaccagacggacacaggcggggcttcggtcacctacaacgatgagacgctcaagctgcagatgatgaatgagctcgcggctgtgttcttcagggagttcgctggccagacgagcagggggaagcggatcccgtcgttcgtcttccacctgcccgaggagaagcaggacctcttcctgaccctcctggtggagggcgatgggagccgcgagttcccaaggtacacggaggcctacgcgcagcggaacttcgacttcgagacgacatctcgcgagctcgctgctggcctgtcaatgctcctgacgcagagggggcagaagcattctctcaagtaccgggactccaaggatagctacactatccgcacctgctccacgtacagggagggcagggacccagtcctgaccgaggctgaccacgatggctacgtgtacgacctctcagtggaggagaatgagaacttcgtggatggggttgggggcatcgtgctgcataatacgtccctgggccaagtgacaatcgatggcgggacctacgacatctataggacgacacgcgtcaaccagccttccattgtggggacagccacgttcgatcagtactggagcgtgcgcacctctaagcggacttcaggaacagtgaccgtgaccgatcacttccgcgcctgggcgaaccggggcctgaacctcggcacaatagaccaaattacattgtgcgtggagggttaccaaagctctggatcagccaacatcacccagaacaccttctctcagggctcttcttccggcagttcgggtggctcatccggctccacaacgactactcgcatcgagtgtgagaacatgtccttgtccggaccctacgttagcaggatcaccaatccctttaatggtattgcgctgtacgccaacggagacacagcccgcgctaccgttaacttccccgcaagtcgcaactacaatttccgcctgcggggttgcggcaacaacaataatcttgcccgtgtggacctgaggatcgacggacggaccgtcgggaccttttattaccagggcacatacccctgggaggccccaattgacaatgtttatgtcagtgcggggagtcatacagtcgaaatcactgttactgcggataacggcacatgggacgtgtatgccgactacctggtgatacagtga

SEQ ID NO: 2873 - DNA, 1659 bp, Artificial Sequence
  Synthetic Construct, AT-30 intein modified protein encoding nucleic acids
atgcaaacaagcattactctgacatccaacgcatccggtacgtttgacggttactattacgaactctggaaggatactggcaatacaacaatgacggtctacactcaaggtcgcttttcctgccagtggtcgaacatcaataacgcgttgtttaggaccgggaagaaatacaaccagaattggcagtctcttggcacaatccggatcacgtactctgcgacttacaacccaaacgggaactcctacttgtgtatctatggctggtctaccaacccattggtcgagttctacatcgttgagtcctgggggaactggagaccgcctggtgcctgcttctcgggggatacggagatcgctctcgcttcgggggattctattactttcgagtcgctggtggacgcttacgagcggggggagacacactactgctacactatcggcgacgatgggcggatccgcattgaggagattatgaacccgcgggtgacccaggaggacgctgctctcctggccgttacgctcgataatggcgaggtcatcaggtgcacacccgaccatgagttcatgctccgggatggcaactactgcgaggcgcagaatctgaccgacgggcagagcctcatgccactgtacaggaccacgacagagatgactgagactaccgagacgacagagactaccgggacagctgagatggtgaagcagccgttcgcccagaacaattgggagtccgtcagccagctcgctaaccgctacaatcgcaggcacacgacaactgaccatatcgttgagacgcagcagattcagtcacagcagcagtcccagatcgagaccgtccagatttctgagagggcggacgttcacaaccataccgtgatctcggtcgagtctctgaccgagacggctgatgtctacgatctggaggttccagttactcataatttcgctctcgcttccggggttttcgttcataatacgtccctgggccaagtgacaatcgatggcgggacctacgacatctataggacgacacgcgtcaaccagccttccattgtggggacagccacgttcgatcagtactggagcgtgcgcacctctaagcggacttcaggaacagtgaccgtgaccgatcacttccgcgcctgggcgaaccggggcctgaacctcggcacaatagaccaaattacattgtgcgtggagggttaccaaagctctggatcagccaacatcacccagaacaccttctctcagggctcttcttccggcagttcgggtggctcatccggctccacaacgactactcgcatcgagtgtgagaacatgtccttgtccggaccctacgttagcaggatcaccaatccctttaatggtattgcgctgtacgccaacggagacacagcccgcgctaccgttaacttccccgcaagtcgcaactacaatttccgcctgcggggttgcggcaacaacaataatcttgcccgtgtggacctgaggatcgacggacggaccgtcgggaccttttattaccagggcacatacccctgggaggccccaattgacaatgtttatgtcagtgcggggagtcatacagtcgaaatcactgttactgcggataacggcacatgggacgtgtatgccgactacctggtgatacagtga

SEQ ID NO: 2874 - DNA, 1641 bp, Artificial Sequence
  Synthetic Construct, AT-31 intein modified protein encoding nucleic acids
atgcaaacaagcattactctgacatccaacgcatccggtacgtttgacggttactattacgaactctggaaggatactggcaatacaacaatgacggtctacactcaaggtcgcttttcctgccagtggtcgaacatcaataacgcgttgtttaggaccgggaagaaatacaaccagaattggcagtctcttggcacaatccggatcacgtactctgcgacttacaacccaaacgggaactcctacttgtgtatctatggctggtctaccaacccattggtcgagttctacatcgttgagtcctgggggaactggagaccgcctggtgcctgcgtttcgggggagacagacatcgctctcgtggagggcaagaccgctactatcggggagctcgtggagtcggcgctgacagacccaaagccggttgacgatggcgtgtgggacaccgcggatttcaccgtgacgtcggctatcgagacgggcgagctcattgagcgggacgtcacacgcgtttggaagaggcagtcccccgagacgatgcggcagatccagattgctggcgggaggagcgtgacagtcactccatcgcaccccgttttcgtggagcataatgggtcttacaccgctaggagggctgactccctgagcgctggcgagtcagtggctatcgctgacgatgtcgccgactcacacccgatttccgtcgataacactgcgaataccctcaacccaaggtcgatgtctacgcctggcatcaccacggacggcgggctgtacaggacagggtccgatggcgggattgtccatgccgaggttggcaaggaggacgttactgattgcctcacaactgacaggatcaccgctgtgaagaccgtcacgccaacagctgagtgggtctacgatctggaggtggagggcacacacgcctacctcacaaacggggttctctcacacaacacgtccctgggccaagtgacaatcgatggcgggacctacgacatctataggacgacacgcgtcaaccagccttccattgtggggacagccacgttcgatcagtactggagcgtgcgcacctctaagcggacttcaggaacagtgaccgtgaccgatcacttccgcgcctgggcgaaccggggcctgaacctcggcacaatagaccaaattacattgtgcgtggagggttaccaaagctctggatcagccaacatcacccagaacaccttctctcagggctcttcttccggcagttcgggtggctcatccggctccacaacgactactcgcatcgagtgtgagaacatgtccttgtccggaccctacgttagcaggatcaccaatccctttaatggtattgcgctgtacgccaacggagacacagcccgcgctaccgttaacttccccgcaagtcgcaactacaatttccgcctgcggggttgcggcaacaacaataatcttgcccgtgtggacctgaggatcgacggacggaccgtcgggaccttttattaccagggcacatacccctgggaggccccaattgacaatgtttatgtcagtgcggggagtcatacagtcgaaatcactgttactgcggataacggcacatgggacgtgtatgccgactacctggtgatacagtga

SEQ ID NO: 2875 - DNA, 2730 bp, Artificial Sequence
  Synthetic Construct, AT-32 intein modified protein encoding nucleic acids
atgcaaacaagcattactctgacatccaacgcatccggtacgtttgacggttactattacgaactctggaaggatactggcaatacaacaatgacggtctacactcaaggtcgcttttcctgccagtggtcgaacatcaataacgcgttgtttaggaccgggaagaaatacaaccagaattggcagtctcttggcacaatccggatcacgtactctgcgacttacaacccaaacgggaactcctacttgtgtatctatggctggtctaccaacccattggtcgagttctacatcgttgagtcctgggggaactggagaccgcctggtgcctcataccatcctaggtcggaggtcctgctcgctgacgggcagcggattgacatcggcactttcgtggattcgcgcattgagaagaataacgccaatgttatcgacggcattaactgcgagatcctgccggtggacgatattgatgtttacaccgtggacacagatactgggtccgctagcacggtttccattgacagggtgagccggcacccagctccatccgagttcatccgcgtgaagttcagcaacggcaggtcggttctcgtgaccccggagcatcccatgttcatcgacgatgggtcagagaccaagacggtccaggctaatgctctgagcggcggggagttcgttccagctcctcaccatctcccaggcgtgaacaccgacgcgtccagcgtctccgacgatatcaatgatgttagcaccattaggacgcacgtgaggtcccgggcgcgcgctaaggctgaggtcgaggttcgcgctacggacggcgagttcaagctcatcgatgccgcgcagaccctgggcatcattacggctgtggggaaggtgagcgtcgacgctccagagcggggcatcattgtcgacatggatcgcacagttgactcgtctaaggattcgatcaacaatgtcctggggtctgttattccttcaaacgacaatgattctatcactagggtccaggacacaggctcgactgggaaccagtggaggtggtctgtgaataccttcatcgagcggatgatcgagattgctccagctgtcacggctgacaggccaaacaggagggtgcctgatgctgtcctcggcgggagcgaggctgtggtccagcagttcctgacaggcgtgatcattgctgccgggcggatcctcgacgagactatccgcatctacgcttcatccaacgagctcgcctgcgactacgccgatgcgttcctcaggctgggcatcaccgcttccgtcgaggacgggccagctgagatcgcggctcagaccgtgatcaagtgcgacagcgattacgagcgcgcgtgcggcatgttcgacatcagctcgtctaggaccacgccctccgatacatcatcccagaacaatcagagctcggtcaccgcccagaacgaggacacgcaccagacaactagccatgagatcctcccgtcgggcattgcggatgagctgcagagcatcaggcagctcctgaacattcccgcctcggagcagctggcgtctatcacggctggcgacgatgggatcgcgctctcgattgctagggccgagatcaacctcctgcgggaccacattgagacactgcgcatggatactgagaatgtcagcattggccgcgacgattgcgttacaccgactatctcttcatccagcaagtacaagtacgcgaagaactcaatcacctccgacgagaatctccagctgttcggccagtcacaggcccagctgtccgagaggacaaagaccacggagtcgtcttcaatctcggcgtctactgacctcgtgtctatcccagctaacatttcagagaataggctcgtggctgctacacagaggctggacgaggtcgagactcgctgcaaccggcgctaccacagggtcatcgccgttgacacggtgtccaatgccggccctcatgcgtgcgagtgggtctacgatattactgtggagcctaccaacactttcatttcttccggggtcgttctgcataacacgtccctgggccaagtgacaatcgatggcgggacctacgacatctataggacgacacgcgtcaaccagccttccattgtggggacagccacgttcgatcagtactggagcgtgcgcacctctaagcggacttcaggaacagtgaccgtgaccgatcacttccgcgcctgggcgaaccggggcctgaacctcggcacaatagaccaaattacattgtgcgtggagggttaccaaagctctggatcagccaacatcacccagaacaccttctctcagggctcttcttccggcagttcgggtggctcatccggctccacaacgactactcgcatcgagtgtgagaacatgtccttgtccggaccctacgttagcaggatcaccaatccctttaatggtattgcgctgtacgccaacggagacacagcccgcgctaccgttaacttccccgcaagtcgcaactacaatttccgcctgcggggttgcggcaacaacaataatcttgcccgtgtggacctgaggatcgacggacggaccgtcgggaccttttattaccagggcacatacccctgggaggccccaattgacaatgtttatgtcagtgcggggagtcatacagtcgaaatcactgttactgcggataacggcacatgggacgtgtatgccgactacctggtgatacagtga

SEQ ID NO: 2876 - DNA, 2088 bp, Artificial Sequence
  Synthetic Construct, AT-33 intein modified protein encoding nucleic acids
atgcaaacaagcattactctgacatccaacgcatccggtacgtttgacggttactattacgaactctggaaggatactggcaatacaacaatgacggtctacactcaaggtcgcttttcctgccagtggtcgaacatcaataacgcgttgtttaggaccgggaagaaatacaaccagaattggcagtctcttggcacaatccggatcacgtactctgcgacttacaacccaaacgggaactcctacttgtgtatctatggctggtctaccaacccattggtcgagttctacatcgttgagtcctgggggaactggagaccgcctggtgcctgcttcactcctgatacaaatgttctgacgcctaatggggttcgcaatattcgggatctcacggtcggggattcggtttactcgctgaacccggagaccatgcagatggagatcaagccggtgacacagactcacgagtaccccgactaccagggcgacctcatcgatattcagacaaacgagatcgatttccgcgtcactccaaatcataggatgctggttgaggctaccggcacggacaccacgtccaccaacgactacgatttcatcgaggccgggaatctcgatatttccagccggtacgagctgcctcacggctggtccgttgaccatacggatagcctcggggcctacatcgacctgattaccctcctgagggagcagtcagacacgtacaacgtcctctccgatggcgggatgacaactgctgctacggctgacatcaatcacaacaatgtcacccgcagggttgactctgatacgttcgtgtcactgattggctggtatgtggctacagggcgggtctcgcgcactcagaacggctctgacagggtctacctccagctgtcccagacaaatactaaggcgcggacccagctcacgatgctcctggacgagctgggcgtggactggcaggctgataacgagaagatccacttcgtgtctcatgtctggacggagctcttcgacaccacgtgcggccgcacagagaagaacaagcacatcccggagctgattttcgacgcttcagcctcccagaagagggcgttcttcgatgctatcattaacggcagcggggtcaagaatgacgattcgtaccagtaccacacctcgtctgaggacctcagggacgatatcctccggctgtgcgttcatatcggcattgtggcgcggtacgactacatcaacgatgagtcctggcgcattgagtgcaccgagacggccaatcccgacttcacactgactcatagcggcaggcagtcgacagctgaggatggggtttactgcgtgactgtggcggataatcagactctgctcgccgggaggaatggcaccttccagtggacaggcaacacgtccctgggccaagtgacaatcgatggcgggacctacgacatctataggacgacacgcgtcaaccagccttccattgtggggacagccacgttcgatcagtactggagcgtgcgcacctctaagcggacttcaggaacagtgaccgtgaccgatcacttccgcgcctgggcgaaccggggcctgaacctcggcacaatagaccaaattacattgtgcgtggagggttaccaaagctctggatcagccaacatcacccagaacaccttctctcagggctcttcttccggcagttcgggtggctcatccggctccacaacgactactcgcatcgagtgtgagaacatgtccttgtccggaccctacgttagcaggatcaccaatccctttaatggtattgcgctgtacgccaacggagacacagcccgcgctaccgttaacttccccgcaagtcgcaactacaatttccgcctgcggggttgcggcaacaacaataatcttgcccgtgtggacctgaggatcgacggacggaccgtcgggaccttttattaccagggcacatacccctgggaggccccaattgacaatgtttatgtcagtgcggggagtcatacagtcgaaatcactgttactgcggataacggcacatgggacgtgtatgccgactacctggtgatacagtga

SEQ ID NO: 2877 - DNA, 2601 bp, Artificial Sequence
  Synthetic Construct, AT-34 intein modified protein encoding nucleic acids
atgcaaacaagcattactctgacatccaacgcatccggtacgtttgacggttactattacgaactctggaaggatactggcaatacaacaatgacggtctacactcaaggtcgcttttcctgccagtggtcgaacatcaataacgcgttgtttaggaccgggaagaaatacaaccagaattggcagtctcttggcacaatccggatcacgtactctgcgacttacaacccaaacgggaactcctacttgtgtatctatggctggtctaccaacccattggtcgagttctacatcgttgagtcctgggggaactggagaccgcctggtgcctgcttccatcctgagactaagatttggttcagggacacagacaatgagtggcatcatgagactattcagactttcgtggaggaccgcctggacgatccagagatcgatgcggttggcacgctcgtgcaggaggtcgacgataacacagaccgggagatctctgtgccttcaattgacgataatggcaacgagcgcctgcagtcagttactgctgtgtccaagcacagggccccaaatcatctcgtgcagatcgagaccattagcggcagggagatcacaattactcctgaccacgagatgcatatcttcgagcagggcaacctggtgtcgaagcaggcttctaagatcacgtcaggggagtacgccgtcatcccgaagcgcctccagacgatttccccatccagccacacacctcagcatgatctcctgagggagttcctcacgcgggatgagctgacagccgacaggctcatcattcacacgtctgacccagtccggctctgcaaccgcgttttccctgaggaggtgacatcatgcaaggatgcggttgagatcatgcagaatactgcttgccatctggacaagaacaaggagaccctcatcggctggctgggcgaggggcgcattccggtcgctctcctgagggggttcgttgagacggacgaggcgctcctgatgagcatccccgacgatgttcagattggcctgaggggggagaaggtgcgcatcgacaggcacattggcttcacggaggagctcacatcgctcctgggctactacgctgctgctgggatcgtgcatacccagacgaatcccatttcctacgagagcgcgcagcaggagcagtcgaggatcaccttctacaacattgatacacagactcagaccgacctcctgaatgccctgaactctgtcttcgagatcgagccgattcagtacaacctggacggcgagatcctcggcgtgccaggggagctcattaggagggtcttcgatactgtcttcgacgttgggacccagccatcccacaagcggatcccccaggctctgttcgatgcctcagagtcccacatcacgagctacctgcgctgcttcttctccactcatgacagcctcaccacggataccagggacatcagcgctacaactgtgtcgcgggagttcaaggaggacatcattgctgctctcaggaggctgggcatcacagctgaggtcaccacgcagcagagcaggtcggtgccagaggtcctcccagactggtacgcgatcgacgatattacgcaccatgacgctgataattccctcaacctgacacggtcctacgtgatctctattgcgtcgtctgatgctgttaccctgcagagggacaggcaggctcaggagcagatcaagtacgacgcgcagggcctcatcgccaacaataacgcgattcaccagagcaggcaagtgactgatggcgggaggaaggactacatcactgagccgatcaccgacattgagtatgtggacgcggatatcgactacacctactgcctcactgtttcggagactcactcactcatcgttaatgatctctctcagaagcagacgtccctgggccaagtgacaatcgatggcgggacctacgacatctataggacgacacgcgtcaaccagccttccattgtggggacagccacgttcgatcagtactggagcgtgcgcacctctaagcggacttcaggaacagtgaccgtgaccgatcacttccgcgcctgggcgaaccggggcctgaacctcggcacaatagaccaaattacattgtgcgtggagggttaccaaagctctggatcagccaacatcacccagaacaccttctctcagggctcttcttccggcagttcgggtggctcatccggctccacaacgactactcgcatcgagtgtgagaacatgtccttgtccggaccctacgttagcaggatcaccaatccctttaatggtattgcgctgtacgccaacggagacacagcccgcgctaccgttaacttccccgcaagtcgcaactacaatttccgcctgcggggttgcggcaacaacaataatcttgcccgtgtggacctgaggatcgacggacggaccgtcgggaccttttattaccagggcacatacccctgggaggccccaattgacaatgtttatgtcagtgcggggagtcatacagtcgaaatcactgttactgcggataacggcacatgggacgtgtatgccgactacctggtgatacagtga

SEQ ID NO: 2878 - DNA, 2646 bp, Artificial Sequence
  Synthetic Construct, AT-35 intein modified protein encoding nucleic acids
atgcaaacaagcattactctgacatccaacgcatccggtacgtttgacggttactattacgaactctggaaggatactggcaatacaacaatgacggtctacactcaaggtcgcttttcctgccagtggtcgaacatcaataacgcgttgtttaggaccgggaagaaatacaaccagaattggcagtctcttggcacaatccggatcacgtactctgcgacttacaacccaaacgggaactcctacttgtgtatctatggctggtctaccaacccattggtcgagttctacatcgttgagtcctgggggaactggagaccgcctggtgcctcggtcgctgcggactcgcggctggtcgctgtttcgccggatgacaagatcgttttcactactattgaggatttctggaagaagctgaacacgccaatcgagcgcaatgggaagttccggaagcgcacatgcgtctctgagggctggcagacttacgctttcgacgagaaccacgaggcctcactgaggcctatcgagaaggcgattcggtacaccgctgatgagtctgagcagctcaggaggatcaccacgcagctcggcaggtcgctggacattacggatgagcactctctgttccgctacgacgatggcatcgaggaggtggctggggacgatctgaccgctggcgacatcattgtcgcgccgaggaccctcgatgttgaggtgacgcagacaactctcgacctgtccgagtacatccacgataacgagaggtgcccaagcgagcagaccggctcgggggagctcaatctggcctccaagagcgcgatctcggactctaggaacaaggagaccccgggcgtgacgcataatatcctcccccagcggagcaagttcaccgacgagatgaccacgctctcaccaacggctgttggcgggctggagtccgagcagaacgagaccctcagggtcggcgagagcacgggggccatcgagaggtacattaatgtggacgattcgttcggctggctcctggggcagttcatcgcgcagaggtcaatttccacagacgctctgaccatgacggtccacactgccgcggagaagcatgccgagcggatcgttgcgaccagcgactcggtgttcgggattaagccaacggtgaactccatcgagcgcggctacgagattgtgttcccttccgtcttcgacacaatcgtcagcggcctcactgcgaaggagcagagcgagcccgagcaggacgtggatcacacacatactgacgagatcggcattccggagtgcatcctgcacgcccccgacgatattgtcctctccttcctgcaggggttcatcctcgcggagaacgctcagcggaagggcaatgctgcctccgaggccagcgagatggtctctgagtcagagacaactgttaccctggagacgccatcggtcggcgttaaggacgggctcgtgttcctgtgccacaggctcggggtcatcacggatatttcggagaagtctggcgaggagtacagcgttcatttcgaggagtctcgctacacagtgtcaatcgccacagagggcaagactaaccccctcgaccagatcctgaatggggagaggccaacaatgcctgagggcgtgagcgtcccagttccagatgctctcctgactatccacgagtcaattgccaactccccacatatcgaccaggtcattcctgataccgtggtccagcaggagacagtttccctggagactctgcagagcctcctgaccggcctgtcgacggtggacctcccagctcagctggaggctaagcgcgacgagctcacactcctgactgagggcgatctctcttacctgagggtggagtcagtcgagtgcgttgactacgatggctacctgtacgatctccaggttgggggggagccagttttcacagctaattggctctacgctcataatacgtccctgggccaagtgacaatcgatggcgggacctacgacatctataggacgacacgcgtcaaccagccttccattgtggggacagccacgttcgatcagtactggagcgtgcgcacctctaagcggacttcaggaacagtgaccgtgaccgatcacttccgcgcctgggcgaaccggggcctgaacctcggcacaatagaccaaattacattgtgcgtggagggttaccaaagctctggatcagccaacatcacccagaacaccttctctcagggctcttcttccggcagttcgggtggctcatccggctccacaacgactactcgcatcgagtgtgagaacatgtccttgtccggaccctacgttagcaggatcaccaatccctttaatggtattgcgctgtacgccaacggagacacagcccgcgctaccgttaacttccccgcaagtcgcaactacaatttccgcctgcggggttgcggcaacaacaataatcttgcccgtgtggacctgaggatcgacggacggaccgtcgggaccttttattaccagggcacatacccctgggaggccccaattgacaatgtttatgtcagtgcggggagtcatacagtcgaaatcactgttactgcggataacggcacatgggacgtgtatgccgactacctggtgatacagtga

SEQ ID NO: 2879 - DNA, 2238 bp, Artificial Sequence
  Synthetic Construct, AT-36 intein modified protein encoding nucleic acids
atgcaaacaagcattactctgacatccaacgcatccggtacgtttgacggttactattacgaactctggaaggatactggcaatacaacaatgacggtctacactcaaggtcgcttttcctgccagtggtcgaacatcaataacgcgttgtttaggaccgggaagaaatacaaccagaattggcagtctcttggcacaatccggatcacgtactctgcgacttacaacccaaacgggaactcctacttgtgtatctatggctggtctaccaacccattggtcgagttctacatcgttgagtcctgggggaactggagaccgcctggtgcctgcctcactgcggactcaacagtcatgctcaaggagaaggggatggtctcggtctcggaggtggagacaggggatcagatcgctcagcgctccgacacaggcttccagtacaagccggtggaggagactcacgcgtacgagaacgctgagacactcactgtcaccctgacgaacggctgctctatccgcgggaccccgaatcacaggctcatggtcgacgatgagtggacgcgcatcgacgagattcagcccgatcaggaggttcattacacactcggctggctgagggagactaaccagtccccgcccaagctccactctcagtcacataccacggtgaatcagacagctgactccatcagcccggattccagcgagcccattgagctgtcggagtctgagaacgcggacacgggcaacaggcacaattctgctgttgccgtgaagcagtcacggacacagactcagctgatcagcgacgaggtggtctcgcggccagagcacaccaggaggcctgatcagctctccgaggagctggctgagctcctgggcctctggatcgacacggggctgtggcatcagagcggcgtccagttcaacgttgagcgcgagaatatcgcggagtacattgaccagctctcacagcagctgttcgataccccagctgctatctccgacacggatggcacctacacggtggacattacagatcataagctcaaggagtggtggaaggctaacttcggcgggaagccagacggcactcagtcgtcttacgtcccacagatgatcaaggaggcccctacaaatgttattgaggcgttcctgagggggtgcttcactgctgagggcgggctcaggaaggacatgaggccacggctgtgcacctcatccgaggatagcatcgacgatattgcggtcctcatgatgggcctggggtaccctgtggagaagtcggtcatcaggaacgctgacggcgagccgtactactcggttatgcccgctaccgacgatgggctctctgccttcctgcacgacgtgggcttcatcgatgagcggcgcgagatcgggctctccaacattgagagctcggatagccgggccctgaacaatacccataagatcgaggttgagtcaattgtggagtccccacctgcgacggtctacgacattacagtggcggataatcatgagtacgttacagatggcatcatttcacacaacacgtccctgggccaagtgacaatcgatggcgggacctacgacatctataggacgacacgcgtcaaccagccttccattgtggggacagccacgttcgatcagtactggagcgtgcgcacctctaagcggacttcaggaacagtgaccgtgaccgatcacttccgcgcctgggcgaaccggggcctgaacctcggcacaatagaccaaattacattgtgcgtggagggttaccaaagctctggatcagccaacatcacccagaacaccttctctcagggctcttcttccggcagttcgggtggctcatccggctccacaacgactactcgcatcgagtgtgagaacatgtccttgtccggaccctacgttagcaggatcaccaatccctttaatggtattgcgctgtacgccaacggagacacagcccgcgctaccgttaacttccccgcaagtcgcaactacaatttccgcctgcggggttgcggcaacaacaataatcttgcccgtgtggacctgaggatcgacggacggaccgtcgggaccttttattaccagggcacatacccctgggaggccccaattgacaatgtttatgtcagtgcggggagtcatacagtcgaaatcactgttactgcggataacggcacatgggacgtgtatgccgactacctggtgatacagtga

SEQ ID NO: 2880 - DNA, 2328 bp, Artificial Sequence
  Synthetic Construct, AT-37 intein modified protein encoding nucleic acids
atgcaaacaagcattactctgacatccaacgcatccggtacgtttgacggttactattacgaactctggaaggatactggcaatacaacaatgacggtctacactcaaggtcgcttttcctgccagtggtcgaacatcaataacgcgttgtttaggaccgggaagaaatacaaccagaattggcagtctcttggcacaatccggatcacgtactctgcgacttacaacccaaacgggaactcctacttgtgtatctatggctggtctaccaacccattggtcgagttctacatcgttgagtcctgggggaactggagaccgcctggtgcctgcgtggaggagaatagcctggtttctaccgatgaggggctgcggcctatcaaggatctggacaatactactgcggagttcgagcagtgggacgagatcgatgtcggcgttaccacggacggcgggaccaagacggctacagctgtttacgataacggcttcgccaatgtgcgccagatccagaccgagagcgggttcaacattgctgctaccccaaatcaccggttccgcacgctgtccagcgacggcacttacacctggaaggaggctggcaagttcgagtccggggaccgcgtgatcctgcagaggaacaccttcgatgctggctcccgcgtgtccctggaggctaatgagagggctgacgatgcccaggacacaactgagggcccagagctgccagggaggatgacgtccgagctggccgagttcctcggctacttcatgggcagcgggtacatctcggacgagacccatgcttccgtggatctggtggtcgacagcgatgccacggagctcaactcatacctgtccaatctcggcgagcagctcttcaggattaccccggccgtcgagtctcaggagatgtcacaggttctgtccttccgggactgccacctcagccgctacttcgaggataacggctggaagaagacggacacaggccataatggggatgcttcggctgctttcgtcccagagcagatcctggagggcgacgagcaggttgtgaacggcttcctcaggggggtgttcgaggcgattgggacggtctcggagaagatcgagattctgaccacgtctacaactctggctgaccagctccagagcctcctgctctcgctgggccacgtgttcacccgggatagcacgaagctcgtcgagacaaacaattaccatgacgatcagctgaggcagaggctctgcggcgctactaggagggaggacgagcggttcatgaacgagatcgggtcactcattgagccagatgagctgaacctctccacacgcgcggacaagaatgatacttacccttcgtctgttatcgaccacgtgcagacactggacggctacgattcagtgtccgagagcctcaagtctcgcattaaccagtcacaggtcgacgggacggttagcaggaagctgatcaaggatattgaggcggagactgctgagaccgtctcgatcgccgaccatgagctcacaggcttctacgcggctactgtggagtctgtcacggaggacacagcgtacactaaggatatttcagttccaagcaacaacacatacatcgccgacgggttcgttactcataatacgtccctgggccaagtgacaatcgatggcgggacctacgacatctataggacgacacgcgtcaaccagccttccattgtggggacagccacgttcgatcagtactggagcgtgcgcacctctaagcggacttcaggaacagtgaccgtgaccgatcacttccgcgcctgggcgaaccggggcctgaacctcggcacaatagaccaaattacattgtgcgtggagggttaccaaagctctggatcagccaacatcacccagaacaccttctctcagggctcttcttccggcagttcgggtggctcatccggctccacaacgactactcgcatcgagtgtgagaacatgtccttgtccggaccctacgttagcaggatcaccaatccctttaatggtattgcgctgtacgccaacggagacacagcccgcgctaccgttaacttccccgcaagtcgcaactacaatttccgcctgcggggttgcggcaacaacaataatcttgcccgtgtggacctgaggatcgacggacggaccgtcgggaccttttattaccagggcacatacccctgggaggccccaattgacaatgtttatgtcagtgcggggagtcatacagtcgaaatcactgttactgcggataacggcacatgggacgtgtatgccgactacctggtgatacagtga

SEQ ID NO: 2881 - DNA, 1656 bp, Artificial Sequence
  Synthetic Construct, AT-38 intein modified protein encoding nucleic acids
atgcaaacaagcattactctgacatccaacgcatccggtacgtttgacggttactattacgaactctggaaggatactggcaatacaacaatgacggtctacactcaaggtcgcttttcctgccagtggtcgaacatcaataacgcgttgtttaggaccgggaagaaatacaaccagaattggcagtctcttggcacaatccggatcacgtactctgcgacttacaacccaaacgggaactcctacttgtgtatctatggctggtctaccaacccattggtcgagttctacatcgttgagtcctgggggaactggagaccgcctggtgcctctattgaggctgatgagtcaatcgttattaggcgggacggggagactgagctgacggagatcgggtcgttcgtggacactattctggccgcggacaaccaggagacccggatcacggatggccacgagattgcgctcgctccgaatgggctggaggttccctccctcgacaccgatgagcagatcaggtggaagcacattgaggcggtgagccggcatgcttcgccagacgagatcctcctgattgagctggagtcaggcaggtccatcagggctaccaaggctcactccttcgtcacgaggagggacggcgatgttctcccagtggctggcgagacactggtggtcggggacgtcctccctactgttggcagctacgatcatgcgtcggggtctatctcagtgccgctgcagtcccagagcgtcgctgctgacggcgggaccgttgagcccaacacaaatatcactgccaacgcggagcgcgattcggcctctattacctctgcgggcatcattgggtcggctacgtgggagaggatctccagcattgagacagtggcgccggagtacgagtatgtgtacgatctctctgtttccgggctggagactttcactacgggggagggggtcgttactcataatacgtccctgggccaagtgacaatcgatggcgggacctacgacatctataggacgacacgcgtcaaccagccttccattgtggggacagccacgttcgatcagtactggagcgtgcgcacctctaagcggacttcaggaacagtgaccgtgaccgatcacttccgcgcctgggcgaaccggggcctgaacctcggcacaatagaccaaattacattgtgcgtggagggttaccaaagctctggatcagccaacatcacccagaacaccttctctcagggctcttcttccggcagttcgggtggctcatccggctccacaacgactactcgcatcgagtgtgagaacatgtccttgtccggaccctacgttagcaggatcaccaatccctttaatggtattgcgctgtacgccaacggagacacagcccgcgctaccgttaacttccccgcaagtcgcaactacaatttccgcctgcggggttgcggcaacaacaataatcttgcccgtgtggacctgaggatcgacggacggaccgtcgggaccttttattaccagggcacatacccctgggaggccccaattgacaatgtttatgtcagtgcggggagtcatacagtcgaaatcactgttactgcggataacggcacatgggacgtgtatgccgactacctggtgatacagtga

SEQ ID NO: 2882 - DNA, 2298 bp, Artificial Sequence
  Synthetic Construct, AT-39 intein modified protein encoding nucleic acids
atgcaaacaagcattactctgacatccaacgcatccggtacgtttgacggttactattacgaactctggaaggatactggcaatacaacaatgacggtctacactcaaggtcgcttttcctgccagtggtcgaacatcaataacgcgttgtttaggaccgggaagaaatacaaccagaattggcagtctcttggcacaatccggatcacgtactctgcgacttacaacccaaacgggaactcctacttgtgtatctatggctggtctaccaacccattggtcgagttctacatcgttgagtcctgggggaactggagaccgcctggtgcctgcctcactgcggggacaagggttctgcgggctgatacgggggcggagactactatgggggagctgttcgcgctgcaggctagggacgttccggtgtggtcactcgacgagtccctgcgctacgtccgcaggcacctcactagggttttcccaaccggggtgaagccagtcttccggctgaggactgctagcggcaagactgtccgcgctaccgctaaccatccattcctcacctacgatgggtggaagcctctcggcgagctgtcggtggctgacaggctggcggttccgaggcacgtgccagctccagagagggtggcttcatggacggacgatcaggtcctcctgctcggccatctcatcggcgatgggtccttcgtcaagaggcagccactccgctacgctagcgttgacgaggctaacctgtcggctgtgacggaggctgctgctaatgccttctccattgtcgcggttcgggacgagtacgctgctgctaggtgcaccacgctcaggctgccagctccttacaggctgacccacggcaggaggaatccactcgctgcttggctggacgagctcggcctgttcgggctcaggagctacgagaagttcgtcccgcaggaggttttccacctgcccaagaggcagatcgctctcttcctgcggcatctctgggcgactgatggctctgtgacgctgacaaggcagtcacgcggcgggaggatctactacgcctcgacatctctccagctgattcaggacgtctccaggctgctcctgcggttcggcattagcacgagggtgcggacaactaccccaaagggggaccacaggcctggctacacactcgatgtttctggcgtggacgatcagaggcggttcctgcaggagatcggcgtccatggggccaggggcgctaccgctgacaggctcctggaggtcatcagggatgtctccgcgaacacgaatgtcgacacagttcccaggcaggtttgggacgatgtgcgcaggctcctggtggagaaggagatgacgcacagggagttcgctgctgctatggggacatcgttcggcgggtccagcctctggaagcatgctccatctcgcgagaggctcggcagggtggcccaggtcctggactcggccgagctcgatgttctggcggtgaacgacgtcctgtgggatgaggtggtcgcgatcgagcctgacggcgaggagcaggtctacgatgctactgttctcggggggcacaacttcgtggcggatggcattgctgttcataatacgtccctgggccaagtgacaatcgatggcgggacctacgacatctataggacgacacgcgtcaaccagccttccattgtggggacagccacgttcgatcagtactggagcgtgcgcacctctaagcggacttcaggaacagtgaccgtgaccgatcacttccgcgcctgggcgaaccggggcctgaacctcggcacaatagaccaaattacattgtgcgtggagggttaccaaagctctggatcagccaacatcacccagaacaccttctctcagggctcttcttccggcagttcgggtggctcatccggctccacaacgactactcgcatcgagtgtgagaacatgtccttgtccggaccctacgttagcaggatcaccaatccctttaatggtattgcgctgtacgccaacggagacacagcccgcgctaccgttaacttccccgcaagtcgcaactacaatttccgcctgcggggttgcggcaacaacaataatcttgcccgtgtggacctgaggatcgacggacggaccgtcgggaccttttattaccagggcacatacccctgggaggccccaattgacaatgtttatgtcagtgcggggagtcatacagtcgaaatcactgttactgcggataacggcacatgggacgtgtatgccgactacctggtgatacagtga

SEQ ID NO: 2883 - DNA, 2154 bp, Artificial Sequence
  Synthetic Construct, AT-40 intein modified protein encoding nucleic acids
atgcaaacaagcattactctgacatccaacgcatccggtacgtttgacggttactattacgaactctggaaggatactggcaatacaacaatgacggtctacactcaaggtcgcttttcctgccagtggtcgaacatcaataacgcgttgtttaggaccgggaagaaatacaaccagaattggcagtctcttggcacaatccggatcacgtactctgcgacttacaacccaaacgggaactcctacttgtgtatctatggctggtctaccaacccattggtcgagttctacatcgttgagtcctgggggaactggagaccgcctggtgcctgcgttacggctgacacatgggttatgacggcctcgggggctaggcaggttcgggatctcattgacaggccattcgaggcggtcgtggacggcgagtgccacccaacagagtcccgcggcttcttcttcactggggataagcctgtgctcaggctgtcgacggctgagggccacacactcaggctgactgcgaaccatccggttctcagggtgtccaagatgaccaggcagctgcgggagacggagtgggttaaggctggcgagctcaggccacacgacaagatcgtcctccacgatcatagggctctgccatcctgggacggcgctcataccgaggctgagggctacctgatcgggctcctgattggcgggggcaccctcacgagggacaaggctatcctgtctatttgggatgctgctgctccaaaggtggctaacgggggcggctcagtcccagctgctggcgtcgccggggttatgagggctgctgagctcgctgctcggaccctgccacaccgcacggacttcaatggctggcagaccacgatggagggcaggggggagtaccacatggctacaggcgccctccatactctcgctctggagctcggcctgacaccaggggataagcgcctcactgcgcctctggagacaacttccagcgctttccacaggggcctcctgagggggatgttcgacgccgatggctcggttcaggggtctcagaggaagggcgtgtccatcaggctcccacagaccgacctcgggaacctgcagacggtccagaggatgctcctgaggctgggcgttgctagcaccattcatcagaataggaggccaggcgggaccaaggtcctcccagatggcgagggcggggctaaggggcactcatgccaggccgcgcatgagctgatcatttccggcgagaatgtggtcaggtacgctgagcggatcggcttcgccgactcggataagatggacaggctcaccgctctcctgcagaggtacaggcacacgaggcatgctgagaggttcatcgcgacagtgcagagcctggaggacgatggcatggaggccgtctacgatgttacagtggcggacgttcatgctttcgatgctaatgggctctacgttcataatacgtccctgggccaagtgacaatcgatggcgggacctacgacatctataggacgacacgcgtcaaccagccttccattgtggggacagccacgttcgatcagtactggagcgtgcgcacctctaagcggacttcaggaacagtgaccgtgaccgatcacttccgcgcctgggcgaaccggggcctgaacctcggcacaatagaccaaattacattgtgcgtggagggttaccaaagctctggatcagccaacatcacccagaacaccttctctcagggctcttcttccggcagttcgggtggctcatccggctccacaacgactactcgcatcgagtgtgagaacatgtccttgtccggaccctacgttagcaggatcaccaatccctttaatggtattgcgctgtacgccaacggagacacagcccgcgctaccgttaacttccccgcaagtcgcaactacaatttccgcctgcggggttgcggcaacaacaataatcttgcccgtgtggacctgaggatcgacggacggaccgtcgggaccttttattaccagggcacatacccctgggaggccccaattgacaatgtttatgtcagtgcggggagtcatacagtcgaaatcactgttactgcggataacggcacatgggacgtgtatgccgactacctggtgatacagtga

SEQ ID NO: 2884 - DNA, 1509 bp, Artificial Sequence
  Synthetic Construct, AT-41 intein modified protein encoding nucleic acids
atgcaaacaagcattactctgacatccaacgcatccggtacgtttgacggttactattacgaactctggaaggatactggcaatacaacaatgacggtctacactcaaggtcgcttttcctgccagtggtcgaacatcaataacgcgttgtttaggaccgggaagaaatacaaccagaattggcagtctcttggcacaatccggatcacgtactctgcgacttacaacccaaacgggaactcctacttgtgtatctatggctggtctaccaacccattggtcgagttctacatcgttgagtcctgggggaactggagaccgcctggtgcctgcttcgcgggggacactgagattactgtttcggacgggcggcgctggatgtcgctccctattaggcagttcgttactgagaatttcgacatctcaaagccgggcctcgatcacgttgggacattctactccgacccaaggcagccattctacgtccgctcgattgattctcagggcaagacaagcctcaagcgggtgacttccgtcagcgttcacagggctccagctcatctggtccggttcgctaccaggagggggagggtcctcaccgttacgcctgaccatgcgatgctggtgtgggacacggattacctccgcaagatcaaggctctggaggtggctgtcggcgacagggttccagtggaggagggcgggctcgtggtcgctgatgaggttgtgtctagggagacggtgcaggctctggacgatcgggtctactgcctcactgtggcggagaatcatactctcgttgctaatggcatcttctgcgggcagacgtccctgggccaagtgacaatcgatggcgggacctacgacatctataggacgacacgcgtcaaccagccttccattgtggggacagccacgttcgatcagtactggagcgtgcgcacctctaagcggacttcaggaacagtgaccgtgaccgatcacttccgcgcctgggcgaaccggggcctgaacctcggcacaatagaccaaattacattgtgcgtggagggttaccaaagctctggatcagccaacatcacccagaacaccttctctcagggctcttcttccggcagttcgggtggctcatccggctccacaacgactactcgcatcgagtgtgagaacatgtccttgtccggaccctacgttagcaggatcaccaatccctttaatggtattgcgctgtacgccaacggagacacagcccgcgctaccgttaacttccccgcaagtcgcaactacaatttccgcctgcggggttgcggcaacaacaataatcttgcccgtgtggacctgaggatcgacggacggaccgtcgggaccttttattaccagggcacatacccctgggaggccccaattgacaatgtttatgtcagtgcggggagtcatacagtcgaaatcactgttactgcggataacggcacatgggacgtgtatgccgactacctggtgatacagtga

SEQ ID NO: 2885 - DNA, 1824 bp, Artificial Sequence
  Synthetic Construct, AT-42 intein modified protein encoding nucleic acids
atgcaaacaagcattactctgacatccaacgcatccggtacgtttgacggttactattacgaactctggaaggatactggcaatacaacaatgacggtctacactcaaggtcgcttttcctgccagtggtcgaacatcaataacgcgttgtttaggaccgggaagaaatacaaccagaattggcagtctcttggcacaatccggatcacgtactctgcgacttacaacccaaacgggaactcctacttgtgtatctatggctggtctaccaacccattggtcgagttctacatcgttgagtcctgggggaactggagaccgcctggtgcctgcttcgctgcgggcactctcatcaagacaccaaaggggcctgttcctattgagcagattcagtcgggggatctcgttttcaatgcgatcggcattggggtggtcgagggcatcgtgtgccagcagaagcagaccattacgctggagctgtctgacggcacatcaatcgtctgcactcacgatcatccattcttctgccctcgcggctgggtcgctgctggcgacctggaggttggctccgggctgttcagccacgaggatctccgcaggctgtggtcgggcggggcttctctcggcctggagtccgggtccagcgacggcaggggggctgttcgctcgtctgaggtgctcctgaggatcctcagggaggaggctcgcgagccagatgctggctactgcgggccagccgaggacgtgcgcaacgcgtctaccgatagggctcatgctgagggcgcttggtggcagtggcaggctgacccgattgcgtcagatgaggctgctaggtccgctggcaggagggtcgctgaccgcgttagggacgaggataggagggaggctaggccagagccaaccgctgtcctcctgcaggacaggcactgcgagccactggctaacgatcggaataggagcggcagggagcattcatcccggggcacgggggaggctgagggccagcggcagggggacgtgccatgctcggtccgcgttgtgagcatctcgcgcgaggagaggggcgggcctgaggcggtgtacaacctcagggtttcagggcatccaagctacttcgctgggggggttctcgttcataatacgtccctgggccaagtgacaatcgatggcgggacctacgacatctataggacgacacgcgtcaaccagccttccattgtggggacagccacgttcgatcagtactggagcgtgcgcacctctaagcggacttcaggaacagtgaccgtgaccgatcacttccgcgcctgggcgaaccggggcctgaacctcggcacaatagaccaaattacattgtgcgtggagggttaccaaagctctggatcagccaacatcacccagaacaccttctctcagggctcttcttccggcagttcgggtggctcatccggctccacaacgactactcgcatcgagtgtgagaacatgtccttgtccggaccctacgttagcaggatcaccaatccctttaatggtattgcgctgtacgccaacggagacacagcccgcgctaccgttaacttccccgcaagtcgcaactacaatttccgcctgcggggttgcggcaacaacaataatcttgcccgtgtggacctgaggatcgacggacggaccgtcgggaccttttattaccagggcacatacccctgggaggccccaattgacaatgtttatgtcagtgcggggagtcatacagtcgaaatcactgttactgcggataacggcacatgggacgtgtatgccgactacctggtgatacagtga

SEQ ID NO: 2886 - DNA, 1509 bp, Artificial Sequence
  Synthetic Construct, AT-43 intein modified protein encoding nucleic acids
atgcaaacaagcattactctgacatccaacgcatccggtacgtttgacggttactattacgaactctggaaggatactggcaatacaacaatgacggtctacactcaaggtcgcttttcctgccagtggtcgaacatcaataacgcgttgtttaggaccgggaagaaatacaaccagaattggcagtctcttggcacaatccggatcacgtactctgcgacttacaacccaaacgggaactcctacttgtgtatctatggctggtctaccaacccattggtcgagttctacatcgttgagtcctgggggaactggagaccgcctggtgcctgcttccatggggacacactcattgagatctacgctgacggcattctggaggagattccgatcaggcggttcgttctggagcatctggatctctcgcaggctggcgtggacgctctggggacgttctacgctgatccggtccggccagctcacgtgcgctccgtcgacacaggcgggatcccacacctccgcaagattacttccgttagcgtgcataaggcccctgcgaacctgatccagttctcgacctctaggggcaagaatctcctggtgacgccggatcatgctatgctcgtttgggacgtgtcctacctccgcaagatcagggccctggaggtcaagattggcgacgctgtcccagtttgggagtcaggggtggtcatctccgacaggatcgtcagcattgattacgttccctgcgaggacgagcgggtgtactgcctcactgtggatagggatcataatgttgtgggcaatggcatcttcactgggcagacgtccctgggccaagtgacaatcgatggcgggacctacgacatctataggacgacacgcgtcaaccagccttccattgtggggacagccacgttcgatcagtactggagcgtgcgcacctctaagcggacttcaggaacagtgaccgtgaccgatcacttccgcgcctgggcgaaccggggcctgaacctcggcacaatagaccaaattacattgtgcgtggagggttaccaaagctctggatcagccaacatcacccagaacaccttctctcagggctcttcttccggcagttcgggtggctcatccggctccacaacgactactcgcatcgagtgtgagaacatgtccttgtccggaccctacgttagcaggatcaccaatccctttaatggtattgcgctgtacgccaacggagacacagcccgcgctaccgttaacttccccgcaagtcgcaactacaatttccgcctgcggggttgcggcaacaacaataatcttgcccgtgtggacctgaggatcgacggacggaccgtcgggaccttttattaccagggcacatacccctgggaggccccaattgacaatgtttatgtcagtgcggggagtcatacagtcgaaatcactgttactgcggataacggcacatgggacgtgtatgccgactacctggtgatacagtga

SEQ ID NO: 2887 - DNA, 2511 bp, Artificial Sequence
  Synthetic Construct, AT-44 intein modified protein encoding nucleic acids
atgcaaacaagcattactctgacatccaacgcatccggtacgtttgacggttactattacgaactctggaaggatactggcaatacaacaatgacggtctacactcaaggtcgcttttcctgccagtggtcgaacatcaataacgcgttgtttaggaccgggaagaaatacaaccagaattggcagtctcttggcacaatccggatcacgtactctgcgacttacaacccaaacgggaactcctacttgtgtatctatggctggtctaccaacccattggtcgagttctacatcgttgagtcctgggggaactggagaccgcctggtgcctgcctgcaccctgacacatacgttattctccctgacgggcgcatgaagaagatttcggagattgatgaggatgaggttctctcagtcaacttcgaggacctgaagctctacaataagaagatcaagaagttcaagcacaaggctccgaagatcctctacaagattaagaccgcgttctccgagctcatcaccacgggcgagcataagctgttcgtggtcgagaacgggaagatcgtcgagaagtgcgttaaggacctcaatggcagcgagctgatcggggttgtgaggaagctgaactactcgttcaacgacaatgtcgagttcaaggatgtctacgttgagcgccactacaagctcgacgagacaatcaggaacaagctgcgcaaggtgagggagaagctgggcctcactcggaaggatgtggagaagctctgcggggtcaaggagatctacattgttaagatcgagacaggcaagctggagtcaattgaggaggagcggctgaagaagctctgctccctgtacgggatcaacttcgaggagatcatctaccgcgacaacctccactacactaatccagtcaagttccctaagacaccgactcccgagctgatgcagatcattggctacatcattggcgacgggcatttcccctcgaatcggatgctgcgcctcaaggatgagcgcaaggaggtcctggaggagtacaaccagctgttcaagacggtgttcaacctggagggcaatatcaagaagggcgacgggaactactacatcctggagatcaacagcaagtacctgatcgattggttcagggagaacattccggagctcttcaacaagacaggcaatgagaggactcccgagttcgtgttccggctcaacaatgacctggtcgcttcttacctgcggggcatcttcgatgccgaggggtacattcgcgccgaggcgaagcagatcggcattgggatgacatcaaagtgcttcatcaaggagattcagttcctcctgctcaggttcggcatcctcgcctcctacagcaagattaagcggaaggaggagaactggaacaatacccataagctgctcatctcggacaagaagtctttcgagctgttcaagaagtacatcggcttcacggcgaaggataagatggagaagctggaggctatcctgaacaagatgaagggcctcaatttccgctacatctccattccactgaccaagaaggagatcagggagttcgtgggcgtccctctgaagacgattaagaacggggacaattactgcaccgattacacgatcgagaagatcattgaggagctcaactccaagggcctgtacgacaaggccgagtacctcaagcgcttcctggacgcggatatcgtttggacgaagttcaagattgaggaggtggagagcgatgttgagtatgtgtacgatctggaggtggaggactaccacaacttcattggcaatctcatcatcaaccacaacacgtccctgggccaagtgacaatcgatggcgggacctacgacatctataggacgacacgcgtcaaccagccttccattgtggggacagccacgttcgatcagtactggagcgtgcgcacctctaagcggacttcaggaacagtgaccgtgaccgatcacttccgcgcctgggcgaaccggggcctgaacctcggcacaatagaccaaattacattgtgcgtggagggttaccaaagctctggatcagccaacatcacccagaacaccttctctcagggctcttcttccggcagttcgggtggctcatccggctccacaacgactactcgcatcgagtgtgagaacatgtccttgtccggaccctacgttagcaggatcaccaatccctttaatggtattgcgctgtacgccaacggagacacagcccgcgctaccgttaacttccccgcaagtcgcaactacaatttccgcctgcggggttgcggcaacaacaataatcttgcccgtgtggacctgaggatcgacggacggaccgtcgggaccttttattaccagggcacatacccctgggaggccccaattgacaatgtttatgtcagtgcggggagtcatacagtcgaaatcactgttactgcggataacggcacatgggacgtgtatgccgactacctggtgatacagtga

SEQ ID NO: 2888 - DNA, 2517 bp, Artificial Sequence
  Synthetic Construct, AT-45 intein modified protein encoding nucleic acids
atgcaaacaagcattactctgacatccaacgcatccggtacgtttgacggttactattacgaactctggaaggatactggcaatacaacaatgacggtctacactcaaggtcgcttttcctgccagtggtcgaacatcaataacgcgttgtttaggaccgggaagaaatacaaccagaattggcagtctcttggcacaatccggatcacgtactctgcgacttacaacccaaacgggaactcctacttgtgtatctatggctggtctaccaacccattggtcgagttctacatcgttgagtcctgggggaactggagaccgcctggtgcctgcctcaacgctaacactgagattctgcaggagtcggggttccgcaagattacggagctgaataaggatgagaaggttttcgcgctgtgcggcaaggagatcaagccagtcgacgggtggaaggttcacaagacgcctcagcatgagtacaacatcgtggtcaagacagtcaatggcctggagattaccacgacaccaaaccacatcttcctcgttaaggagaatggctcgctgaaggagaaggaggccaaggacctgaaggttggggattacgttgcgacggtggaccggattcgcgtgaaggagaaggacatcgatctctctaacggcgacctgtacttcattgggtacttcatcggcgatgggtacacaggcgtgatcgagaagaacacgctcaaggctacaccggatctggccttcaaccccaagtacccgcccaatttcgacgattcggagctccacaagaagtacttcctgaagtgccggatttcaaagggcgtcgctcattacatctactccaagaagctccgcaagattttcaacaagctcaatatgctgaccaaggacaacaagaatatcgatgcgttctgcaacctcccgctggacaagctcgcctacctgatcgcgggcctcttcgactccgatgggtacatctacctgaaccggaagaatattgagttctactcgatctctgagaagctcgtggagcagctgcagttcgtcctcctgcggttcggcattcactccagcatccgcaagaagaagaccaagaccatggtgtccccaactaacgggaaggagtacaagtgcaaggacatctacgtcctcaccatccgcgatttcatgagcattaagaggttctacgagaacatccctctccgccatgaggagaagcgcaggaagctggaggagatcattaagaataaggagatcggccagattccgtctgagttcgttgcgctgaggttcacccccatcgctaagatttggtgcgactgcggcttctcagtggatctcactatgttcaagccgcgcaccaagaggcagcgggagctgaacaagaagagggtgaagctcctgttcgagctcctggacggcaagaagctcatcacgaactacaaggagtactacagcaagaggaagaatccctacttcgatttcattgtccgggagaagatcaacggcaacaattactacagcctcaatgagaaggggagggttctgatgtcgctcctgaacaagcacatcaaggacaaggagaatctggaggagatgtacaacttcctcgtgaatctggagaagtgcccaatttgcggcaagcctatccataaggagatgaggtactcctggaagaaggagtgctacgacggggatatctactgggaccggatcaaggagattaagaagatcaaggtcaacgacaagtacgcctacgatatcgagctgccagatgacgggtctaattcacactacatcgttgctaacggcttcatcgtgcataacacgtccctgggccaagtgacaatcgatggcgggacctacgacatctataggacgacacgcgtcaaccagccttccattgtggggacagccacgttcgatcagtactggagcgtgcgcacctctaagcggacttcaggaacagtgaccgtgaccgatcacttccgcgcctgggcgaaccggggcctgaacctcggcacaatagaccaaattacattgtgcgtggagggttaccaaagctctggatcagccaacatcacccagaacaccttctctcagggctcttcttccggcagttcgggtggctcatccggctccacaacgactactcgcatcgagtgtgagaacatgtccttgtccggaccctacgttagcaggatcaccaatccctttaatggtattgcgctgtacgccaacggagacacagcccgcgctaccgttaacttccccgcaagtcgcaactacaatttccgcctgcggggttgcggcaacaacaataatcttgcccgtgtggacctgaggatcgacggacggaccgtcgggaccttttattaccagggcacatacccctgggaggccccaattgacaatgtttatgtcagtgcggggagtcatacagtcgaaatcactgttactgcggataacggcacatgggacgtgtatgccgactacctggtgatacagtga

SEQ ID NO: 2889 - DNA, 2190 bp, Artificial Sequence
  Synthetic Construct, AT-46 intein modified protein encoding nucleic acids
atgcaaacaagcattactctgacatccaacgcatccggtacgtttgacggttactattacgaactctggaaggatactggcaatacaacaatgacggtctacactcaaggtcgcttttcctgccagtggtcgaacatcaataacgcgttgtttaggaccgggaagaaatacaaccagaattggcagtctcttggcacaatccggatcacgtactctgcgacttacaacccaaacgggaactcctacttgtgtatctatggctggtctaccaacccattggtcgagttctacatcgttgagtcctgggggaactggagaccgcctggtgcctgcgttccgcctgacactctgctcatcctggagaatgggttcaagcgcatcgtggacattaaggtcggggacaaggtcctgacgcacgagaaccggttcaagaaggttgagaaggtgtacaagcgcaggtacatcggcgacatcattaagattaaggtgcgctacttcccagaggagatcattctcaccccagagcaccctgtctacgctatcaagacggagaagaggtgcgatggctctcatgggatctgcaagttcaactgcctcacacagtacactaatccttcatgcaagaagcggtaccgcaagtacaagagggagtggatcattgccaaggacctgaaggtcggcgatgtgatcgtctacccgattcccaacagggttcgggacatcaagtacctctccctggataagtacctcagcaatatcaagagggagttctgccgctcccgcatcccggagaagattgaggtctctgaggagttctgccgcctcgttggctacttcctgtccgaggggtactgcttcagggacggcatcgggttcgctctgggcgagaacgagaagaagatcattgacgatatcgagtacctcatgaagaagattttcaatctgaagcccaagatccgcgacgatggccgctcagaggggatcgagctcaagtactactcccgggtgctgcgcgacttcttcggcgatatgttctactgcggggacgagaagcgggcctggaacaaggcgctcccaaatgagttcctctacctgcctaagaacaagcagctgcagatcttcattggctggtggaggggcgataagggggtcaccacgtcggagattctgatgaaccagctcaggctgatcagcctccggctgggcttcatcattaccttctcgaagcacgttccgaagaatcccaagatcggcgacagggaggtcatcaagtaccatgctaggtggcagggccgcgtgtccatcctcgacgagaagattgtcgatgagctcaagaacgaggacatcaagctgccgaagaaggatgttcgctacggctggatcaaggggaattacctgtacgctcccatcattaggatcggccgggagtactacgacgggttcgtctacaatctggaggtggaggatgactcttcatacgttacagtctcaggcactctgcacaacacgtccctgggccaagtgacaatcgatggcgggacctacgacatctataggacgacacgcgtcaaccagccttccattgtggggacagccacgttcgatcagtactggagcgtgcgcacctctaagcggacttcaggaacagtgaccgtgaccgatcacttccgcgcctgggcgaaccggggcctgaacctcggcacaatagaccaaattacattgtgcgtggagggttaccaaagctctggatcagccaacatcacccagaacaccttctctcagggctcttcttccggcagttcgggtggctcatccggctccacaacgactactcgcatcgagtgtgagaacatgtccttgtccggaccctacgttagcaggatcaccaatccctttaatggtattgcgctgtacgccaacggagacacagcccgcgctaccgttaacttccccgcaagtcgcaactacaatttccgcctgcggggttgcggcaacaacaataatcttgcccgtgtggacctgaggatcgacggacggaccgtcgggaccttttattaccagggcacatacccctgggaggccccaattgacaatgtttatgtcagtgcggggagtcatacagtcgaaatcactgttactgcggataacggcacatgggacgtgtatgccgactacctggtgatacagtga

SEQ ID NO: 2890 - DNA, 2652 bp, Artificial Sequence
  Synthetic Construct, AT-47 intein modified protein encoding nucleic acids
atgcaaacaagcattactctgacatccaacgcatccggtacgtttgacggttactattacgaactctggaaggatactggcaatacaacaatgacggtctacactcaaggtcgcttttcctgccagtggtcgaacatcaataacgcgttgtttaggaccgggaagaaatacaaccagaattggcagtctcttggcacaatccggatcacgtactctgcgacttacaacccaaacgggaactcctacttgtgtatctatggctggtctaccaacccattggtcgagttctacatcgttgagtcctgggggaactggagaccgcctggtgcctgcctgatgccgcatgagaaggtgctgacggagtacggggagattaagattgaggacctgttcaagatcgggaaggagatcgtggagaaggacgagctcaaggagatcaggaagctgaatattaaggtgcacactctcaacgagaatggcgagatcaagatcattaacgccccatacgtgtggaagctcaagcataaggggaagatgatcaaggtcaagctgaagaactggcactcgatcaccacgacaccggagcatcccttcctgaccaacaatggctggatcaaggcggagaatattaagaaggggatgtatgtggctatccctcgcaagatctacggcaacgaggacttcgagaagttcatcgagttcattaattccaagatcctcacgaacgagctgattgtgaaggtcaatgagaaggacctcaagaacgttgagctgccgtcaacaaagatctacaagaagcagaagaacgtgttccgctccgaggatatcattgagcacaacctcaatatcgagaagatttcgttctctccacggatccaccgctgcggcaagccacagcattacatcaagctccctaagtctctgaacgagtggaaggccatcttctacttcgctggcgtgatgttcggcgacgggtgcgtcgatcggatcgcgaacaatgacgaggaggtcttcaacaagctgaagtcactcaacaatctgggcatcgaggttgagaggattaagcggaagtccagctacgagatcattttcaagaacgggaagaatgctctcatcaacctcctgaagattctgttcgattacccgtctgagaagaagtcacataacatcaagattccgcagatcctctacattgctcccaaggagctggtggccgagttcatcaagggctacttcgacgccgatggctacgtgaatctccgccagaacaggatcgaggttatttcagcgtccaaggagttcatcgagggcctgtccattctcctgctccgcttcgagatcacttccaagatctacgagattaagaagagctacaaggagaccaagaagaagtactaccagctcaacatcgtcggcaagaggaacctgaagaatttcaagaacatcgggttctccattaagtacaaggaggagaacctgaataagatcattgagaagagcaggaagtcggagaagtaccccatcaacaaggacatgaagcgcctcaggattctgttcggcatgacgcggaatgaggttaacgtgagctactacgccaagtacgagaacgggaaggagatcccatcgtacgagattgtgaagaagttcctcaattctctgaagcctaagaacctcgataagaagatcaaggttctggagggcaaggagcgcgacgtgaattacctcaaggctttcgagagcgatggcctgatcgagaacgggaggctcaccaagctgggcagggaggccctcaatatctggaagaaccacgagttcgggaaggagaatatcgactacatgaagtcgctgatcgagaacattgcgttcgtcgaggttgaggatgtcgagatcattgactacgatggctacgtttacgatctcacaacagagactcataacttcattgctaatggcatcgtggttcataatacgtccctgggccaagtgacaatcgatggcgggacctacgacatctataggacgacacgcgtcaaccagccttccattgtggggacagccacgttcgatcagtactggagcgtgcgcacctctaagcggacttcaggaacagtgaccgtgaccgatcacttccgcgcctgggcgaaccggggcctgaacctcggcacaatagaccaaattacattgtgcgtggagggttaccaaagctctggatcagccaacatcacccagaacaccttctctcagggctcttcttccggcagttcgggtggctcatccggctccacaacgactactcgcatcgagtgtgagaacatgtccttgtccggaccctacgttagcaggatcaccaatccctttaatggtattgcgctgtacgccaacggagacacagcccgcgctaccgttaacttccccgcaagtcgcaactacaatttccgcctgcggggttgcggcaacaacaataatcttgcccgtgtggacctgaggatcgacggacggaccgtcgggaccttttattaccagggcacatacccctgggaggccccaattgacaatgtttatgtcagtgcggggagtcatacagtcgaaatcactgttactgcggataacggcacatgggacgtgtatgccgactacctggtgatacagtga

SEQ ID NO: 2891 - DNA, 1518 bp, Artificial Sequence
  Synthetic Construct, AT-48 intein modified protein encoding nucleic acids
atgcaaacaagcattactctgacatccaacgcatccggtacgtttgacggttactattacgaactctggaaggatactggcaatacaacaatgacggtctacactcaaggtcgcttttcctgccagtggtcgaacatcaataacgcgttgtttaggaccgggaagaaatacaaccagaattggcagtctcttggcacaatccggatcacgtactctgcgacttacaacccaaacgggaactcctacttgtgtatctatggctggtctaccaacccattggtcgagttctacatcgttgagtcctgggggaactggagaccgcctggtgccgctctcgcctacgatgagcctatctacctctcggatggcaacattatcaatatcggggagttcgtggataagttcttcaagaagtacaagaacagcatcaagaaggaggacaatggcttcgggtggatcgatattggcaacgagaatatctacattaagtccttcaacaagctcagcctgatcattgaggacaagcggatcctccgcgtctggcgcaagaagtactcggggaagctgatcaagattaccacgaagaaccgcagggagatcacactcactcacgatcatccggtttacatctctaagaccggcgaggtgctggagattaatgccgagatggtgaaggtcggggactacatctacattcccaagaacaataccatcaacctcgatgaggttattaaggtggagacggtcgactacaatggccacatctacgatctgactgtggaggataatcatacttacattgctggcaagaatgagggcttcgctgtttccaacacgtccctgggccaagtgacaatcgatggcgggacctacgacatctataggacgacacgcgtcaaccagccttccattgtggggacagccacgttcgatcagtactggagcgtgcgcacctctaagcggacttcaggaacagtgaccgtgaccgatcacttccgcgcctgggcgaaccggggcctgaacctcggcacaatagaccaaattacattgtgcgtggagggttaccaaagctctggatcagccaacatcacccagaacaccttctctcagggctcttcttccggcagttcgggtggctcatccggctccacaacgactactcgcatcgagtgtgagaacatgtccttgtccggaccctacgttagcaggatcaccaatccctttaatggtattgcgctgtacgccaacggagacacagcccgcgctaccgttaacttccccgcaagtcgcaactacaatttccgcctgcggggttgcggcaacaacaataatcttgcccgtgtggacctgaggatcgacggacggaccgtcgggaccttttattaccagggcacatacccctgggaggccccaattgacaatgtttatgtcagtgcggggagtcatacagtcgaaatcactgttactgcggataacggcacatgggacgtgtatgccgactacctggtgatacagtga

SEQ ID NO: 2892 - DNA, 2250 bp, Artificial Sequence
  Synthetic Construct, AT-49 intein modified protein encoding nucleic acids
atgcaaacaagcattactctgacatccaacgcatccggtacgtttgacggttactattacgaactctggaaggatactggcaatacaacaatgacggtctacactcaaggtcgcttttcctgccagtggtcgaacatcaataacgcgttgtttaggaccgggaagaaatacaaccagaattggcagtctcttggcacaatccggatcacgtactctgcgacttacaacccaaacgggaactcctacttgtgtatctatggctggtctaccaacccattggtcgagttctacatcgttgagtcctgggggaactggagaccgcctggtgcctgcattgagggggacgctaagattctgacggatcgggggttcctgaagatgaaggaggtttacaagctcgtgaagaatggggagaagctcaaggtcctcggcctgaatgctgagacactgaagactgagtggaaggagatcattgacgctcagaagagggaggctaggcgctacgagatcggcgtgtaccgcaagaataagaacaccaaggacacgatcaagattacaccggatcacaagttccccgtgttcgtcaacggcgagctcagcaaggtgcagctgtgcgacatcattgataacaatctctcagtcctgtccatcgactacattccaatgatcgaggagaagtacgagtccctcgctgaggtcatgtacctcggcggggctgtcctgagcgatggccatatcgttcggaggaacgggaagccaattcgggtccgcttcacacagaaggacactgaggagaagaaggatttcatcgagaaggttaagggcgacgtgaagctcatcggcgggaatttcatcgagatttcgaaccgcaacaatgtcatcgagtaccagacctctaggaagattccgtcagagatcctgggcttcattgaggttaatattaacacaatccccctctacgccactaaggacgagatcgccgatctgattgcgggcttcgttgacggcgatgggtgcctctccgggaagaggagggtggagatctaccagaactccagccacattaagaagatcgagggcctcatcgtcgggctctacaggctgggcatcattccgaggctgcggtacaagcggtcgtctaccgcgacgatctacttcaacaacaacctggagaccatcctgcagcgcacgcgcaggattaagctcgacaagctgaaggagttcaagaagccagtggaggacaagaagctgatcgatatttcgcagatcctccctgagctgaaggagttcgactacaagggctacctctacaagacctacaaggagaagctgttcatcgggattaacaagctggaggagtacctgtctaagatcgacaaggatggcattgagcgcatcaagcagaagatcaagctcctgaaggagagcgacatctactcgatcaggattaagaaggtcggcgaggattacggggaggtctacaatatcacggttaaggcggagaacgagttcaatcataactacgtggtttggactaagcattacacacctatcgtggttttcaacacgtccctgggccaagtgacaatcgatggcgggacctacgacatctataggacgacacgcgtcaaccagccttccattgtggggacagccacgttcgatcagtactggagcgtgcgcacctctaagcggacttcaggaacagtgaccgtgaccgatcacttccgcgcctgggcgaaccggggcctgaacctcggcacaatagaccaaattacattgtgcgtggagggttaccaaagctctggatcagccaacatcacccagaacaccttctctcagggctcttcttccggcagttcgggtggctcatccggctccacaacgactactcgcatcgagtgtgagaacatgtccttgtccggaccctacgttagcaggatcaccaatccctttaatggtattgcgctgtacgccaacggagacacagcccgcgctaccgttaacttccccgcaagtcgcaactacaatttccgcctgcggggttgcggcaacaacaataatcttgcccgtgtggacctgaggatcgacggacggaccgtcgggaccttttattaccagggcacatacccctgggaggccccaattgacaatgtttatgtcagtgcggggagtcatacagtcgaaatcactgttactgcggataacggcacatgggacgtgtatgccgactacctggtgatacagtga

SEQ ID NO: 2893 - DNA, 2121 bp, Artificial Sequence
  Synthetic Construct, AT-50 intein modified protein encoding nucleic acids
atgcaaacaagcattactctgacatccaacgcatccggtacgtttgacggttactattacgaactctggaaggatactggcaatacaacaatgacggtctacactcaaggtcgcttttcctgccagtggtcgaacatcaataacgcgttgtttaggaccgggaagaaatacaaccagaattggcagtctcttggcacaatccggatcacgtactctgcgacttacaacccaaacgggaactcctacttgtgtatctatggctggtctaccaacccattggtcgagttctacatcgttgagtcctgggggaactggagaccgcctggtgcctgccatccaaaggggacaaaggtcgtggtcaagggcaagggcatcgtgaatattgaggacgttaaggaggggaattacgttctcggcatcgacggctggcagaaggttaagaaggtctggaagtacgagtacgagggcgagctcattaacgttaatgggctgaagtgcacaccgaaccacaagatccccctccgctacaagattaagcataagaagatcaacaagaacgattacctggtgagggacatctacgcgaagtcgctcctgaccaagttcaagggcgaggggaagctcatcctgtgcaaggacttcgagacgattggcaactacgagaagtacatcaatgacatggatgaggacttcatcctcaagtccgagctgatcggcattctcctggctgaggggcacctcctgaggagggatatcgagtacttcgactccagccggggcaagaagcgcattagccatcagtaccgcgtggagatcacggtcaacgaggatgagaaggacttcatcgagaagattaagtacatcttcaagaagctcttcaactacgagctctacgtgcgccgcaagaagggcaccaaggccattacgctcgggtgcgcgaagaaggatatctacctcaagattgaggagatcctgaagaacaaggagaagtacctcccgaatgccatcctgcgggggttcttcgagggcgacggctacgtgaacacagttaggcgggctgtggtcgttaatcagggcactaacaattacgataagattaagttcatcgccagcctcctggacaggctcggcatcaagtacagcttctacacatactcgtacgaggagagggggaagaagctgaagcgctacgtgatcgagattttctctaagggcgacctcattaagttctcaatcctgatttcgttcatctctcgcaggaagaacaatctcctgaacgagatcattaggcagaagactctgtacaagatcggcgattacgggttctacgacctcgacgatgtgtgcgtctcactggagtcctacaagggcgaggtgtacgatctcactctggagggcaggccttactacttcgccaatggcatcctcactcataatacgtccctgggccaagtgacaatcgatggcgggacctacgacatctataggacgacacgcgtcaaccagccttccattgtggggacagccacgttcgatcagtactggagcgtgcgcacctctaagcggacttcaggaacagtgaccgtgaccgatcacttccgcgcctgggcgaaccggggcctgaacctcggcacaatagaccaaattacattgtgcgtggagggttaccaaagctctggatcagccaacatcacccagaacaccttctctcagggctcttcttccggcagttcgggtggctcatccggctccacaacgactactcgcatcgagtgtgagaacatgtccttgtccggaccctacgttagcaggatcaccaatccctttaatggtattgcgctgtacgccaacggagacacagcccgcgctaccgttaacttccccgcaagtcgcaactacaatttccgcctgcggggttgcggcaacaacaataatcttgcccgtgtggacctgaggatcgacggacggaccgtcgggaccttttattaccagggcacatacccctgggaggccccaattgacaatgtttatgtcagtgcggggagtcatacagtcgaaatcactgttactgcggataacggcacatgggacgtgtatgccgactacctggtgatacagtga

SEQ ID NO: 2894 - DNA, 2442 bp, Artificial Sequence
  Synthetic Construct, AT-51 intein modified protein encoding nucleic acids
atgcaaacaagcattactctgacatccaacgcatccggtacgtttgacggttactattacgaactctggaaggatactggcaatacaacaatgacggtctacactcaaggtcgcttttcctgccagtggtcgaacatcaataacgcgttgtttaggaccgggaagaaatacaaccagaattggcagtctcttggcacaatccggatcacgtactctgcgacttacaacccaaacgggaactcctacttgtgtatctatggctggtctaccaacccattggtcgagttctacatcgttgagtcctgggggaactggagaccgcctggtgccagcattctccctgacgagtacctgactattattgaggaggatggcattaaggtcgtgaagatcggggagtacattgatgatctcatgcgcaagcacaaggacaagatcaagttctcgggcatctctgagattctggagacaaagaacctcaagactttctccttcgataagatcacgaagaagtgcgagattaagaaggtgaaggcgctgatcaggcacccatacttcggcaaggcttacaagatcaagctccggtctggccgcaccattaaggtcacgagggggcattcactgttcaagtacgagaacgggaagatcgtcgaggttaagggcgacgatgtgcggttcggggacctgatcgtggtcccaaagaagctcacctgcgtcgataaggaggttgtgatcaacattcctaagcggctgatcaatgctgacgaggaggagatcaaggatctcgtcattaccaagcacaaggacaaggccttcttcgttaagctcaagaagacgctggaggatatcgagaacaataagctcaaggtcatcttcgacgattgcattctctacctgaaggagctcggcctgatcgactacaacatcattaagaagattaataaggttgacatcaagattctggatgaggagaagttcaaggcctacaagaagtacttcgacaccgtcatcgagcatggcaacttcaagaaggggcgctgcaatattcagtacatcaagattaaggactacatcgcgaacattcccgacaaggagttcgaggattgcgagatcggcgcctactcggggaagattaatgcgctcctgaagctcgacgagaagctggctaagttcctcggcttcttcgtgacacgcgggaggctgaagaagcagaagctcaagggcgagactgtctacgagatctcagtttacaagtccctcccggagtaccagaaggagatcgctgagacattcaaggaggtcttcggcgccgggtccatggttaaggacaaagtgactatggataacaagatcgtgtacctcgtcctgaagtacattttcaagtgcggcgacaaggataagaagcacatccccgaggagctcttcctggcctccgagagcgtgatcaagagcttcctggacggcttcctcaaggccaagaagaacagccataaggggacctcgacgttcatggcgaaggatgagaagtacctcaaccagctgatgatcctcttcaatctggttggcattccgacaaggttcactcccgtgaagaacaagggctacaagctcaccctgaatccgaagtacgggacggtgaaggacctcatgctggatgaggtcaaggagatcgaggcgttcgagtacagcggctacgtctacgatctctctgtggaggataatgagaacttcctcgtcaacaacatctacgctcataatacgtccctgggccaagtgacaatcgatggcgggacctacgacatctataggacgacacgcgtcaaccagccttccattgtggggacagccacgttcgatcagtactggagcgtgcgcacctctaagcggacttcaggaacagtgaccgtgaccgatcacttccgcgcctgggcgaaccggggcctgaacctcggcacaatagaccaaattacattgtgcgtggagggttaccaaagctctggatcagccaacatcacccagaacaccttctctcagggctcttcttccggcagttcgggtggctcatccggctccacaacgactactcgcatcgagtgtgagaacatgtccttgtccggaccctacgttagcaggatcaccaatccctttaatggtattgcgctgtacgccaacggagacacagcccgcgctaccgttaacttccccgcaagtcgcaactacaatttccgcctgcggggttgcggcaacaacaataatcttgcccgtgtggacctgaggatcgacggacggaccgtcgggaccttttattaccagggcacatacccctgggaggccccaattgacaatgtttatgtcagtgcggggagtcatacagtcgaaatcactgttactgcggataacggcacatgggacgtgtatgccgactacctggtgatacagtga

SEQ ID NO: 2895 - DNA, 2658 bp, Artificial Sequence
  Synthetic Construct, AT-52 intein modified protein encoding nucleic acids
atgcaaacaagcattactctgacatccaacgcatccggtacgtttgacggttactattacgaactctggaaggatactggcaatacaacaatgacggtctacactcaaggtcgcttttcctgccagtggtcgaacatcaataacgcgttgtttaggaccgggaagaaatacaaccagaattggcagtctcttggcacaatccggatcacgtactctgcgacttacaacccaaacgggaactcctacttgtgtatctatggctggtctaccaacccattggtcgagttctacatcgttgagtcctgggggaactggagaccgcctggtgcctgcctgacgggggacactaaggtcatcgtgaatggggagattcgggagatcggggaggttattgaggagatttctaacgggaagttcggcgtgacactcactaacaatctcaaggtcctgggcatcgacgaggatgggaagattcgcgagttcgacgtgcagtatgtgtacaaggataagaccaacacgctcatcaagattaagacaaagatgggcagggagctgaaggttaccacgtaccacccgctcctgatcaatcataagaacggcgagattaagtgggagaaggcggagaacctcaaggtcggggacaagctggctacgccccgctacatcctcttcaatgagagcgattacaacgaggagctcgctgagtggctgggctacttcatcggcgacgggcacgccgataaggagtcgaataagatcacattcactaacggggacgagaagctgcggaagcgcttcgccgagctcaccgagaagctgttcaaggatgcgaagatcaaggagcgcattcataaggacaggacgccagatatctacgtcaactccaaggaggcggttgagttcatcgacaagctcggcctgagggggaagaaggctgataaggtgcggatccctaaggagattatgcgctcagacgctctcagggcgttcctgagggcttacttcgactgcgatggcgggatcgagaagcactccattgttctcagcaccgcttcgaaggagatggccgaggacctggtgtacgctctcctgaggttcggcatcattgccaagctgcgggagaaggtcaacaagaacaataacaaggtttactaccatatcgtgatttccaactcctccaacctccgcaccttcctggacaacatcggcttctctcaggagaggaagctcaagaagctcctggagatcattaaggatgagaatccgaacctggacgtgatcacgattgataaggagaagatccggtacattagggaccggctcaaggtcaagctgacacgcgacatcgagaaggataattggtcctacaacaagtgcaggaagatcactcaggagctcctgaaggagatctactaccggctggaggagctgaaggagatcgagaaggccctggaggagaacatcctgattgactgggatgaggtggccgagcgcaggaaggagatcgcggagaagacaggcattcgctccgaccgcatcctggagtacattcgggggaagcgcaagccaagcctcaagaactacatcaagattgccaatactctgggcaagaacatcgagaagatcattgacgcgatgcggatcttcgctaagaagtactcgtcttacgcggagatcggcaagatgctgaatatgtggaactcatccatcaagatctacctggagtctaatacccaggagatcgagaagctggaggagattaggaagacggagctcaagctggtcaaggagatcctcaacgacgagaagctgatcgattctattggctacgtcctcttcctggcgtcaaatgagatctactgggacgagatcgttgagattgagcagctcaacggggagttcaccatctacgatctgcatgttccacgctaccacaacttcattgggggcaacctgcctactattctccacaacacgtccctgggccaagtgacaatcgatggcgggacctacgacatctataggacgacacgcgtcaaccagccttccattgtggggacagccacgttcgatcagtactggagcgtgcgcacctctaagcggacttcaggaacagtgaccgtgaccgatcacttccgcgcctgggcgaaccggggcctgaacctcggcacaatagaccaaattacattgtgcgtggagggttaccaaagctctggatcagccaacatcacccagaacaccttctctcagggctcttcttccggcagttcgggtggctcatccggctccacaacgactactcgcatcgagtgtgagaacatgtccttgtccggaccctacgttagcaggatcaccaatccctttaatggtattgcgctgtacgccaacggagacacagcccgcgctaccgttaacttccccgcaagtcgcaactacaatttccgcctgcggggttgcggcaacaacaataatcttgcccgtgtggacctgaggatcgacggacggaccgtcgggaccttttattaccagggcacatacccctgggaggccccaattgacaatgtttatgtcagtgcggggagtcatacagtcgaaatcactgttactgcggataacggcacatgggacgtgtatgccgactacctggtgatacagtga

SEQ ID NO: 2896 - DNA, 2322 bp, Artificial Sequence
  Synthetic Construct, AT-53 intein modified protein encoding nucleic acids
atgcaaacaagcattactctgacatccaacgcatccggtacgtttgacggttactattacgaactctggaaggatactggcaatacaacaatgacggtctacactcaaggtcgcttttcctgccagtggtcgaacatcaataacgcgttgtttaggaccgggaagaaatacaaccagaattggcagtctcttggcacaatccggatcacgtactctgcgacttacaacccaaacgggaactcctacttgtgtatctatggctggtctaccaacccattggtcgagttctacatcgttgagtcctgggggaactggagaccgcctggtgcctcggtctctaaggacacacctattctcgtgaagattgatggcaaggttaagcgcactactttcgaggagctggacaagatctacttcgagaccaacgacgagaatgagatgtacaagaaggtggacaacctggaggtgctgacagtcgatgagaatttccgggttcgctggaggaaggtgtcgactatcattaggcacaaggtcgacaagatcctccggattaagttcgagggcgggtacattgagctgacgggcaaccattccatcatgatgctcgatgagaatgggctggtggccaagaaggcgagcgacatcaaggtcggcgattgcttcctctcgttcgtcgcgaacatcgagggcgagaaggaccggctcgatctgaaggagttcgagccaaaggacatcacctcccgcgtcaagatcattaacgacttcgatatcgacgaggatacggcttggatgctcggcctctacgtggctgagggcgctgttgggttcaagggcaagacctcaggccaggttatctacacgctcgggtcccacgagcatgacctcatcaacaagctgaatgacattgtggataagaagggcttcagcaagtacgagaatttcacaggctcggggttcgaccggaagcgcctgtctgcgaagcagatccgcattctcaacactcagctggctaggttcgtggaggagaacttctacgacggcaatgggcgcagggctaggaacaagcggatcccggatatcattttcgagctcaaggagaatctgagggtcgagttcctcaaggggctggctgacggcgattccagcgggaactggcgcgaggtggtcaggatttcgtctaagtctgacaatctcctgatcgatacagtgtggctcgccaggatctcaggcattgagtcatccattttcgagaacgaggcgcggctgatctggaagggcgggatgaagtggaagaagtctaatctcctgccggccgagcccatcattaagatgatcaagaagctggagaacaagattaacggcaattggcggtacatcctccgccaccagctgtacgagggcaagaagcgcgtctccaaggacaagatcaagcagattctggagatggtcaacgttgagaagctgtccgacaaggagaaggaggtttacgatctcctgaagaagctgagcaagaccgagctctacgcgctggttgtgaaggagatcgagatcattgactacaacgatttcgtctacgacgtctctgttccaaacaatgagatgttcttcgctggcaatgttccaattctgctccacaacacgtccctgggccaagtgacaatcgatggcgggacctacgacatctataggacgacacgcgtcaaccagccttccattgtggggacagccacgttcgatcagtactggagcgtgcgcacctctaagcggacttcaggaacagtgaccgtgaccgatcacttccgcgcctgggcgaaccggggcctgaacctcggcacaatagaccaaattacattgtgcgtggagggttaccaaagctctggatcagccaacatcacccagaacaccttctctcagggctcttcttccggcagttcgggtggctcatccggctccacaacgactactcgcatcgagtgtgagaacatgtccttgtccggaccctacgttagcaggatcaccaatccctttaatggtattgcgctgtacgccaacggagacacagcccgcgctaccgttaacttccccgcaagtcgcaactacaatttccgcctgcggggttgcggcaacaacaataatcttgcccgtgtggacctgaggatcgacggacggaccgtcgggaccttttattaccagggcacatacccctgggaggccccaattgacaatgtttatgtcagtgcggggagtcatacagtcgaaatcactgttactgcggataacggcacatgggacgtgtatgccgactacctggtgatacagtga

SEQ ID NO: 2897 - DNA, 2643 bp, Artificial Sequence
  Synthetic Construct, AT-54 intein modified protein encoding nucleic acids
atgcaaacaagcattactctgacatccaacgcatccggtacgtttgacggttactattacgaactctggaaggatactggcaatacaacaatgacggtctacactcaaggtcgcttttcctgccagtggtcgaacatcaataacgcgttgtttaggaccgggaagaaatacaaccagaattggcagtctcttggcacaatccggatcacgtactctgcgacttacaacccaaacgggaactcctacttgtgtatctatggctggtctaccaacccattggtcgagttctacatcgttgagtcctgggggaactggagaccgcctggtgcctgcctgacgggggacgctaagattactctgcctgacgagcgggagatcaagattgaggatttcattaagatgttcgaggagcgcaagctgaagcacgtcctcaacaggaatggggaggacctggtgctcgctggcgtcaagttcaactccaagatcgttaatcacaaggtgtacaggctggtcctggagagcgggagggagatcgaggctaccggcgaccataagttcctgacgagggatggctggaaggaggtgtacgagctcaaggaggacgatgaggttctggtgtacccggctctggagggcgttgggttcgaggtggacgagcgcaggatcattggcctgaacgagttctacgagttcctcacaaattacgagatcaagctggggtacaagccactcggcaaggcgaagtcatacaaggagctgattactcgcgacaaggagaagatcctctctagggtcctggagctctccgataagtactccaagagcgagatccggcgcaagattgaggaggagttcggcatcaagatttctctgaccacgatcaagaacctcattaatgggaagatcgacggcttcgccctgaagtatgtgcgcaagatcaaggagctcggctgggatgagatcacctacgacgatgagaaggctgggatcttcgccaggctcctgggcttcatcattggcgacgggcacctgtcgaagtctaaggagggccggatcctgattacagctactattaacgagctggaggggatcaagaaggatctggagaagctcggcatcaaggcctcgaacatcattgagaaggacattgagcataagctcgatgggagggagatcaagggcaagacctctttcatctacattaacaataaggccttctacctcctgctcaacttctggggggtcgagattggcaataagacgatcaacgggtacaatattccaaagtggatcaagtacggcaacaagttcgttaagagggagttcctgaggggcctcttcggggctgacggcacaaagccttacatcaagaagtacaacatcaatgggattaagctgggcattcgggtggagaacatctccaaggataagactctggagttcttcgaggaggtcaagaagatgctggaggagttcgaggtcgagagctacattaaggtttcgaagatcgacaacaagaatctgaccgagctcatcgtcaaggccaacaataagaactacctgaagtacctctcaaggatctcctacgcgtacgagaaggacaatttcgctaggctggtgggcgagtacctccggatcaaggaggcgtacaaggacatcattctgaaggagatcgccgagaacgcgctcaaggaggccgatggcgagaagagcctgagggagctcgctaggaagtacaacgtcccggttgacttcatcattaatcagctgaaggggaaggatatcggcctcccccgcaacttcatgacgttcgaggagttcctcaaggagaaggtggtcgacggcaagtatgtgtccgagcggatcattaagaaggagtgcatcggctaccgcgatgtgtacgacattacttgccacaaggatccttctttcattgctaacggcttcgtctctcataacacgtccctgggccaagtgacaatcgatggcgggacctacgacatctataggacgacacgcgtcaaccagccttccattgtggggacagccacgttcgatcagtactggagcgtgcgcacctctaagcggacttcaggaacagtgaccgtgaccgatcacttccgcgcctgggcgaaccggggcctgaacctcggcacaatagaccaaattacattgtgcgtggagggttaccaaagctctggatcagccaacatcacccagaacaccttctctcagggctcttcttccggcagttcgggtggctcatccggctccacaacgactactcgcatcgagtgtgagaacatgtccttgtccggaccctacgttagcaggatcaccaatccctttaatggtattgcgctgtacgccaacggagacacagcccgcgctaccgttaacttccccgcaagtcgcaactacaatttccgcctgcggggttgcggcaacaacaataatcttgcccgtgtggacctgaggatcgacggacggaccgtcgggaccttttattaccagggcacatacccctgggaggccccaattgacaatgtttatgtcagtgcggggagtcatacagtcgaaatcactgttactgcggataacggcacatgggacgtgtatgccgactacctggtgatacagtga

SEQ ID NO: 2898 - DNA, 2496 bp, Artificial Sequence
  Synthetic Construct, AT-55 intein modified protein encoding nucleic acids
atgcaaacaagcattactctgacatccaacgcatccggtacgtttgacggttactattacgaactctggaaggatactggcaatacaacaatgacggtctacactcaaggtcgcttttcctgccagtggtcgaacatcaataacgcgttgtttaggaccgggaagaaatacaaccagaattggcagtctcttggcacaatccggatcacgtactctgcgacttacaacccaaacgggaactcctacttgtgtatctatggctggtctaccaacccattggtcgagttctacatcgttgagtcctgggggaactggagaccgcctggtgcctgcctgacaccggacacatacgtggttctcggggacgggcggattgagactattgaggacatcgtgaatgctaaggagcgcaacgtgctctccctggacctcgataacctcagcatcaagattgacacggcgatcaagttctggaagctgcgctacaacggcaatctgagcaagatcacactctcgaacaattacgagctcaaggctactccggaccactgcctcctggtgctgagggataaccagctcaagtggatccccgccaaggacattaaggagaacgattacatcgcgatgccgttcaattacaaggtcgagcggaagcccatctccctcctgaacctcctgaagtacctggacatcacagatgttctcattgagttcgacgagaactccactatcttcgagaagattgccgagtacatccgcaacaatattaagacctcaacgaagtacaagtacctcaggaaccgcagggtcccgctgaagtacctcatcgagtggaatttcgacctggatgagattgagaaggaggctaagtacatctacaagtccgttgccgggaccaagaagatccccctgttcaagctcgacgagaggttctggtacttcgctggcctggtcctcggcgacgggtcgatccaggattctaagatccggattgcccagaccccactgaaggacgtgaagagcattctcgatgagacgttccctttcctgcacaactggatctcgggcaatcaggtcatcatttctaacccaatcattgccgagatcctggagaagctcggcatgaggaacgggaagctcaatggcatcattttctcactgcctgagtcctacatcaacgccctcattgcggggtacttcgacaccgatggctgcttctcgctcctgtacgacaagaaggcgaagaagcacaacctgcgcatggtcctcacgtcaaagcggcgcgatgttctggagaagatcgggatctacctcaactccatcggcattctgaatacactccataagtctagggaggtgtactcactcatcatttccaacaagagcctggagactttcaaggagaagatcgcgaagtacctgaagattcggaaggaggctttcatcaacggctacaagacatacaagaaggagcatgaggagcgcttcgagtgcgacctcctgccagttaaggaggtgttcaagaagctcaccttcgagaagggccggaaggagatcctgaaggactccaagatccacattgagaactggtacaaggagaagaccaacaatatcccgagggagaagctgaagacggttctccggtacgcgaacaatagcgagcataaggagttcctggagaagatcgtgaacggggacatttcgttcgtgcgcgtcaagaaggtggagaatatcccgtacgatggctacgtctacgatctctctatcaagcataatcagaacttcatctctaatggggtcatttcacacaacacgtccctgggccaagtgacaatcgatggcgggacctacgacatctataggacgacacgcgtcaaccagccttccattgtggggacagccacgttcgatcagtactggagcgtgcgcacctctaagcggacttcaggaacagtgaccgtgaccgatcacttccgcgcctgggcgaaccggggcctgaacctcggcacaatagaccaaattacattgtgcgtggagggttaccaaagctctggatcagccaacatcacccagaacaccttctctcagggctcttcttccggcagttcgggtggctcatccggctccacaacgactactcgcatcgagtgtgagaacatgtccttgtccggaccctacgttagcaggatcaccaatccctttaatggtattgcgctgtacgccaacggagacacagcccgcgctaccgttaacttccccgcaagtcgcaactacaatttccgcctgcggggttgcggcaacaacaataatcttgcccgtgtggacctgaggatcgacggacggaccgtcgggaccttttattaccagggcacatacccctgggaggccccaattgacaatgtttatgtcagtgcggggagtcatacagtcgaaatcactgttactgcggataacggcacatgggacgtgtatgccgactacctggtgatacagtga

SEQ ID NO: 2899 - DNA, 2373 bp, Artificial Sequence
  Synthetic Construct, AT-56 intein modified protein encoding nucleic acids
atgcaaacaagcattactctgacatccaacgcatccggtacgtttgacggttactattacgaactctggaaggatactggcaatacaacaatgacggtctacactcaaggtcgcttttcctgccagtggtcgaacatcaataacgcgttgtttaggaccgggaagaaatacaaccagaattggcagtctcttggcacaatccggatcacgtactctgcgacttacaacccaaacgggaactcctacttgtgtatctatggctggtctaccaacccattggtcgagttctacatcgttgagtcctgggggaactggagaccgcctggtgcctcgctggggcgggatgagctgattttcattaaggagggggacaagctgaaggtttgcaagatcggggaggctattgatgagttcatggagaagtacaaggataagatcattgttgatggggacacggagatcctgtacctcgacggcattgctgaggtgtacaccatctccgtgaacgtcaagacggggaaggccgagttcaagagggtctacgcgatcagccgccacaagccgaggggcaaggtctacaaggttatcggcaaggacgggacctctatcattgttacggaggatcactcactcttcaactacgacgagaacggcaatctggtttgcgtgaagccgcgccagatgaagcatatcattaggaacttcaacaatccctacgatgtggagtaccggatcggcgactacattgagacaaattaccagaggactgattccaagtacaacagccggcagaatgacattcccgagaagctcaagatcacaaaggagctgtgccagttcctgggcctcttcgtcgcggaggggtcatacatcactaacggcatctccattaccacgaaggacgatgacatcgctaagttcattgagcggttcgtgaaggagcagatcaacgagaatattgccgtcaagcgctacgaggattcggtgcggttcgtcaacaaggggttctaccgcttcctcaaggagcacatcaatggcaaggcgattaacaagaatagcccggagttcatcctgaagggcgacaaggagatgaagctggctttcctcggcgggctgatctcgggcgatggctacgtgtccaaggacggccgcgtgcagatctacacaacttccgagcagctcctggggcagctccatctcctgctcagcgacctgggcatgatctactcgattacaaagatcaaggaggagggcgagaagatcgagattaagcggaacgagatcgtccgcaattacaagctctacgttatcgagattgccaagaactgcaccgaggacctgaagccctacgtgatccccaagtacaagaaggagaggatcaagccagcgaactacgatcagctcccttacgactaccggatcattaaggagcacctgcgcaagatcaccgataagaagccatacaacgactacgcctggaagtccaacaatcgcaagctgaagctcaacacgctggagaagatcgagcagctcaatccacatctgagggaggagattaacaagttcaagctgaatatccctttcgagattaaggagatcaaggagattgactacaacggctacgtctacgatctctcagtggaggataatgagaacttcatcacagctacaggcatcctctgccacaacacgtccctgggccaagtgacaatcgatggcgggacctacgacatctataggacgacacgcgtcaaccagccttccattgtggggacagccacgttcgatcagtactggagcgtgcgcacctctaagcggacttcaggaacagtgaccgtgaccgatcacttccgcgcctgggcgaaccggggcctgaacctcggcacaatagaccaaattacattgtgcgtggagggttaccaaagctctggatcagccaacatcacccagaacaccttctctcagggctcttcttccggcagttcgggtggctcatccggctccacaacgactactcgcatcgagtgtgagaacatgtccttgtccggaccctacgttagcaggatcaccaatccctttaatggtattgcgctgtacgccaacggagacacagcccgcgctaccgttaacttccccgcaagtcgcaactacaatttccgcctgcggggttgcggcaacaacaataatcttgcccgtgtggacctgaggatcgacggacggaccgtcgggaccttttattaccagggcacatacccctgggaggccccaattgacaatgtttatgtcagtgcggggagtcatacagtcgaaatcactgttactgcggataacggcacatgggacgtgtatgccgactacctggtgatacagtga

SEQ ID NO: 2900 - DNA, 2613 bp, Artificial Sequence
  Synthetic Construct, AT-57 intein modified protein encoding nucleic acids
atgcaaacaagcattactctgacatccaacgcatccggtacgtttgacggttactattacgaactctggaaggatactggcaatacaacaatgacggtctacactcaaggtcgcttttcctgccagtggtcgaacatcaataacgcgttgtttaggaccgggaagaaatacaaccagaattggcagtctcttggcacaatccggatcacgtactctgcgacttacaacccaaacgggaactcctacttgtgtatctatggctggtctaccaacccattggtcgagttctacatcgttgagtcctgggggaactggagaccgcctggtgcctcgctcccttacgatgagaagatcctcattttcgagaataacgagtacaagctggtcaagatcggggagttcgtggagaagtacctcaaccgctacaaggacagggccatcacctacggcgataacaatatcgaggtgtacattaaggacgagaatatctacgccccatcgttcgacaaggatggcaagatcgtcctgaagcctatcacgcacgcgattcggcatcgcgggaaggagatctacgagattgagctggagtcgggcaagaaggttagggtgaccggggaccactctgtgttcacgatcaacgacaatctggatgtggtcgaggtcaaggctagcgacctcaaggttggcgatttcatcattacaccgaagatcattccctcaatctccaaggacaagatctacctctcggagatcgtcaagaacaaggacaagtactacgttaagatcaaggatcacatcaagttcattgaggagcatgaggagatcctcaaggagtcctacaaggagtacaagactaagtggaaggacctgaagccggttctcaagaagaagaacgcgttccggctcgatctgatcgaggacctggtcgataaggagaagatcgagaagatttcttacggccacgctaactacatcaacaataagattaagctcgacgagaagttcggctacctgatcggggccttcctctcagagggccattggaacgacaagtgcgtggagatttccagcaccaacaaggagttcatcgagaatctggtcgagatcattgaggagattctcggcaaggacgcgtactacatcacagtgaagggggacaagcgcaggtacaaggacctctacgtgatcggcctcaacaagactgtcgctatgatcttcgagtccctcgggctgaacaagctgtcgtctaataaggagatcccgagcattctcctgtcgaatgagacgttcctgaagggcctcatcaaggggtacattgacggcgatgggtcaatctacgtcgacgagtctaagcgggattactcaatccgcctgtacaccacgtccgagacactccgcgacactctctgcctggcgctcaagatcctgggcattaactaccggctctccatcgacaagaagagcaaggttaacgagaattggcgcgattgctacgtgatcaagattaccggcaaggagaacattgagaagctcctggacgtcgagatcaagaacaatggcgggaaggatgttatcccgaagattgccgagaagttcaaggagatcattaaccagtactcccagagggagtggaaggagcggttcggcattgacgtgaacaatctgcatatctgggaggatctcaagaagggctacatgagcaggtaccgggcgaagaaggttctcaacattatgaagaatgtgaaggagatcgaggagaagtacggcaggctcctggacaagatcgggcagctgattgacaacgatctcctgttcgagcgcatcaagagcattagggtgctcgacgagatccccgagtatgtgtacgatatttccgtggagggcacagagaacttcattgggggggagggcttcatttgcctgcataatacgtccctgggccaagtgacaatcgatggcgggacctacgacatctataggacgacacgcgtcaaccagccttccattgtggggacagccacgttcgatcagtactggagcgtgcgcacctctaagcggacttcaggaacagtgaccgtgaccgatcacttccgcgcctgggcgaaccggggcctgaacctcggcacaatagaccaaattacattgtgcgtggagggttaccaaagctctggatcagccaacatcacccagaacaccttctctcagggctcttcttccggcagttcgggtggctcatccggctccacaacgactactcgcatcgagtgtgagaacatgtccttgtccggaccctacgttagcaggatcaccaatccctttaatggtattgcgctgtacgccaacggagacacagcccgcgctaccgttaacttccccgcaagtcgcaactacaatttccgcctgcggggttgcggcaacaacaataatcttgcccgtgtggacctgaggatcgacggacggaccgtcgggaccttttattaccagggcacatacccctgggaggccccaattgacaatgtttatgtcagtgcggggagtcatacagtcgaaatcactgttactgcggataacggcacatgggacgtgtatgccgactacctggtgatacagtga

SEQ ID NO: 2901 - DNA, 2370 bp, Artificial Sequence
  Synthetic Construct, AT-58 intein modified protein encoding nucleic acids
atgcaaacaagcattactctgacatccaacgcatccggtacgtttgacggttactattacgaactctggaaggatactggcaatacaacaatgacggtctacactcaaggtcgcttttcctgccagtggtcgaacatcaataacgcgttgtttaggaccgggaagaaatacaaccagaattggcagtctcttggcacaatccggatcacgtactctgcgacttacaacccaaacgggaactcctacttgtgtatctatggctggtctaccaacccattggtcgagttctacatcgttgagtcctgggggaactggagaccgcctggtgcctgcgtggacggggatactacagtgctgctggacggcaagctcatcaagatcaaggatctggaggacaagtggaaggacgtgaaggtcctcacatcggacgatctgaacccgaagctcacttccctgagcaagtactggaagctcaatgctgacgagtacgggaagaagatctacaagattaagaccgagctgggccgggagatcattgcgacggaggatcaccccttctacaccacgaacggccgcaagaggtgcggggagctcaaagtgggcgacgaggtcatcatctacccgaacgatttccccatgttcgaggacgataatagggttattgtggacgaggagaagatcaagaaggtcatcaacaacattggcgggacctacaagaacaagatcattaatgagctgaaggacaggaagctcatcccgctgacgtacaacgatcagaaggctagcattctcgcccggatcgttggccacgtgatgggcgacgggtctctcatcatcaacaacaagaactcccgcgtggtcttccgcggcgacattgaggatctcaagaccatcaaggaggacctcaaggagctgggctacgatggggaggagatcaagctgcatgagggggagaccgagatcacggactacaacggcaagaagcgcatcattaagggcaaggggtacagcttcgaggtgaggaagaagtcgctctgcatcctcctgaaggctctgggctgcgtcggcggggacaagacaaagaagatgtacggcattccaaactggatcaagactgcgcctaagtacatcaagaaggagttcctctcggcttacttcggctctgagctgacaactccgaagatccgcaaccacggcacctcattcaaggagctctccttcaagatcgcgaagattgaggagatcttcgacgaggataggttcattaaggacatcaaggagatgctcaaggagttcggcatcgagctgaaggtcagggttgaggaggggaacctccggaaggatggctacaagacaaaggtctacgtggcctccatctacaaccataaggagttcttcggccggatcgggtacacctacgcgaataagaaggagacgctggcccgctacgcgtacgagtacctcctgacgaaggagaagtacctcaaggaccgcaacatcaagaagctggagaacaatacaaagttcattactttcgataagttcatcaaggagaagtgcctgaagaatggcttcgttaaggagaagattgtcagcatcgaggagaccaaggtcgactacgtttacgatattactactatttcagagactcataacttcattgctaatggcttcctcacgggcaacacgtccctgggccaagtgacaatcgatggcgggacctacgacatctataggacgacacgcgtcaaccagccttccattgtggggacagccacgttcgatcagtactggagcgtgcgcacctctaagcggacttcaggaacagtgaccgtgaccgatcacttccgcgcctgggcgaaccggggcctgaacctcggcacaatagaccaaattacattgtgcgtggagggttaccaaagctctggatcagccaacatcacccagaacaccttctctcagggctcttcttccggcagttcgggtggctcatccggctccacaacgactactcgcatcgagtgtgagaacatgtccttgtccggaccctacgttagcaggatcaccaatccctttaatggtattgcgctgtacgccaacggagacacagcccgcgctaccgttaacttccccgcaagtcgcaactacaatttccgcctgcggggttgcggcaacaacaataatcttgcccgtgtggacctgaggatcgacggacggaccgtcgggaccttttattaccagggcacatacccctgggaggccccaattgacaatgtttatgtcagtgcggggagtcatacagtcgaaatcactgttactgcggataacggcacatgggacgtgtatgccgactacctggtgatacagtga

SEQ ID NO: 2902 - DNA, 2427 bp, Artificial Sequence
  Synthetic Construct, AT-59 intein modified protein encoding nucleic acids
atgcaaacaagcattactctgacatccaacgcatccggtacgtttgacggttactattacgaactctggaaggatactggcaatacaacaatgacggtctacactcaaggtcgcttttcctgccagtggtcgaacatcaataacgcgttgtttaggaccgggaagaaatacaaccagaattggcagtctcttggcacaatccggatcacgtactctgcgacttacaacccaaacgggaactcctacttgtgtatctatggctggtctaccaacccattggtcgagttctacatcgttgagtcctgggggaactggagaccgcctggtgcctcgctgccatacgaggagaagattattattaaggagggggagttcattaagccagtggagatcgggaagctcgtggatgagatgattgagcgcttcggcttcgagaagatcgggaactctgaggtctgcgacctcccgatcgatatctacgccctctcactggaccaggatgagaaggtgcactggaagcggatcatttcgtgcatccgccacaagcataatggcaagctgatcaagattaagaccaagagcgggagggagattaccgcgacgccgtaccactcgttcgtcatccggaaggataacaagatcattcccgttaagggctccgagctcaagatcggggacaggattccggtggtcaagcatatccccgcgaattgcgttgaggctatcaacatttccgactacgtgagcggcaattacgttgtggataacatcaacaataagattgccccaaagatcaacggcaagtccattcctaacaatatcaagctcgactacgatttcggctacttcatcgggatctacctcgcggagggcagcgtcaccaagtacttcgttagcatctcgaatgtggacgagctcattctgaacaagatccgggccttcgcggacaagctcggcctgaactacggggagtacgataacaataacggcttcgcggagtcgcatgacatccgcatctactcctccaccctcgctgagttcctgtctaatttcggcacctcgtctaacacgaagaagatcgccgagttcgtgttcggggcgaacaaggagttcgtccggggcctcatcagggggtacttcgacggcgatgggaatgtcaacgccgacaggaaggtcattcgggttacatctaactcaaaggagctcatcgacggcatcgctattctcctggcccgcttcaatatcttcagcattaagacaaagactaagaaccagttcgtgctgatcattccccaccgctacgcgaagaagttccatgaggagatcaatttctcggtcgagaagaagaagtccgagctggagaggctggtgtcatccctgaacgacgataagacatacgactcaatcgatatgattccatccatcggcgatgctctcactaagctgggggagaaggtcgactaccctaaggttatcctcaagaagttcgagcggaagcagaagatcggcagggctaccctccagaggcacctgcgcaggatcgaggagctggctgtgaagaagggcgtcaacatcctcgccctgaaggagtactggctcctgaagaaggccgttgagtccgacgtgatctgggatgagattgtcaagatcgaggagattagctgcgacaagaagtatgtgtacgatatttctgtggaggggctggagactttcactactttcgatggggttctcactcataatacgtccctgggccaagtgacaatcgatggcgggacctacgacatctataggacgacacgcgtcaaccagccttccattgtggggacagccacgttcgatcagtactggagcgtgcgcacctctaagcggacttcaggaacagtgaccgtgaccgatcacttccgcgcctgggcgaaccggggcctgaacctcggcacaatagaccaaattacattgtgcgtggagggttaccaaagctctggatcagccaacatcacccagaacaccttctctcagggctcttcttccggcagttcgggtggctcatccggctccacaacgactactcgcatcgagtgtgagaacatgtccttgtccggaccctacgttagcaggatcaccaatccctttaatggtattgcgctgtacgccaacggagacacagcccgcgctaccgttaacttccccgcaagtcgcaactacaatttccgcctgcggggttgcggcaacaacaataatcttgcccgtgtggacctgaggatcgacggacggaccgtcgggaccttttattaccagggcacatacccctgggaggccccaattgacaatgtttatgtcagtgcggggagtcatacagtcgaaatcactgttactgcggataacggcacatgggacgtgtatgccgactacctggtgatacagtga

SEQ ID NO: 2903 - DNA, 2478 bp, Artificial Sequence
  Synthetic Construct, AT-60 intein modified protein encoding nucleic acids
atgcaaacaagcattactctgacatccaacgcatccggtacgtttgacggttactattacgaactctggaaggatactggcaatacaacaatgacggtctacactcaaggtcgcttttcctgccagtggtcgaacatcaataacgcgttgtttaggaccgggaagaaatacaaccagaattggcagtctcttggcacaatccggatcacgtactctgcgacttacaacccaaacgggaactcctacttgtgtatctatggctggtctaccaacccattggtcgagttctacatcgttgagtcctgggggaactggagaccgcctggtgcctgcctgacatcaaattcaaagatcctgacagacgatggctactacattaagctggagaagctcaaggagaagctggacctgcatattaagatctacaacaccgaggagggcgagaagtccagcaatattctgttcgtgtcggagcgctacgcggatgagaagatcattcggatcaagaccgagtcggggagggtcctggagggctctaaggaccacccggtgctgacgctcaacggctacgtgcccatgggcatgctcaaggagggggacgatgtgatcgtctacccatacgagggcgtggagtacgaggagccttccgacgagatcattctcgatgaggacgatttcgcggagtacgacaagcagatcattaagtacctgaaggataggggcctcctgccgctccggatggacaacaagaatatcggcatcattgctaggctcctggggttcgccttcggcgatgggagcatcgtgaaggagaacggcgacagggagaggctctacgtggccttctacgggaagagggagaccctcatcaagattcgggaggacctggagaagctcggcatcaaggccagccgcatctactcccgcaagcgcgaggtcgagatcaggaacgcgtacggcgacgagtacacatccctgtgcgaggataattctatcaagattacttcaaaggccttcgcgctgttcatgcataagctcgggatgcccatcggcaagaagacggagcagatctacaagattccagagtggatcaagaaggcccctaagtgggttaagcggaacttcctggctggcctcttcggggctgacggctctcgcgcggtcttcaagaactacaccccgctgcccatcaatctcacgatgtcgaagtctgaggagctcaaggagaacatcctggagttcctcaatgagattaagctcctgctcgctgagttcgatatcgagtcaatgatctacgagattaagtccctggacggccgcgttagctacaggctcgccatcgtgggcgaggagtcaattaagaacttcctggggcgcatcaattacgagtactccggcgagaagaaggtcatcgggctgctcgcgtacgagtacctccgcaggaaggacatcgctaaggagattcgcaagaagtgcatcaagagggcgaaggagctgtacaagaagggcgttacagtgagcgagatgctcaagatggatgagttcaggaacgagttcatctcgaagcggctgattgagcgcgctgtctacgagaatctcgacgaggacgatgttcggatctccactaagttcccgaagttcgaggagttcatcgagaagtacggcgtcattggcgggttcgttatcgataagattaaggagatcgaggagatttcatacgactccaagctgtacgacgtgggcatcgtttcaaaggagcataacttcattgctaacagcatcgtggttcataatacgtccctgggccaagtgacaatcgatggcgggacctacgacatctataggacgacacgcgtcaaccagccttccattgtggggacagccacgttcgatcagtactggagcgtgcgcacctctaagcggacttcaggaacagtgaccgtgaccgatcacttccgcgcctgggcgaaccggggcctgaacctcggcacaatagaccaaattacattgtgcgtggagggttaccaaagctctggatcagccaacatcacccagaacaccttctctcagggctcttcttccggcagttcgggtggctcatccggctccacaacgactactcgcatcgagtgtgagaacatgtccttgtccggaccctacgttagcaggatcaccaatccctttaatggtattgcgctgtacgccaacggagacacagcccgcgctaccgttaacttccccgcaagtcgcaactacaatttccgcctgcggggttgcggcaacaacaataatcttgcccgtgtggacctgaggatcgacggacggaccgtcgggaccttttattaccagggcacatacccctgggaggccccaattgacaatgtttatgtcagtgcggggagtcatacagtcgaaatcactgttactgcggataacggcacatgggacgtgtatgccgactacctggtgatacagtga

SEQ ID NO: 2904 - DNA, 2019 bp, Artificial Sequence
  Synthetic Construct, AT-61 intein modified protein encoding nucleic acids
atgcaaacaagcattactctgacatccaacgcatccggtacgtttgacggttactattacgaactctggaaggatactggcaatacaacaatgacggtctacactcaaggtcgcttttcctgccagtggtcgaacatcaataacgcgttgtttaggaccgggaagaaatacaaccagaattggcagtctcttggcacaatccggatcacgtactctgcgacttacaacccaaacgggaactcctacttgtgtatctatggctggtctaccaacccattggtcgagttctacatcgttgagtcctgggggaactggagaccgcctggtgcctcggtggactacaatgagcctattattattaaggagaatggggagattaaggtcgtgaagatcggggagctgattgacaagattattgagaactccgagaatatccgcagggagggcatcctggagattgccaagtgcaaggggatcgaggttattgcgttcaactcgaattacaagttcaagttcatgccagtttcggaggtgtctaggcaccctgtgtctgagatgttcgagatcgtggtcgagggcaacaagaaggtcagggttacacggtcccatagcgtcttcactatccgggacaatgaggttgtgccgatccgcgtggacgagctgaaggtcggggatatcctggttctcgcgaaggagctccccaacatcgaggaggacatcgagattgataagaagttctcaaagatcctgggctacatcattgctgaggggtactacgacgataagaagatcgtgctctcttacgactacaacgagaaggagttcatcaatgagaccattgattacttcaagtcactgaactccgacatcacgatctacagcaaggatctcaatatccagattgaggtgaagaacaagaagatcattaatctcctgaagaagctgcgcgtcaagaacaagaggatcccgagcatcattttcaagtcgccctacgagatcaagaagtctttcatcgacggcattttcaacgggaaggatgctaaggtgttcgtctcaaaggagctcgccgaggacgtgatcttcctcctgctccagattaaggagaacgccacaatcaataagaagtcgatcaacgatattgaggtctacgaggttcggcgcatcaccaacatctacacgaatcggaagctggagaagctcatcaactccgacttcattttcctcaagatcaaggagattaataaggtcgagccgacgagcggctacgcgtacgacctcactgttccaaatgcggagaatttcgttgctggcttcgggggcttcgtgctccacaatacgtccctgggccaagtgacaatcgatggcgggacctacgacatctataggacgacacgcgtcaaccagccttccattgtggggacagccacgttcgatcagtactggagcgtgcgcacctctaagcggacttcaggaacagtgaccgtgaccgatcacttccgcgcctgggcgaaccggggcctgaacctcggcacaatagaccaaattacattgtgcgtggagggttaccaaagctctggatcagccaacatcacccagaacaccttctctcagggctcttcttccggcagttcgggtggctcatccggctccacaacgactactcgcatcgagtgtgagaacatgtccttgtccggaccctacgttagcaggatcaccaatccctttaatggtattgcgctgtacgccaacggagacacagcccgcgctaccgttaacttccccgcaagtcgcaactacaatttccgcctgcggggttgcggcaacaacaataatcttgcccgtgtggacctgaggatcgacggacggaccgtcgggaccttttattaccagggcacatacccctgggaggccccaattgacaatgtttatgtcagtgcggggagtcatacagtcgaaatcactgttactgcggataacggcacatgggacgtgtatgccgactacctggtgatacagtga

SEQ ID NO: 2905 - DNA, 2376 bp, Artificial Sequence
  Synthetic Construct, AT-62 intein modified protein encoding nucleic acids
atgcaaacaagcattactctgacatccaacgcatccggtacgtttgacggttactattacgaactctggaaggatactggcaatacaacaatgacggtctacactcaaggtcgcttttcctgccagtggtcgaacatcaataacgcgttgtttaggaccgggaagaaatacaaccagaattggcagtctcttggcacaatccggatcacgtactctgcgacttacaacccaaacgggaactcctacttgtgtatctatggctggtctaccaacccattggtcgagttctacatcgttgagtcctgggggaactggagaccgcctggtgcctgcttccatccggatgaggttctcttcattgatcgggggcgggggctggagtgcattactttcaaggagctgttcgagctggaggacaaggacaacgtgaagatcctctccttcgatggcgagaagctcagcctgaagaagctcaagctggcctccaagcgctactacaatgacgatctcatcaccctgcggttcaacctcggccgcgagatcaagattacgaaggaccacccagtggtcattctggaggatggcgagctcaagatcaagctgacatctgacgtgaaggagggggataaggtcatcctgccctacggcaacttcggggaggagagggagatcgagattgacatcctggaggagctgagcaagacagatctcattgagaaagtgtggatccacaacaaggacctggcgactaatgagttcaacatcattaagccatacctctcgaataagtaccctcatgacgtcaagaggaacggcaccatccgggctaaggacattctcccgatcaaggagattctggataagtacgggtccaagaaccggctgttcacggcgaagtcgaagtctaccacgatcccctacaagattaagatcgacaaggatttcgctcggctcattggctactacctgagcgaggggtggatctcgaaggactacggccgcaacggggttgtgcgcaagaggattggcctctgcttcgggatccacgaggaggagtacattaacgacgttaagaatatcctcaacaagctgggcatcaagtacattgagaagatcaaggatgggtcacattccattctcatctccagcaagatcctggcttacgtcttcgagaatattctgaactgcggcatcaactgctacaataagaacatcccgccccagatgttcaatgccaaggaggagatcaagtgggagttcctcaagggcctgttccgcggggacggcgggatcgtcaggctcaacaataacaagaatctgaacatcgagttcgccaccgtttctaagaagatggcgcactcactcctgattctcctgcagctcctgggcatcgtcgcttcggttaagaagtgctacaataacaagtctacaactatggcctacatcattaggattaacggcctggagcaggtcaagaagatcggcgagctgttcgggaagaagtgggagaattacaaggacattgccgagtcatacaagcggaacatcgagccgctcggctacaagaagtccgataatttcgcgatcctggaggttaaggagatcattaaggagcattactccggctacgtgtactcagtggagacagagaactcactgctcattacaagctacggcatcctcattcacaacacgtccctgggccaagtgacaatcgatggcgggacctacgacatctataggacgacacgcgtcaaccagccttccattgtggggacagccacgttcgatcagtactggagcgtgcgcacctctaagcggacttcaggaacagtgaccgtgaccgatcacttccgcgcctgggcgaaccggggcctgaacctcggcacaatagaccaaattacattgtgcgtggagggttaccaaagctctggatcagccaacatcacccagaacaccttctctcagggctcttcttccggcagttcgggtggctcatccggctccacaacgactactcgcatcgagtgtgagaacatgtccttgtccggaccctacgttagcaggatcaccaatccctttaatggtattgcgctgtacgccaacggagacacagcccgcgctaccgttaacttccccgcaagtcgcaactacaatttccgcctgcggggttgcggcaacaacaataatcttgcccgtgtggacctgaggatcgacggacggaccgtcgggaccttttattaccagggcacatacccctgggaggccccaattgacaatgtttatgtcagtgcggggagtcatacagtcgaaatcactgttactgcggataacggcacatgggacgtgtatgccgactacctggtgatacagtga

SEQ ID NO: 2906 - DNA, 2196 bp, Artificial Sequence
  Synthetic Construct, AT-63 intein modified protein encoding nucleic acids
atgcaaacaagcattactctgacatccaacgcatccggtacgtttgacggttactattacgaactctggaaggatactggcaatacaacaatgacggtctacactcaaggtcgcttttcctgccagtggtcgaacatcaataacgcgttgtttaggaccgggaagaaatacaaccagaattggcagtctcttggcacaatccggatcacgtactctgcgacttacaacccaaacgggaactcctacttgtgtatctatggctggtctaccaacccattggtcgagttctacatcgttgagtcctgggggaactggagaccgcctggtgcctctattccgggggatgaggtcgtttgggccaaggtggacggggaggccaagctcattcctattgaggatctctacgagctctggaaggagggcagggatgttgaggtggctgctctcacggaggagggggtggtctggtccagcgtcgacagggttgctaggcacaggaggcggacaggcctggtgaagatcattacaaggactgggcgggaggtcatcgttacagaggaccattccgtgttcactgtccgggacggcaagattgtggatgtcccaacctcagagctctccgagggcgattggatcgtcctcccagctaggctgccagctggcgactcagatgagattgacgggatcaagattgacgaggatctcgcgttcctcctgggcctctacgtggctgaggggtccctgaccaaccagaaggacgctgtcaggatccacaataaggatcctgaggtcatcgaggagattgaccgcatcgttagggagaagggctgggaggggcggtactacgagagcgaccattcgtactggatcaagagccggaagctccgccagctgtgcgagaagctcggcactaaggccagggagaagaggctcgggccactcctgtcgctgaagcctgagctcctggctgctgctctgaggggctactacacgggcgacgggtcgttctctgtgaagccgcacggccgctctgccatcattgaggcgaccacggtctcaaagaggctcgctgatgagctcctggtggccctccagattctggacatcgtcgcgcgccgctacgagtgcgacgataccaagggctcgacgcggtaccgcgtgatgattaccaagtctgagtacatccgcacgttcgttgagaaagtgggcttcgcccagtccgagaagaacgagaggatccggaagttcctcgcggagaggaagtggacacgcggcaggtccgatattccgactgagctgatcgggagcccctacacctacgttgaggtggagtacatctctgacagggtggctgctgatggcgggctcatgaaggccgagctggagcatctgtacttcgacaagattaaggagatcgttcccctggatcgcgacgatgagtatgtgtacgacgtcgtggaggttaagctcgggcataatttcgttggggggcagggggttctgctccacaacacgtccctgggccaagtgacaatcgatggcgggacctacgacatctataggacgacacgcgtcaaccagccttccattgtggggacagccacgttcgatcagtactggagcgtgcgcacctctaagcggacttcaggaacagtgaccgtgaccgatcacttccgcgcctgggcgaaccggggcctgaacctcggcacaatagaccaaattacattgtgcgtggagggttaccaaagctctggatcagccaacatcacccagaacaccttctctcagggctcttcttccggcagttcgggtggctcatccggctccacaacgactactcgcatcgagtgtgagaacatgtccttgtccggaccctacgttagcaggatcaccaatccctttaatggtattgcgctgtacgccaacggagacacagcccgcgctaccgttaacttccccgcaagtcgcaactacaatttccgcctgcggggttgcggcaacaacaataatcttgcccgtgtggacctgaggatcgacggacggaccgtcgggaccttttattaccagggcacatacccctgggaggccccaattgacaatgtttatgtcagtgcggggagtcatacagtcgaaatcactgttactgcggataacggcacatgggacgtgtatgccgactacctggtgatacagtga

SEQ ID NO: 2907 - DNA, 2580 bp, Artificial Sequence
  Synthetic Construct, AT-64 intein modified protein encoding nucleic acids
atgcaaacaagcattactctgacatccaacgcatccggtacgtttgacggttactattacgaactctggaaggatactggcaatacaacaatgacggtctacactcaaggtcgcttttcctgccagtggtcgaacatcaataacgcgttgtttaggaccgggaagaaatacaaccagaattggcagtctcttggcacaatccggatcacgtactctgcgacttacaacccaaacgggaactcctacttgtgtatctatggctggtctaccaacccattggtcgagttctacatcgttgagtcctgggggaactggagaccgcctggtgcctgcgtggcgccggagacaaagatctgcctcgctgacgggcggttcgttagggccgatgagctgttcgaggagctgaaggagcgggggcgcctggttaagtgcgacgagagcgaggaggtgtacgagctgagggagccagttggggtgtccagcctcgacaaggatgcggtggagatcgtcgagggcaagattacgcacgtgtggcgcctcaaggccgacaagctggtcgaggttgaggtgaagaacggcaggtcgatccggaccacgccagagcataagttcctggtcctcgatccttctggcgagatcgttgagaagagggccgatgagctggagatcggggactacattgtgtgcacccagaagctcgtccacgagggcatgtcggaggaggagctcaagagggaggtgttccgcaggctgggcagggacttcttcgtccatctcccggaggaggaggccgagagcgttctggagctcgcgaaggagcggggcatcaaggctctctgggagacgctggaggtggacattgaggagaactcgttctactaccagctcaggaaggggcgcatcagggccgatattctcgtcgacctggctgaggagctgggcctcgacctggctgatctgtacgacgccgtcgaggtttcatacaggtccaataccaagtccacgaagccaatcaggctcccagagccagaggacctcttctacctggcgggcctcatgttcggcgatgggtgctggaaccagctgaccaatggctccgaggccatccagggggaggtgaagcgcattgcgagcgacatgggcctggaggtgcgcgtgcgccgctacgaggggaagacagcccggatcgacttcccagagactgtgcctcgcattctggaggctctcttcgattacccaaggcggaagaaggcccaccggatccgcgtcaacgatttcctcacaagggcgcctctggactgcatcgctgagttcattcggggctacttcgacgcggatggcacagttgaggaggggcggagcgctgtttcggtgacttcggtctctcgcgagttcctggaggatctccagctcctgctccagaagttcgacgtggcttcttacctgagggagggcgatggggcttacaccctctacgtgtccggcgctaggtcactggagaggttcccagggttcagggagccagagaaggctgagaagctgaagaagctcatggagaaggcctcgtcttcagagctggagaaggtcccgatctccggcgagattctcagggaggtcaggggggacgttcccacaactcgcatgttcaactgctactcaaattacgagggcgggcaagtgggcctcaccaagtccagcctggagaaggtcatctccacgctggaggctgtcggcgttgagggggaggctctggagaggctcaaggctctggcgcgggacgatgtgtgcttcctggaggtggtccgcgttgaggaggtggagtacgacggctacgtctacgacttcacagtggaggagcatcataacttcgctgcggagggcttcgtggttcataatacgtccctgggccaagtgacaatcgatggcgggacctacgacatctataggacgacacgcgtcaaccagccttccattgtggggacagccacgttcgatcagtactggagcgtgcgcacctctaagcggacttcaggaacagtgaccgtgaccgatcacttccgcgcctgggcgaaccggggcctgaacctcggcacaatagaccaaattacattgtgcgtggagggttaccaaagctctggatcagccaacatcacccagaacaccttctctcagggctcttcttccggcagttcgggtggctcatccggctccacaacgactactcgcatcgagtgtgagaacatgtccttgtccggaccctacgttagcaggatcaccaatccctttaatggtattgcgctgtacgccaacggagacacagcccgcgctaccgttaacttccccgcaagtcgcaactacaatttccgcctgcggggttgcggcaacaacaataatcttgcccgtgtggacctgaggatcgacggacggaccgtcgggaccttttattaccagggcacatacccctgggaggccccaattgacaatgtttatgtcagtgcggggagtcatacagtcgaaatcactgttactgcggataacggcacatgggacgtgtatgccgactacctggtgatacagtga

SEQ ID NO: 2908 - DNA, 1929 bp, Artificial Sequence
  Synthetic Construct, AT-65 intein modified protein encoding nucleic acids
atgcaaacaagcattactctgacatccaacgcatccggtacgtttgacggttactattacgaactctggaaggatactggcaatacaacaatgacggtctacactcaaggtcgcttttcctgccagtggtcgaacatcaataacgcgttgtttaggaccgggaagaaatacaaccagaattggcagtctcttggcacaatccggatcacgtactctgcgacttacaacccaaacgggaactcctacttgtgtatctatggctggtctaccaacccattggtcgagttctacatcgttgagtcctgggggaactggagaccgcctggtgcctcggtttcggctgatactcctattctcgttaggcgggggggggaggttctgcgggttactttcgaggatctggactcatggtacttcggcgacaggggcggggagtatgtggacgtgtctgacctggaggtcctgaccgttgaccggaacttccgcgtcacgtgggctcgcgttagcaagctgatccggcaccgcgccaggaagattctcagggtgcatctggaggacggcacaatcgagctcactgggaatcacgccgtcatggttctggatgagggcgggctcagggctgtcaaggcttcggagattgaggagggctcattcctcctgtccttcgtggcggagctggacgagcagccaacagatggcgggaccgtggtcacgtccgtcggctcggggtctcgcgtgagcgacaccacgtacgagctgccagtggaggtccgcgttgagctcctgagggagctcgccgacgatggcgtgatcgaggcgagcgaggacgtgtcggtcgatctcgcttggctggcccggatttctggcgtcgagtcacgcgttaccgacgatggggtggagctcgtctgggagacaaggactggcgacctcctgccagctgatccagtgctcaagctggtcgagcggctggagtcggacctggtcgacgacctggagtcttgggtcttcgatggcagggtgtcaaaggaggcggttcggaaggtgctgtccagcgtggacgctaagaacctcaggggggatgctaggagggcttacaggatgctccggaccctggttcgctccgacgtgcatgcggttaaggtggaggacctggatgtcatggactacgatggctacgtgtacgacgtttctgttccaggcaatgagatgttcttcgccggggaggttccagttctgctgcataatacgtccctgggccaagtgacaatcgatggcgggacctacgacatctataggacgacacgcgtcaaccagccttccattgtggggacagccacgttcgatcagtactggagcgtgcgcacctctaagcggacttcaggaacagtgaccgtgaccgatcacttccgcgcctgggcgaaccggggcctgaacctcggcacaatagaccaaattacattgtgcgtggagggttaccaaagctctggatcagccaacatcacccagaacaccttctctcagggctcttcttccggcagttcgggtggctcatccggctccacaacgactactcgcatcgagtgtgagaacatgtccttgtccggaccctacgttagcaggatcaccaatccctttaatggtattgcgctgtacgccaacggagacacagcccgcgctaccgttaacttccccgcaagtcgcaactacaatttccgcctgcggggttgcggcaacaacaataatcttgcccgtgtggacctgaggatcgacggacggaccgtcgggaccttttattaccagggcacatacccctgggaggccccaattgacaatgtttatgtcagtgcggggagtcatacagtcgaaatcactgttactgcggataacggcacatgggacgtgtatgccgactacctggtgatacagtga

SEQ ID NO: 2909 - DNA, 2460 bp, Artificial Sequence
  Synthetic Construct, AT-66 intein modified protein encoding nucleic acids
atgcaaacaagcattactctgacatccaacgcatccggtacgtttgacggttactattacgaactctggaaggatactggcaatacaacaatgacggtctacactcaaggtcgcttttcctgccagtggtcgaacatcaataacgcgttgtttaggaccgggaagaaatacaaccagaattggcagtctcttggcacaatccggatcacgtactctgcgacttacaacccaaacgggaactcctacttgtgtatctatggctggtctaccaacccattggtcgagttctacatcgttgagtcctgggggaactggagaccgcctggtgcctgcctcgcgccggggacaaagattctcacggagcatggctgctgggttaaggtggaggatctccctaagatgctgaccgatcagaagctgaaggtttacgacgtggatgagggccgcgaggacgattccgagatcaagttcgtcatggagaggggcattgaggaggacgagagggctgtggtcctcgtgaccgagtcaggcctgacgatcgaggggtccgaggatcacccagtcctcacccctgagggctacgttgagctgggggagattgaggagggcgacctcgttgtggtctacccgttcgagggcgtcgagtacgaggagaaggagggcacgatcctcgacgagtccgatttcgaggacgtggatccccaggtcctcaggtacctggaggagagggacctcatcccactgaggtggagcgatccaaaagtggggacgctcgccaggattctgggcttcgcgatgggcgacgggcacctgggcgagcaggctgggcggctcaccctgtctttctacggcgacgagcgcacgctcagggagctgaagcgcgacctggagtcactgggcgtcaaggcgaacctccatgttcgcaagcgccgctacgagatcgagacagctagcggccgctacgagggggaggctacttcggttgagctgcgggtggcgtcgcgctctttcgctctcctgatggagaagctcggcatgccaagggggcggaaggtggagaccccgtacaaggtccccgattggatcaaggaggcgcctctgtgggtgaagaggaacttcctcgctgggctgttcgctgctgacggctcggttgtgaagttcaagcggtacacaccgctccccatcaatctgactcaggccaaggtcgaggagctggaggagaacctgcgggagttcatgaatgacgtggcgaagctcctgcgcgagttcggcattgagaccacgctgtacgaggtcaagagcaagaagaacgtcgtttacaagctggccatcgtgggcgaggagaatattaagcgcttcctcggcaaggtcgggtacgagtacgatccagagaagaaggtggagggcctcgctgcctacgcgtacctcaagctgaaggagcgcgtcaagaaggacaggaaggaggctgctgagacagctgctgaggtgtacgaggagacaggctccatcactaaggcccatgaggctgtcgctgacgtggtcaacaggaggttcgtggagagggttgtgtacgacggcgggatttccagcgtgcgggtcccagaggatttccctaccttcgagcggttcaaggaggagagggttctcgctggcgggttcgtgatcgaggaggtcgttgaggtcaagggcgttgagccggagtacgacaggttctacgatattggggtttgccacggggctcataacttcattgcggatggggtcgtcgttcataatacgtccctgggccaagtgacaatcgatggcgggacctacgacatctataggacgacacgcgtcaaccagccttccattgtggggacagccacgttcgatcagtactggagcgtgcgcacctctaagcggacttcaggaacagtgaccgtgaccgatcacttccgcgcctgggcgaaccggggcctgaacctcggcacaatagaccaaattacattgtgcgtggagggttaccaaagctctggatcagccaacatcacccagaacaccttctctcagggctcttcttccggcagttcgggtggctcatccggctccacaacgactactcgcatcgagtgtgagaacatgtccttgtccggaccctacgttagcaggatcaccaatccctttaatggtattgcgctgtacgccaacggagacacagcccgcgctaccgttaacttccccgcaagtcgcaactacaatttccgcctgcggggttgcggcaacaacaataatcttgcccgtgtggacctgaggatcgacggacggaccgtcgggaccttttattaccagggcacatacccctgggaggccccaattgacaatgtttatgtcagtgcggggagtcatacagtcgaaatcactgttactgcggataacggcacatgggacgtgtatgccgactacctggtgatacagtga

SEQ ID NO: 2910 - DNA, 2565 bp, Artificial Sequence
  Synthetic Construct, AT-67 intein modified protein encoding nucleic acids
atgcaaacaagcattactctgacatccaacgcatccggtacgtttgacggttactattacgaactctggaaggatactggcaatacaacaatgacggtctacactcaaggtcgcttttcctgccagtggtcgaacatcaataacgcgttgtttaggaccgggaagaaatacaaccagaattggcagtctcttggcacaatccggatcacgtactctgcgacttacaacccaaacgggaactcctacttgtgtatctatggctggtctaccaacccattggtcgagttctacatcgttgagtcctgggggaactggagaccgcctggtgcctgcttcgcgcctgggacaagggttattacggcctcgggggacgtggtggagattgatgagatcgtggagcgggctgcggagacggctgtggacggcgggctgagggagggctctacagaggttactgtgggggtcaccaacgtcaggacgctggctgcttgggacggcgatctcacctctaatgacgtggtcgcggtggagaagatcgaggctccgtcacgggccgttcgcgtgaggaccaggtccggcgctgagctggttgtgagcgaggaccacaagttcctcgtggacacggaggatggcccaaggatggtcgaggctagcgagctcaagtcgggggatgagctgtactcggtgcgggagctccgcgtgtctgagaaggtcccaacatacctggagctcctgctggaggccgaggacaagttctacgtgcatcctactgaggagttcgaggaggctgtcgctgagcgctacggctccctggctgaggcttgcagggagaaggagctcccatacagggccagggaggctaaggagcgcaggtactacgagctgagcgagttcgctaggctcgctacggctgttatcgagtcggtggacgaggccacagagtacattgattacgtcactgcgggcgggcggaagcgcgttaagttctccagcccaaggccaggcaaggaggtcatgtatgtggcgggcctgatcgcttcagacgggtccgttgatacagagaggggcttcgtgatgttctcaaacactgagcgggagctgctctccgcgttcgaggagattgtcacagaggagttcggcgttgacgcctcgaagaccgagaaccagaatggggtcacgatgctgagggtcaattcccgggttctcgcgcgcgtgttcgagaggctggctgacccgaagactgtcctcaagatgccccgcgagctcgtggctgcttacctggctggctacgtcgacggcgatgggcacctgaaggatgggaagatcgtgattaccacggctgacagggagagggctggcgatctccagctgctcctgaagaggctgggggtgccaagcgtcctcagggagagggacggcgcttacgatgtcgttgtgacagggcacgacgctgctgagctcgctgaggagctcccactgaggcatcctaagaaggctgaggctgctgcttccatgtcgtctggcaggcgctcatccaggttcgaccgggtgagcaggaggttcgggaggctcctgagggaggtgcgcaggaagtacggcgtcagggcttccgatctggggagctcgtctaccatctctcagattgagtcaggcgagaggagggctacgaggaggctcgctctggagatcgtcgagaggctggaggaggtcgttggcgacgttgaggaggtgcgggagctcagggagctggctgagggcaactacgtgctggatgaggtggtcgaggtcgagacggttgagtacgagcatgagtacctctacgatgttacagtggttccagatcatactctcgtggttgagaatggcatcattacaagcaacacgtccctgggccaagtgacaatcgatggcgggacctacgacatctataggacgacacgcgtcaaccagccttccattgtggggacagccacgttcgatcagtactggagcgtgcgcacctctaagcggacttcaggaacagtgaccgtgaccgatcacttccgcgcctgggcgaaccggggcctgaacctcggcacaatagaccaaattacattgtgcgtggagggttaccaaagctctggatcagccaacatcacccagaacaccttctctcagggctcttcttccggcagttcgggtggctcatccggctccacaacgactactcgcatcgagtgtgagaacatgtccttgtccggaccctacgttagcaggatcaccaatccctttaatggtattgcgctgtacgccaacggagacacagcccgcgctaccgttaacttccccgcaagtcgcaactacaatttccgcctgcggggttgcggcaacaacaataatcttgcccgtgtggacctgaggatcgacggacggaccgtcgggaccttttattaccagggcacatacccctgggaggccccaattgacaatgtttatgtcagtgcggggagtcatacagtcgaaatcactgttactgcggataacggcacatgggacgtgtatgccgactacctggtgatacagtga

SEQ ID NO: 2911 - DNA, 1965 bp, Artificial Sequence
  Synthetic Construct, AT-68 intein modified protein encoding nucleic acids
atgcaaacaagcattactctgacatccaacgcatccggtacgtttgacggttactattacgaactctggaaggatactggcaatacaacaatgacggtctacactcaaggtcgcttttcctgccagtggtcgaacatcaataacgcgttgtttaggaccgggaagaaatacaaccagaattggcagtctcttggcacaatccggatcacgtactctgcgacttacaacccaaacgggaactcctacttgtgtatctatggctggtctaccaacccattggtcgagttctacatcgttgagtcctgggggaactggagaccgcctggtgcctgctcgtggacaaacgctagggcggttacaaggcgggggttcgtgcatgtggatgatctcactactgatgatgaggtcatgtcggtcgacgatcagggcaggacaatctggcagcagattgacgaggtggtccggttcccgttcagcggcacgctctactcgctgggcgggagggagatcaacgctaccattacggccaatcaccgggttgtgggcctcaaccgcgagaagaccaagtgggttgagcatacaccaacttccctgcctggcaacaagatgtgggtgtacaccgctggcgaggggagcaatgaggactacccgctcaccgatacggagatcaggctcgctgtgtggggcctgacagactcgcacaggtctcccgatggccggtggactttctaccagtccggggagaaggcggagcaggtcaggaagctcctggctgacgctggcattgagtacagggagagggctaggaacaggggcatcaccgagattgatgggaaggtcctcaaggcgccgcccaagacgcagtacgagttctcgctcggcaaggttcaggagctggacgatctcctggacagggggaggagcgagctgccaacatggactctctccctgagccagaggcaggctaggctcttcctggaggagtacaggttcaccgacggcacggataccacgtcagctggggactcctacgtcctctacgtttgcaaggatcgcatgagggagcagctccagatgctggctgctgctaacggcctcagggcttccacaactgagtacaggccagggcattggaggctgaacatctctaatagggcgctctcaggcctgtacaagaataccgtggaggaggtcgcttacgagggggaagtgtggtgcctgcgggttccaaatggcaggttcttcattgaggatgggggcaagattcatctcacgggcaacacgtccctgggccaagtgacaatcgatggcgggacctacgacatctataggacgacacgcgtcaaccagccttccattgtggggacagccacgttcgatcagtactggagcgtgcgcacctctaagcggacttcaggaacagtgaccgtgaccgatcacttccgcgcctgggcgaaccggggcctgaacctcggcacaatagaccaaattacattgtgcgtggagggttaccaaagctctggatcagccaacatcacccagaacaccttctctcagggctcttcttccggcagttcgggtggctcatccggctccacaacgactactcgcatcgagtgtgagaacatgtccttgtccggaccctacgttagcaggatcaccaatccctttaatggtattgcgctgtacgccaacggagacacagcccgcgctaccgttaacttccccgcaagtcgcaactacaatttccgcctgcggggttgcggcaacaacaataatcttgcccgtgtggacctgaggatcgacggacggaccgtcgggaccttttattaccagggcacatacccctgggaggccccaattgacaatgtttatgtcagtgcggggagtcatacagtcgaaatcactgttactgcggataacggcacatgggacgtgtatgccgactacctggtgatacagtga

SEQ ID NO: 2912 - DNA, 2007 bp, Artificial Sequence
  Synthetic Construct, AT-69 intein modified protein encoding nucleic acids
atgcaaacaagcattactctgacatccaacgcatccggtacgtttgacggttactattacgaactctggaaggatactggcaatacaacaatgacggtctacactcaaggtcgcttttcctgccagtggtcgaacatcaataacgcgttgtttaggaccgggaagaaatacaaccagaattggcagtctcttggcacaatccggatcacgtactctgcgacttacaacccaaacgggaactcctacttgtgtatctatggctggtctaccaacccattggtcgagttctacatcgttgagtcctgggggaactggagaccgcctggtgcctcgctcgcctgctctactcctattctgactacaaatgggtggtcaactatgggggctctccaggacggggatgaggtctacgcgcctgacggccagcctaccaaggtcatcaaggcccaccccattaacctcaataggccatgcttcaaggtccggttccgcgacggccaggaggtggtcacggatgcggagcatctgtggcaggtgaacgaccggaacaatggcgggagggatcgggtcatgaccacgcaggagatcgctgacgctccatggggcgggcgctacaggttccgggtcccagttaccgagcctctccagacgccagaggctgacctgccagtggatccatggctcctgggcgcttggctcggcgacggggatgcctcgatggtctctatctgctccggcagccaggacctcgattacctgatttctagggtcgagggcctcgggctgtcacacagggttaaccgctacggctcacgcgccgcttccgtctacgtgcatggcatgagggctgtgttctcggagctcgggctcctgaagaataagcacatccccgacaggtacctgaccgcttctgtcgctcagaggaggcagctcctggctggcctgatggacagcgatgggacagtttcggatcgccaagtgactattagcatgaagaacgagaggctcatgaggcaggtgctccagctggtccggtccctgggctacagggctggcttcgggagccgcatggctaggctcaatggcagggactgcgggctggtctacgtggtgcgcttccatacaggctggggggagtcgcccttcgacatgccacgcaagagggatggctgggagcaggcgacaaagacttccgttcagaacctccggctgaatgccatcgttgcggtggagcctgtcgagaccgtcccggttcgctgcattactgttgctcatgagtcttcgctctacgttgctggggaggggttcgttcctacacataatacgtccctgggccaagtgacaatcgatggcgggacctacgacatctataggacgacacgcgtcaaccagccttccattgtggggacagccacgttcgatcagtactggagcgtgcgcacctctaagcggacttcaggaacagtgaccgtgaccgatcacttccgcgcctgggcgaaccggggcctgaacctcggcacaatagaccaaattacattgtgcgtggagggttaccaaagctctggatcagccaacatcacccagaacaccttctctcagggctcttcttccggcagttcgggtggctcatccggctccacaacgactactcgcatcgagtgtgagaacatgtccttgtccggaccctacgttagcaggatcaccaatccctttaatggtattgcgctgtacgccaacggagacacagcccgcgctaccgttaacttccccgcaagtcgcaactacaatttccgcctgcggggttgcggcaacaacaataatcttgcccgtgtggacctgaggatcgacggacggaccgtcgggaccttttattaccagggcacatacccctgggaggccccaattgacaatgtttatgtcagtgcggggagtcatacagtcgaaatcactgttactgcggataacggcacatgggacgtgtatgccgactacctggtgatacagtga

SEQ ID NO: 2913 - DNA, 2322 bp, Artificial Sequence
  Synthetic Construct, AT-70 intein modified protein encoding nucleic acids
atgcaaacaagcattactctgacatccaacgcatccggtacgtttgacggttactattacgaactctggaaggatactggcaatacaacaatgacggtctacactcaaggtcgcttttcctgccagtggtcgaacatcaataacgcgttgtttaggaccgggaagaaatacaaccagaattggcagtctcttggcacaatccggatcacgtactctgcgacttacaacccaaacgggaactcctacttgtgtatctatggctggtctaccaacccattggtcgagttctacatcgttgagtcctgggggaactggagaccgcctggtgcctgcgttaagaatgattcgctgattttcactgatcgggggctggtcactgcggcggagctcgctgtcggggttcctgaggagcatgcggccttcacggaggttggcgtggacacatccactgggagggcgaccacgaacgctgtgtacaatggcgggaggagcccaaccaagagggctaggctcgccctgggctacgagctggaggcgacgccagagcacccaatcagggttctcagggacgatgcgctggcttgggtgcggatggacgagctccatgtcggcgatcgcgttgctctgaggaggggctcggaagtgtgggggcgctccagcctgccagaggcgttcaggtgggtcaagcctaagtacgccgcgaacctcaagctgccaaagggcctcgtgctggacgaggtcgctgctgaggcttgcggcctcctggtctccgaggggaccctcacgaagcgcctggttacagagttcactaacgccgacgcggataatgtgggcttcatctcgcgctgggcggcttctatcggcattgacctctcaaggaacgggagcgattcgattcagtacctcctgtgctccgtggtcctcagggagtggctggcttggctcggcctggactacaccagggccgctgggaagtgcatcccgcgggcggtccgcttcggcgggagggacattatgagggcgttcctcaggggcctgttcgacggggatgcttctgtcgatcccctcaagggcgttatcgagttctgcacagcctcagagaggatggcgcgggaggtccaggttgctctcctgggcctcgggattctggcttctcgccactcaaggactgtggccggctacgagcagctgtactggcgggtgaccgtcaacgacgtggccacgttcgagagggaggtcggcttctcgtctaactggaataggctcaggctgagggaggctgtggcgcgggcagagggcaggtgccggaacccgaatgttgatacagtgcccatcaacgggctcgtcgagaggctgtacaggactgcccagaagcagctctcctggtcatcccaggagggccgcatcttcgggaattacgtgcacggcgagcatgctccaagcagggctgctctggagaggatggtccagcgctgggggtcggagtgcccaaccgagtgcctccctatcgaggccttcctggagctgcctgttgccttcctgtccgtggagagcattgaggacggcgaggcggatgtcgtggatctctcagttccagagacgcatgagttcgttgctaatggggtcgtttgccataatacgtccctgggccaagtgacaatcgatggcgggacctacgacatctataggacgacacgcgtcaaccagccttccattgtggggacagccacgttcgatcagtactggagcgtgcgcacctctaagcggacttcaggaacagtgaccgtgaccgatcacttccgcgcctgggcgaaccggggcctgaacctcggcacaatagaccaaattacattgtgcgtggagggttaccaaagctctggatcagccaacatcacccagaacaccttctctcagggctcttcttccggcagttcgggtggctcatccggctccacaacgactactcgcatcgagtgtgagaacatgtccttgtccggaccctacgttagcaggatcaccaatccctttaatggtattgcgctgtacgccaacggagacacagcccgcgctaccgttaacttccccgcaagtcgcaactacaatttccgcctgcggggttgcggcaacaacaataatcttgcccgtgtggacctgaggatcgacggacggaccgtcgggaccttttattaccagggcacatacccctgggaggccccaattgacaatgtttatgtcagtgcggggagtcatacagtcgaaatcactgttactgcggataacggcacatgggacgtgtatgccgactacctggtgatacagtga

SEQ ID NO: 2914 - DNA, 2289 bp, Artificial Sequence
  Synthetic Construct, AT-71 intein modified protein encoding nucleic acids
atgcaaacaagcattactctgacatccaacgcatccggtacgtttgacggttactattacgaactctggaaggatactggcaatacaacaatgacggtctacactcaaggtcgcttttcctgccagtggtcgaacatcaataacgcgttgtttaggaccgggaagaaatacaaccagaattggcagtctcttggcacaatccggatcacgtactctgcgacttacaacccaaacgggaactcctacttgtgtatctatggctggtctaccaacccattggtcgagttctacatcgttgagtcctgggggaactggagaccgcctggtgcctgcctcccagcctcaacgcggattctcagggcggacactggcgcggagtcaactctcggggagctgctggcctcgggggagcagcctctcgtttggtccctggacgagaggatgaggatggtcgctaggccgatggttaaggtgttcccctcgggcaggaaggaggtgttcaggctgaggctcgcttctgggagggaggtcgaggctaccggcaaccacccgttcctcacggtggacgggtggatcccactggataggctcacagtcggcgacaggctggctactccaaggagcgtgccagagcccgtccacacagagaggatggccgatgcggaggtggtcctcctggctcacatgatcggcgacgggtcgtgcgtccgcaggcagcccgttcgctacgcctccattgacgagcagaatctcgctgcggtgagcgaggctgctgagcatttcggcgtgacggcggtcagggacgattacgctgctgcccgcgtcaccacgctgaggctcccagctccttacaggctgtcacgcggcaagaggaacccaattgcggcttggctcgatgagctgggcctcttcgggctgaggtcccacgagaagttcatcccacggcgcgtcttcgctctccctaatgaccaggttgccctgttcctccgccatctgtgggccacagatggctccgtgaggtgggacagcacttacaggcaggcgcgcgtctactacacatccactagcaggcggctcatcgacgatgtggcgcagctcctgctcaggctgggcgttcacgggcgcattcgcagggtgaccaagccagggtacagggacgcttggcatctcaccatcgacggcgctgataaccagacggtgttcctgagggatgtcggcgttcacggggcccggggcgacgctgctcaggtggctctggctgagctggagccactggtccggaacaccaatgttgacacggtgcctaacgaggtttggaatcaggtgcgccacctgctcgcgacaaagaacattactcatcgcgagttctcggctgccatggggtctaggttctgcggctcaaccatgtggaagaggtcgccctctcgctcaaggctcgcccgcgtcgctgctgttctggacgatgcggatatcgagatgtacgctaccaatgacgtgttctgggataagatcgtcgagattacgtctctcggcgagcaggacgtgtacgatggcactgttccaggcactcataacttcgttgctcagtctatctctgttcataatacgtccctgggccaagtgacaatcgatggcgggacctacgacatctataggacgacacgcgtcaaccagccttccattgtggggacagccacgttcgatcagtactggagcgtgcgcacctctaagcggacttcaggaacagtgaccgtgaccgatcacttccgcgcctgggcgaaccggggcctgaacctcggcacaatagaccaaattacattgtgcgtggagggttaccaaagctctggatcagccaacatcacccagaacaccttctctcagggctcttcttccggcagttcgggtggctcatccggctccacaacgactactcgcatcgagtgtgagaacatgtccttgtccggaccctacgttagcaggatcaccaatccctttaatggtattgcgctgtacgccaacggagacacagcccgcgctaccgttaacttccccgcaagtcgcaactacaatttccgcctgcggggttgcggcaacaacaataatcttgcccgtgtggacctgaggatcgacggacggaccgtcgggaccttttattaccagggcacatacccctgggaggccccaattgacaatgtttatgtcagtgcggggagtcatacagtcgaaatcactgttactgcggataacggcacatgggacgtgtatgccgactacctggtgatacagtga

SEQ ID NO: 2915 - DNA, 1953 bp, Artificial Sequence
  Synthetic Construct, AT-72 intein modified protein encoding nucleic acids
atgcaaacaagcattactctgacatccaacgcatccggtacgtttgacggttactattacgaactctggaaggatactggcaatacaacaatgacggtctacactcaaggtcgcttttcctgccagtggtcgaacatcaataacgcgttgtttaggaccgggaagaaatacaaccagaattggcagtctcttggcacaatccggatcacgtactctgcgacttacaacccaaacgggaactcctacttgtgtatctatggctggtctaccaacccattggtcgagttctacatcgttgagtcctgggggaactggagaccgcctggtgcctgcttccctgcgggcacagtcgtttcggggccatcggcggaggcggctacaaggcgctggttcgagggggagctggtcgttttcactaccgctagcgggaagcagctctcgctgaccggcaaccacccagtgctcacgcgcggcgggtgggtccccgccaacctcctgaatgagggcgacgaggtggtcaggtcgacaaggccacagggcgctactccactcgttgtgcctgaccaccatcaggtgccggcgctgatcgaggatgtctgggggagcttcgctgttaatggcctccacagggtgccagctgctcctgaggacttccatggggatggccagaggggggaggtcgacatcgttggcccagatcggaccctgtggtgcggccacgacgctgctattgctcagcagcgggagcagcagttcttcacccgcaggacggagtccagcggcctcctggtggctgagtccgtcgctcagctcgttgacctgtggcaggctccacactctggctcgtctatcgggcgctcaggcctcccattcgctctgattggcgggcatggcgggggccctgtcgagaggggcctcacggttgctgctgggggctacccaggcctccatgaggccctggcggactaccggcccggcgatgctgtgctgccaccacagggggtcttcgctggctcatccgagatcgggggcgacgattgcgtgattggcaaggtcgactccacacgctgggatgctccagctctccccttcctggtggaggggagggcgggctacgctagcagggggaaggagctcttcgaccggctgactggccaggtcgagctcgatcgcatcgttattctgcggcgcgtgcagtggtccggccacgtcttctcgctcacaagctcagaggggtggcatacgggcaactcgctcatcgtctctaatacgtccctgggccaagtgacaatcgatggcgggacctacgacatctataggacgacacgcgtcaaccagccttccattgtggggacagccacgttcgatcagtactggagcgtgcgcacctctaagcggacttcaggaacagtgaccgtgaccgatcacttccgcgcctgggcgaaccggggcctgaacctcggcacaatagaccaaattacattgtgcgtggagggttaccaaagctctggatcagccaacatcacccagaacaccttctctcagggctcttcttccggcagttcgggtggctcatccggctccacaacgactactcgcatcgagtgtgagaacatgtccttgtccggaccctacgttagcaggatcaccaatccctttaatggtattgcgctgtacgccaacggagacacagcccgcgctaccgttaacttccccgcaagtcgcaactacaatttccgcctgcggggttgcggcaacaacaataatcttgcccgtgtggacctgaggatcgacggacggaccgtcgggaccttttattaccagggcacatacccctgggaggccccaattgacaatgtttatgtcagtgcggggagtcatacagtcgaaatcactgttactgcggataacggcacatgggacgtgtatgccgactacctggtgatacagtga

SEQ ID NO: 2916 - DNA, 2241 bp, Artificial Sequence
  Synthetic Construct, AT-73 intein modified protein encoding nucleic acids
atgcaaacaagcattactctgacatccaacgcatccggtacgtttgacggttactattacgaactctggaaggatactggcaatacaacaatgacggtctacactcaaggtcgcttttcctgccagtggtcgaacatcaataacgcgttgtttaggaccgggaagaaatacaaccagaattggcagtctcttggcacaatccggatcacgtactctgcgacttacaacccaaacgggaactcctacttgtgtatctatggctggtctaccaacccattggtcgagttctacatcgttgagtcctgggggaactggagaccgcctggtgcctgcttccctgcgggcacaccagtggacactatcgatgggccaaagcctattgagtcgctgcgggctggggatcgggttctctcgcatgacggctcgtacgccacggtggagaagctgatcgagaacacaaatgatcagccactcgtctccattagccacttcggccataaggagcctatcaggtgcacgccggagcaccccattctggtgtggacggaccgggatgtcgagacactcatcgacggcgatggggctgacccgttcaacggcttcgtgtggctggctgctcaggacgtccatccatccgatttcattgttgctactgctccactggagacccgcgagaggagggtgttcgacctcatgaatcacgtcggcgaggggacgtacgaggaggttgacggcctgatccggaaggtgaacacagatgcgaggcatcggaataagcagcgccacaggcagggcttcgtcgctgttacccgctacgtggaggagagctacgacctcggcctgatcctcgggtggtacctcgccgagggccatgtctcgaagcgctctggggttgaggatgtgaggccaacgggcgtgcatttcacactgggggctaacgagattgagaggcacgtcgagctcggcatggccttcaagcaggtcttcggcgttgacctggtgctccacactaaccattcagatcactccaccaggatggtttgcaattctaagatcgtggctagcctcctgctctcgctggctggcacggggtactcaacaaagcggctcgcgcacgaggtcatgaccgctgacgaggatttccagaggggcctgctcgtcgggctcttccgcggcgacgggtgcaccacgacaggcgggatggtcctggacctcgttaaccaggagctgatcgatcaggtccagctgctcctgaggaggctcggcattgttagcgtggtccgcacgtacacaaaccaggctggcaatccgactgggcaggtgttcgtcccaggcctgcctgggaccaacgaggagttcatcttcgacgtggataagaacctccagaattacactggcaggaaggggaccaagcggactacctaccaggttgtgcatggccgccacgtctacgggattcgggctgttgagaggactggcgagaccccaaggcaggtctacaatctgcatgtggagggcactcatacttacactattaggggggctgtggttcataacacgtccctgggccaagtgacaatcgatggcgggacctacgacatctataggacgacacgcgtcaaccagccttccattgtggggacagccacgttcgatcagtactggagcgtgcgcacctctaagcggacttcaggaacagtgaccgtgaccgatcacttccgcgcctgggcgaaccggggcctgaacctcggcacaatagaccaaattacattgtgcgtggagggttaccaaagctctggatcagccaacatcacccagaacaccttctctcagggctcttcttccggcagttcgggtggctcatccggctccacaacgactactcgcatcgagtgtgagaacatgtccttgtccggaccctacgttagcaggatcaccaatccctttaatggtattgcgctgtacgccaacggagacacagcccgcgctaccgttaacttccccgcaagtcgcaactacaatttccgcctgcggggttgcggcaacaacaataatcttgcccgtgtggacctgaggatcgacggacggaccgtcgggaccttttattaccagggcacatacccctgggaggccccaattgacaatgtttatgtcagtgcggggagtcatacagtcgaaatcactgttactgcggataacggcacatgggacgtgtatgccgactacctggtgatacagtga

SEQ ID NO: 2917 - DNA, 2031 bp, Artificial Sequence
  Synthetic Construct, AT-74 intein modified protein encoding nucleic acids
atgcaaacaagcattactctgacatccaacgcatccggtacgtttgacggttactattacgaactctggaaggatactggcaatacaacaatgacggtctacactcaaggtcgcttttcctgccagtggtcgaacatcaataacgcgttgtttaggaccgggaagaaatacaaccagaattggcagtctcttggcacaatccggatcacgtactctgcgacttacaacccaaacgggaactcctacttgtgtatctatggctggtctaccaacccattggtcgagttctacatcgttgagtcctgggggaactggagaccgcctggtgcctgcgtggacggggacacaagcgttactctcgcctcgggggatgagaagcctattcgggacatcgtggagtcaacactggaggatccgacagagatcagcgacggcttctaccaggagtcggacattgatgtgctcaccacggatggcggggctgtcgctccaggcagggctaccaaggtttggaagcggcaggctcccgagaagatgtacaggatccggacagagtccggcagggagctggaggtcactccaagccaccccctgttcgtgcagtcagagggcgggctctccccactggtcgctgacgatctcagcgagaacgacttcgtggctgtcccgagggcgctgccagctgacgatggcgacgatttcgggcagcatgtggacgatctgggctccgtcaccgctcggaagacggctgacgctgaggccgtgcgctccgaggacgccgcgacaactccagatgttatccctaacgtgggcgaccagctccgcaggattcgcacctcgctcaggctgtctcagcacgactgcggcctgccaaggtcgacgtaccagcagtacgagaggggggaccggaatccttcgcgctctaggctccagacagtcctgactgcgttcgagcggcgcatcgagcagctctccagcctgtctgacagggtggacgatggcgactcagatgccattgctgccgcgcgggacgagctcaatccatcacaggcttccctggctagcggcatggatgctaccaggacggctatcggggacgatgagaggacggaggctaggccagacggcggggcggttgctgatgctgagagggctgtggctgacgctctctgcagggcgctggctgtcgccgacgatgttgagaggctcaggtcgctggctgacggcgatatcgggtgggacaggatcgattctattgagccagtcgagcctgaggacgagtgggtttacgatctggaggtggagagcacacactcatacctctctaatgatgttgtttcgcataatacgtccctgggccaagtgacaatcgatggcgggacctacgacatctataggacgacacgcgtcaaccagccttccattgtggggacagccacgttcgatcagtactggagcgtgcgcacctctaagcggacttcaggaacagtgaccgtgaccgatcacttccgcgcctgggcgaaccggggcctgaacctcggcacaatagaccaaattacattgtgcgtggagggttaccaaagctctggatcagccaacatcacccagaacaccttctctcagggctcttcttccggcagttcgggtggctcatccggctccacaacgactactcgcatcgagtgtgagaacatgtccttgtccggaccctacgttagcaggatcaccaatccctttaatggtattgcgctgtacgccaacggagacacagcccgcgctaccgttaacttccccgcaagtcgcaactacaatttccgcctgcggggttgcggcaacaacaataatcttgcccgtgtggacctgaggatcgacggacggaccgtcgggaccttttattaccagggcacatacccctgggaggccccaattgacaatgtttatgtcagtgcggggagtcatacagtcgaaatcactgttactgcggataacggcacatgggacgtgtatgccgactacctggtgatacagtga

SEQ ID NO: 2918 - DNA, 2490 bp, Artificial Sequence
  Synthetic Construct, AT-75 intein modified protein encoding nucleic acids
atgcaaacaagcattactctgacatccaacgcatccggtacgtttgacggttactattacgaactctggaaggatactggcaatacaacaatgacggtctacactcaaggtcgcttttcctgccagtggtcgaacatcaataacgcgttgtttaggaccgggaagaaatacaaccagaattggcagtctcttggcacaatccggatcacgtactctgcgacttacaacccaaacgggaactcctacttgtgtatctatggctggtctaccaacccattggtcgagttctacatcgttgagtcctgggggaactggagaccgcctggtgcctcaattcctgcggatgagcaggtcgtggttaggcgcaatggggagacggagctgacggagatcggccctctcgtggattcgctgatggattctcgcgagaccaggtcattcgacgatcacgaggtcacgctcgctccagacggcatcgaggttccctctctgtccagcgaggagaccgttgagtggaagccgattgaggaggtgtcacgccacgagacgccagacgagctcctgaggttcgagctggagtcgggcaggtctatcagggctaccaaggctcattctttcgtcacgcgccaggagaacgaggtggtcccagttgctggggaggagctggaggctggcgactggctccctgttgtggcttcgctggacgccaccgatacgcaggagacagtggacctgaggaagtacctcccggcgggcgattactggtacacttccgtgctcgccgacggcggggctgaggctgtcccaggcgggcccgaccagctgaggaacaagagggctgctctggaggctggcgagctcgctgagcacacagcttacccagtgcagggcactgtcgggctcccagagcagttccctctggacgaggagaccgggttcttcgtgggcgcttggctggctgagggcagcctcgcggatcattacgtttccatcagcaatgtggacgctgccttccagagccgcattaggtcgttcgccgagcgcttcgatctcacggtcaacgagtacgagaatgactccgggttcgcggctggctacgatatccggctgaacggcaccattctgagcgacttcctcagggctgcttgcacggacgatggcgagaagtcgatccccgggttcgctattggcgccaatgaggcgttcctcaaggggctcctgcagggctacttctccggcgatgggaacgtgggcaccaatgcgatcaggtcgtcttcaacaagcgacaggctgactgctggcgttgggctcctgctcgctaggttcgatgtgtacgccacactcggccagcaggaggactcacgcactctgagggtcccaaagaagcacgtttcccggttcgacaaccgcatcggcatggtcggggagaggggcgctgagctggaggctctcgctgagtcagctgactccgatgggccagacgctacagatcagatccctaacttcggcgatgctctggaggctgtggctgaggctgctgacatcccacagaggcaggtcaattcggccacgaagcggcagcgcattgacaggtctcggctggctaggctcgtggctgctgctgaggccgagctggacggggagcagtccgagctggatgcgctcaggcaggctgtcacaggcgacgtcgtttgggatcggatcgagtccattgagactgtggagagcgaccatgagtatgtgtacgatgtttcagtggaggggctggagactttcacaactgcggatggggtcgttactcataatacgtccctgggccaagtgacaatcgatggcgggacctacgacatctataggacgacacgcgtcaaccagccttccattgtggggacagccacgttcgatcagtactggagcgtgcgcacctctaagcggacttcaggaacagtgaccgtgaccgatcacttccgcgcctgggcgaaccggggcctgaacctcggcacaatagaccaaattacattgtgcgtggagggttaccaaagctctggatcagccaacatcacccagaacaccttctctcagggctcttcttccggcagttcgggtggctcatccggctccacaacgactactcgcatcgagtgtgagaacatgtccttgtccggaccctacgttagcaggatcaccaatccctttaatggtattgcgctgtacgccaacggagacacagcccgcgctaccgttaacttccccgcaagtcgcaactacaatttccgcctgcggggttgcggcaacaacaataatcttgcccgtgtggacctgaggatcgacggacggaccgtcgggaccttttattaccagggcacatacccctgggaggccccaattgacaatgtttatgtcagtgcggggagtcatacagtcgaaatcactgttactgcggataacggcacatgggacgtgtatgccgactacctggtgatacagtga

SEQ ID NO: 2919 - DNA, 1980 bp, Artificial Sequence
  Synthetic Construct, AT-76 intein modified protein encoding nucleic acids
atgcaaacaagcattactctgacatccaacgcatccggtacgtttgacggttactattacgaactctggaaggatactggcaatacaacaatgacggtctacactcaaggtcgcttttcctgccagtggtcgaacatcaataacgcgttgtttaggaccgggaagaaatacaaccagaattggcagtctcttggcacaatccggatcacgtactctgcgacttacaacccaaacgggaactcctacttgtgtatctatggctggtctaccaacccattggtcgagttctacatcgttgagtcctgggggaactggagaccgcctggtgcctgcttcatcggggatactctcattccgctcgctgacggcaagtcttaccgcatcaaggatctcatggactgggggacggagttcatcgtttacgcgtgcaccccaacgggcaagattgtggctgctcaggctaccgctaagctcacgaggaggaacgctccactcgtgaaggtcatcctggacaatggcgaggagatcatttgcacacccgaccaccagttcatgctgcgggatgggacttacaaggaggcccagctcctgcaggcggagacatcactcatgccattctactccaagactgacaaggatggctacacactgattactcagccttactccagcaggtggcagaaggctcactggatcattgctaggtctggcctcctggggaaggtgccaaggttcgagggccagaagacgttcatccaccatcagaacttcgacgagagcgataaccgccccgagaacctggagttcatgggcaacagggaccactcggcgtaccatcgctctctggtggagaggaatcagcactggcattccgctgagttcgaggagaagagggtcgctagcctcgctcagaaggctaagacctcggagggctaccagtactacgccgagagggggacgcggaacatcttccagtacatggagcagcagccagagcacttcaagaatgcggtcgctggcaacgggaataggggcaagcagtacctcgttgagtacaacaagacagagaagggcagggggaagtcgcaggagatcgcgaaccggtactacacctgcgagatttgcggcgtcgacgttaagacgcccatcgggctgcacaaccatcggcgcaaggagcaccagtgcaatcataaggtggtcgccgtgaacctcctgaattacaccgaggatgtctactgcctcactgttccggagtaccacaacttcgctctcaaggctggggtcttcgttcataatacgtccctgggccaagtgacaatcgatggcgggacctacgacatctataggacgacacgcgtcaaccagccttccattgtggggacagccacgttcgatcagtactggagcgtgcgcacctctaagcggacttcaggaacagtgaccgtgaccgatcacttccgcgcctgggcgaaccggggcctgaacctcggcacaatagaccaaattacattgtgcgtggagggttaccaaagctctggatcagccaacatcacccagaacaccttctctcagggctcttcttccggcagttcgggtggctcatccggctccacaacgactactcgcatcgagtgtgagaacatgtccttgtccggaccctacgttagcaggatcaccaatccctttaatggtattgcgctgtacgccaacggagacacagcccgcgctaccgttaacttccccgcaagtcgcaactacaatttccgcctgcggggttgcggcaacaacaataatcttgcccgtgtggacctgaggatcgacggacggaccgtcgggaccttttattaccagggcacatacccctgggaggccccaattgacaatgtttatgtcagtgcggggagtcatacagtcgaaatcactgttactgcggataacggcacatgggacgtgtatgccgactacctggtgatacagtga

SEQ ID NO: 2920 - DNA, 2070 bp, Artificial Sequence
  Synthetic Construct, AT-77 intein modified protein encoding nucleic acids
atgcaaacaagcattactctgacatccaacgcatccggtacgtttgacggttactattacgaactctggaaggatactggcaatacaacaatgacggtctacactcaaggtcgcttttcctgccagtggtcgaacatcaataacgcgttgtttaggaccgggaagaaatacaaccagaattggcagtctcttggcacaatccggatcacgtactctgcgacttacaacccaaacgggaactcctacttgtgtatctatggctggtctaccaacccattggtcgagttctacatcgttgagtcctgggggaactggagaccgcctggtgccgctctcgctctggataccgctctccctacgccttcggggtggactactatgggggacgttcaggttggggatcagctctacgatgcgcacggcaggccaaccacggtggtcgctgctaccgaggtgctcacggggaggccttgctacgaggtcgagttctcagacggctcccgcatcgttgccgatgcgcagcatcagtggctgaccgagtctagggctgctcggaagtcacgctgggctgctgacaagcagtacaaccgcgccaggaaccagaatatcgtcgcgagcgttgtgacaactgaggctattgctgggaccctcagggtgggcgctgaccagagggccaatcacgctgtcctcacggctgatccactgtccggcagcgacgtcgatctgccaatcccaccctacgttctcggcgcttggctgggcgacgggcactcggcgtctgctaggatcacctgcgagacgccagagattcctatgtacctggaggcttgcgggctgagggtcgaccatcagggcgcgatgctctactccctgaagttcccagacggcgatccgaggggcagcgtccagggcgttctcaggaccatcggcgtgctgaacgacaagcacattccagcggattacctcagggcttccgagggccagaggagggacctcctggctgggctgatggacacagatggcactgtcgttaggggcgttgggtcgtgccagttcgctgtgacaaacaagcggctcgcggacgatgtctacgagctcgtggtctctctggggtacaagtgcggcaggaccacgaggagggtgcagggcaggagcccagagacatcgacttgccatatcctcaatttctcgacggtggacgatgtcttcaggctggagcggaagcacctcctgcataaggaggagaggccagtgacacgggctaggatcgccaggcggtacattactgccgttcgcccaattgagtccgttcctgtgaggtgcgtggaggttgataatacagagcatctctacctcgccggggagagcatgattccaactcataatacgtccctgggccaagtgacaatcgatggcgggacctacgacatctataggacgacacgcgtcaaccagccttccattgtggggacagccacgttcgatcagtactggagcgtgcgcacctctaagcggacttcaggaacagtgaccgtgaccgatcacttccgcgcctgggcgaaccggggcctgaacctcggcacaatagaccaaattacattgtgcgtggagggttaccaaagctctggatcagccaacatcacccagaacaccttctctcagggctcttcttccggcagttcgggtggctcatccggctccacaacgactactcgcatcgagtgtgagaacatgtccttgtccggaccctacgttagcaggatcaccaatccctttaatggtattgcgctgtacgccaacggagacacagcccgcgctaccgttaacttccccgcaagtcgcaactacaatttccgcctgcggggttgcggcaacaacaataatcttgcccgtgtggacctgaggatcgacggacggaccgtcgggaccttttattaccagggcacatacccctgggaggccccaattgacaatgtttatgtcagtgcggggagtcatacagtcgaaatcactgttactgcggataacggcacatgggacgtgtatgccgactacctggtgatacagtga

SEQ ID NO: 2921 - DNA, 2235 bp, Artificial Sequence
  Synthetic Construct, AT-78 intein modified protein encoding nucleic acids
atgcaaacaagcattactctgacatccaacgcatccggtacgtttgacggttactattacgaactctggaaggatactggcaatacaacaatgacggtctacactcaaggtcgcttttcctgccagtggtcgaacatcaataacgcgttgtttaggaccgggaagaaatacaaccagaattggcagtctcttggcacaatccggatcacgtactctgcgacttacaacccaaacgggaactcctacttgtgtatctatggctggtctaccaacccattggtcgagttctacatcgttgagtcctgggggaactggagaccgcctggtgcctgcctccctgaggatgcgctggttcataccgctaaggggctggtccctattcgggatgttcaggtcggggatctcgttcagacaccgctcggcttccgcagggtggtcgacaagttcgatcagggcttccaggacgtgtacgagatcgagactaacgcgacctacccacgcgctacgctcaatcacaggcaggctgtcctggaggacgctaagggcgggatcgtttggaagcatattgcttcgctggaggccggcgataggctcctgcacaacaagcaggtcctcccgggcactgttacccatctgcccgcggacttcactgagagcaggccatcacactcccggaccgccaagtcgttcgttgtgcctgagctcacggctgaggtggcttggctgatcggcttcacacatggcgacggctacgtggctctcggcaggaacaagtacgataagccgtacgggcgggttgagtggtccatgaactccctggacgctgaggtcacctcccgcatccaggctaagattgatgctgctctcgctctgttcggcctctccgctgtccacagcatcacgaagggcgagaacacagctaagagcatctgctccagcattcggctggccgagtacttccaccgccatatcaagcagccaaatattcctctcactgtgccgtcattcatcctgcagggctccgtcgacattagggctgcttacctcgctggcctgatggactccgatggggctgtgaacaataggccaccacacctcatcacatcggtgtaccggtctttcattcgccaggtctcggtcgttctctcgtctctgggcatcgccgggaggctgaccacgacatacccccagaactctaattggcaggtcaagtacaacctcacgatcccggcgctgaaggagcgctacaatgctctcatttctccccattcagccaagggcgagctcaggcaggggctgaagatgtacggcttcacggttccaggggccgtgatgcgggagacgtacacatactctgagatgagggagatgggcttccaggggtcacggacagttgacgccaactacgagcgctacgtggcggaggctgacatctccctcgatattcctgtgactgtcaagggcctggggagctacgatcacgtgcagacctacgacattgaggttgatgaggctcattgcttctactgcgatggctacctcacacataatacgtccctgggccaagtgacaatcgatggcgggacctacgacatctataggacgacacgcgtcaaccagccttccattgtggggacagccacgttcgatcagtactggagcgtgcgcacctctaagcggacttcaggaacagtgaccgtgaccgatcacttccgcgcctgggcgaaccggggcctgaacctcggcacaatagaccaaattacattgtgcgtggagggttaccaaagctctggatcagccaacatcacccagaacaccttctctcagggctcttcttccggcagttcgggtggctcatccggctccacaacgactactcgcatcgagtgtgagaacatgtccttgtccggaccctacgttagcaggatcaccaatccctttaatggtattgcgctgtacgccaacggagacacagcccgcgctaccgttaacttccccgcaagtcgcaactacaatttccgcctgcggggttgcggcaacaacaataatcttgcccgtgtggacctgaggatcgacggacggaccgtcgggaccttttattaccagggcacatacccctgggaggccccaattgacaatgtttatgtcagtgcggggagtcatacagtcgaaatcactgttactgcggataacggcacatgggacgtgtatgccgactacctggtgatacagtga

(The sequence listing continues in the following parts.)
